(19) United States
(12) Patent Application Publication
(10) Pub. No.: US 2024/0344070 A1
(43) Pub. Date: Oct. 17, 2024

(54) METHODS AND COMPOSITIONS FOR TREATING SUBJECTS HAVING OR AT RISK OF DEVELOPING A NON-PRIMARY HYPEROXALURIA DISEASE OR DISORDER

(71) Applicant: Alnylam Pharmaceuticals, Inc., Cambridge, MA (US)

(72) Inventors: John M. Gansner, Newton, MA (US); David Erbe, Arlington, MA (US)

(21) Appl. No.: 18/403,862

(22) Filed: Jan. 4, 2024

Related U.S. Application Data
(63) Continuation of application No. PCT/US2022/037453, filed on Jul. 18, 2022.
(60) Provisional application No. 63/223,278, filed on Jul. 19, 2021.

(51) Int. Cl. C12N 15/113

(52) U.S. Cl. CPC C12N 15/1137; C12Y 101/03015; C12N 2310/14; C12N 2310/351

(57) ABSTRACT

The present invention provides methods for treating subjects having or at risk of developing a non-primary hyperoxaluria disease or disorder that would benefit from reduction in oxalate, and compositions comprising nucleic acid inhibitors, e.g., double stranded ribonucleic acid (dsRNA) agents or single stranded antisense polynucleotide agents targeting lactate dehydrogenase A (LDHA), hydroxyacid oxidase (HAO1) and/or proline dehydrogenase 2 (PRODH2), for treating such subjects.

### RELATED APPLICATIONS

[0001] This application is a 35 § U.S.C. 111(a) continuation application which claims the benefit of priority to PCT/US2022/037453, filed on Jul. 18, 2022, which, in turn, claims the benefit of priority to U.S. Provisional Application No. 63/223,278, filed on Jul. 19, 2021. The entire contents of each of the foregoing applications are incorporated herein by reference.

### SEQUENCE LISTING

[0002] The instant application contains a Sequence Listing which has been submitted electronically in XML file format and is hereby incorporated by reference in its entirety. Said XML copy, created on Jan. 3, 2024, is named 121301_16202_SL.xml and is 33,486,627 bytes in size.

### BACKGROUND OF THE INVENTION

[0003] Oxalate (C₂O₄²⁻) is the salt-forming ion of oxalic acid (C₂H₂O₄) that is widely distributed in both plants and animals. It is an unavoidable component of the human diet and a ubiquitous component of plants and plant-derived foods. Oxalate can also be synthesized endogenously via the metabolic pathways that occur in the liver. Dietary and endogenous contributions to urinary oxalate excretion are equal. Glyoxylate is an immediate precursor to oxalate and is derived from the oxidation of glycolate by the enzyme glycolate oxidase (GO), also known, and referred to herein, as hydroxyacid oxidase (HAO1), or by catabolism of hydroxyproline, a component of collagen, by proline dehydrogenase 2 (PRODH2, also known as HYPDH). Transamination of glyoxylate with alanine by the enzyme alanine-glyoxylate aminotransferase (AGXT) results in the formation of pyruvate and glycine. Excess glyoxylate is converted to oxalate by lactate dehydrogenase A (LDHA). The endogenous pathway for oxalate metabolism is illustrated in FIG. 1.

[0004] Since oxalate binds with calcium in the kidney, urinary CaOx supersaturation may occur, resulting in the formation and deposition of CaOx crystals in renal tissue or collecting system, even in the presence of normal levels of oxalate. These CaOx crystals contribute to the formation of diffuse renal calcifications (nephrocalcinosis) and stones (nephrolithiasis). Subjects having diffuse renal calcifications or non-obstructing stones typically have no symptoms. However, obstructing stones can cause severe pain. Moreover, over time, these CaOx crystals cause injury and progressive inflammation to the kidney and, when secondary complications such as obstruction are present, these CaOx crystals may lead to decreased renal function and in severe cases even to end-stage renal failure and the need for dialysis.

[0005] Primary hyperoxaluria is a well-known disease associated with high levels of oxalate. Specifically, primary hyperoxaluria is characterized by impaired glyoxylate metabolism resulting in overproduction and accumulation of oxalate throughout the body, typically manifesting as kidney and bladder stones. There are three major types of primary hyperoxaluria that differ in their severity and genetic cause. Autosomal recessive mutations in the AGXT gene cause primary hyperoxaluria type 1 (PH1); autosomal recessive mutations in the GRHPR gene cause primary hyperoxaluria type 2 (PH2); and autosomal recessive mutations in the HOGA1 gene cause primary hyperoxaluria type 3 (PH3) (see, FIG. 1). There are few treatment options for subjects having a hereditary hyperoxaluria. Ultimately, some subjects with hereditary hyperoxaluria develop end stage renal disease (ESRD) and require kidney/liver transplants.

[0006] Recently, two investigational therapeutics for the treatment of subjects having PH1 or PH2 that reduce oxalate have entered the clinic. Specifically, Lumasiran, an RNA interference (RNAi) therapeutic targeting glycolate oxidase (GO) for the treatment of PH1 is currently being evaluated in a Phase III clinical trail (see, e.g., NCT03681184), and DCR-PHXC, an RNA interference (RNAi) therapeutic targeting LDHA for the treatment of PH1 and PH2 has entered Phase II clinical trials (see, e.g., NCT03847909).

[0007] However, there are a significant number of subjects that do not have primary hyperoxaluria, e.g., PH1, PH2, or PH3, and yet still would benefit from reduction in oxalate, for example, subjects having a non-primary hyperoxaluria disease or disorder, for which no effective treatments currently exist. For example, as indicated above, CaOx crystals can form and be deposited in renal tissue or collecting system, even in the presence of normal levels of oxalate and contribute to the formation of diffuse renal calcifications (nephrocalcinosis) and stones (nephrolithiasis). In the presence of other comorbidities, such as a metabolic disorder, e.g., diabetes, Crohn's disease, or bariatric surgery, subjects having such comorbidities may be at risk of developing, e.g., obstructing stones, progressive inflammation of the kidney, decreased renal function and end-stage renal failure.

[0008] Accordingly, there is a need in the art for methods to treat subjects having, or at risk of developing, a non-primary hyperoxaluria that would benefit from treatment with agents that reduce oxalate, such as a nucleic acid inhibitor of lactate dehydrogenase A (LDHA), a nucleic acid inhibitor of proline dehydrogenase 2 (PRODH2) and/or a nucleic acid inhibitor of hydroxyacid oxidase (HAO1).

### SUMMARY OF THE INVENTION

[0009] The present invention is based, at least in part, on the discovery that agents that reduce oxalate levels, such as a nucleic acid inhibitor of lactate dehydrogenase A (LDHA), a nucleic acid inhibitor of hydroxyacid oxidase (HAO1) and/or a nucleic acid inhibitor of proline dehydrogenase 2 (PRODH2), can be used to treat subjects having or at risk of developing a non-primary hyperoxaluria disease or disorder, such as a subject having normal urinary oxalate levels, e.g., normal urinary calcium oxalate levels, or elevated urinary oxalate levels, e.g., elevated urinary calcium oxalate levels, e.g., supersaturated urinary calcium oxalate levels, e.g., a subject having a kidney stone disease, e.g., calcium oxalate kidney stone disease, such as recurrent calcium oxalate kidney stone disease.

[0010] Accordingly, the present invention provides methods for inhibiting the expression of hydroxyacid oxidase (HAO1) in a subject having a non-primary hyperoxaluria disease or disorder that would benefit from reduction in urinary oxalate, methods for reducing urinary oxalate levels in a subject having a non-primary hyperoxaluria disease or disorder that would benefit from reduction in urinary oxalate, and methods for treating a subject having having or at risk of developing a non-primary hyperoxaluria disease or disorder that would benefit from reduction in oxalate, and compositions comprising nucleic acid inhibitors, e.g., double stranded ribonucleic acid (dsRNA) agents or single stranded antisense polynucleotide agents targeting lactate dehydrogenase A (LDHA), hydroxyacid oxidase (HAO1) and/or proline dehydrogenase 2 (PRODH2).

[0011] In one aspect, the present invention provides a method for inhibiting the expression of hydroxyacid oxidase (HAO1) in a subject having a non-primary hyperoxaluria disease or disorder that would benefit from reduction in urinary oxalate, comprising administering to the subject a fixed dose of about 200 mg to about 600 mg of a double stranded ribonucleic acid (dsRNA) agent, or salt thereof, which inhibits the expression of of HAO1, thereby inhibiting the expression of HAO1 in the subject.

[0012] In another aspect, the present invention provides a method for reducing urinary oxalate levels in a subject having a non-primary hyperoxaluria disease or disorder that would benefit from reduction in urinary oxalate, comprising administering to the subject a fixed dose of about 200 mg to about 600 mg of a double stranded ribonucleic acid (dsRNA) agent, or salt thereof, which inhibits the expression of of HAO1, thereby reducing urinary oxalate levels in the subject.

[0013] In one embodiment, the urinary oxalate is urinary calcium oxalate.

[0014] In one embodiment, the reduction in urinary calcium oxalate is reduction in urinary calcium oxalate supersaturation.

[0015] In one aspect, the present invention provides a method for treating a subject having a non-primary hyperoxaluria disease or disorder that would benefit from reduction in oxalate, comprising administering to the subject a fixed dose of about 200 mg to about 600 mg of a double stranded ribonucleic acid (dsRNA) agent, or salt thereof, which inhibits the expression of of HAO1, thereby treating the subject having the non-primary hyperoxaluria disease or disorder that would benefit from reduction in oxalate.

[0016] In one embodiment, the non-primary hyperoxaluria disease or disorder is selected from the group consisting of secondary hyperoxaluria, a kidney stone disease, chronic kidney disease (CKD), end-stage renal disease (ESRD), coronary artery disease, cutaneous oxalate deposition, ethylene glycol poisoning, planned kidney transplantation, and previous kidney transplantation.

[0017] In one embodiment, the non-primary hyperoxaluria disease or disorder is a kidney stone disease.

[0018] In one embodiment, the kidney stone disease is calcium oxalate kidney stone disease.

[0019] In one embodiment, the calcium oxalate kidney stone disease is recurrent calcium oxalate kidney stone disease.

[0020] In one embodiment, administration of the dsRNA agent, or salt thereof, to the subject reduces urinary oxalate levels.

[0021] In one embodiment, the urinary oxalate is urinary calcium oxalate.

[0022] In one embodiment, the reduction in urinary calcium oxalate is reduction in urinary calcium oxalate supersaturation.

[0023] In one embodiment, administration of the dsRNA agent, or salt thereof, to the subject reduces clinical and radiographic kidney stone events.

[0024] In one embodiment, the subject is a human.

[0025] In one embodiment, the dsRNA agent, or salt thereof, is administered to the subject at an interval of once every six months.

[0026] In one embodiment, the dsRNA agent, or salt thereof, is administered to the subject initially, at three months, and every six months thereafter.

[0027] In one embodiment, the fixed dose of the dsRNA agent, or salt thereof, is about 284 mg.

[0028] In one embodiment, the fixed dose of the dsRNA agent, or salt thereof, is about 567 mg.

[0029] In one embodiment, the dsRNA agent, or salt thereof, is administered to the subject subcutaneously.

[0030] In one embodiment, the subcutaneous administration is subcutaneous injection.

[0031] In one embodiment, the dsRNA agent, or salt thereof, comprises a sense strand and an antisense strand forming a double stranded region, wherein the sense strand comprises a nucleotide sequence comprising at least 15 contiguous nucleotides differing by no more than 3 nucleotides from a portion of the nucleotide sequence of SEQ ID NO: 21 and the antisense strand comprises a nucleotide sequence comprising at least 15 contiguous nucleotides differing by no more than 3 nucleotides from the corresponding portion of nucleotide sequence of SEQ ID NO: 22 such that the sense strand is complementary to the at least 15 contiguous nucleotides in the antisense strand.

[0032] In one embodiment, the dsRNA agent, or salt thereof, comprises a sense strand and an antisense strand forming a double stranded region, wherein the antisense strand comprises at least 15 contiguous nucleotides differing by no more than 3 nucleotides from any one of the antisense sequences listed in any one of Tables 4-14.

[0033] In one embodiment, the dsRNA agent, or salt thereof, comprises a sense strand and an antisense strand forming a double-stranded region, wherein the sense strand comprises a nucleotide sequence differing by no more than 3 nucleotides from the nucleotide sequence 5′-GACUUUCAUCCUGGAAAUAUA-3′ (SEQ ID NO:33) and the antisense strand comprises a nucleotide sequence differing by no more than 3 nucleotides from the nucleotide sequence 5′-UAUAUUUCCAGGAUGAAAGUCCA-3′ (SEQ ID NO:34).

[0034] In one embodiment, the dsRNA agent comprises at least one modified nucleotide.

[0035] In one embodiment, no more than five of the sense strand nucleotides and no more than five of the nucleotides of the antisense strand are unmodified nucleotides.

[0036] In one embodiment, substantially all of the nucleotides of the sense strand and substantially all of the nucleotides of the antisense strand are modified nucleotides.

[0037] In one embodiment, all of the nucleotides of the sense strand and all of the nucleotides of the antisense strand are modified nucleotides.

[0038] In one embodiment, at least one of the modified nucleotides is selected from the group a deoxy-nucleotide, a 3′-terminal deoxy-thymine (dT) nucleotide, a 2′-O-methyl modified nucleotide, a 2′-fluoro modified nucleotide, a 2′-deoxy-modified nucleotide, a locked nucleotide, an unlocked nucleotide, a conformationally restricted nucleotide, a constrained ethyl nucleotide, an abasic nucleotide, a 2′-amino-modified nucleotide, a 2′-O-allyl-modified nucleotide, 2′-C-alkyl-modified nucleotide, 2′-hydroxyl-modified nucleotide, a 2′-methoxyethyl modified nucleotide, a 2′-O-alkyl-modified nucleotide, a morpholino nucleotide, a phosphoramidate, a non-natural base comprising nucleotide, a tetrahydropyran modified nucleotide, a 1,5-anhydrohexitol modified nucleotide, a cyclohexenyl modified nucleotide, a nucleotide comprising a 5′-phosphorothioate group, a nucleotide comprising a 5′-methylphosphonate group, a nucleotide comprising a 5′ phosphate or 5′ phosphate mimic, a nucleotide comprising vinyl phosphonate, a nucleotide comprising adenosine-glycol nucleic acid (GNA), a nucleotide comprising thymidine-glycol nucleic acid (GNA) S-Isomer, a nucleotide comprising 2-hydroxymethyl-tetrahydrofurane-5-phosphate, a nucleotide comprising 2′-deoxythymidine-3′phosphate, a nucleotide comprising 2′-deoxyguanosine-3′-phosphate, and a terminal nucleotide linked to a cholesteryl derivative and a dodecanoic acid bisdecylamide group; and combinations thereof.

[0039] In one embodiment, the dsRNA agent, or salt thereof, further comprises at least one phosphorothioate internucleotide linkage.

[0040] In one embodiment, the phosphorothioate or methylphosphonate internucleotide linkage is at the 3′-terminus of one strand.

[0041] In one embodiment, the phosphorothioate or methylphosphonate internucleotide linkage is at the 5′-terminus of one strand.

[0042] In one embodiment, the phosphorothioate or methylphosphonate internucleotide linkage is at the both the 5′- and 3′-terminus of one strand In one embodiment, the dsRNA agent, or salt thereof, comprises 6-8 phosphorothioate internucleotide linkages.

[0043] In one embodiment, at least one strand of the dsRNA agent, or salt thereof, further comprises a ligand.

[0044] In one embodiment, the ligand is attached to the 3′ end of the sense strand.

[0045] In one embodiment, the ligand is one or more N-acetylgalactosamine (GalNAc) derivatives.

[0046] In one embodiment, the one or more GalNAc derivatives is attached through a monovalent, bivalent, or trivalent branched linker.

[0047] In one embodiment, the ligand is

[chemical structure]

[0048] In one embodiment, the dsRNA agent, or salt thereof, is conjugated to the ligand as shown in the following schematic

[chemical structure]

[0049] In one embodiment, the X is O.

[0050] In one embodiment, the nucleotide sequence of the sense strand differs by no more than 3 nucleotides from the nucleotide sequence 5′-gsascuuuCfaUfCfCfuggaaauaua-3′ (SEQ ID NO:35) and the nucleotide sequence of the antisense strand differs by no more than 3 nucleotides from the nucleotide sequence 5′-usAfsuauUfuCfCfaggaUfgAfaagucscsa-3′ (SEQ ID NO:36),

[0051] wherein Af is a 2′-fluoroadenosine-3′-phosphate; Afs is 2′-fluoroadenosine-3′-phosphorothioate; Cf is a 2′-fluorocytidine-3′-phosphate; U is a Uridine-3′-phosphate; Uf is a 2′-fluorouridine-3′-phosphate; a is a 2′-O-methyladenosine-3′-phosphate; as is a 2′-O-methyladenosine-3′-phosphorothioate; c is a 2′-O-methylcytidine-3′-phosphate; cs is a 2′-O-methylcytidine-3′-phosphorothioate; g is a 2′-O-methylguanosine-3′-phosphate; gs is a 2′-O-methylguanosine-3′-phosphorothioate; u is a 2′-O-methyluridine-3′-phosphate; us is a 2′-O-methyluridine-3′-phosphorothioate; and s is a phosphorothioate linkage.

[0052] In one embodiment, the nucleotide sequence of the sense strand differs by no more than 2 nucleotides from the nucleotide sequence 5′-gsascuuuCfaUfCfCfuggaaauaua-3′ (SEQ ID NO:35) and the nucleotide sequence of the antisense strand differs by no more than 2 nucleotides from the nucleotide sequence 5′-usAfsuauUfuCfCfaggaUfgAfaagucscsa-3′ (SEQ ID NO:36).

[0053] In one embodiment, the nucleotide sequence of the sense strand differs by no more than 1 nucleotide from the nucleotide sequence 5′-gsascuuuCfaUfCfCfuggaaauaua-3′ (SEQ ID NO:35) and the nucleotide sequence of the antisense strand differs by no more than 1 nucleotide from the nucleotide sequence 5′-usAfsuauUfuCfCfaggaUfgAfaagucscsa-3′ (SEQ ID NO:36).

[0054] In one embodiment, the nucleotide sequence of the sense strand comprises the nucleotide sequence 5′-gsascuuuCfaUfCfCfuggaaauaua-3′ (SEQ ID NO:35) and the nucleotide sequence of the antisense strand comprises the nucleotide sequence 5′-usAfsuauUfuCfCfaggaUfgAfaagucscsa-3′ (SEQ ID NO:36).

[0055] In one embodiment, the dsRNA agent, or salt thereof, is conjugated to a ligand as shown in the following schematic

[chemical structure]

[0056] and, wherein X is O or S.

[0057] In one aspect, the present invention provides a method for inhibiting the expression of hydroxyacid oxidase (HAO1) in a subject having a non-primary hyperoxaluria disease or disorder that would benefit from reduction in urinary oxalate, comprising administering to the subject a fixed dose of about 200 mg to about 600 mg of a double stranded ribonucleic acid (dsRNA) agent, or salt thereof, which inhibits the expression of of HAO1, wherein the dsRNA agent, or salt thereof, comprises a sense strand and an antisense strand forming a double-stranded region, wherein the nucleotide sequence of the sense strand differs by no more than 3 nucleotides from the nucleotide sequence 5′-gsascuuuCfaUfCfCfuggaaauaua-3′ (SEQ ID NO:35) and the nucleotide sequence of the antisense strand differs by no more than 3 nucleotides from the nucleotide sequence 5′-usAfsuauUfuCfCfaggaUfgAfaagucscsa-3′ (SEQ ID NO:36), wherein Af is a 2′-fluoroadenosine-3′-phosphate; Afs is 2′-fluoroadenosine-3′-phosphorothioate; Cf is a 2′-fluorocytidine-3′-phosphate; U is a Uridine-3′-phosphate; Uf is a 2′-fluorouridine-3′-phosphate; a is a 2′-O-methyladenosine-3′-phosphate; as is a 2′-O-methyladenosine-3′-phosphorothioate; c is a 2′-O-methylcytidine-3′-phosphate; cs is a 2′-O-methylcytidine-3′-phosphorothioate; g is a 2′-O-methylguanosine-3′-phosphate; gs is a 2′-O-methylguanosine-3′-phosphorothioate; u is a 2′-O-methyluridine-3′-phosphate; us is a 2′-O-methyluridine-3′-phosphorothioate; and s is a phosphorothioate linkage, thereby inhibiting the expression of HAO1 in the subject.

[0058] In another aspect, the present invention provides a method for reducing urinary oxalate levels in a subject having a non-primary hyperoxaluria disease or disorder that would benefit from reduction in urinary oxalate, comprising administering to the subject a fixed dose of about 200 mg to about 600 mg of a double stranded ribonucleic acid (dsRNA) agent, or salt thereof, which inhibits the expression of of HAO1, wherein the dsRNA agent, or salt thereof, comprises a sense strand and an antisense strand forming a double-stranded region, wherein the nucleotide sequence of the sense strand differs by no more than 3 nucleotides from the nucleotide sequence 5′-gsascuuuCfaUfCfCfuggaaauaua-3′ (SEQ ID NO:35) and the nucleotide sequence of the antisense strand differs by no more than 3 nucleotides from the nucleotide sequence 5′-usAfsuauUfuCfCfaggaUfgAfaagucscsa-3′ (SEQ ID NO:36), wherein Af is a 2′-fluoroadenosine-3′-phosphate; Afs is 2′-fluoroadenosine-3′-phosphorothioate; Cf is a 2′-fluorocytidine-3′-phosphate; U is a Uridine-3′-phosphate; Uf is a 2′-fluorouridine-3′-phosphate; a is a 2′-O-methyladenosine-3′-phosphate; as is a 2′-O-methyladenosine-3′-phosphorothioate; c is a 2′-O-methylcytidine-3′-phosphate; cs is a 2′-O-methylcytidine-3′-phosphorothioate; g is a 2′-O-methylguanosine-3′-phosphate; gs is a 2′-O-methylguanosine-3′-phosphorothioate; u is a 2′-O-methyluridine-3′-phosphate; us is a 2′-O-methyluridine-3′-phosphorothioate; and s is a phosphorothioate linkage, thereby reducing urinary oxalate levels in the subject.

[0059] In one embodiment, the urinary oxalate is urinary calcium oxalate.

[0060] In one embodiment, the reduction in urinary calcium oxalate is reduction in urinary calcium oxalate supersaturation.

[0061] In one embodiment, the present invention provides a method for treating a subject having a non-primary hyperoxaluria disease or disorder that would benefit from reduction in oxalate, comprising administering to the subject a fixed dose of about 200 mg to about 600 mg of a double stranded ribonucleic acid (dsRNA) agent, or salt thereof, which inhibits the expression of of HAO1, wherein the dsRNA agent, or salt thereof, comprises a sense strand and an antisense strand forming a double-stranded region, wherein the nucleotide sequence of the sense strand differs by no more than 3 nucleotides from the nucleotide sequence 5′-gsascuuuCfaUfCfCfuggaaauaua-3′ (SEQ ID NO:35) and the nucleotide sequence of the antisense strand differs by no more than 3 nucleotides from the nucleotide sequence 5′-usAfsuauUfuCfCfaggaUfgAfaagucscsa-3′ (SEQ ID NO:36), wherein Af is a 2′-fluoroadenosine-3′-phosphate; Afs is 2′-fluoroadenosine-3′-phosphorothioate; Cf is a 2′-fluorocytidine-3′-phosphate; U is a Uridine-3′-phosphate; Uf is a 2′-fluorouridine-3′-phosphate; a is a 2′-O-methyladenosine-3′-phosphate; as is a 2′-O-methyladenosine-3′-phosphorothioate; c is a 2′-O-methylcytidine-3′-phosphate; cs is a 2′-O-methylcytidine-3′-phosphorothioate; g is a 2′-O-methylguanosine-3′-phosphate; gs is a 2′-O-methylguanosine-3′-phosphorothioate; u is a 2′-O-methyluridine-3′-phosphate; us is a 2′-O-methyluridine-3′-phosphorothioate; and s is a phosphorothioate linkage, thereby treating the subject having the non-primary hyperoxaluria disease or disorder that would benefit from reduction in oxalate.

[0062] In one embodiment, the non-primary hyperoxaluria disease or disorder is selected from the group consisting of secondary hyperoxaluria, a kidney stone disease, chronic kidney disease (CKD), end-stage renal disease (ESRD), coronary artery disease, cutaneous oxalate deposition, ethylene glycol poisoning, planned kidney transplantation, and previous kidney transplantation.

[0063] In one embodiment, the non-primary hyperoxaluria disease or disorder is a kidney stone disease.

[0064] In one embodiment, the kidney stone disease is calcium oxalate kidney stone disease.

[0065] In one embodiment, the calcium oxalate kidney stone disease is recurrent calcium oxalate kidney stone disease.

[0066] In one embodiment, administration of the dsRNA agent, or salt thereof, to the subject reduces urinary oxalate levels.

[0067] In one embodiment, the urinary oxalate is urinary calcium oxalate.

[0068] In one embodiment, the reduction in urinary calcium oxalate is reduction in urinary calcium oxalate supersaturation.

[0069] In one embodiment, administration of the dsRNA agent, or salt thereof, to the subject reduces clinical and radiographic kidney stone events.

[0070] In one embodiment, the subject is a human.

[0071] In one embodiment, the dsRNA agent, or salt thereof, is administered to the subject at an interval of once every six months.

[0072] In one embodiment, the dsRNA agent, or salt thereof, is administered to the subject initially, at three months, and every six months thereafter.

[0073] In one embodiment, the fixed dose of the dsRNA agent, or salt thereof, is about 284 mg.

[0074] In one embodiment, the fixed dose of the dsRNA agent, or salt thereof, is about 567 mg.

[0075] In one embodiment, the dsRNA agent, or salt thereof, is administered to the subject subcutaneously.

[0076] In one embodiment, the subcutaneous administration is subcutaneous injection.

[0077] In one embodiment, the nucleotide sequence of the sense strand differs by no more than 2 nucleotides from the nucleotide sequence 5′-gsascuuuCfaUfCfCfuggaaauaua-3′ (SEQ ID NO:35) and the nucleotide sequence of the antisense strand differs by no more than 2 nucleotides from the nucleotide sequence 5′-usAfsuauUfuCfCfaggaUfgAfaagucscsa-3′ (SEQ ID NO:36).

[0078] In one embodiment, the nucleotide sequence of the sense strand differs by no more than 1 nucleotide from the nucleotide sequence 5′-gsascuuuCfaUfCfCfuggaaauaua-3′ (SEQ ID NO:35) and the nucleotide sequence of the antisense strand differs by no more than 1 nucleotide from the nucleotide sequence 5′-usAfsuauUfuCfCfaggaUfgAfaagucscsa-3′ (SEQ ID NO:36).

[0079] In one embodiment, the nucleotide sequence of the sense strand comprises the nucleotide sequence 5′-gsascuuuCfaUfCfCfuggaaauaua-3′ (SEQ ID NO:35) and the nucleotide sequence of the antisense strand comprises the nucleotide sequence 5′-usAfsuauUfuCfCfaggaUfgAfaagucscsa-3′ (SEQ ID NO:36).

[0080] In one embodiment, the dsRNA agent, or salt thereof, is conjugated to a ligand as shown in the following schematic

[chemical structure]

[0081] and, wherein X is O or S.

[0082] In one embodiment, the X is O.

[0083] In one embodiment, the dsRNA agent is in salt form.

[0084] In one embodiment, the dsRNA agent, or salt thereof, is administered to the subject in a pharmaceutical formulation.

[0085] In one embodiment, the method of the invention further comprise administering an additional therapeutic to the subject.

[0086] In one aspect, the present invention provides a method for reducing calcium oxalate kidney stone incidence in a subject, the method comprising subcutaneously administering to the subject a fixed dose of about 284 mg or about 567 mg of a double stranded ribonucleic acid (dsRNA) agent, or salt thereof, comprising a sense strand and an antisense strand forming a double-stranded region, wherein the sense strand comprises the nucleotide sequence 5′-gsascuuuCfaUfCfCfuggaaauaua-3′ (SEQ ID NO:35) and the antisense strand comprises the nucleotide sequence 5′-usAfsuauUfuCfCfaggaUfgAfaagucscsa-3′ (SEQ ID NO:36), wherein Af is a 2′-fluoroadenosine-3′-phosphate; Afs is 2′-fluoroadenosine-3′-phosphorothioate; Cf is a 2′-fluorocytidine-3′-phosphate; U is a Uridine-3′-phosphate; Uf is a 2′-fluorouridine-3′-phosphate; a is a 2′-O-methyladenosine-3′-phosphate; as is a 2′-O-methyladenosine-3′-phosphorothioate; c is a 2′-O-methylcytidine-3′-phosphate; cs is a 2′-O-methylcytidine-3′-phosphorothioate; g is a 2′-O-methylguanosine-3′-phosphate; gs is a 2′-O-methylguanosine-3′-phosphorothioate; u is a 2′-O-methyluridine-3′-phosphate; us is a 2′-O-methyluridine-3′-phosphorothioate; and s is a phosphorothioate linkage, and wherein the sense strand is conjugated to a ligand as shown in the following schematic

[chemical structure]

and, wherein X is O, thereby reducing calcium oxalate kidney stone incidence in the subject.

[0087] In one embodiment, the subject has suffered 2 or more oxalate stone events.

[0088] In one embodiment, the subject has elevated urinary oxalate levels.

[0089] In one embodiment, the subject has suffered 2 or more oxalate stone events and has elevated urinary oxalate levels.

[0090] In one embodiment, the dsRNA agent, or salt thereof, is administered to the subject once every six months.

[0091] In one embodiment, the dsRNA agent, or salt thereof, is administered to the subject initially, at three months, and every six months thereafter.

[0092] In one aspect, the present invention provides a method for treating a subject having a non-primary hyperoxaluria disease or disorder that would benefit from reduction in oxalate, the method comprising administering to the subject a therapeutically effective amount of a nucleic acid inhibitor of hydroxyacid oxidase (HAO1) and/or a nucleic acid inhibitor of Proline Dehydrogenase 2 (PRODH2), thereby treating the subject having the non-primary hyperoxaluria disease or disorder that would benefit from reduction in oxalate.

[0093] In some embodiments, the non-primary hyperoxaluria disease or disorder is selected from the group consisting of a secondary hyperoxaluria, a kidney stone disease, chronic kidney disease (CKD), end-stage renal disease (ESRD), coronary artery disease, cutaneous oxalate deposition, ethylene glycol poisoning, planned kidney transplantation, and previous kidney transplantation.

[0094] In another aspect, the present invention provides a method of treating a subject at risk of developing a non-primary hyperoxaluria disease or disorder that would benefit from reduction in oxalate, the method comprising administering to the subject a therapeutically effective amount of a nucleic acid inhibitor of lactate dehydrogenase A (LDHA), a nucleic acid inhibitor of hydroxyacid oxidase (HAO1), and/or a nucleic acid inhibitor of Proline Dehydrogenase 2 (PRODH2), thereby treating the subject at risk of developing the non-primary hyperoxaluria disease or disorder that would benefit from reduction in oxalate.

[0095] In some embodiments, subject at risk of developing a non-primary hyperoxaluria disease or disorder that would benefit from reduction in oxalate suffers from Crohn's disease, inflammatory bowel disease, a bariatric surgery, fibromyalgia, an autoimmune disease, coronary artery disease, a kidney stone disease, end-stage renal disease (ESRD), diabetes, obesity, HIV, or ethylene glycol poisoning.

[0096] In one embodiment, the subject is a human.

[0097] In one embodiment, the nucleic acid inhibitor is a double stranded ribonucleic acid (dsRNA) agent that inhibits the expression of HAO1.

[0098] In one embodiment, the dsRNA agent comprises a sense strand and an antisense strand forming a double stranded region, wherein the sense strand comprises a nucleotide sequence comprising at least 15 contiguous nucleotides differing by no more than 3 nucleotides from a portion of the nucleotide sequence of SEQ ID NO: 21 and the antisense strand comprises a nucleotide sequence comprising at least 15 contiguous nucleotides differing by no more than 3 nucleotides from the corresponding portion of nucleotide sequence of SEQ ID NO: 22 such that the sense strand is complementary to the at least 15 contiguous nucleotides in the antisense strand.

[0099] In one embodiment, the dsRNA agent comprises a sense strand and an antisense strand forming a double stranded region, wherein the antisense strand comprises at least 15 contiguous nucleotides differing by no more than 3 nucleotides from any one of the antisense sequences listed in any one of Tables 4-14.

[0100] In one embodiment, the dsRNA agent comprises a sense strand and an antisense strand forming a double-stranded region, wherein the sense strand comprises the nucleotide sequence 5′-GACUUUCAUCCUGGAAAUAUA-3′ (SEQ ID NO:33) and the antisense strand comprises the nucleotide sequence 5′-UAUAUUUCCAGGAUGAAAGUCCA-3′ (SEQ ID NO:34).

[0101] In one embodiment, the nucleic acid inhibitor is a double stranded ribonucleic acid (dsRNA) agent that inhibits the expression of LDHA.

[0102] In one embodiment, the dsRNA agent comprises a sense strand and an antisense strand forming a double stranded region, wherein the sense strand comprises a nucleotide sequence comprising at least 15 contiguous nucleotides differing by no more than 3 nucleotides from a portion of the nucleotide sequence of SEQ ID NO: 1 and the antisense strand comprises a nucleotide sequence comprising at least 15 contiguous nucleotides differing by no more than 3 nucleotides from the corresponding portion of nucleotide sequence of SEQ ID NO: 2 such that the sense strand is complementary to the at least 15 contiguous nucleotides in the antisense strand.

[0103] In one embodiment, the dsRNA agent comprises a sense strand and an antisense strand forming a double stranded region, wherein the antisense strand comprises at least 15 contiguous nucleotides differing by no more than 3 nucleotides from any one of the antisense sequences listed in any one of Tables 2-3.

[0104] In one embodiment, the dsRNA agent comprises a sense strand and an antisense strand forming a double stranded region, wherein the sense strand comprises a nucleotide sequence comprising at least 15 contiguous nucleotides differing by no more than 3 nucleotides from the nucleotide sequence of 5′-AUGUUGUCCUUUUUAUCUGAGCAGCCGAAAGGCUGC-3′ (SEQ ID NO:31), and the antisense strand comprises a nucleotide sequence comprising at least 15 contiguous nucleotides differing by no more than 3 nucleotides from the nucleotide sequence 5′-UCAGAUAAAAAGGACAACAUGG-3′ (SEQ ID NO: 32).

[0105] one embodiment, the nucleic acid inhibitor is a double stranded ribonucleic acid (dsRNA) agent that inhibits the expression of PRODH2.

[0106] In one embodiment, the dsRNA agent comprises a sense strand and an antisense strand forming a double stranded region, wherein the sense strand comprises a nucleotide sequence comprising at least 15 contiguous nucleotides differing by no more than 3 nucleotides from a portion of the nucleotide sequence of SEQ ID NO: 4641 and the antisense strand comprises a nucleotide sequence comprising at least 15 contiguous nucleotides differing by no more than 3 nucleotides from the corresponding portion of nucleotide sequence of SEQ ID NO: 4642 such that the sense strand is complementary to the at least 15 contiguous nucleotides in the antisense strand.

[0107] In one embodiment, the dsRNA agent comprises a sense strand and an antisense strand forming a double stranded region, wherein the antisense strand comprises at least 15 contiguous nucleotides differing by no more than 3 nucleotides from any one of the antisense sequences listed in any one of Tables 15-16.

[0108] In one embodiment, the nucleic acid inhibitor is a dual targeting double stranded ribonucleic acid (dsRNA) agent that inhibits the expression of LDHA and HAO1.

[0109] In one embodiment, the dual targeting dsRNA agent comprises a first double stranded ribonucleic acid (dsRNA) agent that inhibits expression of lactic dehydrogenase A (LDHA) comprising a sense strand and an antisense strand; and a second double stranded ribonucleic acid (dsRNA) agent that inhibits expression of hydroxyacid oxidase 1 (glycolate oxidase) (HAO1) comprising a sense strand and an antisense strand, wherein the first dsRNA agent and the second dsRNA agent are covalently attached, wherein the sense strand of the first dsRNA agent comprises at least 15 contiguous nucleotides differing by no more than 3 nucleotides from the nucleotide sequence of SEQ ID NO: 1, and the antisense strand of the first dsRNA agent comprises at least 15 contiguous nucleotides differing by no more than 3 nucleotides from the nucleotide sequence of SEQ ID NO:2, wherein the sense strand of the second dsRNA agent comprises at least 15 contiguous nucleotides differing by no more than 3 nucleotides from the nucleotide sequence of SEQ ID NO:21, and said antisense strand of the second dsRNA agent comprises at least 15 contiguous nucleotides differing by no more than 3 nucleotides from the nucleotide sequence of SEQ ID NO:22.

[0110] In one embodiment, the dual targeting dsRNA agent comprises a first double stranded ribonucleic acid (dsRNA) agent that inhibits expression of lactic dehydrogenase A (LDHA) comprising a sense strand and an antisense strand; and a second double stranded ribonucleic acid (dsRNA) agent that inhibits expression of hydroxyacid oxidase 1 (glycolate oxidase) (HAO1) comprising a sense strand and an antisense strand, wherein the first dsRNA agent and the second dsRNA agent are covalently attached, wherein the antisense strand of the first dsRNA agent comprises at least 15 contiguous nucleotides differing by no more than 3 nucleotides from any one of the antisense sequences listed in any one of Tables 2-3, and wherein the antisense strand of the second dsRNA agent comprises at least 15 contiguous nucleotides differing by no more than 3 nucleotides from any one of the antisense sequences listed in any one of Tables 4-14.

[0111] In one embodiment, the dsRNA agent comprises at least one modified nucleotide.

[0112] In one embodiment, no more than five of the sense strand nucleotides and no more than five of the nucleotides of the antisense strand are unmodified nucleotides.

[0113] In one embodiment, all of the nucleotides of the sense strand and all of the nucleotides of the antisense strand are modified nucleotides.

[0114] In one embodiment, at least one of the modified nucleotides is selected from the group a deoxy-nucleotide, a 3′-terminal deoxythimidine (dT) nucleotide, a 2′-O-methyl modified nucleotide, a 2′-fluoro modified nucleotide, a 2′-deoxy-modified nucleotide, a locked nucleotide, an unlocked nucleotide, a conformationally restricted nucleotide, a constrained ethyl nucleotide, an abasic nucleotide, a 2′-amino-modified nucleotide, a 2′-O-allyl-modified nucleotide, 2′-C-alkyl-modified nucleotide, 2′-hydroxyl-modified nucleotide, a 2′-methoxyethyl modified nucleotide, a 2′-O-alkyl-modified nucleotide, a morpholino nucleotide, a phosphoramidate, a non-natural base comprising nucleotide, a tetrahydropyran modified nucleotide, a 1,5-anhydrohexitol modified nucleotide, a cyclohexenyl modified nucleotide, a nucleotide comprising a 5′-phosphorothioate group, a nucleotide comprising a 5′-methylphosphonate group, a nucleotide comprising a 5′ phosphate or 5′ phosphate mimic, a nucleotide comprising vinyl phosphonate, a nucleotide comprising adenosine-glycol nucleic acid (GNA), a nucleotide comprising thymidine-glycol nucleic acid (GNA) S-Isomer, a nucleotide comprising 2-hydroxymethyl-tetrahydrofurane-5-phosphate, a nucleotide comprising 2′-deoxythymidine-3′phosphate, a nucleotide comprising 2′-deoxyguanosine-3′-phosphate, and a terminal nucleotide linked to a cholesteryl derivative and a dodecanoic acid bisdecylamide group; and combinations thereof.

[0115] In one embodiment, the dsRNA agent further comprises at least one phosphorothioate internucleotide linkage.

[0116] In one embodiment, the dsRNA agent comprises 6-8 phosphorothioate internucleotide linkages.

[0117] In one embodiment, at least one strand of the dsRNA agent further comprises a ligand.

[0118] In one embodiment, the ligand is attached to the 3′ end of the sense strand.

[0119] In one embodiment, the ligand is one or more N-acetylgalactosamine (GalNAc) derivatives.

[0120] In one embodiment, the one or more GalNAc derivatives is attached through a monovalent, bivalent, or trivalent branched linker.

[0121] In one embodiment, the ligand is

[chemical structure]

[0122] In one embodiment, the dsRNA agent is conjugated to the ligand as shown in the following schematic

[chemical structure]

and, wherein X is O or S.

[0123] In one embodiment, the X is O.

[0124] In one embodiment, the sense strand comprises the nucleotide sequence 5′-gsascuuuCfaUfCfCfuggaaauaua-3′ (SEQ ID NO:35) and the antisense strand comprises the nucleotide sequence 5′-usAfsuauUfuCfCfaggaUfgAfaagucscsa-3′ (SEQ ID NO:36), wherein Af is a 2′-fluoroadenosine-3′-phosphate; Afs is 2′-fluoroadenosine-3′-phosphorothioate; Cf is a 2′-fluorocytidine-3′-phosphate; U is a Uridine-3′-phosphate; Uf is a 2′-fluorouridine-3′-phosphate; a is a 2′-O-methyladenosine-3′-phosphate; as is a 2′-O-methyladenosine-3′-phosphorothioate; c is a 2′-O-methylcytidine-3′-phosphate; cs is a 2′-O-methylcytidine-3′-phosphorothioate; g is a 2′-O-methylguanosine-3′-phosphate; gs is a 2′-O-methylguanosine-3′-phosphorothioate; u is a 2′-O-methyluridine-3′-phosphate; us is a 2′-O-methyluridine-3′-phosphorothioate; and s is a phosphorothioate linkage.

[0125] In one embodiment, the dsRNA agent is conjugated to the ligand as shown in the following schematic

[chemical structure]

[0126] and, wherein X is O or S.

[0127] In one embodiment, the dsRNA agent comprises at least one modified nucleotide.

[0128] In one embodiment, all of the nucleotides of the dsRNA agent are modified nucleotides.

[0129] In one embodiment, the modified nucleotide comprises a 2′-modification.

[0130] In one embodiment, the 2′-modification is a 2′-fluoro or 2′-O-methyl modification.

[0131] In one embodiment, one or more of the following positions are modified with a 2′-O-methyl: positions 1, 2, 4, 6, 7, 12, 14, 16, 18-26, or 31-36 of the sense strand and/or positions 1, 6, 8, 11-13, 15, 17, or 19-22 of the antisense strand.

[0132] In one embodiment, all of positions 1, 2, 4, 6, 7, 12, 14, 16, 18-26, and 31-36 of the sense strand and all of the positions 1, 6, 8, 11-13, 15, 17, and 19-22 of the antisense strand are modified with a 2-O-methyl.

[0133] In one embodiment, one or more of the following positions are modified with a 2′-fluoro: positions 3, 5, 8-11, 13, 15, or 17 of the sense strand and/or positions 2-5, 7, 9, 10, 14, 16, or 18 of the antisense strand.

[0134] In one embodiment, all of positions 3, 5, 8-11, 13, 15, or 17 of the sense strand and all of positions 2-5, 7, 9, 10, 14, 16, and 18 of the antisense strand are modified with a 2′-fluoro.

[0135] In one embodiment, the dsRNA agent comprises at least one modified internucleotide linkage.

[0136] In one embodiment, the at least one modified internucleotide linkage is a phosphorothioate linkage.

[0137] In one embodiment, the dsRNA agent has a phosphorothioate linkage between one or more of: positions 1 and 2 of the sense strand, positions 1 and 2 of the antisense strand, positions 2 and 3 of the antisense strand, positions 3 and 4 of the antisense strand, positions 20 and 21 of the antisense strand, and positions 21 and 22 of the antisense strand.

[0138] In one embodiment, the dsRNA agent has a phosphorothioate linkage between each of: positions 1 and 2 of the sense strand, positions 1 and 2 of the antisense strand, positions 2 and 3 of the antisense strand, positions 3 and 4 of the antisense strand, positions 20 and 21 of the antisense strand, and positions 21 and 22 of the antisense strand.

[0139] In one embodiment, the uridine at the first position of the antisense strand comprises a phosphate analog.

[0140] In one embodiment, the dsRNA comprises the following structure at position 1 of the antisense strand:

[chemical structure]

[0141] In one embodiment, one or more of the nucleotides of the -GAAA- sequence on the sense strand is conjugated to a monovalent GalNac moiety.

[0142] In one embodiment, each of the nucleotides of the -GAAA- sequence on the sense strand is conjugated to a monovalent GalNac moiety.

[0143] In one embodiment, the -GAAA- motif comprises the structure:

[chemical structure]

wherein: L represents a bond, click chemistry handle, or a linker of 1 to 20, inclusive, consecutive, covalently bonded atoms in length, selected from the group consisting of substituted and unsubstituted alkylene, substituted and unsubstituted alkenylene, substituted and unsubstituted alkynylene, substituted and unsubstituted heteroalkylene, substituted and unsubstituted heteroalkenylene, substituted and unsubstituted heteroalkynylene, and combinations thereof; and

### X is a O, S, or N.

[0144] In one embodiment, L is an acetal linker.

[0145] In one embodiment, X is O.

[0146] In one embodiment, the -G AAA- sequence comprises the structure:

[chemical structure]

[0147] In one embodiment, the dsRNA comprises an antisense strand having a sequence set forth as UCAGAUAAAAAGGACAACAUGG (SEQ ID NO: 32) and a sense strand having a sequence set forth as AUGUUGUCCUUUUUAUCUGAGCAGCCGAAAGGCUGC (SEQ ID NO: 31), wherein all of positions 1, 2, 4, 6, 7, 12, 14, 16, 18-26, and 31-36 of the sense strand and all of positions 1, 6, 8, 11-13, 15, 17, and 19-22 of the antisense strand are modified with a 2′-O-methyl, and all of positions 3, 5, 8-11, 13, 15, or 17 of the sense strand and all of positions 2-5, 7, 9, 10, 14, 16, and 18 of the antisense strand are modified with a 2′-fluoro; wherein the oligonucleotide has a phosphorothioate linkage between each of: positions 1 and 2 of the sense strand, positions 1 and 2 of the antisense strand, positions 2 and 3 of the antisense strand, positions 3 and 4 of the antisense strand, positions 20 and 21 of the antisense strand, and positions 21 and 22 of the antisense strand;

[0148] wherein the dsRNA agent comprises the following structure at position 1 of the antisense strand:

[chemical structure]

[0149] wherein each of the nucleotides of the -GAAA- sequence on the sense strand is conjugated to a monovalent GalNac moiety comprising the structure:

[chemical structure]

[0150] In one embodiment, the dsRNA agent is present in a composition comprising the dsRNA agent and Na+ counterions.

[0151] In one embodiment, the nucleic acid inhibitor is a single stranded antisense polynucleotide agent that inhibits the expression of LDHA.

[0152] In one embodiment, the single stranded antisense polynucleotide agent comprises at least 15 contiguous nucleotide differing by no more than 3 nucleotides from any one of the antisense nucleotide sequences in any one of Tables 2-3.

[0153] In one embodiment, the nucleic acid inhibitor is a single stranded antisense polynucleotide agent that inhibits the expression of PRODH2.

[0154] In one embodiment, the single stranded antisense polynucleotide agent comprises at least 15 contiguous nucleotide differing by no more than 3 nucleotides from any one of the antisense nucleotide sequences in any one of Tables 15-16.

[0155] In one embodiment, the single stranded antisense polynucleotide agent is about 8 to about 50 nucleotides in length.

[0156] In one embodiment, substantially all of the nucleotides of the single stranded antisense polynucleotide agent are modified nucleotides.

[0157] In one embodiment, all of the nucleotides of the single stranded antisense polynucleotide agent are modified nucleotides.

[0158] In one embodiment, the modified nucleotide comprises a modified sugar moiety selected from the group consisting of: a 2′-O-methoxyethyl modified sugar moiety, a 2′-O-alkyl modified sugar moiety, and a bicyclic sugar moiety.

[0159] In one embodiment, the bicyclic sugar moiety has a (—CRH—)n group forming a bridge between the 2′ oxygen and the 4′ carbon atoms of the sugar ring, wherein n is 1 or 2 and wherein R is H, CH₃ or CH₃OCH₃.

[0160] In one embodiment, n is 1 and R is CH₃.

[0161] In one embodiment, the modified nucleotide is a 5-methylcytosine.

[0162] In one embodiment, the single stranded antisense polynucleotide agent comprises a modified internucleoside linkage.

[0163] In one embodiment, the modified internucleoside linkage is a phosphorothioate internucleoside linkage.

[0164] In one embodiment, the single stranded antisense polynucleotide agent comprises a plurality of 2′-deoxynucleotides flanked on each side by at least one nucleotide having a modified sugar moiety.

[0165] In one embodiment, the single stranded antisense polynucleotide agent is a gapmer comprising a gap segment comprised of linked 2′-deoxynucleotides positioned between a 5′ and a 3′ wing segment.

[0166] In one embodiment, the modified sugar moiety is selected from the group consisting of a 2′-O-methoxyethyl modified sugar moiety, a 2′-methoxy modified sugar moiety, a 2′-O-alkyl modified sugar moiety, and a bicyclic sugar moiety.

[0167] In one embodiment, the nucleic acid inhibitor is present in a pharmaceutical formulation.

[0168] In some embodiments, the methods of the invention further comprise administering an additional therapeutic to the subject.

[0169] In one embodiment, the nucleic acid inhibitor is administered to the subject at a dose of about 0.01 mg/kg to about 10 mg/kg or about 0.5 mg/kg to about 50 mg/kg.

[0170] In one embodiment, the nucleic acid inhibitor is administered to the subject subcutaneously.

[0171] The present invention also provides methods for treating a subject having chronic kidney disease (CKD). The methods include administering to the subject a weight-based dose of a dsRNA agent, or salt thereof, which inhibits the expression of HAO1 in a doing regimen which includes a loading phase of closely spaced administrations that may be followed by a maintenance phase, in which the the dsRNA agent, or salt thereof, is administered at longer spaced intervals.

[0172] Accordingly, in one aspect, the present invention provides a method for inhibiting the expression of hydroxyacid oxidase (HAO1) in a subject having chronic kidney disease (CKD), comprising administering to the subject a double stranded ribonucleic acid (dsRNA) agent, or salt thereof, which inhibits the expression of of HAO1 in a dosing regimen that includes a loading phase followed by a maintenance phase, wherein the subject has a body weight of less than about 10 kilograms (kg) and the loading phase comprises administering a dose of about 6 milligram per kilogram (mg/kg) of the double stranded RNAi agent, or salt thereof, to the subject about once a month for about three months, and the maintenance phase comprises administering a dose of about 3 mg/kg of the double stranded RNAi agent, or salt thereof, to the subject about once a month; or wherein the subject has a body weight of between about 10 kg to about less than 20 kg and the loading phase comprises administering a dose of about 6 mg/kg of the double stranded RNAi agent, or salt thereof, to the subject about once a month for about three months, and the maintenance phase comprises administering a dose of about 6 mg/kg of the double stranded RNAi agent, or salt thereof, to the subject about once every three months; or wherein the subject has a body weight of greater than about 20 kg and the loading phase comprises administering a dose of about 3 mg/kg of the double stranded RNAi agent, or salt thereof, to the subject about once a month for about three months, and the maintenance phase comprises administering a dose of about 3 mg/kg of the double stranded RNAi agent, or salt thereof, to the subject about once every three months, wherein the dsRNA agent, or salt thereof, comprises a sense strand and an antisense strand forming a double-stranded region, wherein the nucleotide sequence of the sense strand differs by no more than 3 nucleotides from the nucleotide sequence 5′-gsascuuuCfaUfCfCfuggaaauaua-3′ (SEQ ID NO:35) and the nucleotide sequence of the antisense strand differs by no more than 3 nucleotides from the nucleotide sequence 5′-usAfsuauUfuCfCfaggaUfgAfaagucscsa-3′ (SEQ ID NO:36), wherein Af is a 2′-fluoroadenosine-3′-phosphate; Afs is 2′-fluoroadenosine-3′-phosphorothioate; Cf is a 2′-fluorocytidine-3′-phosphate; U is a Uridine-3′-phosphate; Uf is a 2′-fluorouridine-3′-phosphate; a is a 2′-O-methyladenosine-3′-phosphate; as is a 2′-O-methyladenosine-3′-phosphorothioate; c is a 2′-O-methylcytidine-3′-phosphate; cs is a 2′-O-methylcytidine-3′-phosphorothioate; g is a 2′-O-methylguanosine-3′-phosphate; gs is a 2′-O-methylguanosine-3′-phosphorothioate; u is a 2′-O-methyluridine-3′-phosphate; us is a 2′-O-methyluridine-3′-phosphorothioate; and s is a phosphorothioate linkage, thereby inhibiting the expression of HAO1 in the subject.

[0173] In another aspect, the present invention provides a method for reducing urinary oxalate levels in a subject having chronic kidney disease, comprising administering to the subject a double stranded ribonucleic acid (dsRNA) agent, or salt thereof, which inhibits the expression of of HAO1 in a dosing regimen that includes a loading phase followed by a maintenance phase, wherein the subject has a body weight of less than about 10 kilograms (kg) and the loading phase comprises administering a dose of about 6 milligram per kilogram (mg/kg) of the double stranded RNAi agent, or salt thereof, to the subject about once a month for about three months, and the maintenance phase comprises administering a dose of about 3 mg/kg of the double stranded RNAi agent, or salt thereof, to the subject about once a month; or wherein the subject has a body weight of between about 10 kg to about less than 20 kg and the loading phase comprises administering a dose of about 6 mg/kg of the double stranded RNAi agent, or salt thereof, to the subject about once a month for about three months, and the maintenance phase comprises administering a dose of about 6 mg/kg of the double stranded RNAi agent, or salt thereof, to the subject about once every three months; or wherein the subject has a body weight of greater than about 20 kg and the loading phase comprises administering a dose of about 3 mg/kg of the double stranded RNAi agent, or salt thereof, to the subject about once a month for about three months, and the maintenance phase comprises administering a dose of about 3 mg/kg of the double stranded RNAi agent, or salt thereof, to the subject about once every three months, wherein the dsRNA agent, or salt thereof, comprises a sense strand and an antisense strand forming a double-stranded region, wherein the nucleotide sequence of the sense strand differs by no more than 3 nucleotides from the nucleotide sequence 5′-gsascuuuCfaUfCfCfuggaaauaua-3′ (SEQ ID NO:35) and the nucleotide sequence of the antisense strand differs by no more than 3 nucleotides from the nucleotide sequence 5′-usAfsuauUfuCfCfaggaUfgAfaagucscsa-3′ (SEQ ID NO:36), wherein Af is a 2′-fluoroadenosine-3′-phosphate; Afs is 2′-fluoroadenosine-3′-phosphorothioate; Cf is a 2′-fluorocytidine-3′-phosphate; U is a Uridine-3′-phosphate; Uf is a 2′-fluorouridine-3′-phosphate; a is a 2′-O-methyladenosine-3′-phosphate; as is a 2′-O-methyladenosine-3′-phosphorothioate; c is a 2′-O-methylcytidine-3′-phosphate; cs is a 2′-O-methylcytidine-3′-phosphorothioate; g is a 2′-O-methylguanosine-3′-phosphate; gs is a 2′-O-methylguanosine-3′-phosphorothioate; u is a 2′-O-methyluridine-3′-phosphate; us is a 2′-O-methyluridine-3′-phosphorothioate; and s is a phosphorothioate linkage, thereby reducing urinary oxalate levels in the subject.

[0174] In one aspect, the present invention provides a method for treating a subject having chronic kidney disease, comprising administering to the subject a double stranded ribonucleic acid (dsRNA) agent, or salt thereof, which inhibits the expression of of HAO1 in a dosing regimen that includes a loading phase followed by a maintenance phase, wherein the subject has a body weight of less than about 10 kilograms (kg) and the loading phase comprises administering a dose of about 6 milligram per kilogram (mg/kg) of the double stranded RNAi agent, or salt thereof, to the subject about once a month for about three months, and the maintenance phase comprises administering a dose of about 3 mg/kg of the double stranded RNAi agent, or salt thereof, to the subject about once a month; or wherein the subject has a body weight of between about 10 kg to about less than 20 kg and the loading phase comprises administering a dose of about 6 mg/kg of the double stranded RNAi agent, or salt thereof, to the subject about once a month for about three months, and the maintenance phase comprises administering a dose of about 6 mg/kg of the double stranded RNAi agent, or salt thereof, to the subject about once every three months; or wherein the subject has a body weight of greater than about 20 kg and the loading phase comprises administering a dose of about 3 mg/kg of the double stranded RNAi agent, or salt thereof, to the subject about once a month for about three months, and the maintenance phase comprises administering a dose of about 3 mg/kg of the double stranded RNAi agent, or salt thereof, to the subject about once every three months, wherein the dsRNA agent, or salt thereof, comprises a sense strand and an antisense strand forming a double-stranded region, wherein the nucleotide sequence of the sense strand differs by no more than 3 nucleotides from the nucleotide sequence 5′-gsascuuuCfaUfCfCfuggaaauaua-3′ (SEQ ID NO:35) and the nucleotide sequence of the antisense strand differs by no more than 3 nucleotides from the nucleotide sequence 5′-usAfsuauUfuCfCfaggaUfgAfaagucscsa-3′ (SEQ ID NO:36), wherein Af is a 2′-fluoroadenosine-3′-phosphate; Afs is 2′-fluoroadenosine-3′-phosphorothioate; Cf is a 2′-fluorocytidine-3′-phosphate; U is a Uridine-3′-phosphate; Uf is a 2′-fluorouridine-3′-phosphate; a is a 2′-O-methyladenosine-3′-phosphate; as is a 2′-O-methyladenosine-3′-phosphorothioate; c is a 2′-O-methylcytidine-3′-phosphate; cs is a 2′-O-methylcytidine-3′-phosphorothioate; g is a 2′-O-methylguanosine-3′-phosphate; gs is a 2′-O-methylguanosine-3′-phosphorothioate; u is a 2′-O-methyluridine-3′-phosphate; us is a 2′-O-methyluridine-3′-phosphorothioate; and s is a phosphorothioate linkage, thereby treating the subject.

[0175] In one embodiment, the subject is a human.

[0176] In one embodiment, the dsRNA agent, or salt thereof, is administered to the subject subcutaneously.

[0177] In one embodiment, the subcutaneous administration is subcutaneous injection.

[0178] In one embodiment, the nucleotide sequence of the sense strand differs by no more than 2 nucleotides from the nucleotide sequence 5′-gsascuuuCfaUfCfCfuggaaauaua-3′ (SEQ ID NO:35) and the nucleotide sequence of the antisense strand differs by no more than 2 nucleotides from the nucleotide sequence 5′-usAfsuauUfuCfCfaggaUfgAfaagucscsa-3′ (SEQ ID NO:36).

[0179] In one embodiment, the nucleotide sequence of the sense strand differs by no more than 1 nucleotide from the nucleotide sequence 5′-gsascuuuCfaUfCfCfuggaaauaua-3′ (SEQ ID NO:35) and the nucleotide sequence of the antisense strand differs by no more than 1 nucleotide from the nucleotide sequence 5′-usAfsuauUfuCfCfaggaUfgAfaagucscsa-3′ (SEQ ID NO:36).

[0180] In one embodiment, the nucleotide sequence of the sense strand comprises the nucleotide sequence 5′-gsascuuuCfaUfCfCfuggaaauaua-3′ (SEQ ID NO:35) and the nucleotide sequence of the antisense strand comprises the nucleotide sequence 5′-usAfsuauUfuCfCfaggaUfgAfaagucscsa-3′ (SEQ ID NO:36).

[0181] In one embodiment, the dsRNA agent, or salt thereof, is conjugated to a ligand as shown in the following schematic

[chemical structure]

[0182] and, wherein X is O or S.

[0183] In one embodiment, the X is O.

[0184] In one embodiment, the dsRNA agent is in salt form.

[0185] In one embodiment, the dsRNA agent, or salt thereof, is administered to the subject in a pharmaceutical formulation.

[0186] In one embodiment, the methods further comprise administering an additional therapeutic to the subject.

### BRIEF DESCRIPTION OF THE DRAWINGS

[0187] FIG. 1 is a schematic of the endogenous pathways for oxalate synthesis.

### DETAILED DESCRIPTION OF THE INVENTION

[0188] The present invention is based, at least in part, on the discovery that agents that reduce oxalate levels, such as a nucleic acid inhibitor of lactate dehydrogenase A (LDHA), a nucleic acid inhibitor of hydroxyacid oxidase (HAO1) and/or a nucleic acid inhibitor of proline dehydrogenase 2 (PRODH2), can be used to treat subjects having or at risk of developing a non-primary hyperoxaluria disease or disorder, such as a subject having normal urinary oxalate levels, e.g., normal urinary calcium oxalate levels, or elevated urinary oxalate levels, e.g., elevated urinary calcium oxalate levels, e.g., supersaturated urinary calcium oxalate levels, e.g., a subject having a kidney stone disease, e.g., calcium oxalate kidney stone disease, such as recurrent calcium oxalate kidney stone disease.

[0189] Accordingly, the present invention provides methods for inhibiting the expression of hydroxyacid oxidase (HAO1) in a subject having a non-primary hyperoxaluria disease or disorder that would benefit from reduction in urinary oxalate, methods for reducing urinary oxalate levels in a subject having a non-primary hyperoxaluria disease or disorder that would benefit from reduction in urinary oxalate, and methods for treating a subject having having or at risk of developing a non-primary hyperoxaluria disease or disorder that would benefit from reduction in oxalate, and compositions comprising nucleic acid inhibitors, e.g., double stranded ribonucleic acid (dsRNA) agents or single stranded antisense polynucleotide agents targeting lactate dehydrogenase A (LDHA), hydroxyacid oxidase (HAO1) and/or proline dehydrogenase 2 (PRODH2).

[0190] The following detailed description discloses how to make and use compositions containing iRNAs to inhibit the expression of an HAO1 gene, an LDHA gene, a PRODH2 gene, and/or both an LDHA gene and an HAO1 gene, as well as compositions and methods for treating subjects having diseases and disorders that would benefit from inhibition and/or reduction of the expression of these genes.

### I. Definitions

[0191] In order that the present invention may be more readily understood, certain terms are first defined. In addition, it should be noted that whenever a value or range of values of a parameter are recited, it is intended that values and ranges intermediate to the recited values are also intended to be part of this invention.

[0192] The articles “a” and “an” are used herein to refer to one or to more than one (i.e., to at least one) of the grammatical object of the article. By way of example, “an element” means one element or more than one element, e.g., a plurality of elements.

[0193] The term “including” is used herein to mean, and is used interchangeably with, the phrase “including but not limited to”. The term “or” is used herein to mean, and is used interchangeably with, the term “and/or,” unless context clearly indicates otherwise.

[0194] The term “about” is used herein to mean within the typical ranges of tolerances in the art. For example, “about” can be understood as about 2 standard deviations from the mean. In certain embodiments, about means±10%. In certain embodiments, about means±5%. When about is present before a series of numbers or a range, it is understood that “about” can modify each of the numbers in the series or range.

[0195] The term “at least”, “no less than” or “or more” prior to a number or series of numbers is understood to include the number adjacent to the term “at least”, and all subsequent numbers or integers that could logically be included, as clear from context. For example, the number of nucleotides in a nucleic acid molecule must be an integer. For example, “at least 18 nucleotides of a 21 nucleotide nucleic acid molecule” means that 18, 19, 20, or 21 nucleotides have the indicated property. When at least is present before a series of numbers or a range, it is understood that “at least” can modify each of the numbers in the series or range.

[0196] As used herein, “no more than” or “or less” is understood as the value adjacent to the phrase and logical lower values or integers, as logical from context, to zero. For example, a duplex with an overhang of “no more than 2 nucleotides” has a 2, 1, or 0 nucleotide overhang. When “no more than” is present before a series of numbers or a range, it is understood that “no more than” can modify each of the numbers in the series or range.

[0197] In the event of a conflict between an indicated target site and the nucleotide sequence for a sense or antisense strand, the indicated sequence takes precedence.

[0198] In the event of a conflict between a chemical structure and a chemical name, the chemical structure takes precedence.

[0199] The term “hyperoxaluria”, as used herein, refers to a condition characterized by increased urinary excretion of oxalate. Generally, hyperoxaluria can be divided into two categories: primary and secondary hyperoxaluria.

[0200] Primary hyperoxaluria, as used herein, refers to autosomal recessive disorders of glyoxylate metabolism. Primary hyperoxaluria is the result of inherited enzyme deficiencies leading to increased endogenous oxalate synthesis. Primary hyperoxaluria can be divided into primary hyperoxaluria Type 1 (PH1); primary hyperoxaluria Type 2 (PH2); primary hyperoxaluria Type 3 (PH3); or primary hyperoxaluria Non-Type 1, Non-Type 2, Non-Type 3 (PH-Non-Type 1, Non-Type 2, Non-Type 3). PH1 is a hereditary disorder caused by mutations in alanine glyoxylate aminotransferase (AGT). PH2 is due to mutations in glyoxylate reductase/hydroxypyruvate reductase (GRHPR). PH3 is caused by mutations in HOGA1 (formerly DHDPSL). Subjects having PH-Non-Type 1, Non-Type 2, Non-Type 3 have clinical characteristics indistinguishable from type 1, 2, and 3, but with normal AGT, GRHPR, and HOGA1 liver enzyme activity, yet the etiology of the marked hyperoxaluria in such subjects remains to be elucidated.

[0201] A deficiency in either AGT or GRHPR activities results in an excess of glyoxylate and oxalate (see, e.g., Knight et al., (2011) Am J Physiol Renal Physiol 302(6): F688-F693). Therefore, inhibition of glycolate oxidase (HAO1) and proline dehydrogenase 2 (PRODH2) will reduce the level of glyoxylate. In addition, inhibition of LDHA expression and/or activity will decrease the level of excess oxalate. The buildup of oxalate in subjects having PH causes increased excretion of oxalate, which in turn results in renal and bladder stones. Stones cause urinary obstruction (often with severe and acute pain), secondary infection of urine and eventually kidney damage. Oxalate stones tend to be severe, resulting in relatively early kidney damage (e.g., onset in teenage years to early adulthood), which impairs the excretion of oxalate, leading to a further acceleration in accumulation of oxalate in the body. After the development of renal failure, patients may get deposits of oxalate in the bones, joints and bone marrow. Severe cases may develop hematological problems such as anaemia and thrombocytopaenia. The deposition of oxalate in the body is sometimes called “oxalosis” to be distinguished from “oxaluria” which refers to oxalate in the urine. Renal failure is a serious complication requiring treatment in its own right. Dialysis can control renal failure but tends to be inadequate to dispose of excess oxalate. Renal transplant is more effective and this is the primary treatment of severe hyperoxaluria. Liver transplantation (often in addition to renal transplant) may be able to control the disease by correcting the metabolic defect. In a proportion of patients with primary hyperoxaluria type 1, pyridoxine treatment (vitamin B6) may also decrease oxalate excretion and prevent kidney stone formation.

[0202] The term “a non-primary hyperoxaluria disease or disorder”, as used herein, refers to a disease, disorder or condition thereof, that is associated with oxalate metabolism, and would benefit from reduction in oxalate and/or from a decrease in the gene expression, replication, or protein activity of lactate dehydrogenase A (LDHA), hydroxyacid oxidase (HAO1) and/or proline dehydrogenase 2 (PRODH2).

[0203] The term “a non-primary hyperoxaluria disease or disorder,” as used herein, does not include primary hyperoxaluria, e.g., primary hyperoxaluria 1 (PH1), primary hyperoxaluria 2 (PH2), or primary hyperoxaluria 3 (PH3).

[0204] Subjects having a non-primary hyperoxaluria disease or disorder that would benefit from reduction in oxalate include subjects having an elevated level of oxalate, e.g., a mild hyperoxaluria condition, i.e., a urinary calcium oxalate excretion level of about 40 to about 60 mg/day, or a high hyperoxaluria condition, i.e., a urinary calcium oxalate excretion level of greater than about 60 mg/day. In one embodiment, subjects having a high hyperoxaluria condition have a supersaturation level of calcium oxalate, e.g., calcium oxalate (i.e., the concentration in urine is above the solubility of oxalate that drives crystallization and kidney stone formation). In other embodiments, subjects having a high hyperoxaluria condition do not have a supersaturation level of calcium oxalate, e.g., calcium oxalate. In some embodiments, subjects at risk of developing a non-primary hyperoxaluria disease or disorder, are subjects having a normal level of urinary oxalate excretion, i.e., a urinary oxalate excretion level of <40 mg/day and would still benefit from a reduction in oxalate.

[0205] Such subjects include those who suffer from a secondary hyperoxaluria, e.g., enteric hyperoxaluria, dietary hyperoxaluria, or idiopathic hyperoxaluria, a kidney stone disease, chronic kidney disease (CKD), end-stage renal disease (ESRD), coronary artery disease, cutaneous oxalate deposition, or ethylene glycol poisoning. Such subjects also include those who are planning to undergo kidney transplantation or have undergone kidney transplantation. In one embodiment, the subject suffers from a kidney stone disease, e.g., a calcium oxalate kidney stone disease, e.g., recurrent calcium oxalate kidney stone disease.

[0206] In certain embodiments, the methods of the invention reduce the level of urinary oxalate, e.g., urinary calcium oxalate, by about ≥20% from baseline as assessed in a 24-hour urinary oxalate analysis.

[0207] In certain embodiments, the methods of the invention reduce the level of urinary oxalate, e.g., urinary calcium oxalate, supersaturation from baseline as assessed in a 24-hour urinary oxalate analysis.

[0208] As used herein, the term “kidney stone disease” refers to a disease in which kidney stones (also called renal stones or urinary stones) form in one or both kidneys of the subject. Kidney stones are small, hard deposits which are made up of minerals or other compounds found in urine. Kidney stones vary in size, shape, and color. To be cleared from the body (or “passed”), the stones need to travel through ducts that carry urine from the kidneys to the bladder (ureters) and be excreted. Depending on their size, kidney stones generally take days to weeks to pass out of the body. There are four main types of kidney stones which are classified by the material they are made of Up to 75 percent of all kidney stones are composed primarily of calcium. Stones can also be made up of uric acid (a normal waste product), cystine (a protein building block), or struvite (a phosphate mineral). Stones form when there is more of the compound in the urine than can be dissolved. This imbalance can occur when there is an increased amount of the material in the urine, a reduced amount of liquid urine, or a combination of both. People are most likely to develop kidney stones between ages 40 and 60, though the stones can appear at any age. Research shows that 35 to 50 percent of people who have one kidney stone will develop additional stones, usually within 10 years of the first stone.

[0209] In one embodiment, the kidney stone disease is a calcium oxalate kidney stone disease. In another embodiment, the kidney stone disease is a non-calcium oxalate kidney stone disease.

[0210] In some embodiments, the kidney stone disease (either calcium oxalate kidney stone disease or non-calcium oxalate kidney stone disease) is non-recurrent kidney stone disease. In other embodiments, the kidney stone disease (either calcium oxalate kidney stone disease or non-calcium oxalate kidney stone disease) is recurrent kidney stone disease.

[0211] As used herein, the term “non-recurrent kidney stone disease” refers to kidney stone disease newly diagnosed in a subject, i.e., the subject was not previously diagnosed as having had kidney stone disease.

[0212] As used herein, the term “recurrent kidney stone disease” refers to kidney stone disease that returns in a subject that previously had kidney stone disease and was successfully treated for the disease (e.g., surgically treated to remove the kidney stone) or passed a kidney stone. Recurrent kidney stone disease may return at any time interval following treatment of the subject for kidney stone disease. In one embodiment, recurrent kidney stone disease is ≥2 stone events within a 5 year period.

[0213] “Chronic kidney disease” (“CKD”) or “chronic renal failure” (“CRF”), as defined by the Kidney Disease Outcomes Quality Initiative (KDOQI) of the National Kidney Foundation and the international guideline group Kidney Disease Improving Global Outcomes (KDIGO), is either kidney damage or a decreased glomerular filtration rate (GFR) of less than 60 mL/min/1.73 m2 for at least 3 months.

[0214] The different stages of CKD form a continuum. The stages of CKD are classified as: Stage 1: Kidney damage with normal or increased GFR (>90 mL/min/1.73 m²); Stage 2: Mild reduction in GFR (60-89 mL/min/1.73 m²); Stage 3a: Moderate reduction in GFR (45-59 mL/min/1.73 m²); Stage 3b: Moderate reduction in GFR (30-44 mL/min/1.73 m²); Stage 4: Severe reduction in GFR (15-29 mL/min/1.73 m²); Stage 5: Kidney failure (GFR <15 mL/min/1.73 m² or dialysis).

[0215] By itself, measurement of GFR may not be sufficient for identifying stage 1 and stage 2 CKD, because in those patients the GFR may in fact be normal or borderline normal. In such cases, the presence of one or more of the following markers of kidney damage can establish the diagnosis: Albuminuria (albumin excretion >30 mg/24 hr or albumin:creatinine ratio >30 mg/g [>3 mg/mmol]); Urine sediment abnormalities; Electrolyte and other abnormalities due to tubular disorders; Histologic abnormalities; Structural abnormalities detected by imaging; History of kidney transplantation in such cases

[0216] “End-stage renal disease” is the last stage of chronic kidney disease. Patients with end-stage renal disease will need dialysis or a kidney transplant in order to survive. In most cases, kidney failure is caused by other health problems, e.g., diabetes, or high blood pressure, that have done permanent damage to the kidneys over time.

[0217] “Secondary hyperoxaluria” results from over absorption of oxalate from the diet and is further characterized either as enteric, resulting from a chronic and unremediable underlying GI disorder associated with malabsorption, such as bariatric surgery complications or Crohn's disease, which predisposes patients to excess oxalate absorption, or idiopathic, meaning the underlying cause is unknown. Enteric hyperoxaluria is the more severe type of secondary hyperoxaluria. Secondary hyperoxaluria may also result from conditions underlying increased intestinal oxalate absorption, such as alterations in intestinal oxalate-degrading microorganisms, and genetic variations of intestinal oxalate transporters. Furthermore, hyperoxaluria may also occur following renal transplantation because of rapid clearance of accumulated oxalate.

[0218] In some embodiments, a non-primary hyperoxaluria disease or disorder is enteric hyperoxaluria. Enteric hyperoxaluria is the formation of calcium oxalate calculi in the urinary tract due to excessive absorption of oxalate from the colon, occurring as a result of intestinal bacterial overgrowth syndromes, fat malabsorption, chronic biliary or pancreatic disease, various intestinal surgical procedures, gastric bypass surgery, inflammatory bowel disease, or any medical condition that causes chronic diarrhea, e.g., Crohn's disease or ulcerative colitis).

[0219] In some embodiments, a non-primary hyperoxaluria disease or disorder is dietary hyperoxaluria, e.g., hyperoxaluria as a result of too much oxalate in the diet, e.g., from too much spinach, rhubarb, almonds, bulgur, millet, corn grits, soy flour, cornmeal, navy beans, etc.

[0220] In some embodiments, a non-primary hyperoxaluria disease or disorder is idiopathic hyperoxaluria. Subjects having idiopathic hyperoxaluria have above normal levels of urinary oxalate of unknown cause, but still develop stones.

[0221] In some embodiments, a non-primary hyperoxaluria disease or disorder is a calcium oxalate tissue deposition disease. For example, when glomerular filtration rate (GFR) drops below about 30-40 mL/min per 1.73 m², renal capacity to excrete calcium oxalate is significantly impaired. At this stage, calcium oxalate starts to deposit in extrarenal tissues. Calcium oxalate deposits may occur in the thyroid, breasts, kidneys, bones, bone marrow, myocardium, or cardiac conduction system. This leads to cardiomyopathy, heart block and other cardiac conduction defects, vascular diseases, retinopathy, synovitis, oxalate osteopathy and anemia that is noted to be resistant to treatment. The deposition of calcium oxalate mat be systemic or tissue specific.

[0222] Subjects having arthritis, sarcoidosis, end-stage renal disease are at risk of developing systemic calcium oxalate tissue deposition disease. Subjects at risk of developing tissue specific depositions in the kidney, for example, include subjects having medullary sponge kidney, nephrocalcinosis, renal tubular acidosis (RTA), and transplant recipients, e.g., kidney transplant recipients. In some embodiments, subjects at risk of developing tissue specific depositions include subjects having coronary artery disease or other vascular diseases, especially in patients with end-stage renal disease, HIV and other conditions where oxalate deposition occurs in plaques or in the vasculature.

[0223] In some embodiments, a non-primary hyperoxaluria disease or disorder is cutaneous oxalate deposition. Oxalate deposition in the skin can contribute to livedo reticularis, ulceration, and distal ischemia. In contrast to patients with primary hyperoxaluria, wherein oxalosis rarely occurs in the skin, patients with systemic oxalosis of chronic renal failure are more likely to present with extravascular calcified deposits of the skin, including dermal and subcutaneous nodules, tender subungual nodules, and skin-colored to yellow macules and papules usually in an acral distribution or on the face. In some embodiments, the non-primary hyperoxaluria disease or disorder is cutaneous oxalate deposition in the setting of dialysis.

[0224] In some embodiments, a non-primary hyperoxaluria disease or disorder is ethylene glycol poisoning. Ethylene glycol is an important cause of metabolic acidosis and subsequent acute renal failure, and the toxicity results from the depressant effects of ethylene glycol on the central nervous system. Specifically, metabolic acidosis and renal failure are caused by the conversion of ethylene glycol to noxious metabolites. Oxidative reactions convert ethylene glycol to glycolaldehyde, and then to glycolic acid, which is the major cause of metabolic acidosis. Both of these steps promote the production of lactate from pyruvate. The conversion of glycolic acid to glyoxylic acid proceeds slowly, further increasing the serum concentration of glycolic acid. Glyoxylic acid is eventually converted to oxalic acid and glycine. Oxalic acid does not contribute to the metabolic acidosis, but it is deposited as calcium oxalate crystals in many tissues.

[0225] As used herein, a “subject” is an animal, such as a mammal, including a primate (such as a human, a non-human primate, e.g., a monkey, and a chimpanzee), a non-primate (such as a cow, a pig, a camel, a llama, a horse, a goat, a rabbit, a sheep, a hamster, a guinea pig, a cat, a dog, a rat, a mouse, a horse, and a whale), or a bird (e.g., a duck or a goose). In one embodiment, a subject is a human subject

[0226] As used herein, the terms “treating” or “treatment” refer to a beneficial or desired result, such as inhibiting oxalate accumulation and/or lowering urinary excretion levels of oxalate in a subject. The terms “treating” or “treatment” also include, but are not limited to, alleviation or amelioration of one or more symptoms of a non-primary hyperoxaluria disease or disorder, such as, e.g., slowing the course of the disease; reducing the severity of later-developing disease; and/or preventing further oxalate tissue deposition. “Treatment” can also mean prolonging survival as compared to expected survival in the absence of treatment.

[0227] The term “lower” in the context of a disease marker or symptom refers to a statistically significant decrease in such level. The decrease can be, for example, at least 10%, at least 15%, at least 20%, at least 25%, at least 30%, at least 35%, at least 40%, at least 45%, at least 50%, at least 55%, at least 60%, at least 65%, at least 70%, at least 75%, at least 80%, at least 85%, at least 90%, at least 95%, or more and is a decrease to a level accepted as within the range of normal for an individual without such disorder.

[0228] As used herein, “prevention” or “preventing,” when used in reference to a disease refers to a reduction in the likelihood that a subject will develop a symptom associated with such disease, disorder, or condition, e.g., oxalate accumulation or stone formation. The likelihood of, e.g., oxalate accumulation or stone formation, is reduced, for example, when an individual having one or more risk factors for stone formation either fails to develop stones or develops stones with less severity relative to a population having the same risk factors and not receiving treatment as described herein. The failure to develop a disease, or the reduction in the development of a symptom associated with such a disease, disorder or condition (e.g., by at least about 10% on a clinically accepted scale for that disease or disorder), or the exhibition of delayed symptoms delayed (e.g., by days, weeks, months or years) is considered effective prevention.

[0229] “Therapeutically effective amount,” as used herein, is intended to include the amount of an inhibitor that, when administered to a subject having a non-primary hyperoxaluria disease, is sufficient to effect treatment of the disease (e.g., by diminishing, ameliorating or maintaining the existing disease or one or more symptoms of disease). The “therapeutically effective amount” may vary depending on the inhibitor, how the inhibitor is administered, the disease and its severity and the history, age, weight, family history, genetic makeup, the types of preceding or concomitant treatments, if any, and other individual characteristics of the subject to be treated.

[0230] “Prophylactically effective amount,” as used herein, is intended to include the amount of an inhibitor that, when administered to a subject having a non-primary hyperoxaluria disease, is sufficient to prevent or ameliorate the disease or one or more symptoms of the disease. Ameliorating the disease includes slowing the course of the disease or reducing the severity of later-developing disease. The “prophylactically effective amount” may vary depending on the inhibitor, how the inhibitor is administered, the degree of risk of disease, and the history, age, weight, family history, genetic makeup, the types of preceding or concomitant treatments, if any, and other individual characteristics of the patient to be treated.

[0231] A “therapeutically-effective amount” or “prophylactically effective amount” also includes an amount of an inhibitor that produces some desired local or systemic effect at a reasonable benefit/risk ratio applicable to any treatment. Inhibitors employed in the methods of the present invention may be administered in a sufficient amount to produce a reasonable benefit/risk ratio applicable to such treatment.

[0232] In the methods of the invention which include administering to a subject a pharmaceutical composition comprising a first dsRNA agent targeting LDHA and a second dsRNA agent targeting HAO1, the therapeutically effective amount of the first dsRNA agent may be the same or different than the therapeutically effective amount of the second dsRNA agent. Similarly, in the methods of the invention which include administering to a subject a pharmaceutical composition comprising a first dsRNA agent targeting LDHA and a second dsRNA agent targeting HAO1, the prophylacticly effective amount of the first dsRNA agent may be the same or different than the prophylactically effective amount of the second dsRNA agent.

[0233] In addition, in the methods of the invention which include administering to a subject a pharmaceutical composition comprising a first single stranded antisense polynucleotide agent targeting LDHA and a second single stranded antisense polynucleotide agent targeting HAO1, the therapeutically effective amount of the first single stranded antisense polynucleotide agent may be the same or different than the therapeutically effective amount of the second single stranded antisense polynucleotide agent. Similarly, in the methods of the invention which include administering to a subject a pharmaceutical composition comprising a first single stranded antisense polynucleotide agent targeting LDHA and a second single stranded antisense polynucleotide agent targeting HAO1, the prophylacticly effective amount of the first single stranded antisense polynucleotide agent may be the same or different than the prophylactically effective amount of the second single stranded antisense polynucleotide agent.

[0234] As used herein, the term a “nucleic acid inhibitor” includes iRNA agents and antisense polynucleotide agents.

[0235] The terms “iRNA”, “RNAi agent,” “iRNA agent,” “RNA interference agent” as used interchangeably herein, refer to an agent that contains RNA as that term is defined herein, and which mediates the targeted cleavage of an RNA transcript via an RNA-induced silencing complex (RISC) pathway. RNA interference (RNAi) is a process that directs the sequence-specific degradation of mRNA. RNAi modulates, e.g., inhibits, the expression of LDHA, PRODH2 and/or HAO1 in a cell, e.g., a cell within a subject, such as a subject suffering from a non-primary hyperoxaluria disease or disorder.

[0236] In one embodiment, an RNAi agent of the disclosure includes a single stranded RNAi that interacts with a target RNA sequence, e.g., an LDHA, PRODH2, and/or HAO1 target mRNA sequence, to direct the cleavage of the target RNA. Without wishing to be bound by theory it is believed that long double stranded RNA introduced into cells is broken down into double-stranded short interfering RNAs (siRNAs) comprising a sense strand and an antisense strand by a Type III endonuclease known as Dicer (Sharp et al. (2001) Genes Dev. 15:485). Dicer, a ribonuclease-III-like enzyme, processes these dsRNA into 19-23 base pair short interfering RNAs with characteristic two base 3′ overhangs (Bernstein, et al., (2001) Nature 409:363). These siRNAs are then incorporated into an RNA-induced silencing complex (RISC) where one or more helicases unwind the siRNA duplex, enabling the complementary antisense strand to guide target recognition (Nykanen, et al., (2001) Cell 107:309). Upon binding to the appropriate target mRNA, one or more endonucleases within the RISC cleave the target to induce silencing (Elbashir, et al., (2001) Genes Dev. 15:188). Thus, in one aspect the disclosure relates to a single stranded RNA (ssRNA) (the antisense strand of a siRNA duplex) generated within a cell and which promotes the formation of a RISC complex to effect silencing of the target gene, i.e., an LDHA, PRODH2 and/or HAO1 gene. Accordingly, the term “siRNA” is also used herein to refer to an RNAi as described above.

[0237] In another embodiment, the RNAi agent may be a single-stranded RNA that is introduced into a cell or organism to inhibit a target mRNA. Single-stranded RNAi agents bind to the RISC endonuclease, Argonaute 2, which then cleaves the target mRNA. The single-stranded siRNAs are generally 15-30 nucleotides and are chemically modified. The design and testing of single-stranded RNAs are described in U.S. Pat. No. 8,101,348 and in Lima et al., (2012) Cell 150:883-894, the entire contents of each of which are hereby incorporated herein by reference. Any of the antisense nucleotide sequences described herein may be used as a single-stranded siRNA as described herein or as chemically modified by the methods described in Lima et al., (2012) Cell 150:883-894.

[0238] In another embodiment, a “RNAi agent” for use in the compositions and methods of the disclosure is a double stranded RNA and is referred to herein as a “double stranded RNAi agent,” “double stranded RNA (dsRNA) molecule,” “dsRNA agent,” or “dsRNA”. The term “dsRNA” refers to a complex of ribonucleic acid molecules, having a duplex structure comprising two anti-parallel and substantially complementary nucleic acid strands, referred to as having “sense” and “antisense” orientations with respect to a target RNA, i.e., an LDHA, PRODH2 and/or HAO1 gene. In some embodiments of the disclosure, a double stranded RNA (dsRNA) triggers the degradation of a target RNA, e.g., an mRNA, through a post-transcriptional gene-silencing mechanism referred to herein as RNA interference or RNAi.

[0239] In yet another embodiment, an “iRNA” for use in the compositions and methods of the invention is a “dual targeting RNAi agent.” The term “dual targeting RNAi agent” refers to a molecule comprising a first dsRNA agent comprising a complex of ribonucleic acid molecules, having a duplex structure comprising two anti-parallel and substantially complementary nucleic acid strands, referred to as having “sense” and “antisense” orientations with respect to a first target RNA, i.e., an LDHA gene, covalently attached to a molecule comprising a second dsRNA agent comprising a complex of ribonucleic acid molecules, having a duplex structure comprising two anti-parallel and substantially complementary nucleic acid strands, referred to as having “sense” and “antisense” orientations with respect to a second target RNA, i.e., an HAO1 gene. In some embodiments of the invention, a dual targeting RNAi agent triggers the degradation of the first and the second target RNAs, e.g., mRNAs, through a post-transcriptional gene-silencing mechanism referred to herein as RNA interference or RNAi.

[0240] The terms “polynucleotide agent,” “antisense polynucleotide agent” “antisense compound”, and “agent” as used interchangeably herein, refer to an agent comprising a single-stranded oligonucleotide that contains RNA as that term is defined herein, and which targets nucleic acid molecules encoding LDHA, PRODH2 and/or HAO1 (e.g., mRNA encoding LDHA, PRODH2 and/or HAO1). The antisense polynucleotide agents specifically bind to the target nucleic acid molecules via hydrogen bonding (e.g., Watson-Crick, Hoogsteen, or reversed Hoogsteen hydrogen bonding) and interfere with the normal function of the targeted nucleic acid (e.g., by an antisense mechanism of action). This interference with or modulation of the function of a target nucleic acid by the polynucleotide agents of the present invention is referred to as “antisense inhibition.” The functions of the target nucleic acid molecule to be interfered with may include functions such as, for example, translocation of the RNA to the site of protein translation, translation of protein from the RNA, splicing of the RNA to yield one or more mRNA species, and catalytic activity which may be engaged in or facilitated by the RNA.

[0241] As used herein, “target sequence” refers to a contiguous portion of the nucleotide sequence of an mRNA molecule formed during the transcription of an LDHA gene, a PRODH2 gene, or an HAO1 gene, including mRNA that is a product of RNA processing of a primary transcription product.

[0242] In one embodiment, the target portion of the sequence will be at least long enough to serve as a substrate for iRNA-directed cleavage at or near that portion of the nucleotide sequence of an mRNA molecule formed during the transcription of an LDHA gene. In another embodiment, the target portion of the sequence will be at least long enough to serve as a substrate for iRNA-directed cleavage at or near that portion of the nucleotide sequence of an mRNA molecule formed during the transcription of a PRODH2 gene. In another embodiment, the target portion of the sequence will be at least long enough to serve as a substrate for iRNA-directed cleavage at or near that portion of the nucleotide sequence of an mRNA molecule formed during the transcription of an HAO1 gene.

[0243] The target sequence of an LDHA gene, a PRODH2 gene or an HAO1 gene may be from about 19-36 nucleotides in length, e.g., about 19-30 nucleotides in length. For example, the target sequence can be about 19-30 nucleotides, 19-30, 19-29, 19-28, 19-27, 19-26, 19-25, 19-24, 19-23, 19-22, 19-21, 19-20, 20-30, 20-29, 20-28, 20-27, 20-26, 20-25, 20-24, 20-23, 20-22, 20-21, 21-30, 21-29, 21-28, 21-27, 21-26, 21-25, 21-24, 21-23, or 21-22 nucleotides in length. In certain embodiments, the target sequence is 19-23 nucleotides in length, optionally 21-23 nucleotides in length. Ranges and lengths intermediate to the above recited ranges and lengths are also contemplated to be part of the disclosure.

[0244] In aspects in which a first dsRNA agent targeting LDHA and a second dsRNA agent targeting HAO1 are covalently attached (i.e., a dual targeting RNAi agent), the length of the LDHA target sequence may be the same as the HAO1 target sequence or different.

[0245] A target sequence may be from about 4-50 nucleotides in length, e.g., 8-45, 10-45, 10-40, 10-35, 10-30, 10-20, 11-45, 11-40, 11-35, 11-30, 11-20, 12-45, 12-40, 12-35, 12-30, 12-25, 12-20, 13-45, 13-40, 13-35, 13-30, 13-25, 13-20, 14-45, 14-40, 14-35, 14-30, 14-25, 14-20, 15-45, 15-40, 15-35, 15-30, 15-25, 15-20, 16-45, 16-40, 16-35, 16-30, 16-25, 16-20, 17-45, 17-40, 17-35, 17-30, 17-25, 17-20, 18-45, 18-40, 18-35, 18-30, 18-25, 18-20, 19-45, 19-40, 19-35, 19-30, 19-25, 19-20, e.g., 4, 5, 6, 7, 8, 9, 10, 11, 12, 13, 14, 15, 16, 17, 18, 19, 20, 21, 22, 23, 24, 25, 26, 27, 28, 29, 30, 31, 32, 33, 34, 35, 36, 37, 38, 39, 40, 41, 42, 43, 44, 45, 46, 47, 48, 49, or 50 contiguous nucleotides of the nucleotide sequence of an mRNA molecule formed during the transcription of an LDHA gene and/or an HAO1 gene. Ranges and lengths intermediate to the above recited ranges and lengths are also contemplated to be part of the invention.

[0246] The terms “complementary,” “fully complementary” and “substantially complementary” are used herein with respect to the base matching between a nucleic acid inhibitor and a target sequence. The term“complementarity” refers to the capacity for pairing between nucleobases of a first nucleic acid and a second nucleic acid.

[0247] As used herein, a nucleic acid inhibitor that is “substantially complementary to at least part of” a messenger RNA (mRNA) refers to a nucleic acid inhibitor that is substantially complementary to a contiguous portion of the mRNA of interest (e.g., an mRNA encoding LDHA, an mRNA encoding PRODH2, and/or an mRNA encoding HAO1). For example, a polynucleotide is complementary to at least a part of an HAO1 mRNA if the sequence is substantially complementary to a non-interrupted portion of an mRNA encoding HAO1.

[0248] As used herein, the term “region of complementarity” refers to the region of the nucleic acid inhibito that is substantially complementary to a sequence, for example a target sequence, e.g., an LDHA nucleotide sequence, a PRODH2 nucleotide sequence and/or an HAO1 nucleotide sequence, as defined herein. Where the region of complementarity is not fully complementary to the target sequence, the mismatches can be in the internal or terminal regions of the molecule. Generally, the most tolerated mismatches are in the terminal regions, e.g., within 5, 4, 3, or 2 nucleotides of the 5′- and/or 3′-terminus of the polynucleotide.

[0249] As used herein, and unless otherwise indicated, the term “complementary,” when used to describe a first nucleotide sequence in relation to a second nucleotide sequence, refers to the ability of a polynucleotide comprising the first nucleotide sequence to hybridize and form a duplex structure under certain conditions with the second nucleotide sequence, as will be understood by the skilled person. Such conditions can, for example, be stringent conditions, where stringent conditions can include: 400 mM NaCl, 40 mM PIPES pH 6.4, 1 mM EDTA, 50° C. or 70° C. for 12-16 hours followed by washing (see, e.g., “Molecular Cloning: A Laboratory Manual, Sambrook, et al. (1989) Cold Spring Harbor Laboratory Press). Other conditions, such as physiologically relevant conditions as can be encountered inside an organism, can apply. The skilled person will be able to determine the set of conditions most appropriate for a test of complementarity of two sequences in accordance with the ultimate application of the nucleotides.

[0250] Complementary sequences include those nucleotide sequences of a nucleic acid inhibitor of the invention that base-pair to a second nucleotide sequence over the entire length of one or both nucleotide sequences. Such sequences can be referred to as “fully complementary” with respect to each other herein. However, where a first sequence is referred to as “substantially complementary” with respect to a second sequence herein, the two sequences can be fully complementary, or they can form one or more, but generally not more than 5, 4, 3 or 2 mismatched base pairs upon hybridization for a duplex up to 30 base pairs, while retaining the ability to hybridize under the conditions most relevant to their ultimate application, e.g., inhibition of target gene expression.

[0251] “Complementary” sequences, as used herein, can also include, or be formed entirely from, non-Watson-Crick base pairs and/or base pairs formed from non-natural and modified nucleotides, in so far as the above requirements with respect to their ability to hybridize are fulfilled. Such non-Watson-Crick base pairs include, but are not limited to, G:U Wobble or Hoogsteen base pairing. As used herein, the term “strand comprising a sequence” refers to an oligonucleotide comprising a chain of nucleotides that is described by the sequence referred to using the standard nucleotide nomenclature.

[0252] “G,” “C,” “A,” “T” and “U” each generally stand for a nucleotide that contains guanine, cytosine, adenine, thymidine and uracil as a base, respectively. However, it will be understood that the terms “deoxyribonucleotide”, “ribonucleotide” and “nucleotide” can also refer to a modified nucleotide, as further detailed below, or a surrogate replacement moiety (see, e.g., Table 1). The skilled person is well aware that guanine, cytosine, adenine, and uracil can be replaced by other moieties without substantially altering the base pairing properties of an oligonucleotide comprising a nucleotide bearing such replacement moiety. For example, without limitation, a nucleotide comprising inosine as its base can base pair with nucleotides containing adenine, cytosine, or uracil. Hence, nucleotides containing uracil, guanine, or adenine can be replaced in the nucleotide sequences of the agents featured in the invention by a nucleotide containing, for example, inosine. In another example, adenine and cytosine anywhere in the oligonucleotide can be replaced with guanine and uracil, respectively to form G-U Wobble base pairing with the target mRNA. Sequences containing such replacement moieties are suitable for the compositions and methods featured in the invention.

[0253] A “nucleoside” is a base-sugar combination. The “nucleobase” (also known as “base”) portion of the nucleoside is normally a heterocyclic base moiety. “Nucleotides” are nucleosides that further include a phosphate group covalently linked to the sugar portion of the nucleoside. For those nucleosides that include a pentofuranosyl sugar, the phosphate group can be linked to the 2′, 3′ or 5′ hydroxyl moiety of the sugar. “Polynucleotides,” also referred to as “oligonucleotides,” are formed through the covalent linkage of adjacent nucleosides to one another, to form a linear polymeric oligonucleotide. Within the polynucleotide structure, the phosphate groups are commonly referred to as forming the internucleoside linkages of the polynucleotide.

[0254] In general, the majority of nucleotides of the nucleic acid inhibitors are ribonucleotides, but as described in detail herein, the inhibitors may also include one or more non-ribonucleotides, e.g., a deoxyribonucleotide. In addition, as used in this specification, a “nucleic acid inhibitor” may include nucleotides (e.g., ribonucleotides or deoxyribonucleotides) with chemical modifications; a nucleic acid inhibitor may include substantial modifications at multiple nucleotides.

[0255] As used herein, the term “modified nucleotide” refers to a nucleotide having, independently, a modified sugar moiety, a modified internucleotide linkage, and/or modified nucleobase. Thus, the term modified nucleotide encompasses substitutions, additions or removal of, e.g., a functional group or atom, to internucleoside linkages, sugar moieties, or nucleobases. The modifications suitable for use in the nucleic acid inhibitors of the invention include all types of modifications disclosed herein or known in the art. Any such modifications, as used in nucleotides, are encompassed by “nucleic acid inhibitor” for the purposes of this specification and claims.

[0256] The term “LDHA” (used interchangeable herein with the term “Ldha”), also known as Cell Proliferation-Inducing Gene 19 Protein, Renal Carcinoma Antigen NY-REN-59, LDH Muscle Subunit, EC 1.1.1.27 4 61, LDH-A, LDH-M, Epididymis Secretory Sperm Binding Protein Li 133P, L-Lactate Dehydrogenase A Chain, Proliferation-Inducing Gene 19, Lactate Dehydrogenase M, HEL-S-133P, EC 1.1.1, GSD11, PIG19, and LDHM, refers to the well known gene encoding a lactate dehydrogenase A from any vertebrate or mammalian source, including, but not limited to, human, bovine, chicken, rodent, mouse, rat, porcine, ovine, primate, monkey, and guinea pig, unless specified otherwise.

[0257] The term also refers to fragments and variants of native LDHA that maintain at least one in vivo or in vitro activity of a native LDHA. The term encompasses full-length unprocessed precursor forms of LDHA as well as mature forms resulting from post-translational cleavage of the signal peptide and forms resulting from proteolytic processing.

[0258] The sequence of a human LDHA mRNA transcript can be found at, for example, GenBank Accession No. GI: 207028493 (NM_001135239.1; SEQ ID NO: 1), GenBank Accession No. GI: 260099722 (NM_001165414.1; SEQ ID NO:3), GenBank Accession No. GI: 260099724 (NM_001165415.1; SEQ ID NO: 5), GenBank Accession No. GI: 260099726 (NM_001165416.1; SEQ ID NO:7), GenBank Accession No. GI: 207028465 (NM_005566.3; SEQ ID NO:9); the sequence of a mouse LDHA mRNA transcript can be found at, for example, GenBank Accession No. GI: 257743038 (NM_001136069.2; SEQ ID NO: 11), GenBank Accession No. GI: 257743036 (NM_010699.2; SEQ ID NO: 13); the sequence of a rat LDHA mRNA transcript can be found at, for example, GenBank Accession No. GI: 8393705 (NM_017025.1; SEQ ID NO: 15); and the sequence of a monkey LDHA mRNA transcript can be found at, for example, GenBank Accession No. GI: 402766306 (NM_001257735.2; SEQ ID NO: 17), GenBank Accession No. GI: 545687102 (NM_001283551.1; SEQ ID NO:19).

[0259] Additional examples of LDHA mRNA sequences are readily available using publicly available databases, e.g., GenBank, UniProt, and OMIM.

[0260] The term “LDHA” as used herein also refers to a particular polypeptide expressed in a cell by naturally occurring DNA sequence variations of the LDHA gene, such as a single nucleotide polymorphism in the LDHA gene. Numerous SNPs within the LDHA gene have been identified and may be found at, for example, NCBI dbSNP (see, e.g., www.ncbi.nlm.nih.gov/snp).

[0261] As used herein, the term “HAO1” refers to the well known gene encoding the enzyme hydroxyacid oxidase 1 from any vertebrate or mammalian source, including, but not limited to, human, bovine, chicken, rodent, mouse, rat, porcine, ovine, primate, monkey, and guinea pig, unless specified otherwise. Other gene names include GO, GOX, GOX1, HAO, and HAOX1. The protein is also known as glycolate oxidase and (S)-2-hydroxy-acid oxidase.

[0262] The term also refers to fragments and variants of native HAO1 that maintain at least one in vivo or in vitro activity of a native HAO1. The term encompasses full-length unprocessed precursor forms of HAO1 as well as mature forms resulting from post-translational cleavage of the signal peptide and forms resulting from proteolytic processing. The sequence of a human HAO1 mRNA transcript can be found at, for example, GenBank Accession No. GI: 11184232 (NM_017545.2; SEQ ID NO:21); the sequence of a monkey HAO1 mRNA transcript can be found at, for example, GenBank Accession No. GI:544464345 (XM_005568381.1; SEQ ID NO:23); the sequence of a mouse HAO1 mRNA transcript can be found at, for example, GenBank Accession No. GI: 133893166 (NM_010403.2; SEQ ID NO:25); and the sequence of a rat HAO1 mRNA transcript can be found at, for example, GenBank Accession No. GI: 166157785 (NM_001107780.2; SEQ ID NO:27).

[0263] The term “HAO1,” as used herein, also refers to naturally occurring DNA sequence variations of the HAO1 gene, such as a single nucleotide polymorphism (SNP) in the HAO1 gene. Exemplary SNPs may be found in the NCBI dbSNP Short Genetic Variations database available at www.ncbi.nlm.nih.gov/projects/SNP.

[0264] As used herein, “proline dehydrogenase 2,” used interchangeably with the term “PRODH2,” refers to the enzyme which catalyzes the first step in the catabolism of trans-4-hydroxy-L-proline, an amino acid derivative obtained through food intake and collagen turnover. Glyoxylate is one of the downstream products of hydroxyproline catabolism, which in people with disorders of glyoxalate metabolism can lead to an increase in oxalate levels and the formation of calcium-oxalate kidney stones. PRODH2 is also known as proline dehydrogenase, HYPDH, HSPOX1, and hydroxyproline dehydrogenase.

[0265] The sequence of a human PRODH2 mRNA transcript can be found at, for example, GenBank Accession No. GI: 1818882103 (NM_021232.2; SEQ ID NO:4641; reverse complement, SEQ ID NO: 4642). The sequence of mouse PRODH2 mRNA can be found at, for example, GenBank Accession No. GI: 142372879 (NM_019546.5; SEQ ID NO:4643; reverse complement, SEQ ID NO: 4644). The sequence of rat PRODH2 mRNA can be found at, for example, GenBank Accession No. GI: 198278487 (NM_001038588.1; SEQ ID NO:4645; reverse complement, SEQ ID NO: 4646). The sequence of Macaca fascicularis PRODH2 mRNA can be found at, for example, GenBank Accession No. GI: 982316449 (XM_005588902.2; SEQ ID NO: 4647; reverse complement, SEQ ID NO: 4648). The sequence of Macaca mulatta PRODH2 mRNA can be found at, for example, GenBank Accession No. GI: 1622893613 (XM_015123711.2; SEQ ID NO: 4649; reverse complement, SEQ ID NO: 4650).

[0266] Additional examples of PRODH2 mRNA sequences are readily available through publicly available databases, e.g., GenBank, UniProt, OMIM, and the Macaca genome project web site.

[0267] Further information on PRODH2 can be found, for example, at www.ncbi.nlm.nih.gov/gene/?term=PRODH2.

[0268] The entire contents of each of the foregoing GenBank Accession numbers and the Gene database numbers are incorporated herein by reference as of the date of filing this application.

[0269] The term PRODH2, as used herein, also refers to variations of the PRODH2 gene including variants provided in the SNP database. Numerous sequence variations within the PRODH2 gene have been identified and may be found at, for example, NCBI dbSNP and UniProt (see, e.g., www.ncbi.nlm.nih.gov/snp/?term=PRODH2, the entire contents of which is incorporated herein by reference as of the date of filing this application.

### II. Methods of the Invention

[0270] The present invention provides a method for inhibiting the expression of hydroxyacid oxidase (HAO1) in a subject, e.g., a human subject, having a non-primary hyperoxaluria disease or disorder that would benefit from reduction in urinary oxalate. The present invention also provides a method for reducing urinary oxalate levels, e.g., urinary oxalate is urinary calcium oxalate, e.g., urinary calcium oxalate supersaturation in a subject, e.g., a human subject, having a non-primary hyperoxaluria disease or disorder that would benefit from reduction in urinary oxalate. In addition, the present invention provides a method for treating a subject, e.g., a human subject, having a non-primary hyperoxaluria disease or disorder that would benefit from reduction in oxalate. The methods include administering, e.g., subcutaneously administering, e.g., subcutaneous injection, to the subject a fixed dose of about 200 mg to about 600 mg, e.g., about 284 mg or about 567 mg, of a double stranded ribonucleic acid (dsRNA) agent, or salt thereof, which inhibits the expression of of HAO1, thereby inhibiting the expression of HAO1 in the subject.

[0271] In other aspects, the present invention also provides a method for treating a subject having a non-primary hyperoxaluria disease or disorder that would benefit from reduction in oxalate. The method includes administering to the subject a therapeutically effective amount of a nucleic acid inhibitor of hydroxyacid oxidase (HAO1) and/or a nucleic acid inhibitor of Proline Dehydrogenase 2 (PRODH2), thereby treating the subject having the non-primary hyperoxaluria disease or disorder that would benefit from reduction in oxalate.

[0272] In addition, the present invention also provides a method of treating a subject at risk of developing a non-primary hyperoxaluria disease or disorder that would benefit from reduction in oxalate. The method includes administering to the subject a therapeutically effective amount of a nucleic acid inhibitor of lactate dehydrogenase A (LDHA), a nucleic acid inhibitor of hydroxyacid oxidase (HAO1), and/or a nucleic acid inhibitor of Proline Dehydrogenase 2 (PRODH2), thereby treating the subject at risk of developing the non-primary hyperoxaluria disease or disorder that would benefit from reduction in oxalate.

[0273] Subjects having a non-primary hyperoxaluria disease or disorder that would benefit from reduction in oxalate include subjects having an elevated level of oxalate, e.g., a mild hyperoxaluria condition, i.e., a urinary calcium oxalate excretion level of about 40 to about 60 mg/day, or a high hyperoxaluria condition, i.e., a urinary calcium oxalate excretion level of greater than about 60 mg/day. In one embodiment, subjects having a high hyperoxaluria condition have a supersaturation level of calcium oxalate, e.g., calcium oxalate (i.e., the concentration in urine is above the solubility of oxalate that drives crystallization and kidney stone formation). In other embodiments, subjects having a high hyperoxaluria condition do not have a supersaturation level of calcium oxalate, e.g., calcium oxalate. In some embodiments, subjects at risk of developing a non-primary hyperoxaluria disease or disorder, are subjects having a normal level of urinary oxalate excretion, i.e., a urinary oxalate excretion level of <40 mg/day and would still benefit from a reduction in oxalate.

[0274] Such subjects include those who suffer from a secondary hyperoxaluria, e.g., enteric hyperoxaluria, dietary hyperoxaluria, or idiopathic hyperoxaluria, a kidney stone disease, chronic kidney disease (CKD), end-stage renal disease (ESRD), coronary artery disease, cutaneous oxalate deposition, or ethylene glycol poisoning. Such subjects also include those who are planning to undergo kidney transplantation or have undergone kidney transplantation.

[0275] In the methods of the present invention, subjects having a non-primary hyperoxaluria disease or disorder that would benefit from reduction in oxalate do not have primary hyperoxaluria (PH), i.e., PH1, PH2, or PH3.

[0276] In some embodiments, the non-primary hyperoxaluria disease or disorder is a kidney stone disease, e.g., calcium oxalate kidney stone disease, e.g., recurrent calcium oxalate kidney stone disease.

[0277] Administration of the dsRNA agent, or salt thereof, is to a subject may be repeated on a regular basis, for example, at an interval of once every three months, or once every six months.

[0278] In one embodiment, the dsRNA agent, or salt thereof, is administered to the subject at an interval of once every six months.

[0279] In other embodiment, the dsRNA agent, or salt thereof, is administered to the subject initially, at three months, and every six months thereafter.

[0280] Administration of the dsRNA, or salt thereof, to the subject may, e.g., reduce urinary oxalate levels, e.g., urinary calcium oxalate, urinary calcium oxalate supersaturation, e.g., by about ≥20% from baseline as assessed in a 24-hour urinary oxalate analysis, and/or reduce clinical and radiographic kidney stone events.

[0281] When the subject to be treated is a mammal such as a human, the nucleic acid inhibitor can be administered by any means known in the art including, but not limited to oral, intraperitoneal, or parenteral routes, including intracranial (e.g., intraventricular, intraparenchymal and intrathecal), intravenous, intramuscular, subcutaneous, transdermal, airway (aerosol), nasal, rectal, and topical (including buccal and sublingual) administration. In certain embodiments, the compositions are administered by intravenous infusion or injection. In certain embodiments, the compositions are administered by subcutaneous injection.

[0282] In some embodiments, the administration is via a depot injection. A depot injection may release the nucleic acid inhibitor in a consistent way over a prolonged time period. Thus, a depot injection may reduce the frequency of dosing needed to obtain a desired effect, e.g., a desired inhibition of LDHA or HAO1 or PRODH2, or a desired inhibition of both LDHA and HAO1, or a therapeutic or prophylactic effect. A depot injection may also provide more consistent serum concentrations. Depot injections may include subcutaneous injections or intramuscular injections. In certain embodiments, the depot injection is a subcutaneous injection.

[0283] In some embodiments, the administration is via a pump. The pump may be an external pump or a surgically implanted pump. In certain embodiments, the pump is a subcutaneously implanted osmotic pump. In other embodiments, the pump is an infusion pump. An infusion pump may be used for intravenous, subcutaneous, arterial, or epidural infusions. In certain embodiments, the infusion pump is a subcutaneous infusion pump. In other embodiments, the pump is a surgically implanted pump that delivers the nucleic acid inhibitor to the liver.

[0284] A nucleic acid inhibitor of the invention, e.g., the dsRNA agent, or salt thereof, may be present in a pharmaceutical composition, such as in a suitable buffer solution. The buffer solution may comprise acetate, citrate, prolamine, carbonate, or phosphate, or any combination thereof. In one embodiment, the buffer solution is phosphate buffered saline (PBS). The pH and osmolarity of the buffer solution containing the iRNA can be adjusted such that it is suitable for administering to a subject.

[0285] Alternatively, a nucleic acid inhibitor of the invention may be administered as a pharmaceutical composition, such as a dsRNA liposomal formulation.

[0286] The mode of administration may be chosen based upon whether local or systemic treatment is desired and based upon the area to be treated. The route and site of administration may be chosen to enhance targeting.

[0287] The methods (and uses) of the invention include administering to the subject, e.g., a human, a therapeutically effective amount of a nucleic acid inhibitor, e.g., a dsRNA agent, a dual targeting iRNA agent, a single stranded antisense polynucleotide agent, or a pharmaceutical composition comprising a nucleic acid inhibitor, e.g., a dsRNA, a pharmaceutical composition comprising a dual targeting RNAi agent, a pharmaceutical composition of the invention comprising a first dsRNA agent that inhibits expression of LDHA and a second dsRNA agent that inhibits expression of HAO1, or a pharmaceutical composition of the invention comprising a single stranded antisense polynucleotide agent.

[0288] Subjects that would benefit from the methods of the invention include subjects having or at risk of developing a non-primary hyperoxaluria disease.

[0289] In the methods (and uses) of the invention which comprise administering to a subject a first nucleic acid inhibitor, such as a dsRNA agent targeting LDHA and a second dsRNA agent targeting HAO1, the first and second nucleic acid inhibitor may be formulated in the same composition or different compositions and may administered to the subject in the same composition or in separate compositions.

[0290] The nucleic acid inhibitor may be administered to the subject at a dose of about 0.1 mg/kg to about 50 mg/kg. Typically, a suitable dose will be in the range of about 0.1 mg/kg to about 5.0 mg/kg, such as about 0.3 mg/kg and about 3.0 mg/kg.

[0291] In the methods (and uses) of the invention which comprise administering to a subject a first nucleic acid inhibitor, e.g., dsRNA agent targeting LDHA and a second dsRNA agent targeting HAO1, the first and second nucleic acid inhibitor may be administered to a subject at the same dose or different doses.

[0292] The nucleic acid inhibitor can be administered by intravenous infusion over a period of time, on a regular basis. In certain embodiments, after an initial treatment regimen, the treatments can be administered on a less frequent basis.

[0293] Administration of a nucleic acid inhibitor can reduce LDHA levels, e.g., in a cell, tissue, blood, urine or other compartment of the patient by at least about 5%, 6, 7, 8, 9, 10, 11, 12, 13, 14, 15, 16, 17, 18, 19, 20, 21, 22, 23, 24, 25, 26, 27, 28, 29, 30, 31, 32, 33, 34, 35, 36, 37, 38, 39, 40, 41, 42, 43, 44, 45, 46, 47, 48, 39, 50, 51, 52, 53, 54, 55, 56, 57, 58, 59, 60, 61, 62, 63, 64, 65, 66, 67, 68, 69, 70, 71, 72, 73, 74, 75, 76, 77, 78, 79, 80, 81, 82, 83, 84, 85, 86, 87, 88, 89, 90, 91, 92, 93, 94, 95, 96, 97, 98, or at least about 99% or more. In one embodiment, administration of the nucleic acid inhibitor can reduce LDHA levels, e.g., in a cell, tissue, blood, urine or other compartment of the patient by at least 20%.

[0294] Administration of a nucleic acid inhibitor can reduce HAO1 levels, e.g., in a cell, tissue, blood, urine or other compartment of the patient by at least about 5%, 6, 7, 8, 9, 10, 11, 12, 13, 14, 15, 16, 17, 18, 19, 20, 21, 22, 23, 24, 25, 26, 27, 28, 29, 30, 31, 32, 33, 34, 35, 36, 37, 38, 39, 40, 41, 42, 43, 44, 45, 46, 47, 48, 39, 50, 51, 52, 53, 54, 55, 56, 57, 58, 59, 60, 61, 62, 63, 64, 65, 66, 67, 68, 69, 70, 71, 72, 73, 74, 75, 76, 77, 78, 79, 80, 81, 82, 83, 84, 85, 86, 87, 88, 89, 90, 91, 92, 93, 94, 95, 96, 97, 98, or at least about 99% or more. In one embodiment, administration of the nucleic acid inhibitor can reduce HAO1 levels, e.g., in a cell, tissue, blood, urine or other compartment of the patient by at least 20%.

[0295] Administration of a nucleic acid inhibitor can reduce PRODH2 levels, e.g., in a cell, tissue, blood, urine or other compartment of the patient by at least about 5%, 6, 7, 8, 9, 10, 11, 12, 13, 14, 15, 16, 17, 18, 19, 20, 21, 22, 23, 24, 25, 26, 27, 28, 29, 30, 31, 32, 33, 34, 35, 36, 37, 38, 39, 40, 41, 42, 43, 44, 45, 46, 47, 48, 39, 50, 51, 52, 53, 54, 55, 56, 57, 58, 59, 60, 61, 62, 63, 64, 65, 66, 67, 68, 69, 70, 71, 72, 73, 74, 75, 76, 77, 78, 79, 80, 81, 82, 83, 84, 85, 86, 87, 88, 89, 90, 91, 92, 93, 94, 95, 96, 97, 98, or at least about 99% or more. In one embodiment, administration of the nucleic acid inhibitor can reduce PRODH2 levels, e.g., in a cell, tissue, blood, urine or other compartment of the patient by at least 20%.

[0296] In the methods (and uses) of the invention which comprise administering to a subject a first nucleic acid inhibitor, e.g., a dsRNA agent targeting LDHA and a second nucleic acid inhibitor, e.g., a dsRNA agent targeting HAO1, the level of inhibition of LDHA may be the same or different that the level of inhibition of HAO1.

[0297] In the methods (and uses) of the invention which comprise administering to a subject a dual targeting RNAi agent, the dual targeting RNAi agent may inhibit expression of the LDHA gene and the HAO1 gene to a level substantially the same as the level of inhibition of expression obtained by the contacting of a cell with both dsRNA agents individually, or the dual targeting RNAi agent may inhibit expression of the LDHA gene and the HAO1 gene to a level higher than the level of inhibition of expression obtained by the contacting of a cell with both dsRNA agents individually.

[0298] Before administration of a full dose of the nucleic acid inhibitor, patients can be administered a smaller dose, such as a 5% infusion reaction, and monitored for adverse effects, such as an allergic reaction. In another example, the patient can be monitored for unwanted immunostimulatory effects, such as increased cytokine (e.g., TNF-alpha or INF-alpha) levels.

[0299] Alternatively, the nucleic acid inhibitor can be administered subcutaneously, i.e., by subcutaneous injection. One or more injections may be used to deliver the desired dose of nucleic acid inhibitor to a subject. The injections may be repeated over a period of time. The administration may be repeated on a regular basis. In certain embodiments, after an initial treatment regimen, the treatments can be administered on a less frequent basis. A repeat-dose regimine may include administration of a therapeutic amount of nucleic acid inhibitor on a regular basis, such as every other day, on a monthly basis, or once a year. In certain embodiments, the nucleic acid inhibitor is administered about once per month to about once per quarter (i.e., about once every three months).

[0300] In one embodiment, the method includes administering a composition featured herein such that expression of the target LDHA gene, the target PRODH2 gene and/or the target HAO1 gene is decreased, such as for about 1, 2, 3, 4, 5, 6, 7, 8, 12, 16, 18, 24 hours, 28, 32, or about 36 hours. In one embodiment, expression of the target LDHA gene, the target PRODH2 gene and/or the HAO1 gene is decreased for an extended duration, e.g., at least about two, three, four days or more, e.g., about one week, two weeks, three weeks, or four weeks or longer.

[0301] In some embodiments, the nucleic acid inhibitors useful for the methods and compositions featured herein specifically target RNAs (primary or processed) of the target LDHA, PRODH2 and/or HAO1 genes. Compositions and methods for inhibiting the expression of these genes using iRNAs can be prepared and performed as described herein.

[0302] Administration of the nucleic acid inhibitors according to the methods of the invention may result in a reduction of the severity, signs, symptoms, and/or markers of such diseases or disorders in a patient with a kidney stone disease. By “reduction” in this context is meant a statistically significant decrease in such level. The reduction can be, for example, at least about 5%, 10%, 15%, 20%, 25%, 30%, 35%, 40%, 45%, 50%, 55%, 60%, 65%, 70%, 75%, 80%, 85%, 90%, 95%, or about 100%.

[0303] Efficacy of treatment or prevention of kidney stone disease can be assessed, for example by measuring disease progression, disease remission, symptom severity, reduction in pain, quality of life, dose of a medication required to sustain a treatment effect, level of a disease marker or any other measurable parameter appropriate for a given disease being treated or targeted for prevention. It is well within the ability of one skilled in the art to monitor efficacy of treatment or prevention by measuring any one of such parameters, or any combination of parameters. Comparisons of the later readings with the initial readings provide a physician an indication of whether the treatment is effective. It is well within the ability of one skilled in the art to monitor efficacy of treatment or prevention by measuring any one of such parameters, or any combination of parameters. In connection with the administration of a nucleic acid inhibitor or pharmaceutical composition thereof, “effective against” indicates that administration in a clinically appropriate manner results in a beneficial effect for at least a statistically significant fraction of patients, such as a improvement of symptoms, a cure, a reduction in disease, extension of life, improvement in quality of life, or other effect generally recognized as positive by medical doctors familiar with treating a kidney stone disease and the related causes.

[0304] A treatment or preventive effect is evident when there is a statistically significant improvement in one or more parameters of disease status, or by a failure to worsen or to develop symptoms where they would otherwise be anticipated. As an example, a favorable change of at least 10% in a measurable parameter of disease, and such as, at least 20%, 30%, 40%, 50% or more can be indicative of effective treatment. Efficacy for a given nucleic acid inhibitor or formulation of that nucleic acid inhibitor can also be judged using an experimental animal model for the given disease as known in the art, such as alanine-glyoxylate amino transferase deficient (Agxt knockout) mice (see, e.g., Salido, et al. (2006) Proc Natl Acad Sci USA 103:18249) and/or glyoxylate reductase/hydroxypyruvate reductase deficient (Grhpr knockout) mice (see, e.g., Knight, et al. (2011) Am J Physiol Renal Physiol 302:F688).

[0305] The invention further provides methods for the use of a nucleic acid inhibitor or a pharmaceutical composition of the invention, e.g., for treating a subject having or at risk of developing a non-primary hyperoxaluria disease that would benefit from reduction in oxalate, in combination with other pharmaceuticals and/or other therapeutic methods, e.g., with known pharmaceuticals and/or known therapeutic methods, such as, for example, those which are currently employed for treating these disorders. For example, in certain embodiments, a nucleic acid inhibitor or pharmaceutical composition of the invention is administered in combination with, e.g., pyridoxine, an ACE inhibitor (angiotensin converting enzyme inhibitors), e.g., benazepril (Lotensin); an angiotensin II receptor antagonist (ARB) (e.g., losartan potassium, such as Merck & Co.'s Cozaar®), e.g., Candesartan (Atacand); an HMG-CoA reductase inhibitor (e.g., a statin); dietary oxalate degrading compounds, e.g., Oxalate decarboxylase (Oxazyme); calcium binding agents, e.g., Sodium cellulose phosphate (Calcibind); diuretics, e.g., thiazide diuretics, such as hydrochlorothiazide (Microzide); phosphate binders, e.g., Sevelamer (Renagel); magnesium and Vitamin B6 supplements; potassium citrate; orthophosphates, bisphosphonates; oral phosphate and citrate solutions; high fluid intake, urinary tract endoscopy; extracorporeal shock wave lithotripsy; kidney dialysis; kidney stone removal (e.g., surgery); and kidney/liver transplant; or a combination of any of the foregoing.

### III. Nucleic Acid Inhibitors for Use in the Methods of the Invention

### A. Double Stranded Ribonucleic Acid Agents of the Invention

[0306] In one embodiment, a nucleic acid inhibitor for use in the methods of the invention is a dsRNA agent. In one embodiment, the dsRNA agent targets an LDHA gene. In one embodiment, the dsRNA agent targets a PRODH2 gene. In another embodiment, the dsRNA agent targets an HAO1 gene. In one embodiment, the dsRNA agent is a dual targeting dsRNA agent targeting an LDHA gene and an HAO1 gene.

[0307] Suitable dsRNA agents for use in the methods of the invention are known in the art and described in, for example, U.S. Patent Publication No. 20200113927 (Alnylam Pharmaceuticals, Inc.); U.S. Patent Publication Nos. 2017/0304446 (Lumasiran) (Alnylam Pharmaceuticals, Inc.), 2017/0306332 (Dicerna Pharmaceuticals), and 2019/0323014 (Dicerna Pharmaceuticals); U.S. Pat. No. 10,478,500 (Lumasiran) (Alnylam Pharmaceuticals, Inc.) and 10,351,854 (Dicerna Pharmaceuticals); and PCT Publication Nos. WO 2019/014530 (Attorney Docket No.: 121301-07520) and WO 2019/075419 (Dicerna Pharmaceuticals), the entire contents of each of which are incorporated herein by reference. Any of these agents may further comprise a ligand. In one embodiment, a suitable dsRNA agent is nedosiran (formerly referred to as DCR-PHXC) (Dicerna Pharmaceuticals).

[0308] In certain specific embodiments, a nucleic acid inhibitor of the present invention is a dsRNA agent which inhibits the expression of an LDHA gene and is selected from the group of agents listed in any one of Tables 2-3. In other embodiments, a nucleic acid inhibitor of the present invention is a dsRNA agent which inhibits the expression of an HAO1 gene and is selected from the group of agents listed in any one of Tables 4-12. In other embodiments, a nucleic acid inhibitor of the present invention is a dsRNA agent which inhibits the expression of a PRODH2 gene and is selected from the group of agents listed in any one of Tables 15-16. In yet other embodiments, nucleic acid inhibitor of the present invention is an dual targeting iRNA agent that inhibits the expression of an LDHA gene and an HAO1 gene, wherein the first dsRNA inhibits expression of an LDHA gene and is selected from the group of agents listed in any one of Tables 2-3, and the first dsRNA inhibits expression of an HAO1 gene and is selected from the group of agents listed in any one of Tables 4-12.

[0309] The dsRNAs of the invention targeting LDHA may include an RNA strand (the antisense strand) having a region which is about 30 nucleotides or less in length, e.g., 15-30, 15-29, 15-28, 15-27, 15-26, 15-25, 15-24, 15-23, 15-22, 15-21, 15-20, 15-19, 15-18, 15-17, 18-30, 18-29, 18-28, 18-27, 18-26, 18-25, 18-24, 18-23, 18-22, 18-21, 18-20, 19-30, 19-29, 19-28, 19-27, 19-26, 19-25, 19-24, 19-23, 19-22, 19-21, 19-20, 20-30, 20-29, 20-28, 20-27, 20-26, 20-25, 20-24, 20-23, 20-22, 20-21, 21-30, 21-29, 21-28, 21-27, 21-26, 21-25, 21-24, 21-23, or 21-22 nucleotides in length, which region is substantially complementary to at least part of an mRNA transcript of an LDHA gene.

[0310] The dsRNAs of the invention targeting HAO1 may include an RNA strand (the antisense strand) having a region which is about 30 nucleotides or less in length, e.g., 15-30, 15-29, 15-28, 15-27, 15-26, 15-25, 15-24, 15-23, 15-22, 15-21, 15-20, 15-19, 15-18, 15-17, 18-30, 18-29, 18-28, 18-27, 18-26, 18-25, 18-24, 18-23, 18-22, 18-21, 18-20, 19-30, 19-29, 19-28, 19-27, 19-26, 19-25, 19-24, 19-23, 19-22, 19-21, 19-20, 20-30, 20-29, 20-28, 20-27, 20-26, 20-25, 20-24, 20-23, 20-22, 20-21, 21-30, 21-29, 21-28, 21-27, 21-26, 21-25, 21-24, 21-23, or 21-22 nucleotides in length, which region is substantially complementary to at least part of an mRNA transcript of an HAO1 gene.

[0311] The dsRNAs of the invention targeting PRODH2 may include an RNA strand (the antisense strand) having a region which is about 30 nucleotides or less in length, e.g., 15-30, 15-29, 15-28, 15-27, 15-26, 15-25, 15-24, 15-23, 15-22, 15-21, 15-20, 15-19, 15-18, 15-17, 18-30, 18-29, 18-28, 18-27, 18-26, 18-25, 18-24, 18-23, 18-22, 18-21, 18-20, 19-30, 19-29, 19-28, 19-27, 19-26, 19-25, 19-24, 19-23, 19-22, 19-21, 19-20, 20-30, 20-29, 20-28, 20-27, 20-26, 20-25, 20-24, 20-23, 20-22, 20-21, 21-30, 21-29, 21-28, 21-27, 21-26, 21-25, 21-24, 21-23, or 21-22 nucleotides in length, which region is substantially complementary to at least part of an mRNA transcript of a PRODH2 gene.

[0312] When the dsRNA agent is a dual targeting agent, as described herein, the agent targeting LDHA may include an antisense strand comprising a region of complementarity to LDHA which is the same length or a different length from the region of complementarity of the antisense strand of the agent targeting HAO1.

[0313] In some embodiments, one or both of the strands of the double stranded RNAi agents of the invention is up to 66 nucleotides in length, e.g., 36-66, 26-36, 25-36, 31-60, 22-43, 27-53 nucleotides in length, with a region of at least 19 contiguous nucleotides that is substantially complementary to at least a part of an mRNA transcript of an LDHA gene. In some embodiments, such dsRNA agents having longer length antisense strands may include a second RNA strand (the sense strand) of 20-60 nucleotides in length wherein the sense and antisense strands form a duplex of 18-30 contiguous nucleotides.

[0314] In other embodiments, one or both of the strands of the double stranded RNAi agents of the invention is up to 66 nucleotides in length, e.g., 36-66, 26-36, 25-36, 31-60, 22-43, 27-53 nucleotides in length, with a region of at least 19 contiguous nucleotides that is substantially complementary to at least a part of an mRNA transcript of an HAO1 gene. In some embodiments, such dsRNA agents having longer length antisense strands may include a second RNA strand (the sense strand) of 20-60 nucleotides in length wherein the sense and antisense strands form a duplex of 18-30 contiguous nucleotides.

[0315] In embodiments in which a first dsRNA agent targeting LDHA and a second dsRNA agent targeting HAO1 are covalently attached, the duplex lengths of the first agent and the second agent may be the same or different.

[0316] The use of these dsRNA agents described herein enables the targeted degradation of mRNAs of an LDHA gene, a PRODH2 gene and/or an HAO1 gene in mammals.

[0317] The dsRNA includes an antisense strand having a region of complementarity which is complementary to at least a part of an mRNA formed in the expression of an LDHA gene or an HAO1 gene or a PRODH2 gene. The region of complementarity is about 30 nucleotides or less in length (e.g., about 30, 29, 28, 27, 26, 25, 24, 23, 22, 21, 20, 19, or 18 nucleotides or less in length). Upon contact with a cell expressing the target gene, the iRNA inhibits the expression of the target gene (e.g., a human, a primate, a non-primate, or a bird target gene) by at least about 10% as assayed by, for example, a PCR or branched DNA (bDNA)-based method, or by a protein-based method, such as by immunofluorescence analysis, using, for example, Western Blotting or flowcytometric techniques.

[0318] A dsRNA includes two RNA strands that are complementary and hybridize to form a duplex structure under conditions in which the dsRNA will be used. One strand of a dsRNA (the antisense strand) includes a region of complementarity that is substantially complementary, and generally fully complementary, to a target sequence. The target sequence can be derived from the sequence of an mRNA formed during the expression of an LDHA gene or an HAO1 gene or a PRODH2 gene. The other strand (the sense strand) includes a region that is complementary to the antisense strand, such that the two strands hybridize and form a duplex structure when combined under suitable conditions. As described elsewhere herein and as known in the art, the complementary sequences of a dsRNA can also be contained as self-complementary regions of a single nucleic acid molecule, as opposed to being on separate oligonucleotides.

[0319] Generally, the duplex structure is between 15 and 30 base pairs in length, e.g., between, 15-29, 15-28, 15-27, 15-26, 15-25, 15-24, 15-23, 15-22, 15-21, 15-20, 15-19, 15-18, 15-17, 18-30, 18-29, 18-28, 18-27, 18-26, 18-25, 18-24, 18-23, 18-22, 18-21, 18-20, 19-30, 19-29, 19-28, 19-27, 19-26, 19-25, 19-24, 19-23, 19-22, 19-21, 19-20, 20-30, 20-29, 20-28, 20-27, 20-26, 20-25, 20-24, 20-23, 20-22, 20-21, 21-30, 21-29, 21-28, 21-27, 21-26, 21-25, 21-24, 21-23, or 21-22 base pairs in length. Ranges and lengths intermediate to the above recited ranges and lengths are also contemplated to be part of the invention.

[0320] Similarly, the region of complementarity to the target sequence is between 15 and 30 nucleotides in length, e.g., between 15-29, 15-28, 15-27, 15-26, 15-25, 15-24, 15-23, 15-22, 15-21, 15-20, 15-19, 15-18, 15-17, 18-30, 18-29, 18-28, 18-27, 18-26, 18-25, 18-24, 18-23, 18-22, 18-21, 18-20, 19-30, 19-29, 19-28, 19-27, 19-26, 19-25, 19-24, 19-23, 19-22, 19-21, 19-20, 20-30, 20-29, 20-28, 20-27, 20-26, 20-25, 20-24, 20-23, 20-22, 20-21, 21-30, 21-29, 21-28, 21-27, 21-26, 21-25, 21-24, 21-23, or 21-22 nucleotides in length. Ranges and lengths intermediate to the above recited ranges and lengths are also contemplated to be part of the invention.

[0321] In some embodiments, the dsRNA is between about 15 and about 23 nucleotides in length, or between about 25 and about 30 nucleotides in length. In general, the dsRNA is long enough to serve as a substrate for the Dicer enzyme. For example, it is well known in the art that dsRNAs longer than about 21-23 nucleotides can serve as substrates for Dicer. As the ordinarily skilled person will also recognize, the region of an RNA targeted for cleavage will most often be part of a larger RNA molecule, often an mRNA molecule. Where relevant, a “part” of an mRNA target is a contiguous sequence of an mRNA target of sufficient length to allow it to be a substrate for RNAi-directed cleavage (i.e., cleavage through a RISC pathway).

[0322] One of skill in the art will also recognize that the duplex region is a primary functional portion of a dsRNA, e.g., a duplex region of about 9 to 36 base pairs, e.g., about 10-36, 11-36, 12-36, 13-36, 14-36, 15-36, 9-35, 10-35, 11-35, 12-35, 13-35, 14-35, 15-35, 9-34, 10-34, 11-34, 12-34, 13-34, 14-34, 15-34, 9-33, 10-33, 11-33, 12-33, 13-33, 14-33, 15-33, 9-32, 10-32, 11-32, 12-32, 13-32, 14-32, 15-32, 9-31, 10-31, 11-31, 12-31, 13-32, 14-31, 15-31, 15-30, 15-29, 15-28, 15-27, 15-26, 15-25, 15-24, 15-23, 15-22, 15-21, 15-20, 15-19, 15-18, 15-17, 18-30, 18-29, 18-28, 18-27, 18-26, 18-25, 18-24, 18-23, 18-22, 18-21, 18-20, 19-30, 19-29, 19-28, 19-27, 19-26, 19-25, 19-24, 19-23, 19-22, 19-21, 19-20, 20-30, 20-29, 20-28, 20-27, 20-26, 20-25, 20-24, 20-23, 20-22, 20-21, 21-30, 21-29, 21-28, 21-27, 21-26, 21-25, 21-24, 21-23, or 21-22 base pairs. Thus, in one embodiment, to the extent that it becomes processed to a functional duplex, of e.g., 15-30 base pairs, that targets a desired RNA for cleavage, an RNA molecule or complex of RNA molecules having a duplex region greater than 30 base pairs is a dsRNA. Thus, an ordinarily skilled artisan will recognize that in one embodiment, a miRNA is a dsRNA. In another embodiment, a dsRNA is not a naturally occurring miRNA. In another embodiment, an iRNA agent useful to target LDHA or HAO1 or PRODH2 expression or LDHA and HAO1 expression is not generated in the target cell by cleavage of a larger dsRNA.

[0323] A dsRNA as described herein can further include one or more single-stranded nucleotide overhangs e.g., 1, 2, 3, or 4 nucleotides. dsRNAs having at least one nucleotide overhang can have unexpectedly superior inhibitory properties relative to their blunt-ended counterparts. A nucleotide overhang can comprise or consist of a nucleotide/nucleoside analog, including a deoxynucleotide/nucleoside. The overhang(s) can be on the sense strand, the antisense strand or any combination thereof. Furthermore, the nucleotide(s) of an overhang can be present on the 5-end, 3′-end or both ends of either an antisense or sense strand of a dsRNA.

[0324] A dsRNA can be synthesized by standard methods known in the art as further discussed below, e.g., by use of an automated DNA synthesizer, such as are commercially available from, for example, Biosearch, Applied Biosystems, Inc.

[0325] A dsRNA of the invention may be prepared using a two-step procedure. First, the individual strands of the double-stranded RNA molecule are prepared separately. Then, the component strands are annealed. The individual strands of the siRNA compound can be prepared using solution-phase or solid-phase organic synthesis or both. Organic synthesis offers the advantage that the oligonucleotide strands comprising unnatural or modified nucleotides can be easily prepared. Single-stranded oligonucleotides of the invention can be prepared using solution-phase or solid-phase organic synthesis or both.

[0326] In one aspect, a dsRNA of the invention targets an LDHA gene and includes at least two nucleotide sequences, a sense sequence and an anti-sense sequence. The sense strand sequence is selected from the group of sequences provided in any one of Tables 2-3 and the corresponding nucleotide sequence of the antisense strand is selected from the group of sequences of any one of Tables 2-3. In this aspect, one of the two sequences is complementary to the other of the two sequences, with one of the sequences being substantially complementary to a sequence of an mRNA generated in the expression of an LDHA gene. As such, in this aspect, a dsRNA will include two oligonucleotides, where one oligonucleotide is described as the sense strand (passenger strand) in any one of Tables 2-3 and the second oligonucleotide is described as the corresponding antisense strand (guide strand) of the sense strand in any one of Tables 2-3. In one embodiment, the substantially complementary sequences of the dsRNA are contained on separate oligonucleotides. In another embodiment, the substantially complementary sequences of the dsRNA are contained on a single oligonucleotide.

[0327] In another aspect, a dsRNA of the invention targets an HAO1 gene and includes at least two nucleotide sequences, a sense sequence and an anti-sense sequence. The sense strand sequence is selected from the group of sequences provided in any one of Tables 4-14 and the corresponding nucleotide sequence of the antisense strand of the sense strand is selected from the group of sequences of any one of Tables 4-14. In this aspect, one of the two sequences is complementary to the other of the two sequences, with one of the sequences being substantially complementary to a sequence of an mRNA generated in the expression of an HAO1 gene. As such, in this aspect, a dsRNA will include two oligonucleotides, where one oligonucleotide is described as the sense strand (passenger strand) in any one of Tables 4-14 and the second oligonucleotide is described as the corresponding antisense strand (guide strand) of the sense strand in any one of Tables 4-14. In one embodiment, the substantially complementary sequences of the dsRNA are contained on separate oligonucleotides. In another embodiment, the substantially complementary sequences of the dsRNA are contained on a single oligonucleotide.

[0328] In yet another aspect, a dsRNA of the invention targets a PRODH2 gene and includes at least two nucleotide sequences, a sense sequence and an anti-sense sequence. The sense strand sequence is selected from the group of sequences provided in any one of Tables 15-16 and the corresponding nucleotide sequence of the antisense strand of the sense strand is selected from the group of sequences of any one of Tables 15-16. In this aspect, one of the two sequences is complementary to the other of the two sequences, with one of the sequences being substantially complementary to a sequence of an mRNA generated in the expression of a PRODH2 gene. As such, in this aspect, a dsRNA will include two oligonucleotides, where one oligonucleotide is described as the sense strand (passenger strand) in any one of Tables 15-16 and the second oligonucleotide is described as the corresponding antisense strand (guide strand) of the sense strand in any one of Tables 15-16. In one embodiment, the substantially complementary sequences of the dsRNA are contained on separate oligonucleotides. In another embodiment, the substantially complementary sequences of the dsRNA are contained on a single oligonucleotide.

[0329] It will be understood that, although the sequences in Tables 2-16 are described as modified, unmodified, unconjugated. and/or conjugated sequences, the RNA of the dsRNA of the invention e.g., a dsRNA of the invention, may comprise any one of the sequences set forth in any one of Table 2-16 that is un-modified, un-conjugated, and/or modified and/or conjugated differently than described therein.

[0330] The skilled person is well aware that dsRNAs having a duplex structure of between about 20 and 23 base pairs, e.g., 21, base pairs have been hailed as particularly effective in inducing RNA interference (Elbashir et al., (2001) EMBO J., 20:6877-6888). However, others have found that shorter or longer RNA duplex structures can also be effective (Chu and Rana (2007) RNA 14:1714-1719; Kim et al. (2005) Nat Biotech 23:222-226). In the embodiments described above, by virtue of the nature of the oligonucleotide sequences provided herein, dsRNAs described herein can include at least one strand of a length of minimally 21 nucleotides. It can be reasonably expected that shorter duplexes minus only a few nucleotides on one or both ends can be similarly effective as compared to the dsRNAs described above. Hence, dsRNAs having a sequence of at least 15, 16, 17, 18, 19, 20, or more contiguous nucleotides derived from one of the sequences provided herein, and differing in their ability to inhibit the expression of an LDHA gene or an HAO1 gene or a PRODH2 gene by not more than about 5, 10, 15, 20, 25, or 30% inhibition from a dsRNA comprising the full sequence, are contemplated to be within the scope of the present invention.

[0331] In addition, the RNAs described in any one of Tables 2-3 identify a site(s) in an LDHA transcript that is susceptible to RISC-mediated cleavage, the RNAs described in any one of Tables 4-14 identify a site(s) in an HAO1 transcript that is susceptible to RISC-mediated cleavage, and those RNAs described in any one of Tables 15-16 identify a site(s) in a PRODH2 transcript that is susceptible to RISC-mediated cleavage. As such, the present invention further features iRNAs that target within this site(s). As used herein, an iRNA is said to target within a particular site of an RNA transcript if the iRNA promotes cleavage of the transcript anywhere within that particular site. Such an iRNA will generally include at least about 15 contiguous nucleotides from one of the sequences provided herein coupled to additional nucleotide sequences taken from the region contiguous to the selected sequence in the gene.

[0332] While a target sequence is generally about 15-30 nucleotides in length, there is wide variation in the suitability of particular sequences in this range for directing cleavage of any given target RNA. Various software packages and the guidelines set out herein provide guidance for the identification of optimal target sequences for any given gene target, but an empirical approach can also be taken in which a “window” or “mask” of a given size (as a non-limiting example, 21 nucleotides) is literally or figuratively (including, e.g., in silico) placed on the target RNA sequence to identify sequences in the size range that can serve as target sequences. By moving the sequence “window” progressively one nucleotide upstream or downstream of an initial target sequence location, the next potential target sequence can be identified, until the complete set of possible sequences is identified for any given target size selected. This process, coupled with systematic synthesis and testing of the identified sequences (using assays as described herein or as known in the art) to identify those sequences that perform optimally can identify those RNA sequences that, when targeted with an iRNA agent, mediate the best inhibition of target gene expression. Thus, while the sequences identified herein represent effective target sequences, it is contemplated that further optimization of inhibition efficiency can be achieved by progressively “walking the window” one nucleotide upstream or downstream of the given sequences to identify sequences with equal or better inhibition characteristics.

[0333] Further, it is contemplated that for any sequence identified herein, further optimization could be achieved by systematically either adding or removing nucleotides to generate longer or shorter sequences and testing those sequences generated by walking a window of the longer or shorter size up or down the target RNA from that point. Again, coupling this approach to generating new candidate targets with testing for effectiveness of iRNAs based on those target sequences in an inhibition assay as known in the art and/or as described herein can lead to further improvements in the efficiency of inhibition. Further still, such optimized sequences can be adjusted by, e.g., the introduction of modified nucleotides as described herein or as known in the art, addition or changes in overhang, or other modifications as known in the art and/or discussed herein to further optimize the molecule (e.g., increasing serum stability or circulating half-life, increasing thermal stability, enhancing transmembrane delivery, targeting to a particular location or cell type, increasing interaction with silencing pathway enzymes, increasing release from endosomes) as an expression inhibitor.

[0334] A dsRNA agent as described herein can contain one or more mismatches to the target sequence. In one embodiment, an iRNA as described herein contains no more than 3 mismatches. If the antisense strand of the iRNA contains mismatches to a target sequence, it is preferable that the area of mismatch is not located in the center of the region of complementarity. If the antisense strand of the iRNA contains mismatches to the target sequence, it is preferable that the mismatch be restricted to be within the last 5 nucleotides from either the 5′- or 3′-end of the region of complementarity. For example, for a 23 nucleotide iRNA agent the strand which is complementary to a region of an LDHA gene or an HAO1 gene or a PRODH2 gene, generally does not contain any mismatch within the central 13 nucleotides. The methods described herein or methods known in the art can be used to determine whether an iRNA containing a mismatch to a target sequence is effective in inhibiting the expression of an LDHA gene, a PRODH2 gene and/or an HAO1 gene. Consideration of the efficacy of iRNAs with mismatches in inhibiting expression of an LDHA gene, a PRODH2 gene and/or an HAO1 gene is important, especially if the particular region of complementarity in an LDHA gene, a PRODH2 gene and/or HAO1 gene is known to have polymorphic sequence variation within the population.

[0335] The dual targeting RNAi agents of the invention, which include two dsRNA agents, are covalently attached via, e.g., a covalent linker. Covalent linkers are well known in the art and include, e.g., nucleic acid linkers, peptide linkers, carbohydrate linkers, and the like. The covalent linker can include RNA and/or DNA and/or a peptide. The linker can be single stranded, double stranded, partially single strands, or partially double stranded. Modified nucleotides or a mixture of nucleotides can also be present in a nucleic acid linker.

[0336] Suitable linkers for use in the dual targeting agent of the invention include those described in U.S. Pat. No. 9,187,746, the entire contents of which are incorporated herein by reference.

In some embodiments the linker includes a disulfide bond. The linker can be cleavable or non-cleavable.

[0337] The linker can be, e.g., dTsdTuu=(5′-2′deoxythymidyl-3′-thiophosphate-5′-2′deoxythymidyl-3′-phosphate-5′-uridyl-3′-phosphate-5′-uridyl-3′-phosphate); rUsrU (a thiophosphate linker: 5′-uridyl-3′-thiophosphate-5′-uridyl-3′-phosphate); an rUrU linker; dTsdTaa (aadTsdT, 5′-2′deoxythymidyl-3′-thiophosphate-5′-2′deoxythymidyl-3′-phosphate-5′-adenyl-3′-phosphate-5′-adenyl-3′-phosphate); dTsdT (5′-2′deoxythymidyl-3′-thiophosphate-5′-2′ deoxythymidyl-3′-phosphate); dTsdTuu=uudTsdT=5′-2′deoxythymidyl-3′-thiophosphate-5′-2′deoxythymidyl-3′-phosphate-5′-uridyl-3′-phosphate-5′-uridyl-3′-phosphate.

[0338] The linker can be a polyRNA, such as poly(5′-adenyl-3′-phosphate-AAAAAAAA) or poly(5′-cytidyl-3′-phosphate-5′-uridyl-3′-phosphate-CUCUCUCU)), e.g., Xn single stranded poly RNA linker wherein n is an integer from 2-50 inclusive, such as, 4-15 inclusive, or 7-8 inclusive. Modified nucleotides or a mixture of nucleotides can also be present in said polyRNA linker. The covalent linker can be a polyDNA, such as poly(5′-2′deoxythymidyl-3′-phosphate-TTTTTTTT), e.g., wherein n is an integer from 2-50 inclusive, such as 4-15 inclusive, or 7-8 inclusive. Modified nucleotides or a mixture of nucleotides can also be present in said polyDNA linker, a single stranded polyDNA linker wherein n is an integer from 2-50 inclusive, such as 4-15 inclusive, or 7-8 inclusive. Modified nucleotides or a mixture of nucleotides can also be present in said polyDNA linker.

[0339] The linker can include a disulfide bond, optionally a bis-hexyl-disulfide linker. In one embodiment, the disulfide linker is

[chemical structure]

[0340] The linker can include a peptide bond, e.g., include amino acids. In one embodiment, the covalent linker is a 1-10 amino acid long linker, such as, comprising 4-5 amino acids, optionally X-Gly-Phe-Gly-Y wherein X and Y represent any amino acid.

[0341] The linker can include HEG, a hexaethyleneglycol linker.

[0342] The covalent linker can attach the sense strand of the first dsRNA agent to the sense strand of the second dsRNA agent; the antisense strand of the first dsRNA agent to the antisense strand of the second dsRNA agent; the sense strand of the first dsRNA agent to the antisense strand of the second dsRNA agent; or the antisense strand of the first dsRNA agent to the sense strand of the second dsRNA agent.

[0343] In some embodiments, the covalent linker further comprises at least one ligand, described below.

i. Modified dsRNA Agent of the Invention

[0344] In one embodiment, the nucleic acid, e.g., RNA, of a nucleic acid inhibitor of the invention is un-modified, and does not comprise, e.g., chemical modifications and/or conjugations known in the art and described herein. In another embodiment, the nucleic acid, e.g., RNA, of a nucleic acid inhibitor of the invention is chemically modified to enhance stability or other beneficial characteristics. In certain embodiments of the invention, substantially all of the nucleotides of a nucleic acid inhibitor of the invention are modified. In other embodiments of the invention, all of the nucleotides of a nucleic acid inhibitor of the invention are modified. Nucleic acid inhibitors of the invention in which “substantially all of the nucleotides are modified” are largely but not wholly modified and can include not more than 5, 4, 3, 2, or 1 unmodified nucleotides.

[0345] In embodiments in which a first nucleic acid inhibitor, e.g., dsRNA agent targeting LDHA, and a second nucleic acid inhibitor, e.g., dsRNA agent targeting HAO1, are covalently attached (i.e., a dual targeting RNAi agent), substantially all of the nucleotides of the first agent and substantially all of the nucleotides of the second agent may be independently modified; all of the nucleotides of the first agent may be modified and all of the nucleotides of the second agent may be independently modified; substantially all of the nucleotides of the first agent and all of the nucleotides of the second agent may be independently modified; or all of the nucleotides of the first agent may be modified and substantially all of the nucleotides of the second agent may be independently modified.

[0346] In some aspects of the invention, substantially all of the nucleotides of a nucleic acid inhibitor of the invention are modified and the nucleic acid inhibitors comprise no more than 10 nucleotides comprising 2′-fluoro modifications (e.g., no more than 9 2′-fluoro modifications, no more than 8 2′-fluoro modifications, no more than 7 2′-fluoro modifications, no more than 6 2′-fluoro modifications, no more than 5 2′-fluoro modifications, no more than 4 2′-fluoro modifications, no more than 5 2′-fluoro modifications, no more than 4 2′-fluoro modifications, no more than 3 2′-fluoro modifications, or no more than 2 2′-fluoro modifications). For example, in some embodiments, the sense strand comprises no more than 4 nucleotides comprising 2′-fluoro modifications (e.g., no more than 3 2′-fluoro modifications, or no more than 2 2′-fluoro modifications). In other embodiments, the antisense strand comprises no more than 6 nucleotides comprising 2′-fluoro modifications (e.g., no more than 5 2′-fluoro modifications, no more than 4 2′-fluoro modifications, no more than 4 2′-fluoro modifications, or no more than 2 2′-fluoro modifications).

[0347] In embodiments in which a first nucleic acid inhibitor, e.g., dsRNA agent targeting LDHA, and a second nucleic acid inhibitor, e.g., dsRNA agent targeting HAO1, are covalently attached (i.e., a dual targeting RNAi agent), substantially all of the nucleotides of the first agent and/or substantially all of the nucleotides of the second agent may be independently modified and the first and second agents may independently comprise no more than 10 nucleotides comprising 2′-fluoro modifications.

[0348] In other aspects of the invention, all of the nucleotides of a nucleic acid inhibitor of the invention are modified and the nucleic acid inhibitors comprise no more than 10 nucleotides comprising 2′-fluoro modifications (e.g., no more than 9 2′-fluoro modifications, no more than 8 2′-fluoro modifications, no more than 7 2′-fluoro modifications, no more than 6 2′-fluoro modifications, no more than 5 2′-fluoro modifications, no more than 4 2′-fluoro modifications, no more than 5 2′-fluoro modifications, no more than 4 2′-fluoro modifications, no more than 3 2′-fluoro modifications, or no more than 2 2′-fluoro modifications).

[0349] In embodiments in which a first nucleic acid inhibitor, e.g., dsRNA agent targeting LDHA, and a second nucleic acid inhibitor, e.g., dsRNA agent targeting HAO1, are covalently attached (i.e., a dual targeting RNAi agent), all of the nucleotides of the first agent and/or all of the nucleotides of the second agent may be independently modified and the first and second agents may independently comprise no more than 10 nucleotides comprising 2′-fluoro modifications.

[0350] In one embodiment, a nucleic acid inhibitor of the invention further comprises a 5′-phosphate or a 5′-phosphate mimic at the 5′ nucleotide of the antisense strand. In another embodiment, the double stranded RNAi agent further comprises a 5′-phosphate mimic at the 5′ nucleotide of the antisense strand. In a specific embodiment, the 5′-phosphate mimic is a 5′-vinyl phosphonate (5′-VP).

[0351] In embodiments in which a first nucleic acid inhibitor, e.g., dsRNA agent targeting LDHA, and a second nucleic acid inhibitor, e.g., dsRNA agent targeting HAO1, are covalently attached (i.e., a dual targeting RNAi agent), the first agent may further comprise a 5′-phosphate or a 5′-phosphate mimic at the 5′ nucleotide of the antisense strand; the second agent may further comprise a 5′-phosphate or a 5′-phosphate mimic at the 5′ nucleotide of the antisense strand; or the first agent and the second agent may further independently comprise a 5′-phosphate or a 5′-phosphate mimic at the 5′ nucleotide of the antisense strand.

[0352] The nucleic acids featured in the invention can be synthesized and/or modified by methods well established in the art, such as those described in “Current protocols in nucleic acid chemistry,” Beaucage, S. L. et al. (Edrs.), John Wiley & Sons, Inc., New York, NY, USA, which is hereby incorporated herein by reference. Modifications include, for example, end modifications, e.g., 5′-end modifications (phosphorylation, conjugation, inverted linkages) or 3′-end modifications (conjugation, DNA nucleotides, inverted linkages, etc.); base modifications, e.g., replacement with stabilizing bases, destabilizing bases, or bases that base pair with an expanded repertoire of partners, removal of bases (abasic nucleotides), or conjugated bases; sugar modifications (e.g., at the 2′-position or 4′-position) or replacement of the sugar; and/or backbone modifications, including modification or replacement of the phosphodiester linkages. Specific examples of nucleic acid inhibitor compounds useful in the embodiments described herein include, but are not limited to nucleic acid inhibitors containing modified backbones or no natural internucleoside linkages. Nucleic acid inhibitors having modified backbones include, among others, those that do not have a phosphorus atom in the backbone. For the purposes of this specification, and as sometimes referenced in the art, modified nucleic acid inhibitors that do not have a phosphorus atom in their internucleoside backbone can also be considered to be oligonucleosides. In some embodiments, a modified nucleic acid inhibitor will have a phosphorus atom in its internucleoside backbone.

[0353] Modified nucleic acid inhibitor backbones include, for example, phosphorothioates, chiral phosphorothioates, phosphorodithioates, phosphotriesters, aminoalkylphosphotriesters, methyl and other alkyl phosphonates including 3′-alkylene phosphonates and chiral phosphonates, phosphinates, phosphoramidates including 3′-amino phosphoramidate and aminoalkylphosphoramidates, thionophosphoramidates, thionoalkylphosphonates, thionoalkylphosphotriesters, and boranophosphates having normal 3′-5′ linkages, 2′-5′-linked analogs of these, and those having inverted polarity wherein the adjacent pairs of nucleoside units are linked 3′-5′ to 5′-3′ or 2′-5′ to 5′-2′. Various salts, mixed salts and free acid forms are also included.

[0354] Representative U.S. patents that teach the preparation of the above phosphorus-containing linkages include, but are not limited to, U.S. Pat. Nos. 3,687,808; 4,469,863; 4,476,301; 5,023,243; 5,177,195; 5,188,897; 5,264,423; 5,276,019; 5,278,302; 5,286,717; 5,321,131; 5,399,676; 5,405,939; 5,453,496; 5,455,233; 5,466,677; 5,476,925; 5,519,126; 5,536,821; 5,541,316; 5,550,111; 5,563,253; 5,571,799; 5,587,361; 5,625,050; 6,028,188; 6,124,445; 6,160,109; 6,169,170; 6,172,209; 6,239,265; 6,277,603; 6,326,199; 6,346,614; 6,444,423; 6,531,590; 6,534,639; 6,608,035; 6,683,167; 6,858,715; 6,867,294; 6,878,805; 7,015,315; 7,041,816; 7,273,933; 7,321,029; and U.S. Pat. RE39464, the entire contents of each of which are hereby incorporated herein by reference.

[0355] Modified nucleic acid inhibitor backbones that do not include a phosphorus atom therein have backbones that are formed by short chain alkyl or cycloalkyl internucleoside linkages, mixed heteroatoms and alkyl or cycloalkyl internucleoside linkages, or one or more short chain heteroatomic or heterocyclic internucleoside linkages. These include those having morpholino linkages (formed in part from the sugar portion of a nucleoside); siloxane backbones; sulfide, sulfoxide and sulfone backbones; formacetyl and thioformacetyl backbones; methylene formacetyl and thioformacetyl backbones; alkene containing backbones; sulfamate backbones; methyleneimino and methylenehydrazino backbones; sulfonate and sulfonamide backbones; amide backbones; and others having mixed N, O, S and CH₂ component parts.

[0356] Representative U.S. patents that teach the preparation of the above oligonucleosides include, but are not limited to, U.S. Pat. Nos. 5,034,506; 5,166,315; 5,185,444; 5,214,134; 5,216,141; 5,235,033; 5,64,562; 5,264,564; 5,405,938; 5,434,257; 5,466,677; 5,470,967; 5,489,677; 5,541,307; 5,561,225; 5,596,086; 5,602,240; 5,608,046; 5,610,289; 5,618,704; 5,623,070; 5,663,312; 5,633,360; 5,677,437; and, 5,677,439, the entire contents of each of which are hereby incorporated herein by reference.

[0357] In other embodiments, suitable RNA mimetics are contemplated for use in nucleic acid inhibitors, in which both the sugar and the internucleoside linkage, i.e., the backbone, of the nucleotide units are replaced with novel groups. The base units are maintained for hybridization with an appropriate nucleic acid target compound. One such oligomeric compound, an RNA mimetic that has been shown to have excellent hybridization properties, is referred to as a peptide nucleic acid (PNA). In PNA compounds, the sugar backbone of an RNA is replaced with an amide containing backbone, in particular an aminoethylglycine backbone. The nucleobases are retained and are bound directly or indirectly to aza nitrogen atoms of the amide portion of the backbone. Representative U.S. patents that teach the preparation of PNA compounds include, but are not limited to, U.S. Pat. Nos. 5,539,082; 5,714,331; and 5,719,262, the entire contents of each of which are hereby incorporated herein by reference. Additional PNA compounds suitable for use in the iRNAs of the invention are described in, for example, in Nielsen et al., Science, 1991, 254, 1497-1500.

[0358] Some embodiments featured in the invention include nucleic acid inhibitors, e.g., RNAs, with phosphorothioate backbones and oligonucleosides with heteroatom backbones, and in particular —CH₂—NH—CH₂—, —CH₂—N(CH₃)—O—CH₂--[known as a methylene (methylimino) or MMI backbone], —CH₂—O—N(CH₃)—CH₂—, —CH₂—N(CH₃)—N(CH₃)—CH₂— and —N(CH₃)—CH₂—CH₂— of the above-referenced U.S. Pat. No. 5,489,677, and the amide backbones of the above-referenced U.S. Pat. No. 5,602,240. In some embodiments, the RNAs featured herein have morpholino backbone structures of the above-referenced U.S. Pat. No. 5,034,506. The native phosphodiester backbone can be represented as O—P(O)(OH)—OCH2-.

[0359] Modified nucleic acid inhibitors can also contain one or more substituted sugar moieties. The nucleic acid inhibitors, e.g., dsRNAs, featured herein can include one of the following at the 2′-position: OH; F; O-, S-, or N-alkyl; O-, S-, or N-alkenyl; O-, S- or N-alkynyl; or O-alkyl-O-alkyl, wherein the alkyl, alkenyl and alkynyl can be substituted or unsubstituted C₁ to C₁₀ alkyl or C₂ to C₁₀ alkenyl and alkynyl. Exemplary suitable modifications include O[(CH₂)ₙO]ₘCH₃, O(CH₂)·ₙOCH₃, O(CH₂)ₙNH₂, O(CH₂)ₙCH₃, O(CH₂)ₙONH₂, and O(CH₂)ₙON[(CH₂)ₙCH₃)]₂, where n and m are from 1 to about 10. In other embodiments, dsRNAs include one of the following at the 2′ position: C₁ to C₁₀ lower alkyl, substituted lower alkyl, alkaryl, aralkyl, O-alkaryl or O-aralkyl, SH, SCH₃, OCN, Cl, Br, CN, CF₃, OCF₃, SOCH₃, SO₂CH₃, ONO₂, NO₂, N₃, NH₂, heterocycloalkyl, heterocycloalkaryl, aminoalkylamino, polyalkylamino, substituted silyl, an RNA cleaving group, a reporter group, an intercalator, a group for improving the pharmacokinetic properties of an iRNA, or a group for improving the pharmacodynamic properties of a nucleic acid inhibitor, and other substituents having similar properties. In some embodiments, the modification includes a 2′-methoxyethoxy (2′-O—CH₂CH₂OCH₃, also known as 2′-O-(2-methoxyethyl) or 2′-MOE) (Martin et al., Helv. Chim. Acta, 1995, 78:486-504) i.e., an alkoxy-alkoxy group. Another exemplary modification is 2′-dimethylaminooxyethoxy, i.e., a O(CH₂)₂ON(CH₃)₂ group, also known as 2′-DMAOE, as described in examples herein below, and 2′-dimethylaminoethoxyethoxy (also known in the art as 2′-O-dimethylaminoethoxyethyl or 2′-DMAEOE), i.e., 2′-O—CH₂—O—CH₂—N(CH₃)₂. Further exemplary modifications include: 5′-Me-2′-F nucleotides, 5′-Me-2′-OMe nucleotides, 5′-Me-2′-deoxynucleotides, (both R and S isomers in these three families); 2′-alkoxyalkyl; and 2′-NMA (N-methylacetamide).

[0360] Other modifications include 2′-methoxy (2′-OCH₃), 2′-aminopropoxy (2′-OCH₂CH₂CH₂NH₂) and 2′-fluoro (2′-F). Similar modifications can also be made at other positions on the RNA of a nucleic acid inhibitor, particularly the 3′ position of the sugar on the 3′ terminal nucleotide or in 2′-5′ linked dsRNAs and the 5′ position of 5′ terminal nucleotide. Nucleic acid inhibitors can also have sugar mimetics such as cyclobutyl moieties in place of the pentofuranosyl sugar. Representative U.S. patents that teach the preparation of such modified sugar structures include, but are not limited to, U.S. Pat. Nos. 4,981,957; 5,118,800; 5,319,080; 5,359,044; 5,393,878; 5,446,137; 5,466,786; 5,514,785; 5,519,134; 5,567,811; 5,576,427; 5,591,722; 5,597,909; 5,610,300; 5,627,053; 5,639,873; 5,646,265; 5,658,873; 5,670,633; and 5,700,920, certain of which are commonly owned with the instant application. The entire contents of each of the foregoing are hereby incorporated herein by reference.

[0361] Additional nucleotides having modified or substituted sugar moieties for use in the nucleic acid inhibitors of the invention include nucleotides comprising a bicyclic sugar. A “bicyclic sugar” is a furanosyl ring modified by the bridging of two atoms. A“bicyclic nucleoside” (“BNA”) is a nucleoside having a sugar moiety comprising a bridge connecting two carbon atoms of the sugar ring, thereby forming a bicyclic ring system. In certain embodiments, the bridge connects the 4′-carbon and the 2′-carbon of the sugar ring. Thus, in some embodiments a nucleic acid inhibitor may include one or more locked nucleic acids. A “locked nucleic acid” (“LNA”) is a nucleotide having a modified ribose moiety in which the ribose moiety comprises an extra bridge connecting the 2′ and 4′ carbons. In other words, an LNA is a nucleotide comprising a bicyclic sugar moiety comprising a 4′-CH₂—O-2′ bridge. This structure effectively “locks” the ribose in the 3′-endo structural conformation. The addition of locked nucleic acids to polynucleotide agents has been shown to increase polynucleotide agent stability in serum, and to reduce off-target effects (Elmen, J. et al., (2005) Nucleic Acids Research 33(1):439-447; Mook, O R. et al., (2007) Mol Canc Ther 6(3):833-843; Grunweller, A. et al., (2003) Nucleic Acids Research 31(12):3185-3193).

[0362] Examples of bicyclic nucleosides for use in the nucleic acid inhibitors of the invention include without limitation nucleosides comprising a bridge between the 4′ and the 2′ ribosyl ring atoms. In certain embodiments, the nucleic acid inhibitors of the invention include one or more bicyclic nucleosides comprising a 4′ to 2′ bridge. Examples of such 4′ to 2′ bridged bicyclic nucleosides, include but are not limited to 4′-(CH2)-O-2′ (LNA); 4′-(CH2)-S-2′; 4′-(CH2)2-O-2′ (ENA); 4′-CH(CH3)-O-2′ (also referred to as “constrained ethyl” or “cEt”) and 4′-CH(CH2OCH3)-O-2′ (and analogs thereof; see, e.g., U.S. Pat. No. 7,399,845); 4′-C(CH3)(CH3)-O-2′ (and analogs thereof; see e.g., U.S. Pat. No. 8,278,283); 4′-CH2-N(OCH3)-2′ (and analogs thereof; see e.g., U.S. Pat. No. 8,278,425); 4′-CH2-O—N(CH3)-2′ (see, e.g., U.S. Patent Publication No. 2004/0171570); 4′-CH2-N(R)—O-2′, wherein R is H, C1-C12 alkyl, or a protecting group (see, e.g., U.S. Pat. No. 7,427,672); 4′-CH2-C(H)(CH3)-2′ (see, e.g., Chattopadhyaya et al., J. Org. Chem., 2009, 74, 118-134); and 4′-CH2-C(═CH2)-2′ (and analogs thereof; see, e.g., U.S. Pat. No. 8,278,426). The entire contents of each of the foregoing are hereby incorporated herein by reference.

[0363] Additional representative U.S. patents and US Patent Publications that teach the preparation of locked nucleic acid nucleotides include, but are not limited to, the following: U.S. Pat. Nos. 6,268,490; 6,525,191; 6,670,461; 6,770,748; 6,794,499; 6,998,484; 7,053,207; 7,034,133; 7,084,125; 7,399,845; 7,427,672; 7,569,686; 7,741,457; 8,022,193; 8,030,467; 8,278,425; 8,278,426; 8,278,283; US 2008/0039618; and US 2009/0012281, the entire contents of each of which are hereby incorporated herein by reference.

[0364] Any of the foregoing bicyclic nucleosides can be prepared having one or more stereochemical sugar configurations including for example α-L-ribofuranose and β-D-ribofuranose (see WO 99/14226).

[0365] In one particular embodiment of the invention, a nucleic acid inhibitor can include one or more constrained ethyl nucleotides. As used herein, a “constrained ethyl nucleotide” or “cEt” is a locked nucleic acid comprising a bicyclic sugar moiety comprising a 4′-CH(CH₃)—O-2′ bridge. In one embodiment, a constrained ethyl nucleotide is in an S conformation and is referred to as an “S-constrained ethyl nucleotide” or “S-cEt.”

[0366] Modified nucleotides included in the nucleic acid inhibitors of the invention can also contain one or more sugar mimetics. For example, the nucleic acid inhibitor may include a “modified tetrahydropyran nucleotide” or “modified THP nucleotide.” A “modified tetrahydropyran nucleotide” has a six-membered tetrahydropyran “sugar” substituted in for the pentofuranosyl residue in normal nucleotides (a sugar surrogate). Modified THP nucleotides include, but are not limited to, what is referred to in the art as hexitol nucleic acid (HNA), anitol nucleic acid (ANA), manitol nucleic acid (MNA) (see, e.g., Leumann, Bioorg. Med. Chem., 2002, 10, 841-854), or fluoro HNA (F-HNA). In some embodiments of the invention, sugar surrogates comprise rings having more than 5 atoms and more than one heteroatom. For example nucleotides comprising morpholino sugar moieties and their use in oligomeric compounds has been reported (see for example: Braasch et al., Biochemistry, 2002, 41, 4503-4510; and U.S. Pat. Nos. 5,698,685; 5,166,315; 5,185,444; and 5,034,506). Morpholinos may be modified, for example by adding or altering various substituent groups from the above morpholino structure. Such sugar surrogates are referred to herein as “modified morpholinos.”

[0367] Combinations of modifications are also provided without limitation, such as 2′-F-5′-methyl substituted nucleosides (see PCT International Application WO 2008/101157 published on Aug. 21, 2008 for other disclosed 5′, 2′-bis substituted nucleosides) and replacement of the ribosyl ring oxygen atom with S and further substitution at the 2′-position (see published U.S. Patent Application US2005-0130923, published on Jun. 16, 2005) or alternatively 5′-substitution of a bicyclic nucleic acid (see PCT International Application WO 2007/134181, published on Nov. 22, 2007 wherein a 4′-CH2-0-2′ bicyclic nucleoside is further substituted at the 5′ position with a 5′-methyl or a 5′-vinyl group). The synthesis and preparation of carbocyclic bicyclic nucleosides along with their oligomerization and biochemical studies have also been described (see, e.g., Srivastava et al., J. Am. Chem. Soc. 2007, 129(26), 8362-8379).

[0368] In certain embodiments, a nucleic acid inhibitor comprises one or more modified cyclohexenyl nucleosides, which is a nucleoside having a six-membered cyclohexenyl in place of the pentofuranosyl residue in naturally occurring nucleosides. Modified cyclohexenyl nucleosides include, but are not limited to those described in the art (see for example commonly owned, published PCT Application WO 2010/036696, published on Apr. 10, 2010, Robeyns et al., J. Am. Chem. Soc., 2008, 130(6), 1979-1984; Horvath et al., Tetrahedron Letters, 2007, 48, 3621-3623; Nauwelaerts et al., J. Am. Chem. Soc., 2007, 129(30), 9340-9348; Gu et al., Nucleosides, Nucleotides & Nucleic Acids, 2005, 24(5-7), 993-998; Nauwelaerts et al., Nucleic Acids Research, 2005, 33(8), 2452-2463; Robeyns et al., Acta Crystallographica, Section F: Structural Biology and Crystallization Communications, 2005, F61(6), 585-586; Gu et al., Tetrahedron, 2004, 60(9), 2111-2123; Gu et al., Oligonucleotides, 2003, 13(6), 479-489; Wang et al., J. Org. Chem., 2003, 68, 4499-4505; Verbeure et al., Nucleic Acids Research, 2001, 29(24), 4941-4947; Wang et al., J. Org. Chem., 2001, 66, 8478-82; Wang et al., Nucleosides, Nucleotides & Nucleic Acids, 2001, 20(4-7), 785-788; Wang et al., J. Am. Chem., 2000, 122, 8595-8602; Published PCT application, WO 06/047842; and Published PCT Application WO 01/049687; the text of each is incorporated by reference herein, in their entirety).

[0369] A nucleic acid inhibitor of the invention can also include nucleobase (often referred to in the art simply as “base”) modifications or substitutions. As used herein, “unmodified” or “natural” nucleobases include the purine bases adenine (A) and guanine (G), and the pyrimidine bases thymine (T), cytosine (C) and uracil (U). Modified nucleobases include other synthetic and natural nucleobases such as 5-methylcytosine (5-me-C), 5-hydroxymethyl cytosine, xanthine, hypoxanthine, 2-aminoadenine, 6-methyl and other alkyl derivatives of adenine and guanine, 2-propyl and other alkyl derivatives of adenine and guanine, 2-thiouracil, 2-thiothymine and 2-thiocytosine, 5-halouracil and cytosine, 5-propynyl uracil and cytosine, 6-azo uracil, cytosine and thymine, 5-uracil (pseudouracil), 4-thiouracil, 8-halo, 8-amino, 8-thiol, 8-thioalkyl, 8-hydroxyl anal other 8-substituted adenines and guanines, 5-halo, particularly 5-bromo, 5-trifluoromethyl and other 5-substituted uracils and cytosines, 7-methylguanine and 7-methyladenine, 8-azaguanine and 8-azaadenine, 7-deazaguanine and 7-daazaadenine and 3-deazaguanine and 3-deazaadenine. Further nucleobases include those disclosed in U.S. Pat. No. 3,687,808, those disclosed in Modified Nucleosides in Biochemistry, Biotechnology and Medicine, Herdewijn, P. ed. Wiley-VCH, 2008; those disclosed in The Concise Encyclopedia Of Polymer Science And Engineering, pages 858-859, Kroschwitz, J. L, ed. John Wiley & Sons, 1990, these disclosed by Englisch et al., (1991) Angewandte Chemie, International Edition, 30:613, and those disclosed by Sanghvi, Y S., Chapter 15, dsRNA Research and Applications, pages 289-302, Crooke, S. T. and Lebleu, B., Ed., CRC Press, 1993. Certain of these nucleobases are particularly useful for increasing the binding affinity of the oligomeric compounds featured in the invention. These include 5-substituted pyrimidines, 6-azapyrimidines and N-2, N-6 and 0-6 substituted purines, including 2-aminopropyladenine, 5-propynyluracil and 5-propynylcytosine. 5-methylcytosine substitutions have been shown to increase nucleic acid duplex stability by 0.6-1.2° C. (Sanghvi, Y. S., Crooke, S. T. and Lebleu, B., Eds., dsRNA Research and Applications, CRC Press, Boca Raton, 1993, pp. 276-278) and are exemplary base substitutions, even more particularly when combined with 2′-O-methoxyethyl sugar modifications.

[0370] Representative U.S. patents that teach the preparation of certain of the above noted modified nucleobases as well as other modified nucleobases include, but are not limited to, the above noted U.S. Pat. Nos. 3,687,808, 4,845,205; 5,130,30; 5,134,066; 5,175,273; 5,367,066; 5,432,272; 5,457,187; 5,459,255; 5,484,908; 5,502,177; 5,525,711; 5,552,540; 5,587,469; 5,594,121, 5,596,091; 5,614,617; 5,681,941; 5,750,692; 6,015,886; 6,147,200; 6,166,197; 6,222,025; 6,235,887; 6,380,368; 6,528,640; 6,639,062; 6,617,438; 7,045,610; 7,427,672; and 7,495,088, the entire contents of each of which are hereby incorporated herein by reference.

[0371] A nucleic acid inhibitor of the invention can also be modified to include one or more locked nucleic acids (LNA). A locked nucleic acid is a nucleotide having a modified ribose moiety in which the ribose moiety comprises an extra bridge connecting the 2′ and 4′ carbons. This structure effectively “locks” the ribose in the 3′-endo structural conformation. The addition of locked nucleic acids to siRNAs has been shown to increase siRNA stability in serum, and to reduce off-target effects (Elmen, J. et al., (2005) Nucleic Acids Research 33(1):439-447; Mook, O R. et al., (2007) Mol Canc Ther 6(3):833-843; Grunweller, A. et al., (2003) Nucleic Acids Research 31(12):3185-3193).

[0372] A nucleic acid inhibitor of the invention can also be modified to include one or more bicyclic sugar moities. A “bicyclic sugar” is a furanosyl ring modified by a aring formed by the bridging of two carbons, whether adjacent or non-adjacent. A“bicyclic nucleoside” (“BNA”) is a nucleoside having a sugar moiety comprising a ring formed by bridging two carbon, whether adjacent or non-adjacent, of the sugar ring, thereby forming a bicyclic ring system. In certain embodiments, the bridge connects the 4′-carbon and the 2′-carbon of the sugar ring, optionally, via the 2′-acyclic oxygen atom. Thus, in some embodiments an agent of the invention may include one or more locked nucleic acids (LNA). A locked nucleic acid is a nucleotide having a modified ribose moiety in which the ribose moiety comprises an extra bridge connecting the 2′ and 4′ carbons. In other words, an LNA is a nucleotide comprising a bicyclic sugar moiety comprising a 4′-CH2-O-2′ bridge. This structure effectively “locks” the ribose in the 3′-endo structural conformation. The addition of locked nucleic acids to siRNAs has been shown to increase siRNA stability in serum, and to reduce off-target effects (Elmen, J. et al., (2005) Nucleic Acids Research 33(1):439-447; Mook, O R. et al., (2007) Mol Canc Ther 6(3):833-843; Grunweller, A. et al., (2003) Nucleic Acids Research 31(12):3185-3193). Examples of bicyclic nucleosides for use in the polynucleotides of the invention include without limitation nucleosides comprising a bridge between the 4′ and the 2′ ribosyl ring atoms. In certain embodiments, the antisense polynucleotide agents of the invention include one or more bicyclic nucleosides comprising a 4′ to 2′ bridge.

[0373] A locked nucleoside can be represented by the structure (omitting stereochemistry),

[chemical structure]

wherein B is a nucleobase or modified nucleobase and L is the linking group that joins the 2′-carbon to the 4′-carbon of the ribose ring. Examples of such 4′ to 2′ bridged bicyclic nucleosides, include but are not limited to 4′-(CH2)-O-2′ (LNA); 4′-(CH2)-S-2′; 4′-(CH2)2-O-2′ (ENA); 4′-CH(CH3)-O-2′ (also referred to as “constrained ethyl” or “cEt”) and 4′-CH(CH2OCH3)-O-2′ (and analogs thereof; see, e.g., U.S. Pat. No. 7,399,845); 4′-C(CH3)(CH3)-O-2′ (and analogs thereof; see e.g., U.S. Pat. No. 8,278,283); 4′-CH2-N(OCH3)-2′ (and analogs thereof; see e.g., U.S. Pat. No. 8,278,425); 4′-CH2-O—N(CH3)-2′ (see, e.g., U.S. Patent Publication No. 2004/0171570); 4′-CH2-N(R)—O-2′, wherein R is H, C1-C12 alkyl, or a nitrogen protecting group (see, e.g., U.S. Pat. No. 7,427,672); 4′-CH2-C(H)(CH3)-2′ (see, e.g., Chattopadhyaya et al., J. Org. Chem., 2009, 74, 118-134); and 4′-CH2-C(═CH2)-2′ (and analogs thereof; see, e.g., U.S. Pat. No. 8,278,426). The entire contents of each of the foregoing are hereby incorporated herein by reference.

[0374] Additional representative U.S. patents and US Patent Publications that teach the preparation of locked nucleic acid nucleotides include, but are not limited to, the following: U.S. Pat. Nos. 6,268,490; 6,525,191; 6,670,461; 6,770,748; 6,794,499; 6,998,484; 7,053,207; 7,034,133; 7,084,125; 7,399,845; 7,427,672; 7,569,686; 7,741,457; 8,022,193; 8,030,467; 8,278,425; 8,278,426; 8,278,283; US 2008/0039618; and US 2009/0012281, the entire contents of each of which are hereby incorporated herein by reference.

[0375] Any of the foregoing bicyclic nucleosides can be prepared having one or more stereochemical sugar configurations including for example α-L-ribofuranose and β-D-ribofuranose (see WO 99/14226).

[0376] A nucleic acid inhibitor of the invention can also be modified to include one or more constrained ethyl nucleotides. As used herein, a “constrained ethyl nucleotide” or “cEt” is a locked nucleic acid comprising a bicyclic sugar moiety comprising a 4′-CH(CH3)-0-2′ bridge (i.e., L in the preceding structure). In one embodiment, a constrained ethyl nucleotide is in the S conformation referred to herein as “S-cEt.”

[0377] A nucleic acid inhibitor of the invention may also include one or more “conformationally restricted nucleotides” (“CRN”). CRN are nucleotide analogs with a linker connecting the C2′ and C4′ carbons of ribose or the C3 and —C5′ carbons of ribose. CRN lock the ribose ring into a stable conformation and increase the hybridization affinity to mRNA. The linker is of sufficient length to place the oxygen in an optimal position for stability and affinity resulting in less ribose ring puckering.

[0378] Representative publications that teach the preparation of certain of the above noted CRN include, but are not limited to, US Patent Publication No. 2013/0190383; and PCT publication WO 2013/036868, the entire contents of each of which are hereby incorporated herein by reference.

[0379] In some embodiments, a nucleic acid inhibitor of the invention comprises one or more monomers that are UNA (unlocked nucleic acid) nucleotides. UNA is unlocked acyclic nucleic acid, wherein any of the bonds of the sugar has been removed, forming an unlocked “sugar” residue. In one example, UNA also encompasses monomer with bonds between C1′-C4′ have been removed (i.e. the covalent carbon-oxygen-carbon bond between the C1′ and C4′ carbons). In another example, the C2′-C3′ bond (i.e. the covalent carbon-carbon bond between the C2′ and C3′ carbons) of the sugar has been removed (see Nuc. Acids Symp. Series, 52, 133-134 (2008) and Fluiter et al., Mol. Biosyst., 2009, 10, 1039 hereby incorporated by reference).

[0380] Representative U.S. publications that teach the preparation of UNA include, but are not limited to, U.S. Pat. No. 8,314,227; and US Patent Publication Nos. 2013/0096289; 2013/0011922; and 2011/0313020, the entire contents of each of which are hereby incorporated herein by reference.

[0381] Potentially stabilizing modifications to the ends of nucleic acid inhibitors can include N-(acetylaminocaproyl)-4-hydroxyprolinol (Hyp-C6-NHAc), N-(caproyl-4-hydroxyprolinol (Hyp-C6), N-(acetyl-4-hydroxyprolinol (Hyp-NHAc), thymidine-2′-0-deoxythymidine (ether), N-(aminocaproyl)-4-hydroxyprolinol (Hyp-C6-amino), 2-docosanoyl-uridine-3″-phosphate, inverted base dT(idT) and others. Disclosure of this modification can be found in PCT Publication No. WO 2011/005861.

[0382] Other modifications of a nucleic acid inhibitor of the invention include a 5′ phosphate or 5′ phosphate mimic, e.g., a 5′-terminal phosphate or phosphate mimic on the antisense strand of an a nucleic acid inhibitor. Suitable phosphate mimics are disclosed in, for example US Patent Publication No. 2012/0157511, the entire contents of which are incorporated herein by reference.

[0383] Any of the nucleic acid inhibitors of the invention may be optionally conjugated with a ligand, such as a GalNAc derivative ligand, as described below.

[0384] As described in more detail below, a nucleic acid inhibitor that contains conjugations of one or more carbohydrate moieties to a nucleic acid inhibitor can optimize one or more properties of the inhibitor. In many cases, the carbohydrate moiety will be attached to a modified subunit of the nucleic acid inhibitor. For example, the ribose sugar of one or more ribonucleotide subunits of an inhibitor can be replaced with another moiety, e.g., a non-carbohydrate (such as, cyclic) carrier to which is attached a carbohydrate ligand. A ribonucleotide subunit in which the ribose sugar of the subunit has been so replaced is referred to herein as a ribose replacement modification subunit (RRMS). A cyclic carrier may be a carbocyclic ring system, i.e., all ring atoms are carbon atoms, or a heterocyclic ring system, i.e., one or more ring atoms may be a heteroatom, e.g., nitrogen, oxygen, sulfur. The cyclic carrier may be a monocyclic ring system, or may contain two or more rings, e.g. fused rings. The cyclic carrier may be a fully saturated ring system, or it may contain one or more double bonds.

[0385] The ligand may be attached to the nucleic acid inhibitor via a carrier. The carriers include (i) at least one “backbone attachment point,” such as, two “backbone attachment points” and (ii) at least one “tethering attachment point.” A “backbone attachment point” as used herein refers to a functional group, e.g. a hydroxyl group, or generally, a bond available for, and that is suitable for incorporation of the carrier into the backbone, e.g., the phosphate, or modified phosphate, e.g., sulfur containing, backbone, of a ribonucleic acid. A “tethering attachment point” (TAP) in some embodiments refers to a constituent ring atom of the cyclic carrier, e.g., a carbon atom or a heteroatom (distinct from an atom which provides a backbone attachment point), that connects a selected moiety. The moiety can be, e.g., a carbohydrate, e.g. monosaccharide, disaccharide, trisaccharide, tetrasaccharide, oligosaccharide and polysaccharide. Optionally, the selected moiety is connected by an intervening tether to the cyclic carrier. Thus, the cyclic carrier will often include a functional group, e.g., an amino group, or generally, provide a bond, that is suitable for incorporation or tethering of another chemical entity, e.g., a ligand to the constituent ring.

[0386] The nucleic acid inhibitors may be conjugated to a ligand via a carrier, wherein the carrier can be cyclic group or acyclic group; in some embodiments, the cyclic group is selected from pyrrolidinyl, pyrazolinyl, pyrazolidinyl, imidazolinyl, imidazolidinyl, piperidinyl, piperazinyl, [1,3]dioxolane, oxazolidinyl, isoxazolidinyl, morpholinyl, thiazolidinyl, isothiazolidinyl, quinoxalinyl, pyridazinonyl, tetrahydrofuryl and and decalin; in some embodiments, the acyclic group is selected from serinol backbone or diethanolamine backbone.

ii. Modified dsRNA Agents Comprising Motifs of the Invention

[0387] In certain aspects of the invention, the double stranded RNAi agents of the invention include agents with chemical modifications as disclosed, for example, in WO 2013/075035, filed on Nov. 16, 2012, the entire contents of which are incorporated herein by reference.

[0388] It is to be understood that, in embodiments in which a first dsRNA agent targeting LDHA and a second dsRNA agent targeting HAO1 are covalently attached (i.e., a dual targeting RNAi agent), the first agent may comprise any one or more of the motifs described below, the second agent may comprise any one or more of the motifs described below, or both the first agent and the second agent may independently comprise any one or more of the motifs described below.

[0389] Accordingly, the invention provides double stranded RNAi agents capable of inhibiting the expression of a target gene (i.e., an LDHA gene, an HAO1 gene, a PRODH2 gene, or both an LDHA gene and an HAO1 gene) in vivo. The RNAi agent comprises a sense strand and an antisense strand. Each strand of the RNAi agent may range from 12-30 nucleotides in length. For example, each strand may be between 14-30 nucleotides in length, 17-30 nucleotides in length, 25-30 nucleotides in length, 27-30 nucleotides in length, 17-23 nucleotides in length, 17-21 nucleotides in length, 17-19 nucleotides in length, 19-25 nucleotides in length, 19-23 nucleotides in length, 19-21 nucleotides in length, 21-25 nucleotides in length, or 21-23 nucleotides in length.

[0390] The sense strand and antisense strand typically form a duplex double stranded RNA (“dsRNA”), also referred to herein as an “RNAi agent.” The duplex region of an RNAi agent may be 12-30 nucleotide pairs in length. For example, the duplex region can be between 14-30 nucleotide pairs in length, 17-30 nucleotide pairs in length, 27-30 nucleotide pairs in length, 17-23 nucleotide pairs in length, 17-21 nucleotide pairs in length, 17-19 nucleotide pairs in length, 19-25 nucleotide pairs in length, 19-23 nucleotide pairs in length, 19-21 nucleotide pairs in length, 21-25 nucleotide pairs in length, or 21-23 nucleotide pairs in length. In another example, the duplex region is selected from 15, 16, 17, 18, 19, 20, 21, 22, 23, 24, 25, 26, and 27 nucleotides in length.

[0391] In one embodiment, the RNAi agent may contain one or more overhang regions and/or capping groups at the 3′-end, 5′-end, or both ends of one or both strands. The overhang can be 1-6 nucleotides in length, for instance 2-6 nucleotides in length, 1-5 nucleotides in length, 2-5 nucleotides in length, 1-4 nucleotides in length, 2-4 nucleotides in length, 1-3 nucleotides in length, 2-3 nucleotides in length, or 1-2 nucleotides in length. The overhangs can be the result of one strand being longer than the other, or the result of two strands of the same length being staggered. The overhang can form a mismatch with the target mRNA or it can be complementary to the gene sequences being targeted or can be another sequence. The first and second strands can also be joined, e.g., by additional bases to form a hairpin, or by other non-base linkers.

[0392] In one embodiment, the nucleotides in the overhang region of the RNAi agent can each independently be a modified or unmodified nucleotide including, but no limited to 2′-sugar modified, such as, 2-F, 2′-Omethyl, thymidine (T), 2′-O-methoxyethyl-5-methyluridine (Teo), 2′-O-methoxyethyladenosine (Aeo), 2′-O-methoxyethyl-5-methylcytidine (m5Ceo), and any combinations thereof. For example, TT can be an overhang sequence for either end on either strand. The overhang can form a mismatch with the target mRNA or it can be complementary to the gene sequences being targeted or can be another sequence.

[0393] The 5′- or 3′-overhangs at the sense strand, antisense strand or both strands of the RNAi agent may be phosphorylated. In some embodiments, the overhang region(s) contains two nucleotides having a phosphorothioate between the two nucleotides, where the two nucleotides can be the same or different. In one embodiment, the overhang is present at the 3′-end of the sense strand, antisense strand, or both strands. In one embodiment, this 3′-overhang is present in the antisense strand. In one embodiment, this 3′-overhang is present in the sense strand.

[0394] The RNAi agent may contain only a single overhang, which can strengthen the interference activity of the RNAi, without affecting its overall stability. For example, the single-stranded overhang may be located at the 3-terminal end of the sense strand or, alternatively, at the 3-terminal end of the antisense strand. The RNAi may also have a blunt end, located at the 5′-end of the antisense strand (or the 3′-end of the sense strand) or vice versa. Generally, the antisense strand of the RNAi has a nucleotide overhang at the 3′-end, and the 5′-end is blunt. While not wishing to be bound by theory, the asymmetric blunt end at the 5′-end of the antisense strand and 3′-end overhang of the antisense strand favor the guide strand loading into RISC process.

[0395] In one embodiment, the RNAi agent is a double blunt-ended of 19 nucleotides in length, wherein the sense strand contains at least one motif of three 2′-F modifications on three consecutive nucleotides at positions 7, 8, and 9 from the 5′end. The antisense strand contains at least one motif of three 2′-O-methyl modifications on three consecutive nucleotides at positions 11, 12, and 13 from the 5′end.

[0396] In another embodiment, the RNAi agent is a double blunt-ended of 20 nucleotides in length, wherein the sense strand contains at least one motif of three 2′-F modifications on three consecutive nucleotides at positions 8, 9, and 10 from the 5′end. The antisense strand contains at least one motif of three 2′-O-methyl modifications on three consecutive nucleotides at positions 11, 12, and 13 from the 5′end.

[0397] In yet another embodiment, the RNAi agent is a double blunt-ended of 21 nucleotides in length, wherein the sense strand contains at least one motif of three 2′-F modifications on three consecutive nucleotides at positions 9, 10, and 11 from the 5′end. The antisense strand contains at least one motif of three 2′-O-methyl modifications on three consecutive nucleotides at positions 11, 12, and 13 from the 5′end.

[0398] In one embodiment, the RNAi agent comprises a 21 nucleotide sense strand and a 23 nucleotide antisense strand, wherein the sense strand contains at least one motif of three 2′-F modifications on three consecutive nucleotides at positions 9, 10, and 11 from the 5′end; the antisense strand contains at least one motif of three 2′-O-methyl modifications on three consecutive nucleotides at positions 11, 12, and 13 from the 5′end, wherein one end of the RNAi agent is blunt, while the other end comprises a 2 nucleotide overhang. For example, the 2 nucleotide overhang is at the 3′-end of the antisense strand.

[0399] When the 2 nucleotide overhang is at the 3′-end of the antisense strand, there may be two phosphorothioate internucleotide linkages between the terminal three nucleotides, wherein two of the three nucleotides are the overhang nucleotides, and the third nucleotide is a paired nucleotide next to the overhang nucleotide. In one embodiment, the RNAi agent additionally has two phosphorothioate internucleotide linkages between the terminal three nucleotides at both the 5′-end of the sense strand and at the 5′-end of the antisense strand. In one embodiment, every nucleotide in the sense strand and the antisense strand of the RNAi agent, including the nucleotides that are part of the motifs are modified nucleotides. In one embodiment each residue is independently modified with a 2′-O-methyl or 2′-fluoro, e.g., in an alternating motif. Optionally, the RNAi agent further comprises a ligand (such as GalNAc₃).

[0400] In one embodiment, the RNAi agent comprises a sense and an antisense strand, wherein the sense strand is 25-30 nucleotide residues in length, wherein starting from the 5′ terminal nucleotide (position 1) positions 1 to 23 of the first strand comprise at least 8 ribonucleotides; the antisense strand is 36-66 nucleotide residues in length and, starting from the 3′ terminal nucleotide, comprises at least 8 ribonucleotides in the positions paired with positions 1-23 of sense strand to form a duplex; wherein at least the 3′ terminal nucleotide of antisense strand is unpaired with sense strand, and up to 6 consecutive 3′ terminal nucleotides are unpaired with sense strand, thereby forming a 3′ single stranded overhang of 1-6 nucleotides; wherein the 5′ terminus of antisense strand comprises from 10-30 consecutive nucleotides which are unpaired with sense strand, thereby forming a 10-30 nucleotide single stranded 5′ overhang; wherein at least the sense strand 5′ terminal and 3′ terminal nucleotides are base paired with nucleotides of antisense strand when sense and antisense strands are aligned for maximum complementarity, thereby forming a substantially duplexed region between sense and antisense strands; and antisense strand is sufficiently complementary to a target RNA along at least 19 ribonucleotides of antisense strand length to reduce target gene expression when the double stranded nucleic acid is introduced into a mammalian cell; and wherein the sense strand contains at least one motif of three 2′-F modifications on three consecutive nucleotides, where at least one of the motifs occurs at or near the cleavage site. The antisense strand contains at least one motif of three 2′-O-methyl modifications on three consecutive nucleotides at or near the cleavage site.

[0401] In one embodiment, the RNAi agent comprises sense and antisense strands, wherein the RNAi agent comprises a first strand having a length which is at least 25 and at most 29 nucleotides and a second strand having a length which is at most 30 nucleotides with at least one motif of three 2′-O-methyl modifications on three consecutive nucleotides at position 11, 12, and 13 from the 5′ end; wherein the 3′ end of the first strand and the 5′ end of the second strand form a blunt end and the second strand is 1-4 nucleotides longer at its 3′ end than the first strand, wherein the duplex region region which is at least 25 nucleotides in length, and the second strand is sufficiently complementary to a target mRNA along at least 19 nucleotide of the second strand length to reduce target gene expression when the RNAi agent is introduced into a mammalian cell, and wherein dicer cleavage of the RNAi agent results in an siRNA comprising the 3′ end of the second strand, thereby reducing expression of the target gene in the mammal. Optionally, the RNAi agent further comprises a ligand.

[0402] In one embodiment, the sense strand of the RNAi agent contains at least one motif of three identical modifications on three consecutive nucleotides, where one of the motifs occurs at the cleavage site in the sense strand.

[0403] In one embodiment, the antisense strand of the RNAi agent can also contain at least one motif of three identical modifications on three consecutive nucleotides, where one of the motifs occurs at or near the cleavage site in the antisense strand.

[0404] For an RNAi agent having a duplex region of 17-23 nucleotide in length, the cleavage site of the antisense strand is typically around the 10, 11 and 12 positions from the 5′-end. Thus the motifs of three identical modifications may occur at the 9, 10, and 11 positions; 10, 11, and 12 positions; 11, 12, and 13 positions; 12, 13, and 14 positions; or 13, 14, and 15 positions of the antisense strand, the count starting from the first nucleotide from the 5′-end of the antisense strand, or, the count starting from the first paired nucleotide within the duplex region from the 5′-end of the antisense strand. The cleavage site in the antisense strand may also change according to the length of the duplex region of the RNAi from the 5′-end.

[0405] The sense strand of the RNAi agent may contain at least one motif of three identical modifications on three consecutive nucleotides at the cleavage site of the strand; and the antisense strand may have at least one motif of three identical modifications on three consecutive nucleotides at or near the cleavage site of the strand. When the sense strand and the antisense strand form a dsRNA duplex, the sense strand and the antisense strand can be so aligned that one motif of the three nucleotides on the sense strand and one motif of the three nucleotides on the antisense strand have at least one nucleotide overlap, i.e., at least one of the three nucleotides of the motif in the sense strand forms a base pair with at least one of the three nucleotides of the motif in the antisense strand. Alternatively, at least two nucleotides may overlap, or all three nucleotides may overlap.

[0406] In one embodiment, the sense strand of the RNAi agent may contain more than one motif of three identical modifications on three consecutive nucleotides. The first motif may occur at or near the cleavage site of the strand and the other motifs may be a wing modification. The term “wing modification” herein refers to a motif occurring at another portion of the strand that is separated from the motif at or near the cleavage site of the same strand. The wing modification is either adjacent to the first motif or is separated by at least one or more nucleotides. When the motifs are immediately adjacent to each other then the chemistry of the motifs are distinct from each other and when the motifs are separated by one or more nucleotide than the chemistries can be the same or different. Two or more wing modifications may be present. For instance, when two wing modifications are present, each wing modification may occur at one end relative to the first motif which is at or near cleavage site or on either side of the lead motif.

[0407] Like the sense strand, the antisense strand of the RNAi agent may contain more than one motifs of three identical modifications on three consecutive nucleotides, with at least one of the motifs occurring at or near the cleavage site of the strand. This antisense strand may also contain one or more wing modifications in an alignment similar to the wing modifications that may be present on the sense strand.

[0408] In one embodiment, the wing modification on the sense strand or antisense strand of the RNAi agent typically does not include the first one or two terminal nucleotides at the 3′-end, 5′-end or both ends of the strand.

[0409] In another embodiment, the wing modification on the sense strand or antisense strand of the RNAi agent typically does not include the first one or two paired nucleotides within the duplex region at the 3′-end, 5′-end or both ends of the strand.

[0410] When the sense strand and the antisense strand of the RNAi agent each contain at least one wing modification, the wing modifications may fall on the same end of the duplex region, and have an overlap of one, two or three nucleotides.

[0411] When the sense strand and the antisense strand of the RNAi agent each contain at least two wing modifications, the sense strand and the antisense strand can be so aligned that two modifications each from one strand fall on one end of the duplex region, having an overlap of one, two or three nucleotides; two modifications each from one strand fall on the other end of the duplex region, having an overlap of one, two or three nucleotides; two modifications one strand fall on each side of the lead motif, having an overlap of one, two or three nucleotides in the duplex region.

[0412] In one embodiment, every nucleotide in the sense strand and antisense strand of the RNAi agent, including the nucleotides that are part of the motifs, may be modified. Each nucleotide may be modified with the same or different modification which can include one or more alteration of one or both of the non-linking phosphate oxygens and/or of one or more of the linking phosphate oxygens; alteration of a constituent of the ribose sugar, e.g., of the 2′ hydroxyl on the ribose sugar; wholesale replacement of the phosphate moiety with “dephospho” linkers; modification or replacement of a naturally occurring base; and replacement or modification of the ribose-phosphate backbone.

[0413] As nucleic acids are polymers of subunits, many of the modifications occur at a position which is repeated within a nucleic acid, e.g., a modification of a base, or a phosphate moiety, or a non-linking O of a phosphate moiety. In some cases the modification will occur at all of the subject positions in the nucleic acid but in many cases it will not. By way of example, a modification may only occur at a 3′ or 5′ terminal position, may only occur in a terminal region, e.g., at a position on a terminal nucleotide or in the last 2, 3, 4, 5, or 10 nucleotides of a strand. A modification may occur in a double strand region, a single strand region, or in both. A modification may occur only in the double strand region of a RNA or may only occur in a single strand region of a RNA. For example, a phosphorothioate modification at a non-linking O position may only occur at one or both termini, may only occur in a terminal region, e.g., at a position on a terminal nucleotide or in the last 2, 3, 4, 5, or 10 nucleotides of a strand, or may occur in double strand and single strand regions, particularly at termini. The 5′ end or ends can be phosphorylated.

[0414] It may be possible, e.g., to enhance stability, to include particular bases in overhangs, or to include modified nucleotides or nucleotide surrogates, in single strand overhangs, e.g., in a 5′ or 3′ overhang, or in both. For example, it can be desirable to include purine nucleotides in overhangs. In some embodiments all or some of the bases in a 3′ or 5′ overhang may be modified, e.g., with a modification described herein. Modifications can include, e.g., the use of modifications at the 2′ position of the ribose sugar with modifications that are known in the art, e.g., the use of deoxyribonucleotides, 2′-deoxy-2′-fluoro (2′-F) or 2′-O-methyl modified instead of the ribosugar of the nucleobase, and modifications in the phosphate group, e.g., phosphorothioate modifications. Overhangs need not be homologous with the target sequence.

[0415] In one embodiment, each residue of the sense strand and antisense strand is independently modified with LNA, CRN, cET, UNA, HNA, CeNA, 2′-methoxyethyl, 2′-O-methyl, 2′-O-allyl, 2′-C-allyl, 2′-deoxy, 2′-hydroxyl, or 2′-fluoro. The strands can contain more than one modification. In one embodiment, each residue of the sense strand and antisense strand is independently modified with 2′-O-methyl or 2′-fluoro.

[0416] At least two different modifications are typically present on the sense strand and antisense strand. Those two modifications may be the 2′-O-methyl or 2′-fluoro modifications, or others. In one embodiment, the Nₐ and/or N_{b} comprise modifications of an alternating pattern. The term “alternating motif” as used herein refers to a motif having one or more modifications, each modification occurring on alternating nucleotides of one strand. The alternating nucleotide may refer to one per every other nucleotide or one per every three nucleotides, or a similar pattern. For example, if A, B and C each represent one type of modification to the nucleotide, the alternating motif can be “ABABABABABAB . . . ,” “AABBAABBAABB . . . ,” “AABAABAABAAB . . . ,” “AAABAAABAAAB . . . ,” “AAABBBAAABBB . . . ,” or “ABCABCABCABC . . . ,” etc. The type of modifications contained in the alternating motif may be the same or different. For example, if A, B, C, D each represent one type of modification on the nucleotide, the alternating pattern, i.e., modifications on every other nucleotide, may be the same, but each of the sense strand or antisense strand can be selected from several possibilities of modifications within the alternating motif such as “ABABAB . . . ”, “ACACAC . . . ” “BDBDBD . . . ” or “CDCDCD . . . ,” etc.

[0417] In one embodiment, the RNAi agent of the invention comprises the modification pattern for the alternating motif on the sense strand relative to the modification pattern for the alternating motif on the antisense strand is shifted. The shift may be such that the modified group of nucleotides of the sense strand corresponds to a differently modified group of nucleotides of the antisense strand and vice versa. For example, the sense strand when paired with the antisense strand in the dsRNA duplex, the alternating motif in the sense strand may start with “ABABAB” from 5′-3′ of the strand and the alternating motif in the antisense strand may start with “BABABA” from 5′-3′ of the strand within the duplex region. As another example, the alternating motif in the sense strand may start with “AABBAABB” from 5′-3′ of the strand and the alternating motif in the antisense strand may start with “BBAABBAA” from 5′-3′ of the strand within the duplex region, so that there is a complete or partial shift of the modification patterns between the sense strand and the antisense strand.

In one embodiment, the RNAi agent comprises the pattern of the alternating motif of 2′-O-methyl modification and 2′-F modification on the sense strand initially has a shift relative to the pattern of the alternating motif of 2′-O-methyl modification and 2′-F modification on the antisense strand initially, i.e., the 2′-O-methyl modified nucleotide on the sense strand base pairs with a 2′-F modified nucleotide on the antisense strand and vice versa. The 1 position of the sense strand may start with the 2′-F modification, and the 1 position of the antisense strand may start with the 2′-O-methyl modification.

[0418] The introduction of one or more motifs of three identical modifications on three consecutive nucleotides to the sense strand and/or antisense strand interrupts the initial modification pattern present in the sense strand and/or antisense strand. This interruption of the modification pattern of the sense and/or antisense strand by introducing one or more motifs of three identical modifications on three consecutive nucleotides to the sense and/or antisense strand surprisingly enhances the gene silencing activity to the target gene.

[0419] In one embodiment, when the motif of three identical modifications on three consecutive nucleotides is introduced to any of the strands, the modification of the nucleotide next to the motif is a different modification than the modification of the motif. For example, the portion of the sequence containing the motif is “ . . . NₐYYYN_{b} . . . ,” where “Y” represents the modification of the motif of three identical modifications on three consecutive nucleotide, and “Nₐ” and “N_{b}” represent a modification to the nucleotide next to the motif “YYY” that is different than the modification of Y, and where Nₐ and N_{b} can be the same or different modifications. Alternatively, Nₐ and/or N_{b} may be present or absent when there is a wing modification present.

[0420] The RNAi agent may further comprise at least one phosphorothioate or methylphosphonate internucleotide linkage. The phosphorothioate or methylphosphonate internucleotide linkage modification may occur on any nucleotide of the sense strand or antisense strand or both strands in any position of the strand. For instance, the internucleotide linkage modification may occur on every nucleotide on the sense strand and/or antisense strand; each internucleotide linkage modification may occur in an alternating pattern on the sense strand and/or antisense strand; or the sense strand or antisense strand may contain both internucleotide linkage modifications in an alternating pattern. The alternating pattern of the internucleotide linkage modification on the sense strand may be the same or different from the antisense strand, and the alternating pattern of the internucleotide linkage modification on the sense strand may have a shift relative to the alternating pattern of the internucleotide linkage modification on the antisense strand. In one embodiment, a double-stranded RNAi agent comprises 6-8 phosphorothioate internucleotide linkages. In one embodiment, the antisense strand comprises two phosphorothioate internucleotide linkages at the 5′-terminus and two phosphorothioate internucleotide linkages at the 3′-terminus, and the sense strand comprises at least two phosphorothioate internucleotide linkages at either the 5′-terminus or the 3′-terminus.

[0421] In one embodiment, the RNAi comprises a phosphorothioate or methylphosphonate internucleotide linkage modification in the overhang region. For example, the overhang region may contain two nucleotides having a phosphorothioate or methylphosphonate internucleotide linkage between the two nucleotides. Internucleotide linkage modifications also may be made to link the overhang nucleotides with the terminal paired nucleotides within the duplex region. For example, at least 2, 3, 4, or all the overhang nucleotides may be linked through phosphorothioate or methylphosphonate internucleotide linkage, and optionally, there may be additional phosphorothioate or methylphosphonate internucleotide linkages linking the overhang nucleotide with a paired nucleotide that is next to the overhang nucleotide. For instance, there may be at least two phosphorothioate internucleotide linkages between the terminal three nucleotides, in which two of the three nucleotides are overhang nucleotides, and the third is a paired nucleotide next to the overhang nucleotide. These terminal three nucleotides may be at the 3′-end of the antisense strand, the 3′-end of the sense strand, the 5′-end of the antisense strand, and/or the 5′end of the antisense strand.

[0422] In one embodiment, the 2 nucleotide overhang is at the 3′-end of the antisense strand, and there are two phosphorothioate internucleotide linkages between the terminal three nucleotides, wherein two of the three nucleotides are the overhang nucleotides, and the third nucleotide is a paired nucleotide next to the overhang nucleotide. Optionally, the RNAi agent may additionally have two phosphorothioate internucleotide linkages between the terminal three nucleotides at both the 5′-end of the sense strand and at the 5′-end of the antisense strand.

[0423] In one embodiment, the RNAi agent comprises mismatch(es) with the target, within the duplex, or combinations thereof. The mismatch may occur in the overhang region or the duplex region. The base pair may be ranked on the basis of their propensity to promote dissociation or melting (e.g., on the free energy of association or dissociation of a particular pairing, the simplest approach is to examine the pairs on an individual pair basis, though next neighbor or similar analysis can also be used). In terms of promoting dissociation: A:U is preferred over G:C; G:U is preferred over G:C; and I:C is preferred over G:C (I=inosine). Mismatches, e.g., non-canonical or other than canonical pairings (as described elsewhere herein) are preferred over canonical (A:T, A:U, G:C) pairings; and pairings which include a universal base are preferred over canonical pairings.

In one embodiment, the RNAi agent comprises at least one of the first 1, 2, 3, 4, or 5 base pairs within the duplex regions from the 5′-end of the antisense strand independently selected from the group of: A:U, G:U, I:C, and mismatched pairs, e.g., non-canonical or other than canonical pairings or pairings which include a universal base, to promote the dissociation of the antisense strand at the 5′-end of the duplex.

[0424] In one embodiment, the nucleotide at the 1 position within the duplex region from the 5′-end in the antisense strand is selected from the group consisting of A, dA, dU, U, and dT. Alternatively, at least one of the first 1, 2 or 3 base pair within the duplex region from the 5′-end of the antisense strand is an AU base pair. For example, the first base pair within the duplex region from the 5′-end of the antisense strand is an AU base pair.

[0425] In another embodiment, the nucleotide at the 3′-end of the sense strand is deoxythimidine (dT). In another embodiment, the nucleotide at the 3′-end of the antisense strand is deoxythimidine (dT). In one embodiment, there is a short sequence of deoxy-thymine nucleotides, for example, two dT nucleotides on the 3′-end of the sense and/or antisense strand.

[0426] In one embodiment, the sense strand sequence may be represented by formula (I):

(I)
5′ nₚ-Nₐ-(X X X)ᵢ-N_{b}-Y Y Y-N_{b}-(Z Z Z)ⱼ-Nₐ-n_{q} 3′

[0427] wherein:
[0428] i and j are each independently 0 or 1;
[0429] p and q are each independently 0-6;
[0430] each Nₐ independently represents an oligonucleotide sequence comprising 0-25 modified nucleotides, each sequence comprising at least two differently modified nucleotides;
[0431] each N_{b} independently represents an oligonucleotide sequence comprising 0-10 modified nucleotides;
[0432] each nₚ and n_{q} independently represent an overhang nucleotide;
[0433] wherein Nb and Y do not have the same modification; and
[0434] XXX, YYY and ZZZ each independently represent one motif of three identical modifications on three consecutive nucleotides. In some embodiments, YYY is all 2′-F modified nucleotides.
   In one embodiment, the Nₐ and/or N_{b} comprise modifications of alternating pattern.

[0435] In one embodiment, the YYY motif occurs at or near the cleavage site of the sense strand. For example, when the RNAi agent has a duplex region of 17-23 nucleotides in length, the YYY motif can occur at or the vicinity of the cleavage site (e.g.: can occur at positions 6, 7, 8, 7, 8, 9, 8, 9, 10, 9, 10, 11, 10, 11, 12 or 11, 12, 13) of—the sense strand, the count starting from the 1^{st} nucleotide, from the 5′-end; or optionally, the count starting at the 1^{st} paired nucleotide within the duplex region, from the 5′-end.

[0436] In one embodiment, i is 1 and j is 0, or i is 0 and j is 1, or both i and j are 1. The sense strand can therefore be represented by the following formulas:

(Ib)
5′ nₚ-Nₐ-YYY-N_{b}-ZZZ-Nₐ-n_{q} 3′;
(Ic)
5′ nₚ-Nₐ-XXX-N_{b}-YYY-Nₐ-n_{q} 3′;
or
(Id)
5′ nₚ-Nₐ-XXX-N_{b}-YYY-N_{b}-ZZZ-Nₐ-n_{q} 3′.

[0437] When the sense strand is represented by formula (Ib), N_{b} represents an oligonucleotide sequence comprising 0-10, 0-7, 0-5, 0-4, 0-2 or 0 modified nucleotides. Each Nₐ independently can represent an oligonucleotide sequence comprising 2-20, 2-15, or 2-10 modified nucleotides.

[0438] When the sense strand is represented as formula (Ic), N_{b} represents an oligonucleotide sequence comprising 0-10, 0-7, 0-10, 0-7, 0-5, 0-4, 0-2 or 0 modified nucleotides. Each Nₐ can independently represent an oligonucleotide sequence comprising 2-20, 2-15, or 2-10 modified nucleotides.

[0439] When the sense strand is represented as formula (Id), each N_{b} independently represents an oligonucleotide sequence comprising 0-10, 0-7, 0-5, 0-4, 0-2 or 0 modified nucleotides. In some embodiment, N_{b} is 0, 1, 2, 3, 4, 5 or 6. Each Nₐ can independently represent an oligonucleotide sequence comprising 2-20, 2-15, or 2-10 modified nucleotides.

Each of X, Y and Z may be the same or different from each other.

[0440] In other embodiments, i is 0 and j is 0, and the sense strand may be represented by the formula:

(Ia)
5′ nₚ-Nₐ-YYY-Nₐ-n_{q} 3′.

When the sense strand is represented by formula (Ia), each Nₐ independently can represent an oligonucleotide sequence comprising 2-20, 2-15, or 2-10 modified nucleotides.

[0441] In one embodiment, the antisense strand sequence of the RNAi may be represented by formula (II):

(II)
5′ n_{q′}-Nₐ′-(Z′Z′Z′)ₖ-N_{b}′-Y′Y′Y′-N_{b}′-(X′X′X′)ₗ-N′ₐ-
nₚ′ 3′

[0442] wherein:
[0443] k and l are each independently 0 or 1;
[0444] p′ and q′ are each independently 0-6;

[0445] each Nₐ′ independently represents an oligonucleotide sequence comprising 0-25 modified nucleotides, each sequence comprising at least two differently modified nucleotides;

[0446] each N_{b}′ independently represents an oligonucleotide sequence comprising 0-10 modified nucleotides;

[0447] each nₚ′ and n_{q}′ independently represent an overhang nucleotide;

[0448] wherein N_{b}′ and Y′ do not have the same modification; and

[0449] X′X′X′, Y′Y′Y′ and Z′Z′Z′ each independently represent one motif of three identical modifications on three consecutive nucleotides.

In one embodiment, the Nₐ′ and/or N_{b}′ comprise modifications of alternating pattern.

[0450] The Y′Y′Y′ motif occurs at or near the cleavage site of the antisense strand. For example, when the RNAi agent has a duplex region of 17-23 nucleotide in length, the Y′Y′Y′ motif can occur at positions 9, 10, 11; 10, 11, 12; 11, 12, 13; 12, 13, 14; or 13, 14, 15 of the antisense strand, with the count starting from the 1^{st} nucleotide, from the 5′-end; or optionally, the count starting at the 1^{st} paired nucleotide within the duplex region, from the 5′-end. In some embodiments, the Y′Y′Y′ motif occurs at positions 11, 12, 13.

[0451] In one embodiment, Y′Y′Y′ motif is all 2′-OMe modified nucleotides.

[0452] In one embodiment, k is 1 and l is 0, or k is 0 and l is 1, or both k and l are 1.

[0453] The antisense strand can therefore be represented by the following formulas:

(IIb)
5′ n_{q′}-Nₐ′-Z′Z′Z′-N_{b}′-Y′Y′Y′-Nₐ′-n_{p′} 3′;
(IIc)
5′ n_{q′}-Nₐ′-Y′Y′Y′-N_{b}′-X′X′X′-n_{p′} 3′;
or
(IId)
5′ n_{q′}-Nₐ′-Z′Z′Z′-N_{b}′-Y′Y′Y′-N_{b}′-X′X′X′-Nₐ′-n_{p′} 3′.

[0454] When the antisense strand is represented by formula (IIb), N_{b}′ represents an oligonucleotide sequence comprising 0-10, 0-7, 0-10, 0-7, 0-5, 0-4, 0-2 or 0 modified nucleotides. Each Nₐ′ independently represents an oligonucleotide sequence comprising 2-20, 2-15, or 2-10 modified nucleotides.

[0455] When the antisense strand is represented as formula (IIc), N_{b}′ represents an oligonucleotide sequence comprising 0-10, 0-7, 0-10, 0-7, 0-5, 0-4, 0-2 or 0 modified nucleotides. Each Nₐ′ independently represents an oligonucleotide sequence comprising 2-20, 2-15, or 2-10 modified nucleotides.

[0456] When the antisense strand is represented as formula (IId), each N_{b}′ independently represents an oligonucleotide sequence comprising 0-10, 0-7, 0-10, 0-7, 0-5, 0-4, 0-2 or 0 modified nucleotides. Each Nₐ′ independently represents an oligonucleotide sequence comprising 2-20, 2-15, or 2-10 modified nucleotides. In some embodiments, N_{b} is 0, 1, 2, 3, 4, 5 or 6.

In other embodiments, k is 0 and l is 0 and the antisense strand may be represented by the formula:

(Ia)
5′ n_{p′}-N_{a′}-Y′Y′Y′-N_{a′}-n_{q′} 3′.

[0457] When the antisense strand is represented as formula (IIa), each Nₐ′ independently represents an oligonucleotide sequence comprising 2-20, 2-15, or 2-10 modified nucleotides.

Each of X′, Y′ and Z′ may be the same or different from each other.
Each nucleotide of the sense strand and antisense strand may be independently modified with LNA, CRN, UNA, cEt, HNA, CeNA, 2′-methoxyethyl, 2′-O-methyl, 2′-O-allyl, 2′-C-allyl, 2′-hydroxyl, or 2′-fluoro. For example, each nucleotide of the sense strand and antisense strand is independently modified with 2′-O-methyl or 2′-fluoro. Each X, Y, Z, X′, Y′ and Z′, in particular, may represent a 2′-O-methyl modification or a 2′-fluoro modification.

[0458] In one embodiment, the sense strand of the RNAi agent may contain YYY motif occurring at 9, 10 and 11 positions of the strand when the duplex region is 21 nt, the count starting from the 1^{st} nucleotide from the 5′-end, or optionally, the count starting at the 1^{st} paired nucleotide within the duplex region, from the 5′-end; and Y represents 2′-F modification. The sense strand may additionally contain XXX motif or ZZZ motifs as wing modifications at the opposite end of the duplex region; and XXX and ZZZ each independently represents a 2′-OMe modification or 2′-F modification.

[0459] In one embodiment the antisense strand may contain Y′Y′Y′ motif occurring at positions 11, 12, 13 of the strand, the count starting from the 1st nucleotide from the 5′ end, or optionally, the count starting at the 1st paired nucleotide within the duplex region, from the 5′-end; and Y′ represents 2′-O-methyl modification. The antisense strand may additionally contain X′X′X′ motif or Z′Z′Z′ motifs as wing modifications at the opposite end of the duplex region; and X′X′X′ and Z′Z′Z′ each independently represents a 2′-OMe modification or 2′-F modification.

[0460] The sense strand represented by any one of the above formulas (Ia), (Ib), (Ic), and (Id) forms a duplex with a antisense strand being represented by any one of formulas (IIa), (IIb), (IIc), and (IId), respectively.

[0461] Accordingly, the RNAi agents for use in the methods of the invention may comprise a sense strand and an antisense strand, each strand having 14 to 30 nucleotides, the RNAi duplex represented by formula (III):

(III)
sense:
5′ np-Na-(X X X)i-Nb-Y Y Y-Nb-(Z Z Z)j-Na-nq 3′
antisense:
3′ np′-Na′-(X′X′X′)k-Nb′-Y′Y′Y′-Nb′-(Z′Z′Z′)l-Na′-
nq′ 5′

[0462] wherein:
[0463] i, j, k, and l are each independently 0 or 1;
[0464] p, p′, q, and q′ are each independently 0-6;
   [0465] each Na and Na′ independently represents an oligonucleotide sequence comprising 0-25 modified nucleotides, each sequence comprising at least two differently modified nucleotides;
   [0466] each Nb and Nb′ independently represents an oligonucleotide sequence comprising 0-10 modified nucleotides;
   [0467] wherein each np′, np, nq′, and nq, each of which may or may not be present, independently represents an overhang nucleotide; and
   [0468] XXX, YYY, ZZZ, X′X′X′, Y′Y′Y′, and Z′Z′Z′ each independently represent one motif of three identical modifications on three consecutive nucleotides.

[0469] In one embodiment, i is 0 and j is 0; or i is 1 and j is 0; or i is 0 and j is 1; or both i and j are 0; or both i and j are 1. In another embodiment, k is 0 and l is 0; or k is 1 and l is 0; k is 0 and l is 1; or both k and l are 0; or both k and l are 1.

[0470] Exemplary combinations of the sense strand and antisense strand forming a RNAi duplex include the formulas below:

(IIIa)
5′ np-Na-Y Y Y-Na-nq 3′
3′ np′-Na′-Y′Y′Y′-Na′nq′ 5′
(IIIb)
5′ np-Na-Y Y Y-Nb-Z Z Z-Na-nq 3′
3′ np′-Na′-Y′Y′Y′-Nb′-Z′Z′Z′-Na′nq′ 5′
(IIIc)
5′ np-Na-X X X-Nb-Y Y Y-Na-nq 3′
3′ np′-Na′-X′X′X′-Nb′-Y′Y′Y′-Na′-nq′ 5′
(IIId)
5′ np-Na-X X X-Nb-Y Y Y-Nb-Z Z Z-Na-nq 3′
3′ np′-Na′-X′X′X′-Nb′-Y′Y′Y′-Nb′-Z′Z′Z′-Na-nq′ 5′

[0471] When the RNAi agent is represented by formula (IIIa), each Na independently represents an oligonucleotide sequence comprising 2-20, 2-15, or 2-10 modified nucleotides.

[0472] When the RNAi agent is represented by formula (IIIb), each Nb independently represents an oligonucleotide sequence comprising 1-10, 1-7, 1-5 or 1-4 modified nucleotides. Each Na independently represents an oligonucleotide sequence comprising 2-20, 2-15, or 2-10 modified nucleotides.

[0473] When the RNAi agent is represented as formula (IIIc), each Nb, Nb′ independently represents an oligonucleotide sequence comprising 0-10, 0-7, 0-10, 0-7, 0-5, 0-4, 0-2 or 0 modified nucleotides. Each Na independently represents an oligonucleotide sequence comprising 2-20, 2-15, or 2-10 modified nucleotides.

[0474] When the RNAi agent is represented as formula (IIId), each Nb, Nb′ independently represents an oligonucleotide sequence comprising 0-10, 0-7, 0-10, 0-7, 0-5, 0-4, 0-2 or 0 modified nucleotides. Each Na, Na′ independently represents an oligonucleotide sequence comprising 2-20, 2-15, or 2-10 modified nucleotides. Each of Na, Na′, Nb and Nb′ independently comprises modifications of alternating pattern.

[0475] Each of X, Y and Z in formulas (III), (IIIa), (IIIb), (IIIc), and (IIId) may be the same or different from each other.

[0476] When the RNAi agent is represented by formula (III), (IIIa), (IIIb), (IIIc), and (IIId), at least one of the Y nucleotides may form a base pair with one of the Y′ nucleotides. Alternatively, at least two of the Y nucleotides form base pairs with the corresponding Y′ nucleotides; or all three of the Y nucleotides all form base pairs with the corresponding Y′ nucleotides.

[0477] When the RNAi agent is represented by formula (IIIb) or (IIId), at least one of the Z nucleotides may form a base pair with one of the Z′ nucleotides. Alternatively, at least two of the Z nucleotides form base pairs with the corresponding Z′ nucleotides; or all three of the Z nucleotides all form base pairs with the corresponding Z′ nucleotides.

[0478] When the RNAi agent is represented as formula (IIIc) or (IIId), at least one of the X nucleotides may form a base pair with one of the X′ nucleotides. Alternatively, at least two of the X nucleotides form base pairs with the corresponding X′ nucleotides; or all three of the X nucleotides all form base pairs with the corresponding X′ nucleotides.

[0479] In one embodiment, the modification on the Y nucleotide is different than the modification on the Y′ nucleotide, the modification on the Z nucleotide is different than the modification on the Z′ nucleotide, and/or the modification on the X nucleotide is different than the modification on the X′ nucleotide.

[0480] In one embodiment, when the RNAi agent is represented by formula (IIId), the Na modifications are 2′-O-methyl or 2′-fluoro modifications. In another embodiment, when the RNAi agent is represented by formula (IIId), the Na modifications are 2′-O-methyl or 2′-fluoro modifications and np′>0 and at least one np′ is linked to a neighboring nucleotide a via phosphorothioate linkage. In yet another embodiment, when the RNAi agent is represented by formula (IIId), the Na modifications are 2′-O-methyl or 2′-fluoro modifications, np′>0 and at least one np′ is linked to a neighboring nucleotide via phosphorothioate linkage, and the sense strand is conjugated to one or more GalNAc derivatives attached through a bivalent or trivalent branched linker (described below). In another embodiment, when the RNAi agent is represented by formula (IIId), the Na modifications are 2′-O-methyl or 2′-fluoro modifications, np′>0 and at least one np′ is linked to a neighboring nucleotide via phosphorothioate linkage, the sense strand comprises at least one phosphorothioate linkage, and the sense strand is conjugated to one or more GalNAc derivatives attached through a bivalent or trivalent branched linker.

[0481] In one embodiment, when the RNAi agent is represented by formula (IIIa), the Na modifications are 2′-O-methyl or 2′-fluoro modifications, np′>0 and at least one np′ is linked to a neighboring nucleotide via phosphorothioate linkage, the sense strand comprises at least one phosphorothioate linkage, and the sense strand is conjugated to one or more GalNAc derivatives attached through a bivalent or trivalent branched linker.

[0482] In one embodiment, the RNAi agent is a multimer containing at least two duplexes represented by formula (III), (IIIa), (IIIb), (IIIc), and (IIId), wherein the duplexes are connected by a linker. The linker can be cleavable or non-cleavable. Optionally, the multimer further comprises a ligand. Each of the duplexes can target the same gene or two different genes; or each of the duplexes can target same gene at two different target sites.

[0483] In one embodiment, the RNAi agent is a multimer containing three, four, five, six or more duplexes represented by formula (III), (IIIa), (IIIb), (IIIc), and (IIId), wherein the duplexes are connected by a linker. The linker can be cleavable or non-cleavable. Optionally, the multimer further comprises a ligand. Each of the duplexes can target the same gene or two different genes; or each of the duplexes can target same gene at two different target sites.

[0484] In one embodiment, two RNAi agents represented by formula (III), (IIIa), (IIIb), (IIIc), and (IIId) are linked to each other at the 5′ end, and one or both of the 3′ ends and are optionally conjugated to to a ligand. Each of the agents can target the same gene or two different genes; or each of the agents can target same gene at two different target sites.

[0485] In certain embodiments, an RNAi agent of the invention may contain a low number of nucleotides containing a 2′-fluoro modification, e.g., 10 or fewer nucleotides with 2′-fluoro modification. For example, the RNAi agent may contain 10, 9, 8, 7, 6, 5, 4, 3, 2, 1 or 0 nucleotides with a 2′-fluoro modification. In a specific embodiment, the RNAi agent of the invention contains 10 nucleotides with a 2′-fluoro modification, e.g., 4 nucleotides with a 2′-fluoro modification in the sense strand and 6 nucleotides with a 2′-fluoro modification in the antisense strand. In another specific embodiment, the RNAi agent of the invention contains 6 nucleotides with a 2′-fluoro modification, e.g., 4 nucleotides with a 2′-fluoro modification in the sense strand and 2 nucleotides with a 2′-fluoro modification in the antisense strand.

[0486] In other embodiments, an RNAi agent of the invention may contain an ultra low number of nucleotides containing a 2′-fluoro modification, e.g., 2 or fewer nucleotides containing a 2′-fluoro modification. For example, the RNAi agent may contain 2, 1 of 0 nucleotides with a 2′-fluoro modification. In a specific embodiment, the RNAi agent may contain 2 nucleotides with a 2′-fluoro modification, e.g., 0 nucleotides with a 2-fluoro modification in the sense strand and 2 nucleotides with a 2′-fluoro modification in the antisense strand.

[0487] Various publications describe multimeric RNAi agents that can be used in the methods of the invention. Such publications include WO2007/091269, U.S. Pat. No. 7,858,769, WO2010/141511, WO2007/117686, WO2009/014887 and WO2011/031520 the entire contents of each of which are hereby incorporated herein by reference.

[0488] In certain embodiments, the compositions and methods of the disclosure include a vinyl phosphonate (VP) modification of an RNAi agent as described herein. In exemplary embodiments, a 5′-vinyl phosphonate modified nucleotide of the disclosure has the structure:

[chemical structure]

wherein X is O or S;
[0489] R is hydrogen, hydroxy, fluoro, or C₁₋₂₀alkoxy (e.g., methoxy or n-hexadecyloxy);
[0490] R^{5′} is ═C(H)—P(O)(OH)₂ and the double bond between the C5′ carbon and R^{5′} is in the E or Z orientation (e.g., E orientation); and
[0491] B is a nucleobase or a modified nucleobase, optionally where B is adenine, guanine, cytosine, thymine, or uracil.

[0492] A vinyl phosphonate of the instant disclosure may be attached to either the antisense or the sense strand of a dsRNA of the disclosure. In certain embodiments, a vinyl phosphonate of the instant disclosure is attached to the antisense strand of a dsRNA, optionally at the 5′ end of the antisense strand of the dsRNA.

[0493] Vinyl phosphonate modifications are also contemplated for the compositions and methods of the instant disclosure. An exemplary vinyl phosphonate structure includes the preceding structure, where R^{5′} is ═C(H)—OP(O)(OH)₂ and the double bond between the C5′ carbon and R^{5′} is in the E or Z orientation (e.g., E orientation).

[0494] As described in more detail below, the RNAi agent that contains conjugations of one or more carbohydrate moieties to a RNAi agent can optimize one or more properties of the RNAi agent. In many cases, the carbohydrate moiety will be attached to a modified subunit of the RNAi agent. For example, the ribose sugar of one or more ribonucleotide subunits of a dsRNA agent can be replaced with another moiety, e.g., a non-carbohydrate (such as, cyclic) carrier to which is attached a carbohydrate ligand. A ribonucleotide subunit in which the ribose sugar of the subunit has been so replaced is referred to herein as a ribose replacement modification subunit (RRMS). A cyclic carrier may be a carbocyclic ring system, i.e., all ring atoms are carbon atoms, or a heterocyclic ring system, i.e., one or more ring atoms may be a heteroatom, e.g., nitrogen, oxygen, sulfur. The cyclic carrier may be a monocyclic ring system, or may contain two or more rings, e.g. fused rings. The cyclic carrier may be a fully saturated ring system, or it may contain one or more double bonds.

[0495] The ligand may be attached to the polynucleotide via a carrier. The carriers include (i) at least one “backbone attachment point,” such as, two “backbone attachment points” and (ii) at least one “tethering attachment point.” A “backbone attachment point” as used herein refers to a functional group, e.g. a hydroxyl group, or generally, a bond available for, and that is suitable for incorporation of the carrier into the backbone, e.g., the phosphate, or modified phosphate, e.g., sulfur containing, backbone, of a ribonucleic acid. A “tethering attachment point” (TAP) in some embodiments refers to a constituent ring atom of the cyclic carrier, e.g., a carbon atom or a heteroatom (distinct from an atom which provides a backbone attachment point), that connects a selected moiety. The moiety can be, e.g., a carbohydrate, e.g. monosaccharide, disaccharide, trisaccharide, tetrasaccharide, oligosaccharide and polysaccharide. Optionally, the selected moiety is connected by an intervening tether to the cyclic carrier. Thus, the cyclic carrier will often include a functional group, e.g., an amino group, or generally, provide a bond, that is suitable for incorporation or tethering of another chemical entity, e.g., a ligand to the constituent ring.

[0496] The RNAi agents may be conjugated to a ligand via a carrier, wherein the carrier can be cyclic group or acyclic group; in some embodiments, the cyclic group is selected from pyrrolidinyl, pyrazolinyl, pyrazolidinyl, imidazolinyl, imidazolidinyl, piperidinyl, piperazinyl, [1,3]dioxolane, oxazolidinyl, isoxazolidinyl, morpholinyl, thiazolidinyl, isothiazolidinyl, quinoxalinyl, pyridazinonyl, tetrahydrofuryl and and decalin; in some embodiments, the acyclic group is selected from serinol backbone or diethanolamine backbone.

iii. Thermally Destabilizing Modifications

[0497] In certain embodiments, a nucleic acid inhibitor molecule can be optimized for RNA interference by incorporating thermally destabilizing modifications in the seed region of the antisense strand. As used herein “seed region” means at positions 2-9 of the 5′-end of the referenced strand. For example, thermally destabilizing modifications can be incorporated in the seed region of the antisense strand to reduce or inhibit off-target gene silencing.

[0498] The term “thermally destabilizing modification(s)” includes modification(s) that would result with a dsRNA with a lower overall melting temperature (Tₘ) than the Tₘ of the dsRNA without having such modification(s). For example, the thermally destabilizing modification(s) can decrease the Tₘ of the dsRNA by 1-4° C., such as one, two, three or four degrees Celcius. And, the term “thermally destabilizing nucleotide” refers to a nucleotide containing one or more thermally destabilizing modifications.

[0499] It has been discovered that dsRNAs with an antisense strand comprising at least one thermally destabilizing modification of the duplex within the first 9 nucleotide positions, counting from the 5′ end, of the antisense strand have reduced off-target gene silencing activity. Accordingly, in some embodiments, the antisense strand comprises at least one (e.g., one, two, three, four, five or more) thermally destabilizing modification of the duplex within the first 9 nucleotide positions of the 5′ region of the antisense strand. In some embodiments, one or more thermally destabilizing modification(s) of the duplex is/are located in positions 2-9, such as, positions 4-8, from the 5′-end of the antisense strand. In some further embodiments, the thermally destabilizing modification(s) of the duplex is/are located at position 6, 7 or 8 from the 5′-end of the antisense strand. In still some further embodiments, the thermally destabilizing modification of the duplex is located at position 7 from the 5′-end of the antisense strand. In some embodiments, the thermally destabilizing modification of the duplex is located at position 2, 3, 4, 5 or 9 from the 5′-end of the antisense strand.

[0500] In another embodiment of the invention, an iRNA agent comprises a sense strand and an antisense strand, each strand having 14 to 40 nucleotides. The RNAi agent may be represented by formula (L):

[chemical structure]

In formula (L), B1, B2, B3, B1′, B2′, B3′, and B4′ each are independently a nucleotide containing a modification selected from the group consisting of 2′-O-alkyl, 2′-substituted alkoxy, 2′-substituted alkyl, 2′-halo, ENA, and BNA/LNA. In one embodiment, B1, B2, B3, B1′, B2′, B3′, and B4′ each contain 2′-OMe modifications. In one embodiment, B1, B2, B3, B1′, B2′, B3′, and B4′ each contain 2′-OMe or 2′-F modifications. In one embodiment, at least one of B1, B2, B3, B1′, B2′, B3′, and B4′ contain 2′-O—N-methylacetamido (2′-O-NMA) modification.

[0501] C1 is a thermally destabilizing nucleotide placed at a site opposite to the seed region of the antisense strand (i.e., at positions 2-8 of the 5′-end of the antisense strand). For example, C1 is at a position of the sense strand that pairs with a nucleotide at positions 2-8 of the 5′-end of the antisense strand. In one example, C1 is at position 15 from the 5′-end of the sense strand. C1 nucleotide bears the thermally destabilizing modification which can include abasic modification; mismatch with the opposing nucleotide in the duplex; and sugar modification such as 2′-deoxy modification or acyclic nucleotide e.g., unlocked nucleic acids (UNA) or glycerol nucleic acid (GNA). In one embodiment, C1 has thermally destabilizing modification selected from the group consisting of: i) mismatch with the opposing nucleotide in the antisense strand; ii) abasic modification selected from the group consisting of:

[chemical structure]

and iii) sugar modification selected from the group consisting of:

[chemical structure]

wherein B is a modified or unmodified nucleobase, R¹ and R² independently are H, halogen, OR₃, or alkyl; and R₃ is H, alkyl, cycloalkyl, aryl, aralkyl, heteroaryl or sugar. In one embodiment, the thermally destabilizing modification in C1 is a mismatch selected from the group consisting of G:G, G:A, G:U, G:T, A:A, A:C, C:C, C:U, C:T, U:U, T:T, and U:T; and optionally, at least one nucleobase in the mismatch pair is a 2′-deoxy nucleobase. In one example, the thermally destabilizing modification in C1 is GNA or

[chemical structure]

[0502] T1, T1′, T2′, and T3′ each independently represent a nucleotide comprising a modification providing the nucleotide a steric bulk that is less or equal to the steric bulk of a 2′-OMe modification. A steric bulk refers to the sum of steric effects of a modification. Methods for determining steric effects of a modification of a nucleotide are known to one skilled in the art. The modification can be at the 2′ position of a ribose sugar of the nucleotide, or a modification to a non-ribose nucleotide, acyclic nucleotide, or the backbone of the nucleotide that is similar or equivalent to the 2′ position of the ribose sugar, and provides the nucleotide a steric bulk that is less than or equal to the steric bulk of a 2′-OMe modification. For example, T1, T1′, T2′, and T3′ are each independently selected from DNA, RNA, LNA, 2′-F, and 2′-F-5′-methyl. In one embodiment, T1 is DNA. In one embodiment, T1′ is DNA, RNA or LNA. In one embodiment, T2′ is DNA or RNA. In one embodiment, T3′ is DNA or RNA.

[0503] n¹, n³, and q¹ are independently 4 to 15 nucleotides in length.

[0504] n⁵, q³, and q⁷ are independently 1-6 nucleotide(s) in length.

[0505] n⁴, q², and q⁶ are independently 1-3 nucleotide(s) in length; alternatively, n⁴ is 0.

[0506] q⁵ is independently 0-10 nucleotide(s) in length.

[0507] n² and q⁴ are independently 0-3 nucleotide(s) in length.

[0508] Alternatively, n⁴ is 0-3 nucleotide(s) in length.

[0509] In one embodiment, n⁴ can be 0. In one example, n⁴ is 0, and q² and q⁶ are 1. In another example, n⁴ is 0, and q² and q⁶ are 1, with two phosphorothioate internucleotide linkage modifications within position 1-5 of the sense strand (counting from the 5′-end of the sense strand), and two phosphorothioate internucleotide linkage modifications at positions 1 and 2 and two phosphorothioate internucleotide linkage modifications within positions 18-23 of the antisense strand (counting from the 5′-end of the antisense strand).

[0510] In one embodiment, n⁴, q², and q⁶ are each 1.

[0511] In one embodiment, n², n⁴, q² q⁴, and q⁶ are each 1.

In one embodiment, C1 is at position 14-17 of the 5′-end of the sense strand, when the sense strand is 19-22 nucleotides in length, and n⁴ is 1. In one embodiment, C1 is at position 15 of the 5′-end of the sense strand

[0512] In one embodiment, T3′ starts at position 2 from the 5′ end of the antisense strand. In one example, T3′ is at position 2 from the 5′ end of the antisense strand and q⁶ is equal to 1.

[0513] In one embodiment, T1′ starts at position 14 from the 5′ end of the antisense strand. In one example, T1′ is at position 14 from the 5′ end of the antisense strand and q² is equal to 1.

[0514] In an exemplary embodiment, T3′ starts from position 2 from the 5′ end of the antisense strand and T1′ starts from position 14 from the 5′ end of the antisense strand. In one example, T3′ starts from position 2 from the 5′ end of the antisense strand and q⁶ is equal to 1 and T1′ starts from position 14 from the 5′ end of the antisense strand and q² is equal to 1.

[0515] In one embodiment, T1′ and T3′ are separated by 11 nucleotides in length (i.e. not counting the T1′ and T3′ nucleotides).

[0516] In one embodiment, T1′ is at position 14 from the 5′ end of the antisense strand. In one example, T1′ is at position 14 from the 5′ end of the antisense strand and q² is equal to 1, and the modification at the 2′ position or positions in a non-ribose, acyclic or backbone that provide less steric bulk than a 2′-OMe ribose.

[0517] In one embodiment, T3′ is at position 2 from the 5′ end of the antisense strand. In one example, T3′ is at position 2 from the 5′ end of the antisense strand and q⁶ is equal to 1, and the modification at the 2′ position or positions in a non-ribose, acyclic or backbone that provide less than or equal to steric bulk than a 2′-OMe ribose.

[0518] In one embodiment, T1 is at the cleavage site of the sense strand. In one example, T1 is at position 11 from the 5′ end of the sense strand, when the sense strand is 19-22 nucleotides in length, and n² is 1. In an exemplary embodiment, T1 is at the cleavage site of the sense strand at position 11 from the 5′ end of the sense strand, when the sense strand is 19-22 nucleotides in length, and n² is 1,

[0519] In one embodiment, T2′ starts at position 6 from the 5′ end of the antisense strand. In one example, T2′ is at positions 6-10 from the 5′ end of the antisense strand, and q⁴ is 1.

[0520] In an exemplary embodiment, T1 is at the cleavage site of the sense strand, for instance, at position 11 from the 5′ end of the sense strand, when the sense strand is 19-22 nucleotides in length, and n² is 1; T1′ is at position 14 from the 5′ end of the antisense strand, and q² is equal to 1, and the modification to T1′ is at the 2′ position of a ribose sugar or at positions in a non-ribose, acyclic or backbone that provide less steric bulk than a 2′-OMe ribose; T2′ is at positions 6-10 from the 5′ end of the antisense strand, and q⁴ is 1; and T3′ is at position 2 from the 5′ end of the antisense strand, and q⁶ is equal to 1, and the modification to T3′ is at the 2′ position or at positions in a non-ribose, acyclic or backbone that provide less than or equal to steric bulk than a 2′-OMe ribose.

[0521] In one embodiment, T2′ starts at position 8 from the 5′ end of the antisense strand. In one example, T2′ starts at position 8 from the 5′ end of the antisense strand, and q⁴ is 2.

[0522] In one embodiment, T2′ starts at position 9 from the 5′ end of the antisense strand. In one example, T2′ is at position 9 from the 5′ end of the antisense strand, and q⁴ is 1.

[0523] In one embodiment, B1′ is 2′-OMe or 2′-F, q¹ is 9, T1′ is 2′-F, q² is 1, B2′ is 2′-OMe or 2′-F, q³ is 4, T2′ is 2′-F, q⁴ is 1, B3′ is 2′-OMe or 2′-F, q⁵ is 6, T3′ is 2′-F, q⁶ is 1, B4′ is 2′-OMe, and q⁷ is 1; with two phosphorothioate internucleotide linkage modifications within positions 1-5 of the sense strand (counting from the 5′-end of the sense strand), and two phosphorothioate internucleotide linkage modifications at positions 1 and 2 and two phosphorothioate internucleotide linkage modifications within positions 18-23 of the antisense strand (counting from the 5′-end of the antisense strand).

[0524] In one embodiment, n⁴ is 0, B3 is 2′-OMe, n⁵ is 3, B1′ is 2′-OMe or 2′-F, q¹ is 9, T1′ is 2′-F, q² is 1, B2′ is 2′-OMe or 2′-F, q³ is 4, T2′ is 2′-F, q⁴ is 1, B3′ is 2′-OMe or 2′-F, q⁵ is 6, T3′ is 2′-F, q⁶ is 1, B4′ is 2′-OMe, and q⁷ is 1; with two phosphorothioate internucleotide linkage modifications within positions 1-5 of the sense strand (counting from the 5′-end of the sense strand), and two phosphorothioate internucleotide linkage modifications at positions 1 and 2 and two phosphorothioate internucleotide linkage modifications within positions 18-23 of the antisense strand (counting from the 5′-end of the antisense strand).

[0525] In one embodiment, B1 is 2′-OMe or 2′-F, n¹ is 8, T1 is 2′F, n² is 3, B2 is 2′-OMe, n³ is 7, n⁴ is 0, B3 is 2′OMe, n⁵ is 3, B1′ is 2′-OMe or 2′-F, q¹ is 9, T1′ is 2′-F, q² is 1, B2′ is 2′-OMe or 2′-F, q³ is 4, T2′ is 2′-F, q⁴ is 2, B3′ is 2′-OMe or 2′-F, q⁵ is 5, T3′ is 2′-F, q⁶ is 1, B4′ is 2′-OMe, and q⁷ is 1.

[0526] In one embodiment, B1 is 2′-OMe or 2′-F, n¹ is 8, T1 is 2′F, n² is 3, B2 is 2′-OMe, n³ is 7, n⁴ is 0, B3 is 2′-OMe, n⁵ is 3, B1′ is 2′-OMe or 2′-F, q¹ is 9, T1′ is 2′-F, q² is 1, B2′ is 2′-OMe or 2′-F, q³ is 4, T2′ is 2′-F, q⁴ is 2, B3′ is 2′-OMe or 2′-F, q⁵ is 5, T3′ is 2′-F, q⁶ is 1, B4′ is 2′-OMe, and q⁷ is 1; with two phosphorothioate internucleotide linkage modifications within positions 1-5 of the sense strand (counting from the 5′-end of the sense strand), and two phosphorothioate internucleotide linkage modifications at positions 1 and 2 and two phosphorothioate internucleotide linkage modifications within positions 18-23 of the antisense strand (counting from the 5′-end of the antisense strand).

[0527] In one embodiment, B1 is 2′-OMe or 2′-F, n¹ is 6, T1 is 2′F, n² is 3, B2 is 2′-OMe, n³ is 7, n⁴ is 0, B3 is 2′OMe, n⁵ is 3, B1′ is 2′-OMe or 2′-F, q¹ is 7, T1′ is 2′-F, q² is 1, B2′ is 2′-OMe or 2′-F, q³ is 4, T2′ is 2′-F, q⁴ is 2, B3′ is 2′-OMe or 2′-F, q⁵ is 5, T3′ is 2′-F, q⁶ is 1, B4′ is 2′-OMe, and q⁷ is 1.

[0528] In one embodiment, B1 is 2′-OMe or 2′-F, n¹ is 6, T1 is 2′F, n² is 3, B2 is 2′-OMe, n³ is 7, n⁴ is 0, B3 is 2′-OMe, n⁵ is 3, B1′ is 2′-OMe or 2′-F, q¹ is 7, T1′ is 2′-F, q² is 1, B2′ is 2′-OMe or 2′-F, q³ is 4, T2′ is 2′-F, q⁴ is 2, B3′ is 2′-OMe or 2′-F, q⁵ is 5, T3′ is 2′-F, q⁶ is 1, B4′ is 2′-OMe, and q⁷ is 1; with two phosphorothioate internucleotide linkage modifications within positions 1-5 of the sense strand (counting from the 5′-end of the sense strand), and two phosphorothioate internucleotide linkage modifications at positions 1 and 2 and two phosphorothioate internucleotide linkage modifications within positions 18-23 of the antisense strand (counting from the 5′-end of the antisense strand).

[0529] In one embodiment, B1 is 2′-OMe or 2′-F, n¹ is 8, T1 is 2′F, n² is 3, B2 is 2′-OMe, n³ is 7, n⁴ is 0, B3 is 2′OMe, n⁵ is 3, B1′ is 2′-OMe or 2′-F, q¹ is 9, T1′ is 2′-F, q² is 1, B2′ is 2′-OMe or 2′-F, q³ is 4, T2′ is 2′-F, q⁴ is 1, B3′ is 2′-OMe or 2′-F, q⁵ is 6, T3′ is 2′-F, q⁶ is 1, B4′ is 2′-OMe, and q⁷ is 1.

[0530] In one embodiment, B1 is 2′-OMe or 2′-F, n¹ is 8, T1 is 2′F, n² is 3, B2 is 2′-OMe, n³ is 7, n⁴ is 0, B3 is 2′-OMe, n⁵ is 3, B1′ is 2′-OMe or 2′-F, q¹ is 9, T1′ is 2′-F, q² is 1, B2′ is 2′-OMe or 2′-F, q³ is 4, T2′ is 2′-F, q⁴ is 1, B3′ is 2′-OMe or 2′-F, q⁵ is 6, T3′ is 2′-F, q⁶ is 1, B4′ is 2′-OMe, and q⁷ is 1; with two phosphorothioate internucleotide linkage modifications within positions 1-5 of the sense strand (counting from the 5′-end of the sense strand), and two phosphorothioate internucleotide linkage modifications at positions 1 and 2 and two phosphorothioate internucleotide linkage modifications within positions 18-23 of the antisense strand (counting from the 5′-end of the antisense strand).

[0531] In one embodiment, B1 is 2′-OMe or 2′-F, n¹ is 8, T1 is 2′F, n² is 3, B2 is 2′-OMe, n³ is 7, n⁴ is 0, B3 is 2′OMe, n⁵ is 3, B1′ is 2′-OMe or 2′-F, q¹ is 9, T1′ is 2′-F, q² is 1, B2′ is 2′-OMe or 2′-F, q³ is 5, T2′ is 2′-F, q⁴ is 1, B3′ is 2′-OMe or 2′-F, q⁵ is 5, T3′ is 2′-F, q⁶ is 1, B4′ is 2′-OMe, and q⁷ is 1; optionally with at least 2 additional TT at the 3′-end of the antisense strand.

[0532] In one embodiment, B1 is 2′-OMe or 2′-F, n¹ is 8, T1 is 2′F, n² is 3, B2 is 2′-OMe, n³ is 7, n⁴ is 0, B3 is 2′-OMe, n⁵ is 3, B1′ is 2′-OMe or 2′-F, q¹ is 9, T1′ is 2′-F, q² is 1, B2′ is 2′-OMe or 2′-F, q³ is 5, T2′ is 2′-F, q⁴ is 1, B3′ is 2′-OMe or 2′-F, q⁵ is 5, T3′ is 2′-F, q⁶ is 1, B4′ is 2′-OMe, and q⁷ is 1; optionally with at least 2 additional TT at the 3′-end of the antisense strand; with two phosphorothioate internucleotide linkage modifications within positions 1-5 of the sense strand (counting from the 5′-end of the sense strand), and two phosphorothioate internucleotide linkage modifications at positions 1 and 2 and two phosphorothioate internucleotide linkage modifications within positions 18-23 of the antisense strand (counting from the 5′-end of the antisense strand).

[0533] In one embodiment, B1 is 2′-OMe or 2′-F, n¹ is 8, T1 is 2′F, n² is 3, B2 is 2′-OMe, n³ is 7, n⁴ is 0, B3 is 2′-OMe, n⁵ is 3, B1′ is 2′-OMe or 2′-F, q¹ is 9, T1′ is 2′-F, q² is 1, B2′ is 2′-OMe or 2′-F, q³ is 4, q⁴ is 0, B3′ is 2′-OMe or 2′-F, q⁵ is 7, T3′ is 2′-F, q⁶ is 1, B4′ is 2′-OMe, and q⁷ is 1.

In one embodiment, B1 is 2′-OMe or 2′-F, n¹ is 8, T1 is 2′F, n² is 3, B2 is 2′-OMe, n³ is 7, n⁴ is 0, B3 is 2′-OMe, n⁵ is 3, B1′ is 2′-OMe or 2′-F, q¹ is 9, T1′ is 2′-F, q² is 1, B2′ is 2′-OMe or 2′-F, q³ is 4, q⁴ is 0, B3′ is 2′-OMe or 2′-F, q⁵ is 7, T3′ is 2′-F, q⁶ is 1, B4′ is 2′-OMe, and q⁷ is 1; with two phosphorothioate internucleotide linkage modifications within positions 1-5 of the sense strand (counting from the 5′-end), and two phosphorothioate internucleotide linkage modifications at positions 1 and 2 and two phosphorothioate internucleotide linkage modifications within positions 18-23 of the antisense strand (counting from the 5′-end).
In one embodiment, B1 is 2′-OMe or 2′-F, n¹ is 8, T1 is 2′F, n² is 3, B2 is 2′-OMe, n³ is 7, n⁴ is 0, B3 is 2′OMe, n⁵ is 3, B1′ is 2′-OMe or 2′-F, q¹ is 9, T1′ is 2′-F, q² is 1, B2′ is 2′-OMe or 2′-F, q³ is 4, T2′ is 2′-F, q⁴ is 2, B3′ is 2′-OMe or 2′-F, q⁵ is 5, T3′ is 2′-F, q⁶ is 1, B4′ is 2′-F, and q⁷ is 1.

[0534] In one embodiment, B1 is 2′-OMe or 2′-F, n¹ is 8, T1 is 2′F, n² is 3, B2 is 2′-OMe, n³ is 7, n⁴ is 0, B3 is 2′-OMe, n⁵ is 3, B1′ is 2′-OMe or 2′-F, q¹ is 9, T1′ is 2′-F, q² is 1, B2′ is 2′-OMe or 2′-F, q³ is 4, T2′ is 2′-F, q⁴ is 2, B3′ is 2′-OMe or 2′-F, q⁵ is 5, T3′ is 2′-F, q⁶ is 1, B4′ is 2′-F, and q⁷ is 1; with two phosphorothioate internucleotide linkage modifications within positions 1-5 of the sense strand (counting from the 5′-end of the sense strand), and two phosphorothioate internucleotide linkage modifications at positions 1 and 2 and two phosphorothioate internucleotide linkage modifications within positions 18-23 of the antisense strand (counting from the 5′-end of the antisense strand).

In one embodiment, B1 is 2′-OMe or 2′-F, n¹ is 8, T1 is 2′F, n² is 3, B2 is 2′-OMe, n³ is 7, n⁴ is 0, B3 is 2′-OMe, n⁵ is 3, B1′ is 2′-OMe or 2′-F, q¹ is 9, T1′ is 2′-F, q² is 1, B2′ is 2′-OMe or 2′-F, q³ is 4, q⁴ is 0, B3′ is 2′-OMe or 2′-F, q⁵ is 7, T3′ is 2′-F, q⁶ is 1, B4′ is 2′-F, and q⁷ is 1.

[0535] In one embodiment, B1 is 2′-OMe or 2′-F, n¹ is 8, T1 is 2′F, n² is 3, B2 is 2′-OMe, n³ is 7, n⁴ is 0, B3 is 2′-OMe, n⁵ is 3, B1′ is 2′-OMe or 2′-F, q¹ is 9, T1′ is 2′-F, q² is 1, B2′ is 2′-OMe or 2′-F, q³ is 4, q⁴ is 0, B3′ is 2′-OMe or 2′-F, q⁵ is 7, T3′ is 2′-F, q⁶ is 1, B4′ is 2′-F, and q⁷ is 1; with two phosphorothioate internucleotide linkage modifications within positions 1-5 of the sense strand (counting from the 5′-end of the sense strand), and two phosphorothioate internucleotide linkage modifications at positions 1 and 2 and two phosphorothioate internucleotide linkage modifications within positions 18-23 of the antisense strand (counting from the 5′-end of the antisense strand).

[0536] The dsRNA agent can comprise a phosphorus-containing group at the 5′-end of the sense strand or antisense strand. The 5′-end phosphorus-containing group can be 5′-end phosphate (5′-P), 5′-end phosphorothioate (5′-PS), 5′-end phosphorodithioate (5′-PS₂), 5′-end vinylphosphonate (5′-VP), 5′-end methylphosphonate (MePhos), or 5′-deoxy-5′-C-malonyl

[chemical structure]

When the 5′-end phosphorus-containing group is 5′-end vinylphosphonate (5′-VP), the 5′-VP can be either 5′-E-VP isomer

[chemical structure]

5′-Z-VP isomer

[chemical structure]

or mixtures thereof.

[0537] In one embodiment, the RNAi agent comprises a phosphorus-containing group at the 5′-end of the sense strand. In one embodiment, the RNAi agent comprises a phosphorus-containing group at the 5′-end of the antisense strand.

[0538] In one embodiment, the RNAi agent comprises a 5′-P. In one embodiment, the RNAi agent comprises a 5′-P in the antisense strand.

[0539] In one embodiment, the RNAi agent comprises a 5′-PS. In one embodiment, the RNAi agent comprises a 5′-PS in the antisense strand.

[0540] In one embodiment, the RNAi agent comprises a 5′-VP. In one embodiment, the RNAi agent comprises a 5′-VP in the antisense strand. In one embodiment, the RNAi agent comprises a 5′-E-VP in the antisense strand. In one embodiment, the RNAi agent comprises a 5′-Z-VP in the antisense strand.

[0541] In one embodiment, the RNAi agent comprises a 5′-PS₂. In one embodiment, the RNAi agent comprises a 5′-PS₂ in the antisense strand.

[0542] In one embodiment, the RNAi agent comprises a 5′-PS₂. In one embodiment, the RNAi agent comprises a 5′-deoxy-5′-C-malonyl in the antisense strand.

[0543] In one embodiment, B1 is 2′-OMe or 2′-F, n¹ is 8, T1 is 2′F, n² is 3, B2 is 2′-OMe, n³ is 7, n⁴ is 0, B3 is 2′OMe, n⁵ is 3, B1′ is 2′-OMe or 2′-F, q¹ is 9, T1′ is 2′-F, q² is 1, B2′ is 2′-OMe or 2′-F, q³ is 4, T2′ is 2′-F, q⁴ is 2, B3′ is 2′-OMe or 2′-F, q⁵ is 5, T3′ is 2′-F, q⁶ is 1, B4′ is 2′-OMe, and q⁷ is 1. The RNAi agent also comprises a 5′-PS.

[0544] In one embodiment, B1 is 2′-OMe or 2′-F, n¹ is 8, T1 is 2′F, n² is 3, B2 is 2′-OMe, n³ is 7, n⁴ is 0, B3 is 2′OMe, n⁵ is 3, B1′ is 2′-OMe or 2′-F, q¹ is 9, T1′ is 2′-F, q² is 1, B2′ is 2′-OMe or 2′-F, q³ is 4, T2′ is 2′-F, q⁴ is 2, B3′ is 2′-OMe or 2′-F, q⁵ is 5, T3′ is 2′-F, q⁶ is 1, B4′ is 2′-OMe, and q⁷ is 1. The RNAi agent also comprises a 5′-P.

[0545] In one embodiment, B1 is 2′-OMe or 2′-F, n¹ is 8, T1 is 2′F, n² is 3, B2 is 2′-OMe, n³ is 7, n⁴ is 0, B3 is 2′OMe, n⁵ is 3, B1′ is 2′-OMe or 2′-F, q¹ is 9, T1′ is 2′-F, q² is 1, B2′ is 2′-OMe or 2′-F, q³ is 4, T2′ is 2′-F, q⁴ is 2, B3′ is 2′-OMe or 2′-F, q⁵ is 5, T3′ is 2′-F, q⁶ is 1, B4′ is 2′-OMe, and q⁷ is 1. The RNAi agent also comprises a 5′-VP. The 5′-VP may be 5′-E-VP, 5′-Z-VP, or combination thereof.

[0546] In one embodiment, B1 is 2′-OMe or 2′-F, n¹ is 8, T1 is 2′F, n² is 3, B2 is 2′-OMe, n³ is 7, n⁴ is 0, B3 is 2′OMe, n⁵ is 3, B1′ is 2′-OMe or 2′-F, q¹ is 9, T1′ is 2′-F, q² is 1, B2′ is 2′-OMe or 2′-F, q³ is 4, T2′ is 2′-F, q⁴ is 2, B3′ is 2′-OMe or 2′-F, q⁵ is 5, T3′ is 2′-F, q⁶ is 1, B4′ is 2′-OMe, and q⁷ is 1. The RNAi agent also comprises a 5′-PS₂.

[0547] In one embodiment, B1 is 2′-OMe or 2′-F, n¹ is 8, T1 is 2′F, n² is 3, B2 is 2′-OMe, n³ is 7, n⁴ is 0, B3 is 2′OMe, n⁵ is 3, B1′ is 2′-OMe or 2′-F, q¹ is 9, T1′ is 2′-F, q² is 1, B2′ is 2′-OMe or 2′-F, q³ is 4, T2′ is 2′-F, q⁴ is 2, B3′ is 2′-OMe or 2′-F, q⁵ is 5, T3′ is 2′-F, q⁶ is 1, B4′ is 2′-OMe, and q⁷ is 1. The RNAi agent also comprises a 5′-deoxy-5′-C-malonyl.

[0548] In one embodiment, B1 is 2′-OMe or 2′-F, n¹ is 8, T1 is 2′F, n² is 3, B2 is 2′-OMe, n³ is 7, n⁴ is 0, B3 is 2′-OMe, n⁵ is 3, B1′ is 2′-OMe or 2′-F, q¹ is 9, T1′ is 2′-F, q² is 1, B2′ is 2′-OMe or 2′-F, q³ is 4, T2′ is 2′-F, q⁴ is 2, B3′ is 2′-OMe or 2′-F, q⁵ is 5, T3′ is 2′-F, q⁶ is 1, B4′ is 2′-OMe, and q⁷ is 1; with two phosphorothioate internucleotide linkage modifications within position 1-5 of the sense strand (counting from the 5′-end of the sense strand), and two phosphorothioate internucleotide linkage modifications at positions 1 and 2 and two phosphorothioate internucleotide linkage modifications within positions 18-23 of the antisense strand (counting from the 5′-end of the antisense strand). The RNAi agent also comprises a 5′-P.

[0549] In one embodiment, B1 is 2′-OMe or 2′-F, n¹ is 8, T1 is 2′F, n² is 3, B2 is 2′-OMe, n³ is 7, n⁴ is 0, B3 is 2′-OMe, n⁵ is 3, B1′ is 2′-OMe or 2′-F, q¹ is 9, T1′ is 2′-F, q² is 1, B2′ is 2′-OMe or 2′-F, q³ is 4, T2′ is 2′-F, q⁴ is 2, B3′ is 2′-OMe or 2′-F, q⁵ is 5, T3′ is 2′-F, q⁶ is 1, B4′ is 2′-OMe, and q⁷ is 1; with two phosphorothioate internucleotide linkage modifications within position 1-5 of the sense strand (counting from the 5′-end of the sense strand), and two phosphorothioate internucleotide linkage modifications at positions 1 and 2 and two phosphorothioate internucleotide linkage modifications within positions 18-23 of the antisense strand (counting from the 5′-end of the antisense strand). The RNAi agent also comprises a 5′-PS.

[0550] In one embodiment, B1 is 2′-OMe or 2′-F, n¹ is 8, T1 is 2′F, n² is 3, B2 is 2′-OMe, n³ is 7, n⁴ is 0, B3 is 2′-OMe, n⁵ is 3, B1′ is 2′-OMe or 2′-F, q¹ is 9, T1′ is 2′-F, q² is 1, B2′ is 2′-OMe or 2′-F, q³ is 4, T2′ is 2′-F, q⁴ is 2, B3′ is 2′-OMe or 2′-F, q⁵ is 5, T3′ is 2′-F, q⁶ is 1, B4′ is 2′-OMe, and q⁷ is 1; with two phosphorothioate internucleotide linkage modifications within position 1-5 of the sense strand (counting from the 5′-end of the sense strand), and two phosphorothioate internucleotide linkage modifications at positions 1 and 2 and two phosphorothioate internucleotide linkage modifications within positions 18-23 of the antisense strand (counting from the 5′-end of the antisense strand). The RNAi agent also comprises a 5′-VP. The 5′-VP may be 5′-E-VP, 5′-Z-VP, or combination thereof.

[0551] In one embodiment, B1 is 2′-OMe or 2′-F, n¹ is 8, T1 is 2′F, n² is 3, B2 is 2′-OMe, n³ is 7, n⁴ is 0, B3 is 2′-OMe, n⁵ is 3, B1′ is 2′-OMe or 2′-F, q¹ is 9, T1′ is 2′-F, q² is 1, B2′ is 2′-OMe or 2′-F, q³ is 4, T2′ is 2′-F, q⁴ is 2, B3′ is 2′-OMe or 2′-F, q⁵ is 5, T3′ is 2′-F, q⁶ is 1, B4′ is 2′-OMe, and q⁷ is 1; with two phosphorothioate internucleotide linkage modifications within position 1-5 of the sense strand (counting from the 5′-end of the sense strand), and two phosphorothioate internucleotide linkage modifications at positions 1 and 2 and two phosphorothioate internucleotide linkage modifications within positions 18-23 of the antisense strand (counting from the 5′-end of the antisense strand). The RNAi agent also comprises a 5′-PS₂.

[0552] In one embodiment, B1 is 2′-OMe or 2′-F, n¹ is 8, T1 is 2′F, n² is 3, B2 is 2′-OMe, n³ is 7, n⁴ is 0, B3 is 2′-OMe, n⁵ is 3, B1′ is 2′-OMe or 2′-F, q¹ is 9, T1′ is 2′-F, q² is 1, B2′ is 2′-OMe or 2′-F, q³ is 4, T2′ is 2′-F, q⁴ is 2, B3′ is 2′-OMe or 2′-F, q⁵ is 5, T3′ is 2′-F, q⁶ is 1, B4′ is 2′-OMe, and q⁷ is 1; with two phosphorothioate internucleotide linkage modifications within position 1-5 of the sense strand (counting from the 5′-end of the sense strand), and two phosphorothioate internucleotide linkage modifications at positions 1 and 2 and two phosphorothioate internucleotide linkage modifications within positions 18-23 of the antisense strand (counting from the 5′-end of the antisense strand). The RNAi agent also comprises a 5′-deoxy-5′-C-malonyl.

[0553] In one embodiment, B1 is 2′-OMe or 2′-F, n¹ is 8, T1 is 2′F, n² is 3, B2 is 2′-OMe, n³ is 7, n⁴ is 0, B3 is 2′-OMe, n⁵ is 3, B1′ is 2′-OMe or 2′-F, q¹ is 9, T1′ is 2′-F, q² is 1, B2′ is 2′-OMe or 2′-F, q³ is 4, q⁴ is 0, B3′ is 2′-OMe or 2′-F, q⁵ is 7, T3′ is 2′-F, q⁶ is 1, B4′ is 2′-OMe, and q⁷ is 1. The RNAi agent also comprises a 5′-P.

[0554] In one embodiment, B1 is 2′-OMe or 2′-F, n¹ is 8, T1 is 2′F, n² is 3, B2 is 2′-OMe, n³ is 7, n⁴ is 0, B3 is 2′-OMe, n⁵ is 3, B1′ is 2′-OMe or 2′-F, q¹ is 9, T1′ is 2′-F, q² is 1, B2′ is 2′-OMe or 2′-F, q³ is 4, q⁴ is 0, B3′ is 2′-OMe or 2′-F, q⁵ is 7, T3′ is 2′-F, q⁶ is 1, B4′ is 2′-OMe, and q⁷ is 1. The dsRNA agent also comprises a 5′-PS.

[0555] In one embodiment, B1 is 2′-OMe or 2′-F, n¹ is 8, T1 is 2′F, n² is 3, B2 is 2′-OMe, n³ is 7, n⁴ is 0, B3 is 2′-OMe, n⁵ is 3, B1′ is 2′-OMe or 2′-F, q¹ is 9, T1′ is 2′-F, q² is 1, B2′ is 2′-OMe or 2′-F, q³ is 4, q⁴ is 0, B3′ is 2′-OMe or 2′-F, q⁵ is 7, T3′ is 2′-F, q⁶ is 1, B4′ is 2′-OMe, and q⁷ is 1. The RNAi agent also comprises a 5′-VP. The 5′-VP may be 5′-E-VP, 5′-Z-VP, or combination thereof.

[0556] In one embodiment, B1 is 2′-OMe or 2′-F, n¹ is 8, T1 is 2′F, n² is 3, B2 is 2′-OMe, n³ is 7, n⁴ is 0, B3 is 2′-OMe, n⁵ is 3, B1′ is 2′-OMe or 2′-F, q¹ is 9, T1′ is 2′-F, q² is 1, B2′ is 2′-OMe or 2′-F, q³ is 4, q⁴ is 0, B3′ is 2′-OMe or 2′-F, q⁵ is 7, T3′ is 2′-F, q⁶ is 1, B4′ is 2′-OMe, and q⁷ is 1. The RNAi agent also comprises a 5′-PS₂.

[0557] In one embodiment, B1 is 2′-OMe or 2′-F, n¹ is 8, T1 is 2′F, n² is 3, B2 is 2′-OMe, n³ is 7, n⁴ is 0, B3 is 2′-OMe, n⁵ is 3, B1′ is 2′-OMe or 2′-F, q¹ is 9, T1′ is 2′-F, q² is 1, B2′ is 2′-OMe or 2′-F, q³ is 4, q⁴ is 0, B3′ is 2′-OMe or 2′-F, q⁵ is 7, T3′ is 2′-F, q⁶ is 1, B4′ is 2′-OMe, and q⁷ is 1. The RNAi agent also comprises a 5′-deoxy-5′-C-malonyl.

[0558] In one embodiment, B1 is 2′-OMe or 2′-F, n¹ is 8, T1 is 2′F, n² is 3, B2 is 2′-OMe, n³ is 7, n⁴ is 0, B3 is 2′-OMe, n⁵ is 3, B1′ is 2′-OMe or 2′-F, q¹ is 9, T1′ is 2′-F, q² is 1, B2′ is 2′-OMe or 2′-F, q³ is 4, q⁴ is 0, B3′ is 2′-OMe or 2′-F, q⁵ is 7, T3′ is 2′-F, q⁶ is 1, B4′ is 2′-OMe, and q⁷ is 1; with two phosphorothioate internucleotide linkage modifications within position 1-5 of the sense strand (counting from the 5′-end), and two phosphorothioate internucleotide linkage modifications at positions 1 and 2 and two phosphorothioate internucleotide linkage modifications within positions 18-23 of the antisense strand (counting from the 5′-end). The RNAi agent also comprises a 5′-P.

[0559] In one embodiment, B1 is 2′-OMe or 2′-F, n¹ is 8, T1 is 2′F, n² is 3, B2 is 2′-OMe, n³ is 7, n⁴ is 0, B3 is 2′-OMe, n⁵ is 3, B1′ is 2′-OMe or 2′-F, q¹ is 9, T1′ is 2′-F, q² is 1, B2′ is 2′-OMe or 2′-F, q³ is 4, q⁴ is 0, B3′ is 2′-OMe or 2′-F, q⁵ is 7, T3′ is 2′-F, q⁶ is 1, B4′ is 2′-OMe, and q⁷ is 1; with two phosphorothioate internucleotide linkage modifications within position 1-5 of the sense strand (counting from the 5′-end), and two phosphorothioate internucleotide linkage modifications at positions 1 and 2 and two phosphorothioate internucleotide linkage modifications within positions 18-23 of the antisense strand (counting from the 5′-end). The RNAi agent also comprises a 5′-PS.

[0560] In one embodiment, B1 is 2′-OMe or 2′-F, n¹ is 8, T1 is 2′F, n² is 3, B2 is 2′-OMe, n³ is 7, n⁴ is 0, B3 is 2′-OMe, n⁵ is 3, B1′ is 2′-OMe or 2′-F, q¹ is 9, T1′ is 2′-F, q² is 1, B2′ is 2′-OMe or 2′-F, q³ is 4, q⁴ is 0, B3′ is 2′-OMe or 2′-F, q⁵ is 7, T3′ is 2′-F, q⁶ is 1, B4′ is 2′-OMe, and q⁷ is 1; with two phosphorothioate internucleotide linkage modifications within position 1-5 of the sense strand (counting from the 5′-end), and two phosphorothioate internucleotide linkage modifications at positions 1 and 2 and two phosphorothioate internucleotide linkage modifications within positions 18-23 of the antisense strand (counting from the 5′-end). The RNAi agent also comprises a 5′-VP. The 5′-VP may be 5′-E-VP, 5′-Z-VP, or combination thereof.

[0561] In one embodiment, B1 is 2′-OMe or 2′-F, n¹ is 8, T1 is 2′F, n² is 3, B2 is 2′-OMe, n³ is 7, n⁴ is 0, B3 is 2′-OMe, n⁵ is 3, B1′ is 2′-OMe or 2′-F, q¹ is 9, T1′ is 2′-F, q² is 1, B2′ is 2′-OMe or 2′-F, q³ is 4, q⁴ is 0, B3′ is 2′-OMe or 2′-F, q⁵ is 7, T3′ is 2′-F, q⁶ is 1, B4′ is 2′-OMe, and q⁷ is 1; with two phosphorothioate internucleotide linkage modifications within position 1-5 of the sense strand (counting from the 5′-end), and two phosphorothioate internucleotide linkage modifications at positions 1 and 2 and two phosphorothioate internucleotide linkage modifications within positions 18-23 of the antisense strand (counting from the 5′-end). The RNAi agent also comprises a 5′-PS₂.

[0562] In one embodiment, B1 is 2′-OMe or 2′-F, n¹ is 8, T1 is 2′F, n² is 3, B2 is 2′-OMe, n³ is 7, n⁴ is 0, B3 is 2′-OMe, n⁵ is 3, B1′ is 2′-OMe or 2′-F, q¹ is 9, T1′ is 2′-F, q² is 1, B2′ is 2′-OMe or 2′-F, q³ is 4, q⁴ is 0, B3′ is 2′-OMe or 2′-F, q⁵ is 7, T3′ is 2′-F, q⁶ is 1, B4′ is 2′-OMe, and q⁷ is 1; with two phosphorothioate internucleotide linkage modifications within position 1-5 of the sense strand (counting from the 5′-end), and two phosphorothioate internucleotide linkage modifications at positions 1 and 2 and two phosphorothioate internucleotide linkage modifications within positions 18-23 of the antisense strand (counting from the 5′-end). The RNAi agent also comprises a 5′-deoxy-5′-C-malonyl.

[0563] In one embodiment, B1 is 2′-OMe or 2′-F, n¹ is 8, T1 is 2′F, n² is 3, B2 is 2′-OMe, n³ is 7, n⁴ is 0, B3 is 2′OMe, n⁵ is 3, B1′ is 2′-OMe or 2′-F, q¹ is 9, T1′ is 2′-F, q² is 1, B2′ is 2′-OMe or 2′-F, q³ is 4, T2′ is 2′-F, q⁴ is 2, B3′ is 2′-OMe or 2′-F, q⁵ is 5, T3′ is 2′-F, q⁶ is 1, B4′ is 2′-F, and q⁷ is 1. The RNAi agent also comprises a 5′-P.

[0564] In one embodiment, B1 is 2′-OMe or 2′-F, n¹ is 8, T1 is 2′F, n² is 3, B2 is 2′-OMe, n³ is 7, n⁴ is 0, B3 is 2′OMe, n⁵ is 3, B1′ is 2′-OMe or 2′-F, q¹ is 9, T1′ is 2′-F, q² is 1, B2′ is 2′-OMe or 2′-F, q³ is 4, T2′ is 2′-F, q⁴ is 2, B3′ is 2′-OMe or 2′-F, q⁵ is 5, T3′ is 2′-F, q⁶ is 1, B4′ is 2′-F, and q⁷ is 1. The RNAi agent also comprises a 5′-PS.

[0565] In one embodiment, B1 is 2′-OMe or 2′-F, n¹ is 8, T1 is 2′F, n² is 3, B2 is 2′-OMe, n³ is 7, n⁴ is 0, B3 is 2′OMe, n⁵ is 3, B1′ is 2′-OMe or 2′-F, q¹ is 9, T1′ is 2′-F, q² is 1, B2′ is 2′-OMe or 2′-F, q³ is 4, T2′ is 2′-F, q⁴ is 2, B3′ is 2′-OMe or 2′-F, q⁵ is 5, T3′ is 2′-F, q⁶ is 1, B4′ is 2′-F, and q⁷ is 1. The RNAi agent also comprises a 5′-VP. The 5′-VP may be 5′-E-VP, 5′-Z-VP, or combination thereof.

[0566] In one embodiment, B1 is 2′-OMe or 2′-F, n¹ is 8, T1 is 2′F, n² is 3, B2 is 2′-OMe, n³ is 7, n⁴ is 0, B3 is 2′OMe, n⁵ is 3, B1′ is 2′-OMe or 2′-F, q¹ is 9, T1′ is 2′-F, q² is 1, B2′ is 2′-OMe or 2′-F, q³ is 4, T2′ is 2′-F, q⁴ is 2, B3′ is 2′-OMe or 2′-F, q⁵ is 5, T3′ is 2′-F, q⁶ is 1, B4′ is 2′-F, and q⁷ is 1. The dsRNAi RNA agent also comprises a 5′-PS₂.

[0567] In one embodiment, B1 is 2′-OMe or 2′-F, n¹ is 8, T1 is 2′F, n² is 3, B2 is 2′-OMe, n³ is 7, n⁴ is 0, B3 is 2′OMe, n⁵ is 3, B1′ is 2′-OMe or 2′-F, q¹ is 9, T1′ is 2′-F, q² is 1, B2′ is 2′-OMe or 2′-F, q³ is 4, T2′ is 2′-F, q⁴ is 2, B3′ is 2′-OMe or 2′-F, q⁵ is 5, T3′ is 2′-F, q⁶ is 1, B4′ is 2′-F, and q⁷ is 1. The RNAi agent also comprises a 5′-deoxy-5′-C-malonyl.

[0568] In one embodiment, B1 is 2′-OMe or 2′-F, n¹ is 8, T1 is 2′F, n² is 3, B2 is 2′-OMe, n³ is 7, n⁴ is 0, B3 is 2′-OMe, n⁵ is 3, B1′ is 2′-OMe or 2′-F, q¹ is 9, T1′ is 2′-F, q² is 1, B2′ is 2′-OMe or 2′-F, q³ is 4, T2′ is 2′-F, q⁴ is 2, B3′ is 2′-OMe or 2′-F, q⁵ is 5, T3′ is 2′-F, q⁶ is 1, B4′ is 2′-F, and q⁷ is 1; with two phosphorothioate internucleotide linkage modifications within position 1-5 of the sense strand (counting from the 5′-end of the sense strand), and two phosphorothioate internucleotide linkage modifications at positions 1 and 2 and two phosphorothioate internucleotide linkage modifications within positions 18-23 of the antisense strand (counting from the 5′-end of the antisense strand). The RNAi agent also comprises a 5′-P.

[0569] In one embodiment, B1 is 2′-OMe or 2′-F, n¹ is 8, T1 is 2′F, n² is 3, B2 is 2′-OMe, n³ is 7, n⁴ is 0, B3 is 2′-OMe, n⁵ is 3, B1′ is 2′-OMe or 2′-F, q¹ is 9, T1′ is 2′-F, q² is 1, B2′ is 2′-OMe or 2′-F, q³ is 4, T2′ is 2′-F, q⁴ is 2, B3′ is 2′-OMe or 2′-F, q⁵ is 5, T3′ is 2′-F, q⁶ is 1, B4′ is 2′-F, and q⁷ is 1; with two phosphorothioate internucleotide linkage modifications within position 1-5 of the sense strand (counting from the 5′-end of the sense strand), and two phosphorothioate internucleotide linkage modifications at positions 1 and 2 and two phosphorothioate internucleotide linkage modifications within positions 18-23 of the antisense strand (counting from the 5′-end of the antisense strand). The RNAi agent also comprises a 5′-PS.

[0570] In one embodiment, B1 is 2′-OMe or 2′-F, n¹ is 8, T1 is 2′F, n² is 3, B2 is 2′-OMe, n³ is 7, n⁴ is 0, B3 is 2′-OMe, n⁵ is 3, B1′ is 2′-OMe or 2′-F, q¹ is 9, T1′ is 2′-F, q² is 1, B2′ is 2′-OMe or 2′-F, q³ is 4, T2′ is 2′-F, q⁴ is 2, B3′ is 2′-OMe or 2′-F, q⁵ is 5, T3′ is 2′-F, q⁶ is 1, B4′ is 2′-F, and q⁷ is 1; with two phosphorothioate internucleotide linkage modifications within position 1-5 of the sense strand (counting from the 5′-end of the sense strand), and two phosphorothioate internucleotide linkage modifications at positions 1 and 2 and two phosphorothioate internucleotide linkage modifications within positions 18-23 of the antisense strand (counting from the 5′-end of the antisense strand). The RNAi agent also comprises a 5′-VP. The 5′-VP may be 5′-E-VP, 5′-Z-VP, or combination thereof.

[0571] In one embodiment, B1 is 2′-OMe or 2′-F, n¹ is 8, T1 is 2′F, n² is 3, B2 is 2′-OMe, n³ is 7, n⁴ is 0, B3 is 2′-OMe, n⁵ is 3, B1′ is 2′-OMe or 2′-F, q¹ is 9, T1′ is 2′-F, q² is 1, B2′ is 2′-OMe or 2′-F, q³ is 4, T2′ is 2′-F, q⁴ is 2, B3′ is 2′-OMe or 2′-F, q⁵ is 5, T3′ is 2′-F, q⁶ is 1, B4′ is 2′-F, and q⁷ is 1; with two phosphorothioate internucleotide linkage modifications within position 1-5 of the sense strand (counting from the 5′-end of the sense strand), and two phosphorothioate internucleotide linkage modifications at positions 1 and 2 and two phosphorothioate internucleotide linkage modifications within positions 18-23 of the antisense strand (counting from the 5′-end of the antisense strand). The RNAi agent also comprises a 5′-PS₂.

[0572] In one embodiment, B1 is 2′-OMe or 2′-F, n¹ is 8, T1 is 2′F, n² is 3, B2 is 2′-OMe, n³ is 7, n⁴ is 0, B3 is 2′-OMe, n⁵ is 3, B1′ is 2′-OMe or 2′-F, q¹ is 9, T1′ is 2′-F, q² is 1, B2′ is 2′-OMe or 2′-F, q³ is 4, T2′ is 2′-F, q⁴ is 2, B3′ is 2′-OMe or 2′-F, q⁵ is 5, T3′ is 2′-F, q⁶ is 1, B4′ is 2′-F, and q⁷ is 1; with two phosphorothioate internucleotide linkage modifications within position 1-5 of the sense strand (counting from the 5′-end of the sense strand), and two phosphorothioate internucleotide linkage modifications at positions 1 and 2 and two phosphorothioate internucleotide linkage modifications within positions 18-23 of the antisense strand (counting from the 5′-end of the antisense strand). The RNAi agent also comprises a 5′-deoxy-5′-C-malonyl.

[0573] In one embodiment, B1 is 2′-OMe or 2′-F, n¹ is 8, T1 is 2′F, n² is 3, B2 is 2′-OMe, n³ is 7, n⁴ is 0, B3 is 2′-OMe, n⁵ is 3, B1′ is 2′-OMe or 2′-F, q¹ is 9, T1′ is 2′-F, q² is 1, B2′ is 2′-OMe or 2′-F, q³ is 4, q⁴ is 0, B3′ is 2′-OMe or 2′-F, q⁵ is 7, T3′ is 2′-F, q⁶ is 1, B4′ is 2′-F, and q⁷ is 1. The RNAi agent also comprises a 5′-P.

[0574] In one embodiment, B1 is 2′-OMe or 2′-F, n¹ is 8, T1 is 2′F, n² is 3, B2 is 2′-OMe, n³ is 7, n⁴ is 0, B3 is 2′-OMe, n⁵ is 3, B1′ is 2′-OMe or 2′-F, q¹ is 9, T1′ is 2′-F, q² is 1, B2′ is 2′-OMe or 2′-F, q³ is 4, q⁴ is 0, B3′ is 2′-OMe or 2′-F, q⁵ is 7, T3′ is 2′-F, q⁶ is 1, B4′ is 2′-F, and q⁷ is 1. The RNAi agent also comprises a 5′-PS.

[0575] In one embodiment, B1 is 2′-OMe or 2′-F, n¹ is 8, T1 is 2′F, n² is 3, B2 is 2′-OMe, n³ is 7, n⁴ is 0, B3 is 2′-OMe, n⁵ is 3, B1′ is 2′-OMe or 2′-F, q¹ is 9, T1′ is 2′-F, q² is 1, B2′ is 2′-OMe or 2′-F, q³ is 4, q⁴ is 0, B3′ is 2′-OMe or 2′-F, q⁵ is 7, T3′ is 2′-F, q⁶ is 1, B4′ is 2′-F, and q⁷ is 1. The RNAi agent also comprises a 5′-VP. The 5′-VP may be 5′-E-VP, 5′-Z-VP, or combination thereof.

[0576] In one embodiment, B1 is 2′-OMe or 2′-F, n¹ is 8, T1 is 2′F, n² is 3, B2 is 2′-OMe, n³ is 7, n⁴ is 0, B3 is 2′-OMe, n⁵ is 3, B1′ is 2′-OMe or 2′-F, q¹ is 9, T1′ is 2′-F, q² is 1, B2′ is 2′-OMe or 2′-F, q³ is 4, q⁴ is 0, B3′ is 2′-OMe or 2′-F, q⁵ is 7, T3′ is 2′-F, q⁶ is 1, B4′ is 2′-F, and q⁷ is 1. The RNAi agent also comprises a 5′-PS₂.

[0577] In one embodiment, B1 is 2′-OMe or 2′-F, n¹ is 8, T1 is 2′F, n² is 3, B2 is 2′-OMe, n³ is 7, n⁴ is 0, B3 is 2′-OMe, n⁵ is 3, B1′ is 2′-OMe or 2′-F, q¹ is 9, T1′ is 2′-F, q² is 1, B2′ is 2′-OMe or 2′-F, q³ is 4, q⁴ is 0, B3′ is 2′-OMe or 2′-F, q⁵ is 7, T3′ is 2′-F, q⁶ is 1, B4′ is 2′-F, and q⁷ is 1. The RNAi agent also comprises a 5′-deoxy-5′-C-malonyl.

[0578] In one embodiment, B1 is 2′-OMe or 2′-F, n¹ is 8, T1 is 2′F, n² is 3, B2 is 2′-OMe, n³ is 7, n⁴ is 0, B3 is 2′-OMe, n⁵ is 3, B1′ is 2′-OMe or 2′-F, q¹ is 9, T1′ is 2′-F, q² is 1, B2′ is 2′-OMe or 2′-F, q³ is 4, q⁴ is 0, B3′ is 2′-OMe or 2′-F, q⁵ is 7, T3′ is 2′-F, q⁶ is 1, B4′ is 2′-F, and q⁷ is 1; with two phosphorothioate internucleotide linkage modifications within position 1-5 of the sense strand (counting from the 5′-end of the sense strand), and two phosphorothioate internucleotide linkage modifications at positions 1 and 2 and two phosphorothioate internucleotide linkage modifications within positions 18-23 of the antisense strand (counting from the 5′-end of the antisense strand). The RNAi agent also comprises a 5′-P.

[0579] In one embodiment, B1 is 2′-OMe or 2′-F, n¹ is 8, T1 is 2′F, n² is 3, B2 is 2′-OMe, n³ is 7, n⁴ is 0, B3 is 2′-OMe, n⁵ is 3, B1′ is 2′-OMe or 2′-F, q¹ is 9, T1′ is 2′-F, q² is 1, B2′ is 2′-OMe or 2′-F, q³ is 4, q⁴ is 0, B3′ is 2′-OMe or 2′-F, q⁵ is 7, T3′ is 2′-F, q⁶ is 1, B4′ is 2′-F, and q⁷ is 1; with two phosphorothioate internucleotide linkage modifications within position 1-5 of the sense strand (counting from the 5′-end of the sense strand), and two phosphorothioate internucleotide linkage modifications at positions 1 and 2 and two phosphorothioate internucleotide linkage modifications within positions 18-23 of the antisense strand (counting from the 5′-end of the antisense strand). The RNAi agent also comprises a 5′-PS.

[0580] In one embodiment, B1 is 2′-OMe or 2′-F, n¹ is 8, T1 is 2′F, n² is 3, B2 is 2′-OMe, n³ is 7, n⁴ is 0, B3 is 2′-OMe, n⁵ is 3, B1′ is 2′-OMe or 2′-F, q¹ is 9, T1′ is 2′-F, q² is 1, B2′ is 2′-OMe or 2′-F, q³ is 4, q⁴ is 0, B3′ is 2′-OMe or 2′-F, q⁵ is 7, T3′ is 2′-F, q⁶ is 1, B4′ is 2′-F, and q⁷ is 1; with two phosphorothioate internucleotide linkage modifications within position 1-5 of the sense strand (counting from the 5′-end of the sense strand), and two phosphorothioate internucleotide linkage modifications at positions 1 and 2 and two phosphorothioate internucleotide linkage modifications within positions 18-23 of the antisense strand (counting from the 5′-end of the antisense strand). The RNAi agent also comprises a 5′-VP. The 5′-VP may be 5′-E-VP, 5′-Z-VP, or combination thereof.

[0581] In one embodiment, B1 is 2′-OMe or 2′-F, n¹ is 8, T1 is 2′F, n² is 3, B2 is 2′-OMe, n³ is 7, n⁴ is 0, B3 is 2′-OMe, n⁵ is 3, B1′ is 2′-OMe or 2′-F, q¹ is 9, T1′ is 2′-F, q² is 1, B2′ is 2′-OMe or 2′-F, q³ is 4, q⁴ is 0, B3′ is 2′-OMe or 2′-F, q⁵ is 7, T3′ is 2′-F, q⁶ is 1, B4′ is 2′-F, and q⁷ is 1; with two phosphorothioate internucleotide linkage modifications within position 1-5 of the sense strand (counting from the 5′-end of the sense strand), and two phosphorothioate internucleotide linkage modifications at positions 1 and 2 and two phosphorothioate internucleotide linkage modifications within positions 18-23 of the antisense strand (counting from the 5′-end of the antisense strand). The RNAi agent also comprises a 5′-PS₂.

[0582] In one embodiment, B1 is 2′-OMe or 2′-F, n¹ is 8, T1 is 2′F, n² is 3, B2 is 2′-OMe, n³ is 7, n⁴ is 0, B3 is 2′-OMe, n⁵ is 3, B1′ is 2′-OMe or 2′-F, q¹ is 9, T1′ is 2′-F, q² is 1, B2′ is 2′-OMe or 2′-F, q³ is 4, q⁴ is 0, B3′ is 2′-OMe or 2′-F, q⁵ is 7, T3′ is 2′-F, q⁶ is 1, B4′ is 2′-F, and q⁷ is 1; with two phosphorothioate internucleotide linkage modifications within position 1-5 of the sense strand (counting from the 5′-end of the sense strand), and two phosphorothioate internucleotide linkage modifications at positions 1 and 2 and two phosphorothioate internucleotide linkage modifications within positions 18-23 of the antisense strand (counting from the 5′-end of the antisense strand). The RNAi agent also comprises a 5′-deoxy-5′-C-malonyl.

[0583] In one embodiment, B1 is 2′-OMe or 2′-F, n¹ is 8, T1 is 2′F, n² is 3, B2 is 2′-OMe, n³ is 7, n⁴ is 0, B3 is 2′-OMe, n⁵ is 3, B1′ is 2′-OMe or 2′-F, q¹ is 9, T1′ is 2′-F, q² is 1, B2′ is 2′-OMe or 2′-F, q³ is 4, T2′ is 2′-F, q⁴ is 2, B3′ is 2′-OMe or 2′-F, q⁵ is 5, T3′ is 2′-F, q⁶ is 1, B4′ is 2′-OMe, and q⁷ is 1; with two phosphorothioate internucleotide linkage modifications within position 1-5 of the sense strand (counting from the 5′-end of the sense strand), and two phosphorothioate internucleotide linkage modifications at positions 1 and 2 and two phosphorothioate internucleotide linkage modifications within positions 18-23 of the antisense strand (counting from the 5′-end of the antisense strand). The RNAi agent also comprises a 5′-P and a targeting ligand. In one embodiment, the 5′-P is at the 5′-end of the antisense strand, and the targeting ligand is at the 3′-end of the sense strand.

[0584] In one embodiment, B1 is 2′-OMe or 2′-F, n¹ is 8, T1 is 2′F, n² is 3, B2 is 2′-OMe, n³ is 7, n⁴ is 0, B3 is 2′-OMe, n⁵ is 3, B1′ is 2′-OMe or 2′-F, q¹ is 9, T1′ is 2′-F, q² is 1, B2′ is 2′-OMe or 2′-F, q³ is 4, T2′ is 2′-F, q⁴ is 2, B3′ is 2′-OMe or 2′-F, q⁵ is 5, T3′ is 2′-F, q⁶ is 1, B4′ is 2′-OMe, and q⁷ is 1; with two phosphorothioate internucleotide linkage modifications within position 1-5 of the sense strand (counting from the 5′-end of the sense strand), and two phosphorothioate internucleotide linkage modifications at positions 1 and 2 and two phosphorothioate internucleotide linkage modifications within positions 18-23 of the antisense strand (counting from the 5′-end of the antisense strand). The RNAi agent also comprises a 5′-PS and a targeting ligand. In one embodiment, the 5′-PS is at the 5′-end of the antisense strand, and the targeting ligand is at the 3′-end of the sense strand.

[0585] In one embodiment, B1 is 2′-OMe or 2′-F, n¹ is 8, T1 is 2′F, n² is 3, B2 is 2′-OMe, n³ is 7, n⁴ is 0, B3 is 2′-OMe, n⁵ is 3, B1′ is 2′-OMe or 2′-F, q¹ is 9, T1′ is 2′-F, q² is 1, B2′ is 2′-OMe or 2′-F, q³ is 4, T2′ is 2′-F, q⁴ is 2, B3′ is 2′-OMe or 2′-F, q⁵ is 5, T3′ is 2′-F, q⁶ is 1, B4′ is 2′-OMe, and q⁷ is 1; with two phosphorothioate internucleotide linkage modifications within position 1-5 of the sense strand (counting from the 5′-end of the sense strand), and two phosphorothioate internucleotide linkage modifications at positions 1 and 2 and two phosphorothioate internucleotide linkage modifications within positions 18-23 of the antisense strand (counting from the 5′-end of the antisense strand). The RNAi agent also comprises a 5′-VP (e.g., a 5′-E-VP, 5′-Z-VP, or combination thereof), and a targeting ligand. In one embodiment, the 5′-VP is at the 5′-end of the antisense strand, and the targeting ligand is at the 3′-end of the sense strand.

[0586] In one embodiment, B1 is 2′-OMe or 2′-F, n¹ is 8, T1 is 2′F, n² is 3, B2 is 2′-OMe, n³ is 7, n⁴ is 0, B3 is 2′-OMe, n⁵ is 3, B1′ is 2′-OMe or 2′-F, q¹ is 9, T1′ is 2′-F, q² is 1, B2′ is 2′-OMe or 2′-F, q³ is 4, T2′ is 2′-F, q⁴ is 2, B3′ is 2′-OMe or 2′-F, q⁵ is 5, T3′ is 2′-F, q⁶ is 1, B4′ is 2′-OMe, and q⁷ is 1; with two phosphorothioate internucleotide linkage modifications within position 1-5 of the sense strand (counting from the 5′-end of the sense strand), and two phosphorothioate internucleotide linkage modifications at positions 1 and 2 and two phosphorothioate internucleotide linkage modifications within positions 18-23 of the antisense strand (counting from the 5′-end of the antisense strand). The RNAi agent also comprises a 5′-PS₂ and a targeting ligand. In one embodiment, the 5′-PS₂ is at the 5′-end of the antisense strand, and the targeting ligand is at the 3′-end of the sense strand.

[0587] In one embodiment, B1 is 2′-OMe or 2′-F, n¹ is 8, T1 is 2′F, n² is 3, B2 is 2′-OMe, n³ is 7, n⁴ is 0, B3 is 2′-OMe, n⁵ is 3, B1′ is 2′-OMe or 2′-F, q¹ is 9, T1′ is 2′-F, q² is 1, B2′ is 2′-OMe or 2′-F, q³ is 4, T2′ is 2′-F, q⁴ is 2, B3′ is 2′-OMe or 2′-F, q⁵ is 5, T3′ is 2′-F, q⁶ is 1, B4′ is 2′-OMe, and q⁷ is 1; with two phosphorothioate internucleotide linkage modifications within position 1-5 of the sense strand (counting from the 5′-end of the sense strand), and two phosphorothioate internucleotide linkage modifications at positions 1 and 2 and two phosphorothioate internucleotide linkage modifications within positions 18-23 of the antisense strand (counting from the 5′-end of the antisense strand). The RNAi agent also comprises a 5′-deoxy-5′-C-malonyl and a targeting ligand. In one embodiment, the 5′-deoxy-5′-C-malonyl is at the 5′-end of the antisense strand, and the targeting ligand is at the 3′-end of the sense strand.

[0588] In one embodiment, B1 is 2′-OMe or 2′-F, n¹ is 8, T1 is 2′F, n² is 3, B2 is 2′-OMe, n³ is 7, n⁴ is 0, B3 is 2′-OMe, n⁵ is 3, B1′ is 2′-OMe or 2′-F, q¹ is 9, T1′ is 2′-F, q² is 1, B2′ is 2′-OMe or 2′-F, q³ is 4, q⁴ is 0, B3′ is 2′-OMe or 2′-F, q⁵ is 7, T3′ is 2′-F, q⁶ is 1, B4′ is 2′-OMe, and q⁷ is 1; with two phosphorothioate internucleotide linkage modifications within position 1-5 of the sense strand (counting from the 5′-end), and two phosphorothioate internucleotide linkage modifications at positions 1 and 2 and two phosphorothioate internucleotide linkage modifications within positions 18-23 of the antisense strand (counting from the 5′-end). The RNAi agent also comprises a 5′-P and a targeting ligand. In one embodiment, the 5′-P is at the 5′-end of the antisense strand, and the targeting ligand is at the 3′-end of the sense strand.

[0589] In one embodiment, B1 is 2′-OMe or 2′-F, n¹ is 8, T1 is 2′F, n² is 3, B2 is 2′-OMe, n³ is 7, n⁴ is 0, B3 is 2′-OMe, n⁵ is 3, B1′ is 2′-OMe or 2′-F, q¹ is 9, T1′ is 2′-F, q² is 1, B2′ is 2′-OMe or 2′-F, q³ is 4, q⁴ is 0, B3′ is 2′-OMe or 2′-F, q⁵ is 7, T3′ is 2′-F, q⁶ is 1, B4′ is 2′-OMe, and q⁷ is 1; with two phosphorothioate internucleotide linkage modifications within position 1-5 of the sense strand (counting from the 5′-end), and two phosphorothioate internucleotide linkage modifications at positions 1 and 2 and two phosphorothioate internucleotide linkage modifications within positions 18-23 of the antisense strand (counting from the 5′-end). The RNAi agent also comprises a 5′-PS and a targeting ligand. In one embodiment, the 5′-PS is at the 5′-end of the antisense strand, and the targeting ligand is at the 3′-end of the sense strand.

[0590] In one embodiment, B1 is 2′-OMe or 2′-F, n¹ is 8, T1 is 2′F, n² is 3, B2 is 2′-OMe, n³ is 7, n⁴ is 0, B3 is 2′-OMe, n⁵ is 3, B1′ is 2′-OMe or 2′-F, q¹ is 9, T1′ is 2′-F, q² is 1, B2′ is 2′-OMe or 2′-F, q³ is 4, q⁴ is 0, B3′ is 2′-OMe or 2′-F, q⁵ is 7, T3′ is 2′-F, q⁶ is 1, B4′ is 2′-OMe, and q⁷ is 1; with two phosphorothioate internucleotide linkage modifications within position 1-5 of the sense strand (counting from the 5′-end), and two phosphorothioate internucleotide linkage modifications at positions 1 and 2 and two phosphorothioate internucleotide linkage modifications within positions 18-23 of the antisense strand (counting from the 5′-end). The RNAi agent also comprises a 5′-VP (e.g., a 5′-E-VP, 5′-Z-VP, or combination thereof) and a targeting ligand. In one embodiment, the 5′-VP is at the 5′-end of the antisense strand, and the targeting ligand is at the 3′-end of the sense strand.

In one embodiment, B1 is 2′-OMe or 2′-F, n¹ is 8, T1 is 2′F, n² is 3, B2 is 2′-OMe, n³ is 7, n⁴ is 0, B3 is 2′-OMe, n⁵ is 3, B1′ is 2′-OMe or 2′-F, q¹ is 9, T1′ is 2′-F, q² is 1, B2′ is 2′-OMe or 2′-F, q³ is 4, q⁴ is 0, B3′ is 2′-OMe or 2′-F, q⁵ is 7, T3′ is 2′-F, q⁶ is 1, B4′ is 2′-OMe, and q⁷ is 1; with two phosphorothioate internucleotide linkage modifications within position 1-5 of the sense strand (counting from the 5′-end), and two phosphorothioate internucleotide linkage modifications at positions 1 and 2 and two phosphorothioate internucleotide linkage modifications within positions 18-23 of the antisense strand (counting from the 5′-end). The RNAi agent also comprises a 5′-PS₂ and a targeting ligand. In one embodiment, the 5′-PS₂ is at the 5′-end of the antisense strand, and the targeting ligand is at the 3′-end of the sense strand.

[0591] In one embodiment, B1 is 2′-OMe or 2′-F, n¹ is 8, T1 is 2′F, n² is 3, B2 is 2′-OMe, n³ is 7, n⁴ is 0, B3 is 2′-OMe, n⁵ is 3, B1′ is 2′-OMe or 2′-F, q¹ is 9, T1′ is 2′-F, q² is 1, B2′ is 2′-OMe or 2′-F, q³ is 4, q⁴ is 0, B3′ is 2′-OMe or 2′-F, q⁵ is 7, T3′ is 2′-F, q⁶ is 1, B4′ is 2′-OMe, and q⁷ is 1; with two phosphorothioate internucleotide linkage modifications within position 1-5 of the sense strand (counting from the 5′-end), and two phosphorothioate internucleotide linkage modifications at positions 1 and 2 and two phosphorothioate internucleotide linkage modifications within positions 18-23 of the antisense strand (counting from the 5′-end). The RNAi agent also comprises a 5′-deoxy-5′-C-malonyl and a targeting ligand. In one embodiment, the 5′-deoxy-5′-C-malonyl is at the 5′-end of the antisense strand, and the targeting ligand is at the 3′-end of the sense strand.

[0592] In one embodiment, B1 is 2′-OMe or 2′-F, n¹ is 8, T1 is 2′F, n² is 3, B2 is 2′-OMe, n³ is 7, n⁴ is 0, B3 is 2′-OMe, n⁵ is 3, B1′ is 2′-OMe or 2′-F, q¹ is 9, T1′ is 2′-F, q² is 1, B2′ is 2′-OMe or 2′-F, q³ is 4, T2′ is 2′-F, q⁴ is 2, B3′ is 2′-OMe or 2′-F, q⁵ is 5, T3′ is 2′-F, q⁶ is 1, B4′ is 2′-F, and q⁷ is 1; with two phosphorothioate internucleotide linkage modifications within position 1-5 of the sense strand (counting from the 5′-end of the sense strand), and two phosphorothioate internucleotide linkage modifications at positions 1 and 2 and two phosphorothioate internucleotide linkage modifications within positions 18-23 of the antisense strand (counting from the 5′-end of the antisense strand). The RNAi agent also comprises a 5′-P and a targeting ligand. In one embodiment, the 5′-P is at the 5′-end of the antisense strand, and the targeting ligand is at the 3′-end of the sense strand.

[0593] In one embodiment, B1 is 2′-OMe or 2′-F, n¹ is 8, T1 is 2′F, n² is 3, B2 is 2′-OMe, n³ is 7, n⁴ is 0, B3 is 2′-OMe, n⁵ is 3, B1′ is 2′-OMe or 2′-F, q¹ is 9, T1′ is 2′-F, q² is 1, B2′ is 2′-OMe or 2′-F, q³ is 4, T2′ is 2′-F, q⁴ is 2, B3′ is 2′-OMe or 2′-F, q⁵ is 5, T3′ is 2′-F, q⁶ is 1, B4′ is 2′-F, and q⁷ is 1; with two phosphorothioate internucleotide linkage modifications within position 1-5 of the sense strand (counting from the 5′-end of the sense strand), and two phosphorothioate internucleotide linkage modifications at positions 1 and 2 and two phosphorothioate internucleotide linkage modifications within positions 18-23 of the antisense strand (counting from the 5′-end of the antisense strand). The RNAi agent also comprises a 5′-PS and a targeting ligand. In one embodiment, the 5′-PS is at the 5′-end of the antisense strand, and the targeting ligand is at the 3′-end of the sense strand.

[0594] In one embodiment, B1 is 2′-OMe or 2′-F, n¹ is 8, T1 is 2′F, n² is 3, B2 is 2′-OMe, n³ is 7, n⁴ is 0, B3 is 2′-OMe, n⁵ is 3, B1′ is 2′-OMe or 2′-F, q¹ is 9, T1′ is 2′-F, q² is 1, B2′ is 2′-OMe or 2′-F, q³ is 4, T2′ is 2′-F, q⁴ is 2, B3′ is 2′-OMe or 2′-F, q⁵ is 5, T3′ is 2′-F, q⁶ is 1, B4′ is 2′-F, and q⁷ is 1; with two phosphorothioate internucleotide linkage modifications within position 1-5 of the sense strand (counting from the 5′-end of the sense strand), and two phosphorothioate internucleotide linkage modifications at positions 1 and 2 and two phosphorothioate internucleotide linkage modifications within positions 18-23 of the antisense strand (counting from the 5′-end of the antisense strand). The RNAi agent also comprises a 5′-VP (e.g., a 5′-E-VP, 5′-Z-VP, or combination thereof) and a targeting ligand. In one embodiment, the 5′-VP is at the 5′-end of the antisense strand, and the targeting ligand is at the 3′-end of the sense strand.

[0595] In one embodiment, B1 is 2′-OMe or 2′-F, n¹ is 8, T1 is 2′F, n² is 3, B2 is 2′-OMe, n³ is 7, n⁴ is 0, B3 is 2′-OMe, n⁵ is 3, B1′ is 2′-OMe or 2′-F, q¹ is 9, T1′ is 2′-F, q² is 1, B2′ is 2′-OMe or 2′-F, q³ is 4, T2′ is 2′-F, q⁴ is 2, B3′ is 2′-OMe or 2′-F, q⁵ is 5, T3′ is 2′-F, q⁶ is 1, B4′ is 2′-F, and q⁷ is 1; with two phosphorothioate internucleotide linkage modifications within position 1-5 of the sense strand (counting from the 5′-end of the sense strand), and two phosphorothioate internucleotide linkage modifications at positions 1 and 2 and two phosphorothioate internucleotide linkage modifications within positions 18-23 of the antisense strand (counting from the 5′-end of the antisense strand). The RNAi agent also comprises a 5′-PS₂ and a targeting ligand. In one embodiment, the 5′-PS₂ is at the 5′-end of the antisense strand, and the targeting ligand is at the 3′-end of the sense strand.

[0596] In one embodiment, B1 is 2′-OMe or 2′-F, n¹ is 8, T1 is 2′F, n² is 3, B2 is 2′-OMe, n³ is 7, n⁴ is 0, B3 is 2′-OMe, n⁵ is 3, B1′ is 2′-OMe or 2′-F, q¹ is 9, T1′ is 2′-F, q² is 1, B2′ is 2′-OMe or 2′-F, q³ is 4, T2′ is 2′-F, q⁴ is 2, B3′ is 2′-OMe or 2′-F, q⁵ is 5, T3′ is 2′-F, q⁶ is 1, B4′ is 2′-F, and q⁷ is 1; with two phosphorothioate internucleotide linkage modifications within position 1-5 of the sense strand (counting from the 5′-end of the sense strand), and two phosphorothioate internucleotide linkage modifications at positions 1 and 2 and two phosphorothioate internucleotide linkage modifications within positions 18-23 of the antisense strand (counting from the 5′-end of the antisense strand). The RNAi agent also comprises a 5′-deoxy-5′-C-malonyl and a targeting ligand. In one embodiment, the 5′-deoxy-5′-C-malonyl is at the 5′-end of the antisense strand, and the targeting ligand is at the 3′-end of the sense strand.

[0597] In one embodiment, B1 is 2′-OMe or 2′-F, n¹ is 8, T1 is 2′F, n² is 3, B2 is 2′-OMe, n³ is 7, n⁴ is 0, B3 is 2′-OMe, n⁵ is 3, B1′ is 2′-OMe or 2′-F, q¹ is 9, T1′ is 2′-F, q² is 1, B2′ is 2′-OMe or 2′-F, q³ is 4, q⁴ is 0, B3′ is 2′-OMe or 2′-F, q⁵ is 7, T3′ is 2′-F, q⁶ is 1, B4′ is 2′-F, and q⁷ is 1; with two phosphorothioate internucleotide linkage modifications within position 1-5 of the sense strand (counting from the 5′-end of the sense strand), and two phosphorothioate internucleotide linkage modifications at positions 1 and 2 and two phosphorothioate internucleotide linkage modifications within positions 18-23 of the antisense strand (counting from the 5′-end of the antisense strand). The RNAi agent also comprises a 5′-P and a targeting ligand. In one embodiment, the 5′-P is at the 5′-end of the antisense strand, and the targeting ligand is at the 3′-end of the sense strand.

[0598] In one embodiment, B1 is 2′-OMe or 2′-F, n¹ is 8, T1 is 2′F, n² is 3, B2 is 2′-OMe, n³ is 7, n⁴ is 0, B3 is 2′-OMe, n⁵ is 3, B1′ is 2′-OMe or 2′-F, q¹ is 9, T1′ is 2′-F, q² is 1, B2′ is 2′-OMe or 2′-F, q³ is 4, q⁴ is 0, B3′ is 2′-OMe or 2′-F, q⁵ is 7, T3′ is 2′-F, q⁶ is 1, B4′ is 2′-F, and q⁷ is 1; with two phosphorothioate internucleotide linkage modifications within position 1-5 of the sense strand (counting from the 5′-end of the sense strand), and two phosphorothioate internucleotide linkage modifications at positions 1 and 2 and two phosphorothioate internucleotide linkage modifications within positions 18-23 of the antisense strand (counting from the 5′-end of the antisense strand). The RNAi agent also comprises a 5′-PS and a targeting ligand. In one embodiment, the 5′-PS is at the 5′-end of the antisense strand, and the targeting ligand is at the 3′-end of the sense strand.

[0599] In one embodiment, B1 is 2′-OMe or 2′-F, n¹ is 8, T1 is 2′F, n² is 3, B2 is 2′-OMe, n³ is 7, n⁴ is 0, B3 is 2′-OMe, n⁵ is 3, B1′ is 2′-OMe or 2′-F, q¹ is 9, T1′ is 2′-F, q² is 1, B2′ is 2′-OMe or 2′-F, q³ is 4, q⁴ is 0, B3′ is 2′-OMe or 2′-F, q⁵ is 7, T3′ is 2′-F, q⁶ is 1, B4′ is 2′-F, and q⁷ is 1; with two phosphorothioate internucleotide linkage modifications within position 1-5 of the sense strand (counting from the 5′-end of the sense strand), and two phosphorothioate internucleotide linkage modifications at positions 1 and 2 and two phosphorothioate internucleotide linkage modifications within positions 18-23 of the antisense strand (counting from the 5′-end of the antisense strand). The RNAi agent also comprises a 5′-VP (e.g., a 5′-E-VP, 5′-Z-VP, or combination thereof) and a targeting ligand. In one embodiment, the 5′-VP is at the 5′-end of the antisense strand, and the targeting ligand is at the 3′-end of the sense strand.

[0600] In one embodiment, B1 is 2′-OMe or 2′-F, n¹ is 8, T1 is 2′F, n² is 3, B2 is 2′-OMe, n³ is 7, n⁴ is 0, B3 is 2′-OMe, n⁵ is 3, B1′ is 2′-OMe or 2′-F, q¹ is 9, T1′ is 2′-F, q² is 1, B2′ is 2′-OMe or 2′-F, q³ is 4, q⁴ is 0, B3′ is 2′-OMe or 2′-F, q⁵ is 7, T3′ is 2′-F, q⁶ is 1, B4′ is 2′-F, and q⁷ is 1; with two phosphorothioate internucleotide linkage modifications within position 1-5 of the sense strand (counting from the 5′-end of the sense strand), and two phosphorothioate internucleotide linkage modifications at positions 1 and 2 and two phosphorothioate internucleotide linkage modifications within positions 18-23 of the antisense strand (counting from the 5′-end of the antisense strand). The RNAi agent also comprises a 5′-PS₂ and a targeting ligand. In one embodiment, the 5′-PS₂ is at the 5′-end of the antisense strand, and the targeting ligand is at the 3′-end of the sense strand.

[0601] In one embodiment, B1 is 2′-OMe or 2′-F, n¹ is 8, T1 is 2′F, n² is 3, B2 is 2′-OMe, n³ is 7, n⁴ is 0, B3 is 2′-OMe, n⁵ is 3, B1′ is 2′-OMe or 2′-F, q¹ is 9, T1′ is 2′-F, q² is 1, B2′ is 2′-OMe or 2′-F, q³ is 4, q⁴ is 0, B3′ is 2′-OMe or 2′-F, q⁵ is 7, T3′ is 2′-F, q⁶ is 1, B4′ is 2′-F, and q⁷ is 1; with two phosphorothioate internucleotide linkage modifications within position 1-5 of the sense strand (counting from the 5′-end of the sense strand), and two phosphorothioate internucleotide linkage modifications at positions 1 and 2 and two phosphorothioate internucleotide linkage modifications within positions 18-23 of the antisense strand (counting from the 5′-end of the antisense strand). The RNAi agent also comprises a 5′-deoxy-5′-C-malonyl and a targeting ligand. In one embodiment, the 5′-deoxy-5′-C-malonyl is at the 5′-end of the antisense strand, and the targeting ligand is at the 3′-end of the sense strand.

[0602] In a particular embodiment, an RNAi agent of the present invention comprises:
[0603] (a) a sense strand having:
   [0604] (i) a length of 21 nucleotides;
   [0605] (ii) an ASGPR ligand attached to the 3′-end, wherein said ASGPR ligand comprises three GalNAc derivatives attached through a trivalent branched linker; and
   [0606] (iii) 2′-F modifications at positions 1, 3, 5, 7, 9 to 11, 13, 17, 19, and 21, and 2′-OMe modifications at positions 2, 4, 6, 8, 12, 14 to 16, 18, and 20 (counting from the 5′ end);
   [0607] and
[0608] (b) an antisense strand having:
   [0609] (i) a length of 23 nucleotides;
   [0610] (ii) 2′-OMe modifications at positions 1, 3, 5, 9, 11 to 13, 15, 17, 19, 21, and 23, and 2′F modifications at positions 2, 4, 6 to 8, 10, 14, 16, 18, 20, and 22 (counting from the 5′ end); and
   [0611] (iii) phosphorothioate internucleotide linkages between nucleotide positions 21 and 22, and between nucleotide positions 22 and 23 (counting from the 5′ end);
   [0612] wherein the dsRNA agents have a two nucleotide overhang at the 3′-end of the antisense strand, and a blunt end at the 5′-end of the antisense strand.

[0613] In another particular embodiment, an RNAi agent of the present invention comprises:
[0614] (a) a sense strand having:
   [0615] (i) a length of 21 nucleotides;
   [0616] (ii) an ASGPR ligand attached to the 3′-end, wherein said ASGPR ligand comprises three GalNAc derivatives attached through a trivalent branched linker;
   [0617] (iii) 2′-F modifications at positions 1, 3, 5, 7, 9 to 11, 13, 15, 17, 19, and 21, and 2′-OMe modifications at positions 2, 4, 6, 8, 12, 14, 16, 18, and 20 (counting from the 5′ end); and
   [0618] (iv) phosphorothioate internucleotide linkages between nucleotide positions 1 and 2, and between nucleotide positions 2 and 3 (counting from the 5′ end);
   [0619] and
[0620] (b) an antisense strand having:
   [0621] (i) a length of 23 nucleotides;
   [0622] (ii) 2′-OMe modifications at positions 1, 3, 5, 7, 9, 11 to 13, 15, 17, 19, and 21 to 23, and 2′F modifications at positions 2, 4, 6, 8, 10, 14, 16, 18, and 20 (counting from the 5′ end); and
   [0623] (iii) phosphorothioate internucleotide linkages between nucleotide positions 1 and 2, between nucleotide positions 2 and 3, between nucleotide positions 21 and 22, and between nucleotide positions 22 and 23 (counting from the 5′ end);
[0624] wherein the RNAi agents have a two nucleotide overhang at the 3′-end of the antisense strand, and a blunt end at the 5′-end of the antisense strand.

[0625] In another particular embodiment, a RNAi agent of the present invention comprises:
[0626] (a) a sense strand having:
   [0627] (i) a length of 21 nucleotides;
   [0628] (ii) an ASGPR ligand attached to the 3′-end, wherein said ASGPR ligand comprises three GalNAc derivatives attached through a trivalent branched linker;
   [0629] (iii) 2′-OMe modifications at positions 1 to 6, 8, 10, and 12 to 21, 2′-F modifications at positions 7, and 9, and a desoxy-nucleotide (e.g. dT) at position 11 (counting from the 5′ end); and
   [0630] (iv) phosphorothioate internucleotide linkages between nucleotide positions 1 and 2, and between nucleotide positions 2 and 3 (counting from the 5′ end);
   [0631] and
[0632] (b) an antisense strand having:
   [0633] (i) a length of 23 nucleotides;
   [0634] (ii) 2′-OMe modifications at positions 1, 3, 7, 9, 11, 13, 15, 17, and 19 to 23, and 2′-F modifications at positions 2, 4 to 6, 8, 10, 12, 14, 16, and 18 (counting from the 5′ end); and
   [0635] (iii) phosphorothioate internucleotide linkages between nucleotide positions 1 and 2, between nucleotide positions 2 and 3, between nucleotide positions 21 and 22, and between nucleotide positions 22 and 23 (counting from the 5′ end);
[0636] wherein the RNAi agents have a two nucleotide overhang at the 3′-end of the antisense strand, and a blunt end at the 5′-end of the antisense strand.

[0637] In another particular embodiment, aRNAi agent of the present invention comprises:
[0638] (a) a sense strand having:
   [0639] (i) a length of 21 nucleotides;
   [0640] (ii) an ASGPR ligand attached to the 3′-end, wherein said ASGPR ligand comprises three GalNAc derivatives attached through a trivalent branched linker;
   [0641] (iii) 2′-OMe modifications at positions 1 to 6, 8, 10, 12, 14, and 16 to 21, and 2′-F modifications at positions 7, 9, 11, 13, and 15; and
   [0642] (iv) phosphorothioate internucleotide linkages between nucleotide positions 1 and 2, and between nucleotide positions 2 and 3 (counting from the 5′ end);
   [0643] and
[0644] (b) an antisense strand having:
   [0645] (i) a length of 23 nucleotides;
   [0646] (ii) 2′-OMe modifications at positions 1, 5, 7, 9, 11, 13, 15, 17, 19, and 21 to 23, and 2′-F modifications at positions 2 to 4, 6, 8, 10, 12, 14, 16, 18, and 20 (counting from the 5′ end); and
   [0647] (iii) phosphorothioate internucleotide linkages between nucleotide positions 1 and 2, between nucleotide positions 2 and 3, between nucleotide positions 21 and 22, and between nucleotide positions 22 and 23 (counting from the 5′ end);
[0648] wherein the RNAi agents have a two nucleotide overhang at the 3′-end of the antisense strand, and a blunt end at the 5′-end of the antisense strand.

[0649] In another particular embodiment, a RNAi agent of the present invention comprises:
[0650] (a) a sense strand having:
   [0651] (i) a length of 21 nucleotides;
   [0652] (ii) an ASGPR ligand attached to the 3′-end, wherein said ASGPR ligand comprises three GalNAc derivatives attached through a trivalent branched linker;
   [0653] (iii) 2′-OMe modifications at positions 1 to 9, and 12 to 21, and 2′-F modifications at positions 10, and 11; and
   [0654] (iv) phosphorothioate internucleotide linkages between nucleotide positions 1 and 2, and between nucleotide positions 2 and 3 (counting from the 5′ end);
   [0655] and
[0656] (b) an antisense strand having:
   [0657] (i) a length of 23 nucleotides;
   [0658] (ii) 2′-OMe modifications at positions 1, 3, 5, 7, 9, 11 to 13, 15, 17, 19, and 21 to 23, and 2′-F modifications at positions 2, 4, 6, 8, 10, 14, 16, 18, and 20 (counting from the 5′ end); and
   [0659] (iii) phosphorothioate internucleotide linkages between nucleotide positions 1 and 2, between nucleotide positions 2 and 3, between nucleotide positions 21 and 22, and between nucleotide positions 22 and 23 (counting from the 5′ end);
[0660] wherein the RNAi agents have a two nucleotide overhang at the 3′-end of the antisense strand, and a blunt end at the 5′-end of the antisense strand.

[0661] In another particular embodiment, a RNAi agent of the present invention comprises:
[0662] (a) a sense strand having:
   [0663] (i) a length of 21 nucleotides;
   [0664] (ii) an ASGPR ligand attached to the 3′-end, wherein said ASGPR ligand comprises three GalNAc derivatives attached through a trivalent branched linker;
   [0665] (iii) 2′-F modifications at positions 1, 3, 5, 7, 9 to 11, and 13, and 2′-OMe modifications at positions 2, 4, 6, 8, 12, and 14 to 21; and
   [0666] (iv) phosphorothioate internucleotide linkages between nucleotide positions 1 and 2, and between nucleotide positions 2 and 3 (counting from the 5′ end);
   [0667] and
[0668] (b) an antisense strand having:
   [0669] (i) a length of 23 nucleotides;
   [0670] (ii) 2′-OMe modifications at positions 1, 3, 5 to 7, 9, 11 to 13, 15, 17 to 19, and 21 to 23, and 2′-F modifications at positions 2, 4, 8, 10, 14, 16, and 20 (counting from the 5′ end); and
   [0671] (iii) phosphorothioate internucleotide linkages between nucleotide positions 1 and 2, between nucleotide positions 2 and 3, between nucleotide positions 21 and 22, and between nucleotide positions 22 and 23 (counting from the 5′ end);
[0672] wherein the RNAi agents have a two nucleotide overhang at the 3′-end of the antisense strand, and a blunt end at the 5′-end of the antisense strand.

[0673] In another particular embodiment, a RNAi agents of the present invention comprises:
[0674] (a) a sense strand having:
   [0675] (i) a length of 21 nucleotides;
   [0676] (ii) an ASGPR ligand attached to the 3′-end, wherein said ASGPR ligand comprises three GalNAc derivatives attached through a trivalent branched linker;
   [0677] (iii) 2′-OMe modifications at positions 1, 2, 4, 6, 8, 12, 14, 15, 17, and 19 to 21, and 2′-F modifications at positions 3, 5, 7, 9 to 11, 13, 16, and 18; and
   [0678] (iv) phosphorothioate internucleotide linkages between nucleotide positions 1 and 2, and between nucleotide positions 2 and 3 (counting from the 5′ end);
   [0679] and
[0680] (b) an antisense strand having:
   [0681] (i) a length of 25 nucleotides;
   [0682] (ii) 2′-OMe modifications at positions 1, 4, 6, 7, 9, 11 to 13, 15, 17, and 19 to 23, 2′-F modifications at positions 2, 3, 5, 8, 10, 14, 16, and 18, and desoxy-nucleotides (e.g. dT) at positions 24 and 25 (counting from the 5′ end); and
   [0683] (iii) phosphorothioate internucleotide linkages between nucleotide positions 1 and 2, between nucleotide positions 2 and 3, between nucleotide positions 21 and 22, and between nucleotide positions 22 and 23 (counting from the 5′ end);
[0684] wherein the RNAi agents have a four nucleotide overhang at the 3′-end of the antisense strand, and a blunt end at the 5′-end of the antisense strand.

[0685] In another particular embodiment, a RNAi agent of the present invention comprises:
[0686] (a) a sense strand having:
   [0687] (i) a length of 21 nucleotides;
   [0688] (ii) an ASGPR ligand attached to the 3′-end, wherein said ASGPR ligand comprises three GalNAc derivatives attached through a trivalent branched linker;
   [0689] (iii) 2′-OMe modifications at positions 1 to 6, 8, and 12 to 21, and 2′-F modifications at positions 7, and 9 to 11; and
   [0690] (iv) phosphorothioate internucleotide linkages between nucleotide positions 1 and 2, and between nucleotide positions 2 and 3 (counting from the 5′ end);
   [0691] and
[0692] (b) an antisense strand having:
   [0693] (i) a length of 23 nucleotides;
   [0694] (ii) 2′-OMe modifications at positions 1, 3 to 5, 7, 8, 10 to 13, 15, and 17 to 23, and 2′-F modifications at positions 2, 6, 9, 14, and 16 (counting from the 5′ end); and
   [0695] (iii) phosphorothioate internucleotide linkages between nucleotide positions 1 and 2, between nucleotide positions 2 and 3, between nucleotide positions 21 and 22, and between nucleotide positions 22 and 23 (counting from the 5′ end);
[0696] wherein the RNAi agents have a two nucleotide overhang at the 3′-end of the antisense strand, and a blunt end at the 5′-end of the antisense strand.

[0697] In another particular embodiment, a RNAi agent of the present invention comprises:
[0698] (a) a sense strand having:
   [0699] (i) a length of 21 nucleotides;
   [0700] (ii) an ASGPR ligand attached to the 3′-end, wherein said ASGPR ligand comprises three GalNAc derivatives attached through a trivalent branched linker;
   [0701] (iii) 2′-OMe modifications at positions 1 to 6, 8, and 12 to 21, and 2′-F modifications at positions 7, and 9 to 11; and
   [0702] (iv) phosphorothioate internucleotide linkages between nucleotide positions 1 and 2, and between nucleotide positions 2 and 3 (counting from the 5′ end);
   [0703] and
[0704] (b) an antisense strand having:
   [0705] (i) a length of 23 nucleotides;
   [0706] (ii) 2′-OMe modifications at positions 1, 3 to 5, 7, 10 to 13, 15, and 17 to 23, and 2′-F modifications at positions 2, 6, 8, 9, 14, and 16 (counting from the 5′ end); and
[0707] (iii) phosphorothioate internucleotide linkages between nucleotide positions 1 and 2, between nucleotide positions 2 and 3, between nucleotide positions 21 and 22, and between nucleotide positions 22 and 23 (counting from the 5′ end);
[0708] wherein the RNAi agents have a two nucleotide overhang at the 3′-end of the antisense strand, and a blunt end at the 5′-end of the antisense strand.

[0709] In another particular embodiment, a RNAi agent of the present invention comprises:
[0710] (a) a sense strand having:
   [0711] (i) a length of 19 nucleotides;
   [0712] (ii) an ASGPR ligand attached to the 3′-end, wherein said ASGPR ligand comprises three GalNAc derivatives attached through a trivalent branched linker;
   [0713] (iii) 2′-OMe modifications at positions 1 to 4, 6, and 10 to 19, and 2′-F modifications at positions 5, and 7 to 9; and
   [0714] (iv) phosphorothioate internucleotide linkages between nucleotide positions 1 and 2, and between nucleotide positions 2 and 3 (counting from the 5′ end);
   [0715] and
[0716] (b) an antisense strand having:
   [0717] (i) a length of 21 nucleotides;
   [0718] (ii) 2′-OMe modifications at positions 1, 3 to 5, 7, 10 to 13, 15, and 17 to 21, and 2′-F modifications at positions 2, 6, 8, 9, 14, and 16 (counting from the 5′ end); and
   [0719] (iii) phosphorothioate internucleotide linkages between nucleotide positions 1 and 2, between nucleotide positions 2 and 3, between nucleotide positions 19 and 20, and between nucleotide positions 20 and 21 (counting from the 5′ end);
[0720] wherein the RNAi agents have a two nucleotide overhang at the 3′-end of the antisense strand, and a blunt end at the 5′-end of the antisense strand.

### B. Single Stranded Antisense Polynucleotide Agents of the Invention

[0721] In one embodiment, a nucleic acid inhibitor for use in the methods of the invention is a single stranded antisense polynucleotide agent that targets LDHA, a single stranded antisense polynucleotide agent that targets PRODH2, and/or a single stranded antisense polynucleotide agent that targets HAO1.

[0722] Suitable antisense polynucleotide agent for use in the methods of the invention are known in the art and described in, for example, U.S. Patent Publication No. 2018/0092990 (Attorney Docket No. 121301-03602), the entire contents of which are incorporated herein by reference.

[0723] In certain specific embodiments, a nucleic acid inhibitor of the present invention is a single stranded antisense polynucleotide agent which inhibits the expression of an LDHA gene and is selected from the group of antisense sequence listed in any one of Tables 2-3. In some embodiments, a nucleic acid inhibitor of the present invention is a single stranded antisense polynucleotide agent which inhibits the expression of an HAO1 gene and is selected from the group of antisense sequence listed in any one of Tables 4-14. In some embodiments, a nucleic acid inhibitor of the present invention is a single stranded antisense polynucleotide agent which inhibits the expression of a PRODH2 gene and is selected from the group of antisense sequence listed in any one of Tables 15-16. Any of these agents may further comprise a ligand.

[0724] The polynucleotide agents of the invention include a nucleotide sequence which is about 4 to about 50 nucleotides or less in length and which is about 80% complementary to at least part of an mRNA transcript of an LDHA gene, a PRODH2 gene and/or HAO1 gene. The use of these polynucleotide agents enables the targeted inhibition of RNA expression and/or activity of a corresponding gene in subjects, such as human subjects.

[0725] The polynucleotide agents, e.g., antisense polynucleotide agents, and compositions comprising such agents, of the invention target an LDHA gene, a PRODH2 gene and/or an HAO1 gene and inhibit the expression of the gene. In one embodiment, the polynucleotide agents inhibit the expression of the gene in a cell, such as a cell within a subject, e.g., a mammal, such as a human having or at risk of developing a non-primary hyperoxaluria disease or disorder.

[0726] The polynucleotide agents of the invention include a region of complementarity which is complementary to at least a part of an mRNA formed in the expression of an LDHA gene, a PRODH2 gene and/or an HAO1 gene. The region of complementarity may be about 50 nucleotides or less in length (e.g., about 50, 49, 48, 47, 46, 45, 44, 43, 42, 41, 40, 39, 38, 37, 36, 35, 34, 33, 32, 31, 30, 29, 28, 27, 26, 25, 24, 23, 22, 21, 20, 19, 18, 17, 16, 15, 14, 13, 12, 11, 10, 9, 8, 7, 6, 5, or 4 nucleotides or less in length). Upon contact with a cell expressing the gene, the polynucleotide agent inhibits the expression of the gene (e.g., a human, a primate, a non-primate, or a bird LDHA gene, PRODH2 gene and/or HAO1 gene) by at least about 10% as assayed by, for example, a PCR or branched DNA (bDNA)-based method, or by a protein-based method, such as by immunofluorescence analysis, using, for example, western Blotting or flow cytometric techniques.

[0727] The region of complementarity between a polynucleotide agent and a target sequence may be substantially complementary (e.g., there is a sufficient degree of complementarity between the polynucleotide agent and a target nucleic acid to so that they specifically hybridize and induce a desired effect), but is generally fully complementary to the target sequence. The target sequence can be derived from the sequence of an mRNA formed during the expression of an LDHA gene, a PRODH2 gene and/or an HAO1 gene.

[0728] In one aspect, an antisense polynucleotide agent, specifically hybridizes to a target nucleic acid molecule, such as the mRNA encoding LDHA, and comprises a contiguous nucleotide sequence which corresponds to the reverse complement of a nucleotide sequence of SEQ ID NOs:1, 3, 5, 7, or 9, or a fragment of SEQ ID NOs:1, 3, 5, 7, or 9.

[0729] In one aspect, an antisense polynucleotide agent, specifically hybridizes to a target nucleic acid molecule, such as the mRNA encoding HAO1, and comprises a contiguous nucleotide sequence which corresponds to the reverse complement of a nucleotide sequence of SEQ ID NO:21, or a fragment of SEQ ID NO:21.

[0730] In another aspect, an antisense polynucleotide agent, specifically hybridizes to a target nucleic acid molecule, such as the mRNA encoding PRODH2, and comprises a contiguous nucleotide sequence which corresponds to the reverse complement of a nucleotide sequence of SEQ ID NO:4641, or a fragment of SEQ ID NO:4641.

[0731] In some embodiments, the polynucleotide agents of the invention may be substantially complementary to the target sequence. For example, a polynucleotide agent that is substantially complementary to the target sequence may include a contiguous nucleotide sequence comprising no more than 5 mismatches (e.g., no more than 1, no more than 2, no more than 3, no more than 4, or no more than 5 mismatches) when hybridizing to a target sequence, such as to the corresponding region of a nucleic acid which encodes a mammalian LDHA mRNA, a mammalian PRODH2 mRNA, and/or a mammalian HAO1 mRNA. In some embodiments, the contiguous nucleotide sequence comprises no more than a single mismatch when hybridizing to the target sequence, such as the corresponding region of a nucleic acid which encodes a mammalian LDHA mRNA, a mammalian PRODH2 mRNA, and/or a mammalian HAO1 mRNA.

[0732] In some embodiments, the polynucleotide agents of the invention that are substantially complementary to the target sequence comprise a contiguous nucleotide sequence which is at least about 80% complementary over its entire length to the equivalent region of the nucleotide sequence of SEQ ID NOs:1, 3, 5, 7, or 9, or a fragment of SEQ ID NOs:1, 3, 5, 7, or 9, such as about 85%, about 86%, about 87%, about 88%, about 89%, about 90%, about % 91%, about 92%, about 93%, about 94%, about 95%, about 96%, about 97%, about 98%, or about 99% complementary.

[0733] In some embodiments, a polynucleotide agent comprises a contiguous nucleotide sequence which is fully complementary over its entire length to the equivalent region of the nucleotide sequence of SEQ ID NOs:1, 3, 5, 7, or 9 (or a fragment of SEQ ID NOs:1, 3, 5, 7, or 9).

[0734] In some embodiments, the polynucleotide agents of the invention that are substantially complementary to the target sequence comprise a contiguous nucleotide sequence which is at least about 80% complementary over its entire length to the equivalent region of the nucleotide sequence of SEQ ID NO:21, or a fragment of SEQ ID NO:21, such as about 85%, about 86%, about 87%, about 88%, about 89%, about 90%, about % 91%, about 92%, about 93%, about 94%, about 95%, about 96%, about 97%, about 98%, or about 99% complementary.

[0735] In some embodiments, a polynucleotide agent comprises a contiguous nucleotide sequence which is fully complementary over its entire length to the equivalent region of the nucleotide sequence of SEQ ID NO:21 (or a fragment of SEQ ID NO:21).

[0736] In some embodiments, the polynucleotide agents of the invention that are substantially complementary to the target sequence comprise a contiguous nucleotide sequence which is at least about 80% complementary over its entire length to the equivalent region of the nucleotide sequence of SEQ ID NO:4641, or a fragment of SEQ ID NO:4641, such as about 85%, about 86%, about 87%, about 88%, about 89%, about 90%, about % 91%, about 92%, about 93%, about 94%, about 95%, about 96%, about 97%, about 98%, or about 99% complementary.

[0737] In some embodiments, a polynucleotide agent comprises a contiguous nucleotide sequence which is fully complementary over its entire length to the equivalent region of the nucleotide sequence of SEQ ID NO:4641 (or a fragment of SEQ ID NO:4641).

[0738] A polynucleotide agent may comprise a contiguous nucleotide sequence of about 4 to about 50 nucleotides in length, e.g., 4, 5, 6, 7, 8, 9, 10, 11, 12, 13, 14, 15, 16, 17, 18, 19, 20, 21, 22, 23, 24, 25, 26, 27, 28, 29, 30, 31, 32, 33, 34, 35, 36, 37, 38, 39, 40, 41, 42, 43, 44, 45, 46, 47, 48, 49, or 50 nucleotides in length.

[0739] In some embodiments, a polynucleotide agent may comprise a contiguous nucleotide sequence of no more than 22 nucleotides, such as no more than 21 nucleotides, 20 nucleotides, 19 nucleotides, or no more than 18 nucleotides. In some embodiments the polynucleotide agents of the invention comprises less than 20 nucleotides. In other embodiments, the polynucleotide agents of the invention comprise 20 nucleotides.

[0740] In certain aspects, a polynucleotide agent of the invention targeting LDHA includes a sequence selected from the group of antisense sequences provided in any one of Tables 2-3.

[0741] In certain aspects, a polynucleotide agent of the invention targeting HAO1 includes a sequence selected from the group of antisense sequences provided many one of Tables 4-14.

[0742] In certain aspects, a polynucleotide agent of the invention targeting PRODH2 includes a sequence selected from the group of antisense sequences provided in any one of Tables 15-16.

[0743] It will be understood that, although some of the antisense sequences in Tables 2-16 are described as modified and/or conjugated sequences, a polynucleotide agent of the invention, may also comprise any one of the sequences set forth in Tables 2-16 that is un-modified, un-conjugated, and/or modified and/or conjugated differently than described therein.

[0744] By virtue of the nature of the nucleotide sequences provided in Tables 2-16, polynucleotide agents of the invention may include one of the sequences of Tables 2-16 minus only a few nucleotides on one or both ends and yet remain similarly effective as compared to the polynucleotide agents described above. Hence, polynucleotide agents having a sequence of at least 4, 5, 6, 7, 8, 9, 10, 11, 12, 13, 14, 15, 16, 17, 18, 19, 20, or more contiguous nucleotides derived from one of the sequences of Tables 2-14 and differing in their ability to inhibit the expression of the corresponding gene by not more than about 5, 10, 15, 20, 25, or 30% inhibition from an polynucleotide agent comprising the full sequence, are contemplated to be within the scope of the present invention.

[0745] In addition, the polynucleotide agents provided in Tables 2-16 identify a region(s) in an LDHA transcript, a PRODH2 transcript and/or an HAO1 transcript that is susceptible to antisense inhibition (e.g., the regions in SEQ ID NO: 1 or SEQ ID NO:21 or SEQ ID NO: 4641 which the polynucleotide agents may target). As such, the present invention further features polynucleotide agents that target within one of these sites. As used herein, a polynucleotide agent is said to target within a particular site of an RNA transcript if the polynucleotide agent promotes antisense inhibition of the target at that site. Such a polynucleotide agent will generally include at least about 15 contiguous nucleotides from one of the sequences provided in Tables 2-16 coupled to additional nucleotide sequences taken from the region contiguous to the selected sequence in the target gene.

[0746] While a target sequence is generally about 4-50 nucleotides in length, there is wide variation in the suitability of particular sequences in this range for directing antisense inhibition of any given target RNA. Various software packages and the guidelines set out herein provide guidance for the identification of optimal target sequences for any given gene target, but an empirical approach can also be taken in which a “window” or “mask” of a given size (as a non-limiting example, 20 nucleotides) is literally or figuratively (including, e.g., in silico) placed on the target RNA sequence to identify sequences in the size range that can serve as target sequences. By moving the sequence “window” progressively one nucleotide upstream or downstream of an initial target sequence location, the next potential target sequence can be identified, until the complete set of possible sequences is identified for any given target size selected. This process, coupled with systematic synthesis and testing of the identified sequences (using assays as described herein or as known in the art) to identify those sequences that perform optimally can identify those RNA sequences that, when targeted with a polynucleotide agent, mediate the best inhibition of target gene expression. Thus, while the sequences identified, for example, in Tables 2-16, represent effective target sequences, it is contemplated that further optimization of antisense inhibition efficiency can be achieved by progressively “walking the window” one nucleotide upstream or downstream of the given sequences to identify sequences with equal or better inhibition characteristics.

[0747] Further, it is contemplated that for any sequence identified, e.g., in Tables 2-16, further optimization could be achieved by systematically either adding or removing nucleotides to generate longer or shorter sequences and testing those sequences generated by walking a window of the longer or shorter size up or down the target RNA from that point. Again, coupling this approach to generating new candidate targets with testing for effectiveness of polynucleotide agents based on those target sequences in an inhibition assay as known in the art and/or as described herein can lead to further improvements in the efficiency of inhibition. Further still, such optimized sequences can be adjusted by, e.g., the introduction of modified nucleotides as described herein or as known in the art, addition or changes in length, or other modifications as known in the art and/or discussed herein to further optimize the molecule (e.g., increasing serum stability or circulating half-life, increasing thermal stability, enhancing transmembrane delivery, targeting to a particular location or cell type, increasing interaction with silencing pathway enzymes, increasing release from endosomes) as an expression inhibitor.

i. Single Stranded Polynucleotide Agents Comprising Motifs

[0748] In certain embodiments of the invention, at least one of the contiguous nucleotides of the antisense polynucleotide agents of the invention may be a modified nucleotide. Suitable nucleotide modifications for use in the single stranded antisense polynucleotide agents of the invention are described in Section A(ii), above. In one embodiment, the modified nucleotide comprises one or more modified sugars. In other embodiments, the modified nucleotide comprises one or more modified nucleobases. In yet other embodiments, the modified nucleotide comprises one or more modified internucleoside linkages. In some embodiments, the modifications (sugar modifications, nucleobase modifications, and/or linkage modifications) define a pattern or motif. In one embodiment, the patterns of modifications of sugar moieties, internucleoside linkages, and nucleobases are each independent of one another.

[0749] Polynucleotide agents having modified oligonucleotides arranged in patterns, or motifs may, for example, confer to the agents properties such as enhanced inhibitory activity, increased binding affinity for a target nucleic acid, or resistance to degradation by in vivo nucleases. For example, such agents may contain at least one region modified so as to confer increased resistance to nuclease degradation, increased cellular uptake, increased binding affinity for the target nucleic acid, and/or increased inhibitory activity. A second region of such agents may optionally serve as a substrate for the cellular endonuclease RNase H, which cleaves the RNA strand of an RNA:DNA duplex.

[0750] An exemplary polynucleotide agent having modified oligonucleotides arranged in patterns, or motifs is a gapmer. In a “gapmer”, an internal region or “gap” having a plurality of linked nucleotides that supports RNaseH cleavage is positioned between two external flanking regions or “wings” having a plurality of linked nucleotides that are chemically distinct from the linked nucleotides of the internal region. The gap segment generally serves as the substrate for endonuclease cleavage, while the wing segments comprise modified nucleotides.

[0751] The three regions of a gapmer motif (the 5′-wing, the gap, and the 3′-wing) form a contiguous sequence of nucleotides and may be described as “X-Y-Z”, wherein “X” represents the length of the 5-wing, “Y” represents the length of the gap, and “Z” represents the length of the 3′-wing. In one embodiment, a gapmer described as “X-Y-Z” has a configuration such that the gap segment is positioned immediately adjacent to each of the 5′ wing segment and the 3′ wing segment. Thus, no intervening nucleotides exist between the 5′ wing segment and gap segment, or the gap segment and the 3′ wing segment. Any of the compounds, e.g., antisense compounds, described herein can have a gapmer motif. In some embodiments, X and Z are the same, in other embodiments they are different.

[0752] In certain embodiments, the regions of a gapmer are differentiated by the types of modified nucleotides in the region. The types of modified nucleotides that may be used to differentiate the regions of a gapmer, in some embodiments, include β-D-ribonucleotides, β-D-deoxyribonucleotides, 2′-modified nucleotides, e.g., 2′-modified nucleotides (e.g., 2′-MOE, and 2′-O—CH3), and bicyclic sugar modified nucleotides (e.g., those having a 4′-(CH2)n-O-2′ bridge, where n=1 or n=2). In one embodiment, at least some of the modified nucleotides of each of the wings may differ from at least some of the modified nucleotides of the gap. For example, at least some of the modified nucleotides of each wing that are closest to the gap (the 3′-most nucleotide of the 5′-wing and the 5′-most nucleotide of the 3-wing) differ from the modified nucleotides of the neighboring gap nucleotides, thus defining the boundary between the wings and the gap. In certain embodiments, the modified nucleotides within the gap are the same as one another. In certain embodiments, the gap includes one or more modified nucleotides that differ from the modified nucleotides of one or more other nucleotides of the gap.

[0753] The length of the 5′-wing (X) of a gapmer may be 1 to 6 nucleotides in length, e.g., 2 to 6, 2 to 5, 3 to 6, 3 to 5, 1 to 5, 1 to 4, 1 to 3, 2 to 4 nucleotides in length, e.g., 1, 2, 3, 4, 5, or 6 nucleotides in length.

[0754] The length of the 3′-wing (Z) of a gapmer may be 1 to 6 nucleotides in length, e.g., 2 to 6, 2-5, 3 to 6, 3 to 5, 1 to 5, 1 to 4, 1 to 3, 2 to 4 nucleotides in length, e.g., 1, 2, 3, 4, 5, or 6 nucleotides in length.

[0755] The length of the gap (Y) of a gapmer may be 5 to 14 nucleotides in length, e.g., 5 to 13, 5 to 12, 5 to 11, 5 to 10, 5 to 9, 5 to 8, 5 to 7, 5 to 6, 6 to 14, 6 to 13, 6 to 12, 6 to 11, 6 to 10, 6 to 9, 6 to 8, 6 to 7, 7 to 14, 7 to 13, 7 to 12, 7 to 11, 7 to 10, 7 to 9, 7 to 8, 8 to 14, 8 to 13, 8 to 12, 8 to 11, 8 to 10, 8 to 9, 9 to 14, 9 to 13, 9 to 12, 9 to 11, 9 to 10, 10 to 14, 10 to 13, 10 to 12, 10 to 11, 11 to 14, 11 to 13, 11 to 12, 12 to 14, 12 to 13, or 13 to 14 nucleotides in length, e.g., 5, 6, 7, 8, 9, 10, 11, 12, 13, or 14 nucleotides in length.

[0756] In some embodiments of the invention X consists of 2, 3, 4, 5 or 6 nucleotides, Y consists of 7, 8, 9, 10, 11, or 12 nucleotides, and Z consists of 2, 3, 4, 5 or 6 nucleotides. Such gapmers include (X-Y-Z) 2-7-2, 2-7-3, 2-7-4, 2-7-5, 2-7-6, 3-7-2, 3-7-3, 3-7-4, 3-7-5, 3-7-6, 4-7-3, 4-7-4, 4-7-5, 4-7-6, 5-7-3, 5-7-4, 5-7-5, 5-7-6, 6-7-3, 6-7-4, 6-7-5, 6-7-6, 3-7-3, 3-7-4, 3-7-5, 3-7-6, 4-7-3, 4-7-4, 4-7-5, 4-7-6, 5-7-3, 5-7-4, 5-7-5, 5-7-6, 6-7-3, 6-7-4, 6-7-5, 6-7-6, 2-8-2, 2-8-3, 2-8-4, 2-8-5, 2-8-6, 3-8-2, 3-8-3, 3-8-4, 3-8-5, 3-8-6, 4-8-3, 4-8-4, 4-8-5, 4-8-6, 5-8-3, 5-8-4, 5-8-5, 5-8-6, 6-8-3, 6-8-4, 6-8-5, 6-8-6, 2-9-2, 2-9-3, 2-9-4, 2-9-5, 2-9-6, 3-9-2, 3-9-3, 3-9-4, 3-9-5, 3-9-6, 4-9-3, 4-9-4, 4-9-5, 4-9-6, 5-9-3, 5-9-4, 5-9-5, 5-9-6, 6-9-3, 6-9-4, 6-9-5, 6-9-6, 2-10-2, 2-10-3, 2-10-4, 2-10-5, 2-10-6, 3-10-2, 3-10-3, 3-10-4, 3-10-5, 3-10-6, 4-10-3, 4-10-4, 4-10-5, 4-10-6, 5-10-3, 5-10-4, 5-10-5, 5-10-6, 6-10-3, 6-10-4, 6-10-5, 6-10-6, 2-11-2, 2-11-3, 2-11-4, 2-11-5, 2-11-6, 3-11-2, 3-11-3, 3-11-4, 3-11-5, 3-11-6, 4-11-3, 4-11-4, 4-11-5, 4-11-6, 5-11-3, 5-11-4, 5-11-5, 5-11-6, 6-11-3, 6-11-4, 6-11-5, 6-11-6, 2-12-2, 2-12-3, 2-12-4, 2-12-5, 2-12-6, 3-12-2, 3-12-3, 3-12-4, 3-12-5, 3-12-6, 4-12-3, 4-12-4, 4-12-5, 4-12-6, 5-12-3, 5-12-4, 5-12-5, 5-12-6, 6-12-3, 6-12-4, 6-12-5, or 6-12-6.

[0757] In some embodiments of the invention, polynucleotide agents of the invention include a 5-10-5 gapmer motif. In other embodiments of the invention, polynucleotide agents of the invention include a 4-10-4 gapmer motif. In another embodiment of the invention, polynucleotide agents of the invention include a 3-10-3 gapmer motif. In yet other embodiments of the invention, polynucleotide agents of the invention include a 2-10-2 gapmer motif.

[0758] The 5′-wing and/or 3′-wing of a gapmer may independently include 1-6 modified nucleotides, e.g., 1, 2, 3, 4, 5, or 6 modified nucleotides.

[0759] In some embodiment, the 5′-wing of a gapmer includes at least one modified nucleotide. In one embodiment, the 5′-wing of a gapmer comprises at least two modified nucleotides. In another embodiment, the 5′-wing of a gapmer comprises at least three modified nucleotides. In yet another embodiment, the 5′-wing of a gapmer comprises at least four modified nucleotides. In another embodiment, the 5′-wing of a gapmer comprises at least five modified nucleotides. In certain embodiments, each nucleotide of the 5′-wing of a gapmer is a modified nucleotide.

[0760] In some embodiments, the 3′-wing of a gapmer includes at least one modified nucleotide. In one embodiment, the 3′-wing of a gapmer comprises at least two modified nucleotides. In another embodiment, the 3′-wing of a gapmer comprises at least three modified nucleotides. In yet another embodiment, the 3′-wing of a gapmer comprises at least four modified nucleotides. In another embodiment, the 3′-wing of a gapmer comprises at least five modified nucleotides. In certain embodiments, each nucleotide of the 3′-wing of a gapmer is a modified nucleotide.

[0761] In certain embodiments, the regions of a gapmer are differentiated by the types of sugar moieties of the nucleotides. In one embodiment, the nucleotides of each distinct region comprise uniform sugar moieties. In other embodiments, the nucleotides of each distinct region comprise different sugar moieties. In certain embodiments, the sugar nucleotide modification motifs of the two wings are the same as one another. In certain embodiments, the sugar nucleotide modification motifs of the 5′-wing differs from the sugar nucleotide modification motif of the 3′-wing.

[0762] The 5′-wing of a gapmer may include 1-6 modified nucleotides, e.g., 1, 2, 3, 4, 5, or 6 modified nucleotides.

[0763] In one embodiment, at least one modified nucleotide of the 5′-wing of a gapmer is a bicyclic nucleotide, such as a constrained ethyl nucleotide, or an LNA. In another embodiment, the 5′-wing of a gapmer includes 2, 3, 4, or 5 bicyclic nucleotides. In some embodiments, each nucleotide of the 5′-wing of a gapmer is a bicyclic nucleotide.

[0764] In one embodiment, the 5′-wing of a gapmer includes at least 1, 2, 3, 4, or 5 constrained ethyl nucleotides. In some embodiments, each nucleotide of the 5′-wing of a gapmer is a constrained ethyl nucleotide.

[0765] In one embodiment, the 5′-wing of a gapmer comprises at least one LNA nucleotide. In another embodiment, the 5′-wing of a gapmer includes 2, 3, 4, or 5 LNA nucleotides. In other embodiments, each nucleotide of the 5′-wing of a gapmer is an LNA nucleotide.

In certain embodiments, at least one modified nucleotide of the 5′-wing of a gapmer is a non-bicyclic modified nucleotide, e.g., a 2′-substituted nucleotide. A “2′-substituted nucleotide” is a nucleotide comprising a modification at the 2′-position which is other than H or OH, such as a 2′-OMe nucleotide, or a 2′-MOE nucleotide. In one embodiment, the 5′-wing of a gapmer comprises 2, 3, 4, or 5 2′-substituted nucleotides. In one embodiment, each nucleotide of the 5′-wing of a gapmer is a 2′-substituted nucleotide.

[0766] In one embodiment, the 5′-wing of a gapmer comprises at least one 2′-OMe nucleotide. In one embodiment, the 5′-wing of a gapmer comprises at least 2, 3, 4, or 5 2′-OMe nucleotides. In one embodiment, each of the nucleotides of the 5′-wing of a gapmer comprises a 2′-OMe nucleotide. In one embodiment, the 5′-wing of a gapmer comprises at least one 2′-MOE nucleotide. In one embodiment, the 5′-wing of a gapmer comprises at least 2, 3, 4, or 5 2′-MOE nucleotides. In one embodiment, each of the nucleotides of the 5′-wing of a gapmer comprises a 2′-MOE nucleotide. In certain embodiments, the 5′-wing of a gapmer comprises at least one 2′-deoxynucleotide. In certain embodiments, each nucleotide of the 5′-wing of a gapmer is a 2′-deoxynucleotide. In a certain embodiments, the 5′-wing of a gapmer comprises at least one ribonucleotide. In certain embodiments, each nucleotide of the 5′-wing of a gapmer is a ribonucleotide.

[0767] The 3′-wing of a gapmer may include 1-6 modified nucleotides, e.g., 1, 2, 3, 4, 5, or 6 modified nucleotides.

[0768] In one embodiment, at least one modified nucleotide of the 3′-wing of a gapmer is a bicyclic nucleotide, such as a constrained ethyl nucleotide, or an LNA. In another embodiment, the 3′-wing of a gapmer includes 2, 3, 4, or 5 bicyclic nucleotides. In some embodiments, each nucleotide of the 3′-wing of a gapmer is a bicyclic nucleotide.

[0769] In one embodiment, the 3′-wing of a gapmer includes at least one constrained ethyl nucleotide. In another embodiment, the 3′-wing of a gapmer includes 2, 3, 4, or 5 constrained ethyl nucleotides. In some embodiments, each nucleotide of the 3′-wing of a gapmer is a constrained ethyl nucleotide.

[0770] In one embodiment, the 3′-wing of a gapmer comprises at least one LNA nucleotide. In another embodiment, the 3′-wing of a gapmer includes 2, 3, 4, or 5 LNA nucleotides. In other embodiments, each nucleotide of the 3′-wing of a gapmer is an LNA nucleotide.

[0771] In certain embodiments, at least one modified nucleotide of the 3′-wing of a gapmer is a non-bicyclic modified nucleotide, e.g., a 2′-substituted nucleotide. In one embodiment, the 3′-wing of a gapmer comprises 2, 3, 4, or 5 2′-substituted nucleotides. In one embodiment, each nucleotide of the 3′-wing of a gapmer is a 2′-substituted nucleotide.

[0772] In one embodiment, the 3′-wing of a gapmer comprises at least one 2′-OMe nucleotide. In one embodiment, the 3′-wing of a gapmer comprises at least 2, 3, 4, or 5 2′-OMe nucleotides. In one embodiment, each of the nucleotides of the 3′-wing of a gapmer comprises a 2′-OMe nucleotide.

In one embodiment, the 3′-wing of a gapmer comprises at least one 2′-MOE nucleotide. In one embodiment, the 3′-wing of a gapmer comprises at least 2, 3, 4, or 5 2′-MOE nucleotides. In one embodiment, each of the nucleotides of the 3′-wing of a gapmer comprises a 2′-MOE nucleotide. In certain embodiments, the 3′-wing of a gapmer comprises at least one 2′-deoxynucleotide. In certain embodiments, each nucleotide of the 3′-wing of a gapmer is a 2′-deoxynucleotide. In a certain embodiments, the 3′-wing of a gapmer comprises at least one ribonucleotide. In certain embodiments, each nucleotide of the 3′-wing of a gapmer is a ribonucleotide.

[0773] The gap of a gapmer may include 5-14 modified nucleotides, e.g., 5, 6, 7, 8, 9, 10, 11, 12, 13, or 14 modified nucleotides.

[0774] In one embodiment, the gap of a gapmer comprises at least one 5-methylcytosine. In one embodiment, the gap of a gapmer comprises at least 2, 3, 4, 5, 6, 7, 8, 9, 10, 11, 12, or 13 5-methylcytosines. In one embodiment, all of the nucleotides of the the gap of a gapmer are 5-methylcytosines.

[0775] In one embodiment, the gap of a gapmer comprises at least one 2′-deoxynucleotide. In one embodiment, the gap of a gapmer comprises at least 2, 3, 4, 5, 6, 7, 8, 9, 10, 11, 12, or 13 2′-deoxynucleotides. In one embodiment, all of the nucleotides of the the gap of a gapmer are 2′-deoxynucleotides.

[0776] A gapmer may include one or more modified internucleotide linkages. In some embodiments, a gapmer includes one or more phosphodiester internucleotide linkages. In other embodiments, a gapmer includes one or more phosphorothioate internucleotide linkages.

[0777] In one embodiment, each nucleotide of a 5′-wing of a gapmer are linked via a phosphorothioate internucleotide linkage. In another embodiment, each nucleotide of a 3′-wing of a gapmer are linked via a phosphorothioate internucleotide linkage. In yet another embodiment, each nucleotide of a gap segment of a gapmer is linked via a phosphorothioate internucleotide linkage. In one embodiment, all of the nucleotides in a gapmer are linked via phosphorothioate internucleotide linkages.

[0778] In one embodiment, a polynucleotide agent comprises a gap segment of ten 2′-deoxyribonucleotides positioned immediately adjacent to and between a 5′-wing segment comprising five nucleotides and a 3′-wing segment comprising 5 nucleotides.

[0779] In another embodiment, a polynucleotide agent comprises a gap segment of ten 2′-deoxyribonucleotides positioned immediately adjacent to and between a 5′-wing segment comprising four nucleotides and a 3′-wing segment comprising four nucleotides.

[0780] In another embodiment, a polynucleotide agent comprises a gap segment of ten 2′-deoxyribonucleotides positioned immediately adjacent to and between a 5′-wing segment comprising three nucleotides and a 3′-wing segment comprising three nucleotides.

[0781] In another embodiment, a polynucleotide agent comprises a gap segment of ten 2′-deoxyribonucleotides positioned immediately adjacent to and between a 5′-wing segment comprising two nucleotides and a 3′-wing segment comprising two nucleotides.

[0782] In one embodiment, each nucleotide of a 5-wing flanking a gap segment of 10 2′-deoxyribonucleotides comprises a modified nucleotide. In another embodiment, each nucleotide of a 3-wing flanking a gap segment of 10 2′-deoxyribonucleotides comprises a modified nucleotide. In one embodiment, each of the modified 5′-wing nucleotides and each of the modified 3′-wing nucleotides comprise a 2′-sugar modification. In one embodiment, the 2′-sugar modification is a 2′-OMe modification. In another embodiment, the 2′-sugar modification is a 2′-MOE modification. In one embodiment, each of the modified 5′-wing nucleotides and each of the modified 3′-wing nucleotides comprise a bicyclic nucleotide. In one embodiment, the bicyclic nucleotide is a constrained ethyl nucleotide. In another embodiment, the bicyclic nucleotide is an LNA nucleotide.

[0783] In one embodiment, each cytosine in a polynucleotide agent is a 5-methylcytosine.

[0784] In one embodiment, a polynucleotide agent comprises a gap segment of ten 2′-deoxyribonucleotides positioned immediately adjacent to and between a 5′-wing segment comprising five nucleotides comprising a 2′OMe modification and a 3′-wing segment comprising five nucleotides comprising a 2′OMe modification, wherein each internucleotide linkage of the agent is a phosphorothioate linkage. In one embodiment, each cytosine of the agent is a 5-methylcytosine. In one embodiment, the agent further comprises a ligand.

[0785] In one embodiment, a polynucleotide agent of the invention comprises a gap segment of ten 2′-deoxyribonucleotides positioned immediately adjacent to and between a 5′-wing segment comprising five nucleotides comprising a 2′MOE modification and a 3′-wing segment comprising five nucleotides comprising a 2′MOE modification, wherein each internucleotide linkage of the agent is a phosphorothioate linkage. In one embodiment, each cytosine of the agent is a 5-methylcytosine. In one embodiment, the agent further comprises a ligand.

[0786] In one embodiment, a polynucleotide agent of the invention comprises a gap segment of ten 2′-deoxyribonucleotides positioned immediately adjacent to and between a 5′-wing segment comprising five constrained ethyl nucleotides and a 3′-wing segment comprising five constrained ethyl nucleotides, wherein each internucleotide linkage of the agent is a phosphorothioate linkage. In one embodiment, each cytosine of the agent is a 5-methylcytosine.

[0787] In one embodiment, a polynucleotide agent of the invention comprises a gap segment of ten 2′-deoxyribonucleotides positioned immediately adjacent to and between a 5′-wing segment comprising five LNA nucleotides and a 3′-wing segment comprising five LNA nucleotides, wherein each internucleotide linkage of the agent is a phosphorothioate linkage. In one embodiment, each cytosine of the agent is a 5-methylcytosine.

[0788] In one embodiment, a polynucleotide agent of the invention comprises a gap segment of ten 2′-deoxyribonucleotides positioned immediately adjacent to and between a 5′-wing segment comprising four nucleotides comprising a 2′OMe modification and a 3′-wing segment comprising four nucleotides comprising a 2′OMe modification, wherein each internucleotide linkage of the agent is a phosphorothioate linkage. In one embodiment, each cytosine of the agent is a 5-methylcytosine. In one embodiment, a polynucleotide agent tof the invention comprises a gap segment of ten 2′-deoxyribonucleotides positioned immediately adjacent to and between a 5′-wing segment comprising four nucleotides comprising a 2′MOE modification and a 3′-wing segment comprising four nucleotides comprising a 2′MOE modification, wherein each internucleotide linkage of the agent is a phosphorothioate linkage. In one embodiment, each cytosine of the agent is a 5-methylcytosine.

In one embodiment, a polynucleotide agent of the invention comprises a gap segment of ten 2′-deoxyribonucleotides positioned immediately adjacent to and between a 5′-wing segment comprising four constrained ethyl nucleotides and a 3′-wing segment comprising four constrained ethyl nucleotides, wherein each internucleotide linkage of the agent is a phosphorothioate linkage. In one embodiment, each cytosine of the agent is a 5-methylcytosine.

[0789] In one embodiment, a polynucleotide agent of the invention comprises a gap segment of ten 2′-deoxyribonucleotides positioned immediately adjacent to and between a 5′-wing segment comprising four LNA nucleotides and a 3′-wing segment comprising four LNA nucleotides, wherein each internucleotide linkage of the agent is a phosphorothioate linkage. In one embodiment, each cytosine of the agent is a 5-methylcytosine.

[0790] In one embodiment, a polynucleotide agent of the invention comprises a gap segment of ten 2′-deoxyribonucleotides positioned immediately adjacent to and between a 5′-wing segment comprising three nucleotides comprising a 2′OMe modification and a 3′-wing segment comprising three nucleotides comprising a 2′OMe modification, wherein each internucleotide linkage of the agent is a phosphorothioate linkage. In one embodiment, each cytosine of the agent is a 5-methylcytosine.

[0791] In one embodiment, a polynucleotide agent of the invention comprises a gap segment of ten 2′-deoxyribonucleotides positioned immediately adjacent to and between a 5′-wing segment comprising three nucleotides comprising a 2′MOE modification and a 3′-wing segment comprising three nucleotides comprising a 2′MOE modification, wherein each internucleotide linkage of the agent is a phosphorothioate linkage. In one embodiment, each cytosine of the agent is a 5-methylcytosine.

[0792] In one embodiment, a polynucleotide agent of the invention comprises a gap segment of ten 2′-deoxyribonucleotides positioned immediately adjacent to and between a 5′-wing segment comprising three constrained ethyl nucleotides and a 3′-wing segment comprising three constrained ethyl nucleotides, wherein each internucleotide linkage of the agent is a phosphorothioate linkage. In one embodiment, each cytosine of the agent is a 5-methylcytosine.

[0793] In one embodiment, a polynucleotide agent of the invention comprises a gap segment of ten 2′-deoxyribonucleotides positioned immediately adjacent to and between a 5′-wing segment comprising three LNA nucleotides and a 3′-wing segment comprising three LNA nucleotides, wherein each internucleotide linkage of the agent is a phosphorothioate linkage. In one embodiment, each cytosine of the agent is a 5-methylcytosine.

[0794] In one embodiment, a polynucleotide agent of the invention comprises a gap segment of ten 2′-deoxyribonucleotides positioned immediately adjacent to and between a 5′-wing segment comprising two nucleotides comprising a 2′OMe modification and a 3′-wing segment comprising two nucleotides comprising a 2′OMe modification, wherein each internucleotide linkage of the agent is a phosphorothioate linkage. In one embodiment, each cytosine of the agent is a 5-methylcytosine.

In one embodiment, a polynucleotide agent of the invention comprises a gap segment of ten 2′-deoxyribonucleotides positioned immediately adjacent to and between a 5′-wing segment comprising two nucleotides comprising a 2′MOE modification and a 3′-wing segment comprising two nucleotides comprising a 2′MOE modification, wherein each internucleotide linkage of the agent is a phosphorothioate linkage. In one embodiment, each cytosine of the agent is a 5-methylcytosine.

[0795] In one embodiment, a polynucleotide agent of the invention comprises a gap segment of ten 2′-deoxyribonucleotides positioned immediately adjacent to and between a 5′-wing segment comprising two constrained ethyl nucleotides and a 3′-wing segment comprising two constrained ethyl nucleotides, wherein each internucleotide linkage of the agent is a phosphorothioate linkage. In one embodiment, each cytosine of the agent is a 5-methylcytosine.

[0796] In one embodiment, a polynucleotide agent of the invention comprises a gap segment of ten 2′-deoxyribonucleotides positioned immediately adjacent to and between a 5′-wing segment comprising two LNA nucleotides and a 3′-wing segment comprising two LNA nucleotides, wherein each internucleotide linkage of the agent is a phosphorothioate linkage. In one embodiment, each cytosine of the agent is a 5-methylcytosine.

[0797] Further gapmer designs suitable for use in the agents, compositions, and methods of the invention are disclosed in, for example, U.S. Pat. Nos. 7,687,617 and 8,580,756; U.S. Patent Publication Nos. 20060128646, 20090209748, 20140128586, 20140128591, 20100210712, and 20080015162A1; and International Publication No. WO 2013/159108, the entire content of each of which are incorporated herein by reference.

### C. Nucleic Acid Inhibitors Conjugated to Ligands

[0798] Another modification of a nucleic acid inhibitor of the invention involves chemically linking to the nucleic acid inhibitor one or more ligands, moieties or conjugates that enhance the activity, cellular distribution or cellular uptake of the nucleic acid inhibitor. Such moieties include but are not limited to lipid moieties such as a cholesterol moiety (Letsinger et al., (1989) Proc. Natl. Acid. Sci. USA, 86: 6553-6556), cholic acid (Manoharan et al., (1994) Biorg. Med. Chem. Let., 4:1053-1060), a thioether, e.g., beryl-S-tritylthiol (Manoharan et al., (1992) Ann. N.Y. Acad. Sci., 660:306-309; Manoharan et al., (1993) Biorg. Med. Chem. Let., 3:2765-2770), a thiocholesterol (Oberhauser et al., (1992) Nucl. Acids Res., 20:533-538), an aliphatic chain, e.g., dodecandiol or undecyl residues (Saison-Behmoaras et al., (1991) EMBO J, 10:1111-1118; Kabanov et al., (1990) FEBS Lett., 259:327-330; Svinarchuk et al., (1993) Biochimie, 75:49-54), a phospholipid, e.g., di-hexadecyl-rac-glycerol or triethyl-ammonium 1,2-di-O-hexadecyl-rac-glycero-3-phosphonate (Manoharan et al., (1995) Tetrahedron Lett., 36:3651-3654; Shea et al., (1990) Nucl. Acids Res., 18:3777-3783), a polyamine or a polyethylene glycol chain (Manoharan et al., (1995) Nucleosides & Nucleotides, 14:969-973), or adamantane acetic acid (Manoharan et al., (1995) Tetrahedron Lett., 36:3651-3654), a palmityl moiety (Mishra et al., (1995) Biochim. Biophys. Acta, 1264:229-237), or an octadecylamine or hexylamino-carbonyloxycholesterol moiety (Crooke et al., (1996) J. Pharmacol. Exp. Ther., 277:923-937).

[0799] In embodiments in which a first dsRNA agent targeting LDHA and a second dsRNA agent targeting HAO1 are covalently attached (i.e., a dual targeting RNAi agent described herein), one or both of the dsRNA agents may independently comprise one or more ligands.

[0800] In one embodiment, a ligand alters the distribution, targeting or lifetime of a nucleic acid inhibitor into which it is incorporated. In certain embodiments a ligand provides an enhanced affinity for a selected target, e.g., molecule, cell or cell type, compartment, e.g., a cellular or organ compartment, tissue, organ or region of the body, as, e.g., compared to a species absent such a ligand. In some embodiments, ligands will not take part in duplex pairing in a duplexed nucleic acid.

[0801] Ligands can include a naturally occurring substance, such as a protein (e.g., human serum albumin (HSA), low-density lipoprotein (LDL), or globulin); carbohydrate (e.g., a dextran, pullulan, chitin, chitosan, inulin, cyclodextrin, N-acetylglucosamine, N-acetylgalactosamine or hyaluronic acid); or a lipid. The ligand can also be a recombinant or synthetic molecule, such as a synthetic polymer, e.g., a synthetic polyamino acid. Examples of polyamino acids include polyamino acid is a polylysine (PLL), poly L-aspartic acid, poly L-glutamic acid, styrene-maleic acid anhydride copolymer, poly(L-lactide-co-glycolide) copolymer, divinyl ether-maleic anhydride copolymer, N-(2-hydroxypropyl)methacrylamide copolymer (HMPA), polyethylene glycol (PEG), polyvinyl alcohol (PVA), polyurethane, poly(2-ethylacryllic acid), N-isopropylacrylamide polymers, or polyphosphazine. Example of polyamines include: polyethylenimine, polylysine (PLL), spermine, spermidine, polyamine, pseudopeptide-polyamine, peptidomimetic polyamine, dendrimer polyamine, arginine, amidine, protamine, cationic lipid, cationic porphyrin, quaternary salt of a polyamine, or an alpha helical peptide.

[0802] Ligands can also include targeting groups, e.g., a cell or tissue targeting agent, e.g., a lectin, glycoprotein, lipid or protein, e.g., an antibody, that binds to a specified cell type such as a kidney cell. A targeting group can be a thyrotropin, melanotropin, lectin, glycoprotein, surfactant protein A, Mucin carbohydrate, multivalent lactose, multivalent galactose, N-acetyl-galactosamine, N-acetyl-glucosamine multivalent mannose, multivalent fucose, glycosylated polyaminoacids, multivalent galactose, transferrin, bisphosphonate, polyglutamate, polyaspartate, a lipid, cholesterol, a steroid, bile acid, folate, vitamin B12, vitamin A, biotin, or an RGD peptide or RGD peptide mimetic.

[0803] Other examples of ligands include dyes, intercalating agents (e.g. acridines), cross-linkers (e.g. psoralene, mitomycin C), porphyrins (TPPC4, texaphyrin, Sapphyrin), polycyclic aromatic hydrocarbons (e.g., phenazine, dihydrophenazine), artificial endonucleases (e.g. EDTA), lipophilic molecules, e.g., cholesterol, cholic acid, adamantane acetic acid, 1-pyrene butyric acid, dihydrotestosterone, 1,3-Bis-O(hexadecyl)glycerol, geranyloxyhexyl group, hexadecylglycerol, borneol, menthol, 1,3-propanediol, heptadecyl group, palmitic acid, myristic acid,O3-(oleoyl)lithocholic acid, O3-(oleoyl)cholenic acid, dimethoxytrityl, or phenoxazine) and peptide conjugates (e.g., antennapedia peptide, Tat peptide), alkylating agents, phosphate, amino, mercapto, PEG (e.g., PEG-40K), MPEG, [MPEG]₂, polyamino, alkyl, substituted alkyl, radiolabeled markers, enzymes, haptens (e.g. biotin), transport/absorption facilitators (e.g., aspirin, vitamin E, folic acid), synthetic ribonucleases (e.g., imidazole, bisimidazole, histamine, imidazole clusters, acridine-imidazole conjugates, Eu3+ complexes of tetraazamacrocycles), dinitrophenyl, HRP, or AP.

[0804] Ligands can be proteins, e.g., glycoproteins, or peptides, e.g., molecules having a specific affinity for a co-ligand, or antibodies e.g., an antibody, that binds to a specified cell type such as a hepatic cell. Ligands can also include hormones and hormone receptors. They can also include non-peptidic species, such as lipids, lectins, carbohydrates, vitamins, cofactors, multivalent lactose, multivalent galactose, N-acetyl-galactosamine, N-acetyl-glucosamine multivalent mannose, or multivalent fucose. The ligand can be, for example, a lipopolysaccharide, an activator of p38 MAP kinase, or an activator of NF-κB.

[0805] The ligand can be a substance, e.g., a drug, which can increase the uptake of the nucleic acid inhibitor into the cell, for example, by disrupting the cell's cytoskeleton, e.g., by disrupting the cell's microtubules, microfilaments, and/or intermediate filaments. The drug can be, for example, taxon, vincristine, vinblastine, cytochalasin, nocodazole, japlakinolide, latrunculin A, phalloidin, swinholide A, indanocine, or myoservin.

[0806] In some embodiments, a ligand attached to a nucleic acid inhibitor as described herein acts as a pharmacokinetic modulator (PK modulator). PK modulators include lipophiles, bile acids, steroids, phospholipid analogues, peptides, protein binding agents, PEG, vitamins etc. Exemplary PK modulators include, but are not limited to, cholesterol, fatty acids, cholic acid, lithocholic acid, dialkylglycerides, diacylglyceride, phospholipids, sphingolipids, naproxen, ibuprofen, vitamin E, biotin etc. Oligonucleotides that comprise a number of phosphorothioate linkages are also known to bind to serum protein, thus short oligonucleotides, e.g., oligonucleotides of about 5 bases, 10 bases, 15 bases or 20 bases, comprising multiple of phosphorothioate linkages in the backbone are also amenable to the present invention as ligands (e.g. as PK modulating ligands). In addition, aptamers that bind serum components (e.g. serum proteins) are also suitable for use as PK modulating ligands in the embodiments described herein.

[0807] Ligand-conjugated nucleic acid inhibitors of the invention may be synthesized by the use of an oligonucleotide that bears a pendant reactive functionality, such as that derived from the attachment of a linking molecule onto the oligonucleotide (described below). This reactive oligonucleotide may be reacted directly with commercially-available ligands, ligands that are synthesized bearing any of a variety of protecting groups, or ligands that have a linking moiety attached thereto.

[0808] The oligonucleotides used in the conjugates of the present invention may be conveniently and routinely made through the well-known technique of solid-phase synthesis. Equipment for such synthesis is sold by several vendors including, for example, Applied Biosystems (Foster City, Calif.). Any other means for such synthesis known in the art may additionally or alternatively be employed. It is also known to use similar techniques to prepare other oligonucleotides, such as the phosphorothioates and alkylated derivatives.

[0809] In the ligand-conjugated oligonucleotides and ligand-molecule bearing sequence-specific linked nucleosides of the present invention, the oligonucleotides and oligonucleosides may be assembled on a suitable DNA synthesizer utilizing standard nucleotide or nucleoside precursors, or nucleotide or nucleoside conjugate precursors that already bear the linking moiety, ligand-nucleotide or nucleoside-conjugate precursors that already bear the ligand molecule, or non-nucleoside ligand-bearing building blocks.

[0810] When using nucleotide-conjugate precursors that already bear a linking moiety, the synthesis of the sequence-specific linked nucleosides is typically completed, and the ligand molecule is then reacted with the linking moiety to form the ligand-conjugated oligonucleotide. In some embodiments, the oligonucleotides or linked nucleosides of the present invention are synthesized by an automated synthesizer using phosphoramidites derived from ligand-nucleoside conjugates in addition to the standard phosphoramidites and non-standard phosphoramidites that are commercially available and routinely used in oligonucleotide synthesis.

i. Lipid Conjugates

[0811] In one embodiment, the ligand or conjugate is a lipid or lipid-based molecule. In one embodiment, such a lipid or lipid-based molecule binds a serum protein, e.g., human serum albumin (HSA). An HSA binding ligand allows for distribution of the conjugate to a target tissue, e.g., a non-kidney target tissue of the body. For example, the target tissue can be the liver, including parenchymal cells of the liver. Other molecules that can bind HSA can also be used as ligands. For example, neproxin or aspirin can be used. A lipid or lipid-based ligand can (a) increase resistance to degradation of the conjugate, (b) increase targeting or transport into a target cell or cell membrane, and/or (c) can be used to adjust binding to a serum protein, e.g., HSA.

[0812] A lipid based ligand can be used to inhibit, e.g., control the binding of the conjugate to a target tissue. For example, a lipid or lipid-based ligand that binds to HSA more strongly will be less likely to be targeted to the kidney and therefore less likely to be cleared from the body. A lipid or lipid-based ligand that binds to HSA less strongly can be used to target the conjugate to the kidney.

[0813] In one embodiment, the lipid based ligand binds HSA. For example, it binds HSA with a sufficient affinity such that the conjugate will be distributed to a non-kidney tissue. However, it is preferred that the affinity not be so strong that the HSA-ligand binding cannot be reversed.

[0814] In another embodiment, the lipid based ligand binds HSA weakly or not at all, such that the conjugate will be distributed to the kidney. Other moieties that target to kidney cells can also be used in place of or in addition to the lipid based ligand.

[0815] In another aspect, the ligand is a moiety, e.g., a vitamin, which is taken up by a target cell, e.g., a proliferating cell. These are particularly useful for treating disorders characterized by unwanted cell proliferation, e.g., of the malignant or non-malignant type, e.g., cancer cells. Exemplary vitamins include vitamin A, E, and K. Other exemplary vitamins include are B vitamin, e.g., folic acid, B12, riboflavin, biotin, pyridoxal or other vitamins or nutrients taken up by target cells such as liver cells. Also included are HSA and low density lipoprotein (LDL).

ii. Cell Permeation Agents

[0816] In another aspect, the ligand is a cell-permeation agent, such as, a helical cell-permeation agent. In one embodiment, the agent is amphipathic. An exemplary agent is a peptide such as tat or antennopedia. If the agent is a peptide, it can be modified, including a peptidylmimetic, invertomers, non-peptide or pseudo-peptide linkages, and use of D-amino acids. In some embodiments, the helical agent is an alpha-helical agent, which may have a lipophilic and a lipophobic phase.

[0817] The ligand can be a peptide or peptidomimetic. A peptidomimetic (also referred to herein as an oligopeptidomimetic) is a molecule capable of folding into a defined three-dimensional structure similar to a natural peptide. The attachment of peptide and peptidomimetics to nucleic acid inhibitors can affect pharmacokinetic distribution of the nucleic acid inhibitor, such as by enhancing cellular recognition and absorption. The peptide or peptidomimetic moiety can be about 5-50 amino acids long, e.g., about 5, 10, 15, 20, 25, 30, 35, 40, 45, or 50 amino acids long.

[0818] A peptide or peptidomimetic can be, for example, a cell permeation peptide, cationic peptide, amphipathic peptide, or hydrophobic peptide (e.g., consisting primarily of Tyr, Trp or Phe). The peptide moiety can be a dendrimer peptide, constrained peptide or crosslinked peptide. In another alternative, the peptide moiety can include a hydrophobic membrane translocation sequence (MTS). An exemplary hydrophobic MTS-containing peptide is RFGF having the amino acid sequence AAVALLPAVLLALLAP (SEQ ID NO: 4154). An RFGF analogue (e.g., amino acid sequence AALLPVLLAAP (SEQ ID NO: 4151) containing a hydrophobic MTS can also be a targeting moiety. The peptide moiety can be a “delivery” peptide, which can carry large polar molecules including peptides, oligonucleotides, and protein across cell membranes. For example, sequences from the HIV Tat protein (GRKKRRQRRRPPQ (SEQ ID NO: 4152) and the Drosophila Antennapedia protein (RQIKIWFQNRRMKWKK (SEQ ID NO: 4153) have been found to be capable of functioning as delivery peptides. A peptide or peptidomimetic can be encoded by a random sequence of DNA, such as a peptide identified from a phage-display library, or one-bead-one-compound (OBOC) combinatorial library (Lam et al., Nature, 354:82-84, 1991). Examples of a peptide or peptidomimetic tethered to a nucleic acid inhibitor via an incorporated monomer unit for cell targeting purposes is an arginine-glycine-aspartic acid (RGD)-peptide, or RGD mimic. A peptide moiety can range in length from about 5 amino acids to about 40 amino acids. The peptide moieties can have a structural modification, such as to increase stability or direct conformational properties. Any of the structural modifications described below can be utilized.

[0819] An RGD peptide for use in the compositions and methods of the invention may be linear or cyclic, and may be modified, e.g., glycosylated or methylated, to facilitate targeting to a specific tissue(s). RGD-containing peptides and peptidomimetics may include D-amino acids, as well as synthetic RGD mimics. In addition to RGD, one can use other moieties that target the integrin ligand. Exemplary conjugates of this ligand target PECAM-1 or VEGF.

[0820] A “cell permeation peptide” is capable of permeating a cell, e.g., a microbial cell, such as a bacterial or fungal cell, or a mammalian cell, such as a human cell. A microbial cell-permeating peptide can be, for example, a α-helical linear peptide (e.g., LL-37 or Ceropin P1), a disulfide bond-containing peptide (e.g., α-defensin, β-defensin or bactenecin), or a peptide containing only one or two dominating amino acids (e.g., PR-39 or indolicidin). A cell permeation peptide can also include a nuclear localization signal (NLS). For example, a cell permeation peptide can be a bipartite amphipathic peptide, such as MPG, which is derived from the fusion peptide domain of HIV-1 gp41 and the NLS of SV40 large T antigen (Simeoni et al., Nucl. Acids Res. 31:2717-2724, 2003).

iii. Carbohydrate Conjugates

[0821] In some embodiments of the compositions and methods of the invention, a nucleic acid inhibitor further comprises a carbohydrate. The carbohydrate conjugated nucleic acid inhibitors are advantageous for the in vivo delivery of nucleic acids, as well as compositions suitable for in vivo therapeutic use, as described herein. As used herein, “carbohydrate” refers to a compound which is either a carbohydrate per se made up of one or more monosaccharide units having at least 6 carbon atoms (which can be linear, branched or cyclic) with an oxygen, nitrogen or sulfur atom bonded to each carbon atom; or a compound having as a part thereof a carbohydrate moiety made up of one or more monosaccharide units each having at least six carbon atoms (which can be linear, branched or cyclic), with an oxygen, nitrogen or sulfur atom bonded to each carbon atom. Representative carbohydrates include the sugars (mono-, di-, tri- and oligosaccharides containing from about 4, 5, 6, 7, 8, or 9 monosaccharide units), and polysaccharides such as starches, glycogen, cellulose and polysaccharide gums. Specific monosaccharides include C5 and above (e.g., C5, C6, C7, or C8) sugars; di- and trisaccharides include sugars having two or three monosaccharide units (e.g., C5, C6, C7, or C8).

[0822] In embodiments in which a first dsRNA agent targeting LDHA and a second dsRNA agent targeting HAO1 are covalently attached (i.e., a dual targeting RNAi agent), one or both of the dsRNA agents may independently comprise one or more carbohydrate ligands.

[0823] In one embodiment, a carbohydrate conjugate for use in the compositions and In certain embodiments, a carbohydrate conjugate comprises a monosaccharide.

[0824] In certain embodiments, the monosaccharide is an N-acetylgalactosamine (GalNAc). GalNAc conjugates, which comprise one or more N-acetylgalactosamine (GalNAc) derivatives, are described, for example, in U.S. Pat. No. 8,106,022, the entire content of which is hereby incorporated herein by reference. In some embodiments, the GalNAc conjugate serves as a ligand that targets the nucleic acid inhibitor to particular cells. In some embodiments, the GalNAc conjugate targets the nucleic acid inhibitor to liver cells, e.g., by serving as a ligand for the asialoglycoprotein receptor of liver cells (e.g., hepatocytes).

[0825] In some embodiments, the carbohydrate conjugate comprises one or more GalNAc derivatives. The GalNAc derivatives may be attached via a linker, e.g., a bivalent or trivalent branched linker. In some embodiments the GalNAc conjugate is conjugated to the 3′ end of the sense strand. In some embodiments, the GalNAc conjugate is conjugated to the nucleic acid inhibitor (e.g., to the 3′ end of the sense strand) via a linker, e.g., a linker as described herein. In some embodiments the GalNAc conjugate is conjugated to the 5′ end of the sense strand. In some embodiments, the GalNAc conjugate is conjugated to the nucleic acid inhibitor (e.g., to the 5′ end of the sense strand) via a linker, e.g., a linker as described herein.

[0826] In certain embodiments of the invention, the GalNAc or GalNAc derivative is attached to a nucleic acid inhibitor of the invention via a monovalent linker. In some embodiments, the GalNAc or GalNAc derivative is attached to a nucleic acid inhibitor of the invention via a bivalent linker. In yet other embodiments of the invention, the GalNAc or GalNAc derivative is attached to a nucleic acid inhibitor of the invention via a trivalent linker. In other embodiments of the invention, the GalNAc or GalNAc derivative is attached to a nucleic acid inhibitor of the invention via a tetravalent linker.

[0827] In certain embodiments, the nucleic acid inhibitors of the invention comprise one GalNAc or GalNAc derivative attached to the nucleic acid inhibitor. In certain embodiments, the nucleic acid inhibitors of the invention comprise a plurality (e.g., 2, 3, 4, 5, or 6) GalNAc or GalNAc derivatives, each independently attached to a plurality of nucleotides of the nucleic acid inhibitor through a plurality of monovalent linkers.

[0828] In some embodiments, for example, when two strands of a nucleic acid inhibitor of the invention are part of one larger molecule connected by an uninterrupted chain of nucleotides between the 3′-end of one strand and the 5′-end of the respective other strand forming a hairpin loop comprising, a plurality of unpaired nucleotides, each unpaired nucleotide within the hairpin loop may independently comprise a GalNAc or GalNAc derivative attached via a monovalent linker. The hairpin loop may also be formed by an extended overhang in one strand of the duplex.

[0829] In some embodiments, for example, when the two strands of a nucleic acid inhibitor of the invention are part of one larger molecule connected by an uninterrupted chain of nucleotides between the 3′-end of one strand and the 5′-end of the respective other strand forming a hairpin loop comprising, a plurality of unpaired nucleotides, each unpaired nucleotide within the hairpin loop may independently comprise a GalNAc or GalNAc derivative attached via a monovalent linker. The hairpin loop may also be formed by an extended overhang in one strand of the duplex.

[0830] In some embodiments, the GalNAc conjugate is

[chemical structure]

[0831] In some embodiments, the RNAi agent is attached to the carbohydrate conjugate via a linker as shown in the following schematic, wherein X is O or S

[chemical structure]

[0832] In some embodiments, the RNAi agent is conjugated to L96 as defined in Table 1 and shown below:

[chemical structure]

[0833] In certain embodiments, a carbohydrate conjugate for use in the compositions and methods of the invention is selected from the group consisting of:

[chemical structure]

[chemical structure]

[chemical structure]

[chemical structure]

[chemical structure]

[chemical structure]

[chemical structure]

[chemical structure]

[chemical structure]

[0834] In certain embodiments, a carbohydrate conjugate for use in the compositions and methods of the invention is a monosaccharide. In certain embodiments, the monosaccharide is an N-acetylgalactosamine, such as

[chemical structure]

[0835] Another representative carbohydrate conjugate for use in the embodiments described herein includes, but is not limited to,

[chemical structure]

[0836] when one of X or Y is an oligonucleotide, the other is a hydrogen.

[0837] In some embodiments, a suitable ligand is a ligand disclosed in WO 2019/055633, the entire contents of which are incorporated herein by reference. In one embodiment the ligand comprises the structure below:

[chemical structure]

[0838] In certain embodiments, the nucleic acid inhibitors of the disclosure may include GalNAc ligands, even if such GalNAc ligands are currently projected to be of limited value for the intrathecal/CNS delivery route(s) of the instant disclosure.

[0839] In some embodiments, the carbohydrate conjugate further comprises one or more additional ligands as described above, such as, but not limited to, a PK modulator or a cell permeation peptide.

[0840] Additional carbohydrate conjugates and linkers suitable for use in the present invention include those described in WO 2014/179620 and WO 2014/179627, the entire contents of each of which are incorporated herein by reference.

[0841] In embodiments in which a first dsRNA agent targeting LDHA and a second dsRNA agent targeting HAO1 are covalently attached (i.e., a dual targeting RNAi agent), one or both of the dsRNA agents may independently comprise a GalNAc or GalNAc derivative ligand.

iv. Linkers

[0842] In some embodiments, the conjugate or ligand described herein can be attached to a nucleic acid inhibitor with various linkers that can be cleavable or non cleavable.

[0843] The term “linker” or “linking group” means an organic moiety that connects two parts of a compound, e.g., covalently attaches two parts of a compound. Linkers typically comprise a direct bond or an atom such as oxygen or sulfur, a unit such as NR8, C(O), C(O)NH, SO, SO₂, SO₂NH or a chain of atoms, such as, but not limited to, substituted or unsubstituted alkyl, substituted or unsubstituted alkenyl, substituted or unsubstituted alkynyl, arylalkyl, arylalkenyl, arylalkynyl, heteroarylalkyl, heteroarylalkenyl, heteroarylalkynyl, heterocyclylalkyl, heterocyclylalkenyl, heterocyclylalkynyl, aryl, heteroaryl, heterocyclyl, cycloalkyl, cycloalkenyl, alkylarylalkyl, alkylarylalkenyl, alkylarylalkynyl, alkenylarylalkyl, alkenylarylalkenyl, alkenylarylalkynyl, alkynylarylalkyl, alkynylarylalkenyl, alkynylarylalkynyl, alkylheteroarylalkyl, alkylheteroarylalkenyl, alkylheteroarylalkynyl, alkenylheteroarylalkyl, alkenylheteroarylalkenyl, alkenylheteroarylalkynyl, alkynylheteroarylalkyl, alkynylheteroarylalkenyl, alkynylheteroarylalkynyl, alkylheterocyclylalkyl, alkylheterocyclylalkenyl, alkylhererocyclylalkynyl, alkenylheterocyclylalkyl, alkenylheterocyclylalkenyl, alkenylheterocyclylalkynyl, alkynylheterocyclylalkyl, alkynylheterocyclylalkenyl, alkynylheterocyclylalkynyl, alkylaryl, alkenylaryl, alkynylaryl, alkylheteroaryl, alkenylheteroaryl, alkynylhereroaryl, which one or more methylenes can be interrupted or terminated by O, S, S(O), SO₂, N(R8), C(O), substituted or unsubstituted aryl, substituted or unsubstituted heteroaryl, substituted or unsubstituted heterocyclic; where R8 is hydrogen, acyl, aliphatic or substituted aliphatic. In one embodiment, the linker is between about 1-24 atoms, 2-24, 3-24, 4-24, 5-24, 6-24, 6-18, 7-18, 8-18 atoms, 7-17, 8-17, 6-16, 7-17, or 8-16 atoms.

[0844] A cleavable linking group is one which is sufficiently stable outside the cell, but which upon entry into a target cell is cleaved to release the two parts the linker is holding together. In one embodiment, the cleavable linking group is cleaved at least about 10 times, 20, times, 30 times, 40 times, 50 times, 60 times, 70 times, 80 times, 90 times or more, or at least about 100 times faster in a target cell or under a first reference condition (which can, e.g., be selected to mimic or represent intracellular conditions) than in the blood of a subject, or under a second reference condition (which can, e.g., be selected to mimic or represent conditions found in the blood or serum).

[0845] Cleavable linking groups are susceptible to cleavage agents, e.g., pH, redox potential or the presence of degradative molecules. Generally, cleavage agents are more prevalent or found at higher levels or activities inside cells than in serum or blood. Examples of such degradative agents include: redox agents which are selected for particular substrates or which have no substrate specificity, including, e.g., oxidative or reductive enzymes or reductive agents such as mercaptans, present in cells, that can degrade a redox cleavable linking group by reduction; esterases; endosomes or agents that can create an acidic environment, e.g., those that result in a pH of five or lower; enzymes that can hydrolyze or degrade an acid cleavable linking group by acting as a general acid, peptidases (which can be substrate specific), and phosphatases.

[0846] A cleavable linkage group, such as a disulfide bond can be susceptible to pH. The pH of human serum is 7.4, while the average intracellular pH is slightly lower, ranging from about 7.1-7.3. Endosomes have a more acidic pH, in the range of 5.5-6.0, and lysosomes have an even more acidic pH at around 5.0. Some linkers will have a cleavable linking group that is cleaved at a certain pH, thereby releasing a cationic lipid from the ligand inside the cell, or into the desired compartment of the cell.

[0847] A linker can include a cleavable linking group that is cleavable by a particular enzyme. The type of cleavable linking group incorporated into a linker can depend on the cell to be targeted. For example, a liver-targeting ligand can be linked to a cationic lipid through a linker that includes an ester group. Liver cells are rich in esterases, and therefore the linker will be cleaved more efficiently in liver cells than in cell types that are not esterase-rich. Other cell-types rich in esterases include cells of the lung, renal cortex, and testis.

[0848] Linkers that contain peptide bonds can be used when targeting cell types rich in peptidases, such as liver cells and synoviocytes.

[0849] In general, the suitability of a candidate cleavable linking group can be evaluated by testing the ability of a degradative agent (or condition) to cleave the candidate linking group. It will also be desirable to also test the candidate cleavable linking group for the ability to resist cleavage in the blood or when in contact with other non-target tissue. Thus, one can determine the relative susceptibility to cleavage between a first and a second condition, where the first is selected to be indicative of cleavage in a target cell and the second is selected to be indicative of cleavage in other tissues or biological fluids, e.g., blood or serum. The evaluations can be carried out in cell free systems, in cells, in cell culture, in organ or tissue culture, or in whole animals. It can be useful to make initial evaluations in cell-free or culture conditions and to confirm by further evaluations in whole animals. In certain embodiments, useful candidate compounds are cleaved at least about 2, 4, 10, 20, 30, 40, 50, 60, 70, 80, 90, or about 100 times faster in the cell (or under in vitro conditions selected to mimic intracellular conditions) as compared to blood or serum (or under in vitro conditions selected to mimic extracellular conditions).

a. Redox Cleavable Linking Groups

[0850] In one embodiment, a cleavable linking group is a redox cleavable linking group that is cleaved upon reduction or oxidation. An example of reductively cleavable linking group is a disulphide linking group (—S—S—). To determine if a candidate cleavable linking group is a suitable “reductively cleavable linking group,” or for example is suitable for use with a particular nucleic acid inhibitor and particular targeting agent one can look to methods described herein. For example, a candidate can be evaluated by incubation with dithiothreitol (DTT), or other reducing agent using reagents know in the art, which mimic the rate of cleavage which would be observed in a cell, e.g., a target cell. The candidates can also be evaluated under conditions which are selected to mimic blood or serum conditions. In one, candidate compounds are cleaved by at most about 10% in the blood. In other embodiments, useful candidate compounds are degraded at least about 2, 4, 10, 20, 30, 40, 50, 60, 70, 80, 90, or about 100 times faster in the cell (or under in vitro conditions selected to mimic intracellular conditions) as compared to blood (or under in vitro conditions selected to mimic extracellular conditions). The rate of cleavage of candidate compounds can be determined using standard enzyme kinetics assays under conditions chosen to mimic intracellular media and compared to conditions chosen to mimic extracellular media.

b. Phosphate-Based Cleavable Linking Groups

[0851] In other embodiments, a cleavable linker comprises a phosphate-based cleavable linking group. A phosphate-based cleavable linking group is cleaved by agents that degrade or hydrolyze the phosphate group. An example of an agent that cleaves phosphate groups in cells are enzymes such as phosphatases in cells. Examples of phosphate-based linking groups are —O—P(O)(ORk)-O—, —O—P(S)(ORk)-O—, —O—P(S)(SRk)-O—, —S—P(O)(ORk)-O—, —O—P(O)(ORk)-S—, —S—P(O)(ORk)-S—, —O—P(S)(ORk)-S—, —S—P(S)(ORk)-O—, —O—P(O)(Rk)-O—, —O—P(S)(Rk)-O—, —S—P(O)(Rk)-O—, —S—P(S)(Rk)-O—, —S—P(O)(Rk)-S—, —O—P(S)(Rk)-S—, wherein Rk at each occurrence can be, independently, C1-C20 alkyl, C1-C20 haloalkyl, C6-C10 aryl, or C7-C12 aralkyl. Exemplary embodiments include —O—P(O)(OH)—O—, —O—P(S)(OH)—O—, —O—P(S)(SH)—O—, —S—P(O)(OH)—O—, —O—P(O)(OH)—S—, —S—P(O)(OH)—S—, —O—P(S)(OH)—S—, —S—P(S)(OH)—O—, —O—P(O)(H)—O—, —O—P(S)(H)—O—, —S—P(O)(H)—O, —S—P(S)(H)—O—, —S—P(O)(H)—S—, and —O—P(S)(H)—S—. In certain embodiments a phosphate-based linking group is —O—P(O)(OH)—O—. These candidates can be evaluated using methods analogous to those described above.

c. Acid Cleavable Linking Groups

[0852] In another embodiment, a cleavable linker comprises an acid cleavable linking group. An acid cleavable linking group is a linking group that is cleaved under acidic conditions. In one embodiments acid cleavable linking groups are cleaved in an acidic environment with a pH of about 6.5 or lower (e.g., about 6.0, 5.75, 5.5, 5.25, 5.0, or lower), or by agents such as enzymes that can act as a general acid. In a cell, specific low pH organelles, such as endosomes and lysosomes can provide a cleaving environment for acid cleavable linking groups. Examples of acid cleavable linking groups include but are not limited to hydrazones, esters, and esters of amino acids. Acid cleavable groups can have the general formula —C═NN—, C(O)O, or —OC(O). An exemplary embodiment is when the carbon attached to the oxygen of the ester (the alkoxy group) is an aryl group, substituted alkyl group, or tertiary alkyl group such as dimethyl pentyl or t-butyl. These candidates can be evaluated using methods analogous to those described above.

d. Ester-Based Linking Groups

[0853] In another embodiment, a cleavable linker comprises an ester-based cleavable linking group. An ester-based cleavable linking group is cleaved by enzymes such as esterases and amidases in cells. Examples of ester-based cleavable linking groups include but are not limited to esters of alkylene, alkenylene and alkynylene groups. Ester cleavable linking groups have the general formula —C(O)O—, or —OC(O)—. These candidates can be evaluated using methods analogous to those described above.

e. Peptide-Based Cleaving Groups

[0854] In yet another embodiment, a cleavable linker comprises a peptide-based cleavable linking group. A peptide-based cleavable linking group is cleaved by enzymes such as peptidases and proteases in cells. Peptide-based cleavable linking groups are peptide bonds formed between amino acids to yield oligopeptides (e.g., dipeptides, tripeptides etc.) and polypeptides. Peptide-based cleavable groups do not include the amide group (—C(O)NH—). The amide group can be formed between any alkylene, alkenylene or alkynelene. A peptide bond is a special type of amide bond formed between amino acids to yield peptides and proteins. The peptide based cleavage group is generally limited to the peptide bond (i.e., the amide bond) formed between amino acids yielding peptides and proteins and does not include the entire amide functional group. Peptide-based cleavable linking groups have the general formula —NHCHRAC(O)NHCHRBC(O)—, where RA and RB are the R groups of the two adjacent amino acids. These candidates can be evaluated using methods analogous to those described above.

[0855] In one embodiment, a nucleic acid inhibitor of the invention is conjugated to a carbohydrate through a linker. Non-limiting examples of carbohydrate conjugates with linkers of the compositions and methods of the invention include, but are not limited to,

[chemical structure]

[chemical structure]

[chemical structure]

[chemical structure]

when one of X or Y is an oligonucleotide, the other is a hydrogen.

[0856] In certain embodiments of the compositions and methods of the invention, a ligand is one or more GalNAc (N-acetylgalactosamine) derivatives attached through a bivalent or trivalent branched linker.

[0857] In embodiments in which a first dsRNA agent targeting LDHA and a second dsRNA agent targeting HAO1 are covalently attached (i.e., a dual targeting RNAi agent), one or both of the dsRNA agents may independently a ligand comprising one or more GalNAc (N-acetylgalactosamine) derivatives attached through a bivalent or trivalent branched linker.

[0858] In one embodiment, a nucleic acid inhibitor of the invention is conjugated to a bivalent or trivalent branched linker selected from the group of structures shown in any of formula (XLV)-(XLVIII):

[chemical structure]

wherein:
[0859] q2A, q2B, q3A, q3B, q4A, q4B, q5A, q5B and q5C represent independently for each occurrence 0-20 and wherein the repeating unit can be the same or different;
[0860] P^{2A}, P^{2B}, P^{3A}, P^{3B}, P^{4A}, P^{4B}, P^{5A}, P^{5B}, P^{5C}, T^{2A}, T^{2B}, T^{3A}, T^{3B}, T^{4A}, T^{4B}, T^{4A}, T^{5B}, T^{5C} are each independently for each occurrence absent, CO, NH, O, S, OC(O), NHC(O), CH₂, CH₂NH or CH₂O;
[0861] Q^{2A}, Q^{2B}, Q^{3A}, Q^{3B}, Q^{4A}, Q^{4B}, Q^{5A}, Q^{5B}, Q^{5C} are independently for each occurrence absent, alkylene, substituted alkylene wherein one or more methylenes can be interrupted or terminated by one or more of O, S, S(O), SO₂, N(R^{N}), C(R′)═C(R″), C≡C or C(O);
[0862] R^{2A}, R^{2B}, R^{3A}, R^{3B}, R^{4A}, R^{4B}, R^{5A}, R^{5B}, R^{5C} are each independently for each occurrence absent, NH, O, S, CH₂, C(O)O, C(O)NH, NHCH(R^{a})C(O), —C(O)—CH(R^{a})—NH—, CO, CH═N—O,

[chemical structure]

or heterocyclyl;

[0863] L^{2A}, L^{2B}, L^{3A}, L^{3B}, L^{4A}, L^{4B}, L^{5A}, L^{5B} and L^{5C} represent the ligand; i.e. each independently for each occurrence a monosaccharide (such as GalNAc), disaccharide, trisaccharide, tetrasaccharide, oligosaccharide, or polysaccharide; and R^{a} is H or amino acid side chain. Trivalent conjugating GalNAc derivatives are particularly useful for use with RNAi agents for inhibiting the expression of a target gene, such as those of formula (XLIX):

[chemical structure]

[0864] wherein L^{5A}, L^{5B} and L^{5C} represent a monosaccharide, such as GalNAc derivative.

[0865] Examples of suitable bivalent and trivalent branched linker groups conjugating GalNAc derivatives include, but are not limited to, the structures recited above as formulas II, VII, XI, X, and XIII.

[0866] Representative U.S. patents that teach the preparation of conjugates include, but are not limited to, U.S. Pat. Nos. 4,828,979; 4,948,882; 5,218,105; 5,525,465; 5,541,313; 5,545,730; 5,552,538; 5,578,717, 5,580,731; 5,591,584; 5,109,124; 5,118,802; 5,138,045; 5,414,077; 5,486,603; 5,512,439; 5,578,718; 5,608,046; 4,587,044; 4,605,735; 4,667,025; 4,762,779; 4,789,737; 4,824,941; 4,835,263; 4,876,335; 4,904,582; 4,958,013; 5,082,830; 5,112,963; 5,214,136; 5,082,830; 5,112,963; 5,214,136; 5,245,022; 5,254,469; 5,258,506; 5,262,536; 5,272,250; 5,292,873; 5,317,098; 5,371,241, 5,391,723; 5,416,203, 5,451,463; 5,510,475; 5,512,667; 5,514,785; 5,565,552; 5,567,810; 5,574,142; 5,585,481; 5,587,371; 5,595,726; 5,597,696; 5,599,923; 5,599,928 and 5,688,941; 6,294,664; 6,320,017; 6,576,752; 6,783,931; 6,900,297; 7,037,646; 8,106,022, the entire contents of each of which are hereby incorporated herein by reference.

[0867] It is not necessary for all positions in a given compound to be uniformly modified, and in fact more than one of the aforementioned modifications can be incorporated in a single compound or even at a single nucleoside within a nucleic acid inhibitor. The present invention also includes nucleic acid inhibitors that are chimeric compounds.

[0868] “Chimeric” iRNA compounds or “chimeras,” in the context of this invention, are nucleic acid inhibitors which contain two or more chemically distinct regions, each made up of at least one monomer unit, i.e., a nucleotide in the case of a dsRNA compound. These nucleic acid inhibitors typically contain at least one region wherein the RNA is modified so as to confer upon the nucleic acid inhibitor increased resistance to nuclease degradation, increased cellular uptake, and/or increased binding affinity for the target nucleic acid. An additional region of the nucleic acid inhibitor can serve as a substrate for enzymes capable of cleaving RNA:DNA or RNA:RNA hybrids. By way of example, RNase H is a cellular endonuclease which cleaves the RNA strand of an RNA:DNA duplex. Activation of RNase H, therefore, results in cleavage of the RNA target, thereby greatly enhancing the efficiency of iRNA inhibition of gene expression. Consequently, comparable results can often be obtained with shorter iRNAs when chimeric dsRNAs are used, compared to phosphorothioate deoxy dsRNAs hybridizing to the same target region. Cleavage of the RNA target can be routinely detected by gel electrophoresis and, if necessary, associated nucleic acid hybridization techniques known in the art.

[0869] In certain instances, the RNA of a nucleic acid inhibitor can be modified by a non-ligand group. A number of non-ligand molecules have been conjugated to iRNAs in order to enhance the activity, cellular distribution or cellular uptake of the iRNA, and procedures for performing such conjugations are available in the scientific literature. Such non-ligand moieties have included lipid moieties, such as cholesterol (Kubo, T. et al., Biochem. Biophys. Res. Comm., 2007, 365(1):54-61; Letsinger et al., Proc. Natl. Acad. Sci. USA, 1989, 86:6553), cholic acid (Manoharan et al., Bioorg. Med. Chem. Lett., 1994, 4:1053), a thioether, e.g., hexyl-S-tritylthiol (Manoharan et al., Ann. N.Y. Acad. Sci., 1992, 660:306; Manoharan et al., Bioorg. Med. Chem. Let., 1993, 3:2765), a thiocholesterol (Oberhauser et al., Nucl. Acids Res., 1992, 20:533), an aliphatic chain, e.g., dodecandiol or undecyl residues (Saison-Behmoaras et al., EMBO J., 1991, 10:111; Kabanov et al., FEBS Lett., 1990, 259:327; Svinarchuk et al., Biochimie, 1993, 75:49), a phospholipid, e.g., di-hexadecyl-rac-glycerol or triethylammonium 1,2-di-O-hexadecyl-rac-glycero-3-H-phosphonate (Manoharan et al., Tetrahedron Lett., 1995, 36:3651; Shea et al., Nucl. Acids Res., 1990, 18:3777), a polyamine or a polyethylene glycol chain (Manoharan et al., Nucleosides & Nucleotides, 1995, 14:969), or adamantane acetic acid (Manoharan et al., Tetrahedron Lett., 1995, 36:3651), a palmityl moiety (Mishra et al., Biochim. Biophys. Acta, 1995, 1264:229), or an octadecylamine or hexylamino-carbonyl-oxycholesterol moiety (Crooke et al., J. Pharmacol. Exp. Ther., 1996, 277:923). Representative United States patents that teach the preparation of such RNA conjugates have been listed above. Typical conjugation protocols involve the synthesis of an RNAs bearing an aminolinker at one or more positions of the sequence. The amino group is then reacted with the molecule being conjugated using appropriate coupling or activating reagents. The conjugation reaction can be performed either with the RNA still bound to the solid support or following cleavage of the RNA, in solution phase. Purification of the RNA conjugate by HPLC typically affords the pure conjugate.

### III. Delivery of a Nucleic Acid Inhibitor of the Invention

[0870] The delivery of a nucleic acid inhibitor of the invention to a cell e.g., a cell within a subject, such as a human subject (e.g., a subject in need thereof, such as a subject having or at risk of developing a non-primary hyperoxaluria disease or disorder) can be achieved in a number of different ways. For example, delivery may be performed by contacting a cell with a nucleic acid inhibitor of the invention either in vitro or in vivo. In vivo delivery may also be performed directly by administering a composition comprising a nucleic acid inhibitor, e.g., a dsRNA, to a subject.

[0871] Alternatively, in vivo delivery may be performed indirectly by administering one or more vectors that encode and direct the expression of the nucleic acid inhibitor. These alternatives are discussed further below.

[0872] In the methods of the invention which include a first dsRNA agent targeting LDHA and a second dsRNA agent targeting HAO1 which are covalently attached (i.e., a dual targeting RNAi agent), the delivery of the first agent may be the same or different than the delivery of the second agent.

[0873] In general, any method of delivering a nucleic acid molecule (in vitro or in vivo) can be adapted for use with a nucleic acid inhibitor of the invention (see e.g., Akhtar S. and Julian R L., (1992) Trends Cell. Biol. 2(5):139-144 and WO94/02595, which are incorporated herein by reference in their entireties). For in vivo delivery, factors to consider in order to deliver a nucleic acid inhibitor include, for example, biological stability of the delivered molecule, prevention of non-specific effects, and accumulation of the delivered molecule in the target tissue. The non-specific effects of a nucleic acid inhibitor can be minimized by local administration, for example, by direct injection or implantation into a tissue or topically administering the preparation. Local administration to a treatment site maximizes local concentration of the agent, limits the exposure of the agent to systemic tissues that can otherwise be harmed by the agent or that can degrade the agent, and permits a lower total dose of the nucleic acid inhibitor to be administered. Several studies have shown successful knockdown of gene products when a nucleic acid inhibitor is administered locally. For example, intraocular delivery of a VEGF dsRNA by intravitreal injection in cynomolgus monkeys (Tolentino, M J. et al., (2004) Retina 24:132-138) and subretinal injections in mice (Reich, S J. et al. (2003) Mol. Vis. 9:210-216) were both shown to prevent neovascularization in an experimental model of age-related macular degeneration. In addition, direct intratumoral injection of a dsRNA in mice reduces tumor volume (Pille, J. et al. (2005) Mol. Ther. 11:267-274) and can prolong survival of tumor-bearing mice (Kim, W J. et al., (2006) Mol. Ther. 14:343-350; Li, S. et al., (2007) Mol. Ther. 15:515-523). RNA interference has also shown success with local delivery to the CNS by direct injection (Dorn, G. et al., (2004) Nucleic Acids 32:e49; Tan, P H. et al. (2005) Gene Ther. 12:59-66; Makimura, H. et a.l (2002) BMC Neurosci. 3:18; Shishkina, G T., et al. (2004) Neuroscience 129:521-528; Thakker, E R., et al. (2004) Proc. Natl. Acad. Sci. U.S.A. 101:17270-17275; Akaneya, Y., et al. (2005) J. Neurophysiol. 93:594-602) and to the lungs by intranasal administration (Howard, K A. et al., (2006) Mol. Ther. 14:476-484; Zhang, X. et al., (2004) J. Biol. Chem. 279:10677-10684; Bitko, V. et al., (2005) Nat. Med. 11:50-55). For administering a nucleic acid inhibitor systemically for the treatment of a disease, the nucleic acid inhibitor can be modified or alternatively delivered using a drug delivery system; both methods act to prevent the rapid degradation of the nucleic acid inhibitor by endo- and exo-nucleases in vivo. Modification of the nucleic acid inhibitor or the pharmaceutical carrier can also permit targeting of the nucleic acid inhibitor to the target tissue and avoid undesirable off-target effects. Nucleic acid inhibitors can be modified by chemical conjugation to lipophilic groups such as cholesterol to enhance cellular uptake and prevent degradation. For example, a nucleic acid inhibitor directed against ApoB conjugated to a lipophilic cholesterol moiety was injected systemically into mice and resulted in knockdown of apoB mRNA in both the liver and jejunum (Soutschek, J. et al., (2004) Nature 432:173-178). Conjugation of an nucleic acid inhibitor to an aptamer has been shown to inhibit tumor growth and mediate tumor regression in a mouse model of prostate cancer (McNamara, J O. et al., (2006) Nat. Biotechnol. 24:1005-1015). In an alternative embodiment, the nucleic acid inhibitor can be delivered using drug delivery systems such as a nanoparticle, a dendrimer, a polymer, liposomes, or a cationic delivery system. Positively charged cationic delivery systems facilitate binding of a nucleic acid inhibitor (negatively charged) and also enhance interactions at the negatively charged cell membrane to permit efficient uptake of a nucleic acid inhibitor by the cell. Cationic lipids, dendrimers, or polymers can either be bound to a nucleic acid inhibitor, or induced to form a vesicle or micelle (see e.g., Kim S H. et al., (2008) Journal of Controlled Release 129(2):107-116) that encases a nucleic acid inhibitor. The formation of vesicles or micelles further prevents degradation of the iRNA when administered systemically. Methods for making and administering cationic-nucleic acid inhibitor complexes are well within the abilities of one skilled in the art (see e.g., Sorensen, D R., et al. (2003) J. Mol. Biol 327:761-766; Verma, U N. et al., (2003) Clin. Cancer Res. 9:1291-1300; Arnold, A S et al., (2007) J. Hypertens. 25:197-205, which are incorporated herein by reference in their entirety). Some non-limiting examples of drug delivery systems useful for systemic delivery of nucleic acid inhibitors include DOTAP (Sorensen, D R., et al (2003), supra; Verma, U N. et al., (2003), supra), Oligofectamine, “solid nucleic acid lipid particles” (Zimmermann, T S. et al., (2006) Nature 441:111-114), cardiolipin (Chien, P Y. et al., (2005) Cancer Gene Ther. 12:321-328; Pal, A. et al., (2005) Int J. Oncol. 26:1087-1091), polyethyleneimine (Bonnet M E. et al., (2008) Pharm. Res. August 16 Epub ahead of print; Aigner, A. (2006) J. Biomed. Biotechnol. 71659), Arg-Gly-Asp (RGD) peptides (Liu, S. (2006) Mol. Pharm. 3:472-487), and polyamidoamines (Tomalia, D A. et al., (2007) Biochem. Soc. Trans. 35:61-67; Yoo, H. et al., (1999) Pharm. Res. 16:1799-1804). In some embodiments, a nucleic acid inhibitor forms a complex with cyclodextrin for systemic administration. Methods for administration and pharmaceutical compositions of nucleic acid inhibitors and cyclodextrins can be found in U.S. Pat. No. 7,427,605, which is herein incorporated by reference in its entirety.

A. Vector Encoded iRNAs of the Invention

[0874] Nucleic acid inhibitors targeting the LDHA gene, nucleic acid inhibitor targeting the HAO1 gene, nucleic acid inhibitor targeting the PRODH2 gene, and nucleic acid inhibitors targeting LDHA and HAO1 can be expressed from transcription units inserted into DNA or RNA vectors (see, e.g. Couture, A, et al., TIG. (1996), 12:5-10; Skillern, A., et al., International PCT Publication No. WO 00/22113, Conrad, International PCT Publication No. WO 00/22114, and Conrad, U.S. Pat. No. 6,054,299). Expression can be transient (on the order of hours to weeks) or sustained (weeks to months or longer), depending upon the specific construct used and the target tissue or cell type. These transgenes can be introduced as a linear construct, a circular plasmid, or a viral vector, which can be an integrating or non-integrating vector. The transgene can also be constructed to permit it to be inherited as an extrachromosomal plasmid (Gassmann, et al., (1995) Proc. Natl. Acad. Sci. USA 92:1292).

[0875] The individual strand or strands of a nucleic acid inhibitor can be transcribed from a promoter on an expression vector. Where two separate strands are to be expressed to generate, for example, a dsRNA, two separate expression vectors can be co-introduced (e.g., by transfection or infection) into a target cell. Alternatively each individual strand of a nucleic acid inhibitor can be transcribed by promoters both of which are located on the same expression plasmid. In one embodiment, a dsRNA is expressed as inverted repeat polynucleotides joined by a linker polynucleotide sequence such that the dsRNA has a stem and loop structure.

[0876] Nucleic acid inhibitor expression vectors are generally DNA plasmids or viral vectors. Expression vectors compatible with eukaryotic cells, such as those compatible with vertebrate cells, can be used to produce recombinant constructs for the expression of a nucleic acid inhibitor as described herein. Eukaryotic cell expression vectors are well known in the art and are available from a number of commercial sources. Typically, such vectors are provided containing convenient restriction sites for insertion of the desired nucleic acid segment. Delivery of nucleic acid inhibitor expressing vectors can be systemic, such as by intravenous or intramuscular administration, by administration to target cells ex-planted from the patient followed by reintroduction into the patient, or by any other means that allows for introduction into a desired target cell.

[0877] Viral vector systems which can be utilized with the methods and compositions described herein include, but are not limited to, (a) adenovirus vectors; (b) retrovirus vectors, including but not limited to lentiviral vectors, moloney murine leukemia virus, etc.; (c) adeno-associated virus vectors; (d) herpes simplex virus vectors; (e) SV 40 vectors; (f) polyoma virus vectors; (g) papilloma virus vectors; (h) picornavirus vectors; (i) pox virus vectors such as an orthopox, e.g., vaccinia virus vectors or avipox, e.g. canary pox or fowl pox; and (j) a helper-dependent or gutless adenovirus. Replication-defective viruses can also be advantageous. Different vectors will or will not become incorporated into the cells' genome. The constructs can include viral sequences for transfection, if desired. Alternatively, the construct can be incorporated into vectors capable of episomal replication, e.g. EPV and EBV vectors. Constructs for the recombinant expression of an iRNA will generally require regulatory elements, e.g., promoters, enhancers, etc., to ensure the expression of the iRNA in target cells. Other aspects to consider for vectors and constructs are known in the art.

### IV. Pharmaceutical Compositions of the Invention

[0878] The present invention also includes pharmaceutical compositions and formulations which include the nucleic acid inhibitors of the invention. Accordingly, in one embodiment, provided herein are pharmaceutical compositions comprising a nucleic acid inhibitor, such as a double stranded ribonucleic acid (dsRNA) agent or a single stranded antisense polynucleotide agent that inhibits expression of LDHA1 in a cell, such as a liver cell; and a pharmaceutically acceptable carrier.

[0879] In another embodiment, provided herein are pharmaceutical compositions comprising a nucleic acid inhibitor, such as a double stranded ribonucleic acid (dsRNA) agent or a single stranded antisense polynucleotide agent that inhibits expression of HAO1 in a cell, such as a liver cell; and a pharmaceutically acceptable carrier.

[0880] In another embodiment, provided herein are pharmaceutical compositions comprising a nucleic acid inhibitor, such as a double stranded ribonucleic acid (dsRNA) agent or a single stranded antisense polynucleotide agent that inhibits expression of PRODH2 in a cell, such as a liver cell; and a pharmaceutically acceptable carrier.

[0881] In one embodiment, provided herein are pharmaceutical compositions comprising a first nucleic acid inhibitor, such as a double stranded ribonucleic acid (dsRNA) agent or a single stranded antisense polynucleotide agent, that inhibits expression of lactic acid dehydrogenase A (LDHA) in a cell, such as a liver cell, and a second nucleic acid inhibitor, such as a double stranded ribonucleic acid (dsRNA) agent or a single stranded antisense polynucleotide agent, that inhibits expression of hydroxyacid oxidase 1 (glycolate oxidase) (HAO1) in a cell, such as a liver cell; and a pharmaceutically acceptable carrier.

[0882] In yet another embodiment, the present invention provides pharmaceutical compositions and formulations comprising a nucleic acid inhibitor, such as a dual targeting RNAi agent of the invention, and a pharmaceutically acceptable carrier.

[0883] The pharmaceutical compositions containing the iRNA of the invention are useful for treating a subject having or at risk of developing a non-primary hyperoxaluria disease or disorder.

[0884] Such pharmaceutical compositions are formulated based on the mode of delivery. One example is compositions that are formulated for systemic administration via parenteral delivery, e.g., by intravenous (IV) or for subcutaneous delivery. Another example is compositions that are formulated for direct delivery into the liver, e.g., by infusion into the liver, such as by continuous pump infusion.

[0885] The pharmaceutical compositions of the invention may be administered in dosages sufficient to inhibit expression of an LDHA gene, an HAO1 gene, a PRODH2 gene, or both an LDHA gene and an HAO1 gene. In general, a suitable dose of a nucleic acid inhibitor of the invention will be in the range of about 0.001 to about 200.0 milligrams per kilogram body weight of the recipient per day, generally in the range of about 1 to 50 mg per kilogram body weight per day. Typically, a suitable dose of a nucleic acid inhibitor of the invention will be in the range of about 0.1 mg/kg to about 5.0 mg/kg, such as, about 0.3 mg/kg and about 3.0 mg/kg.

[0886] In the methods of the invention which include a first nucleic acid inhibitor targeting LDHA and a second nucleic acid inhibitor targeting HAO1, the first inhibitor and the second inhibitor may be present in the same pharmaceutical formulation or separate pharmaceutical formulations.

[0887] A repeat-dose regimine may include administration of a therapeutic amount of nucleic acid inhibitor on a regular basis, such as every other day to once a year. In certain embodiments, the nucleic acid inhibitor is administered about once per month to about once per quarter (i.e., about once every three months).

[0888] After an initial treatment regimen, the treatments can be administered on a less frequent basis. The skilled artisan will appreciate that certain factors can influence the dosage and timing required to effectively treat a subject, including but not limited to the severity of the disease or disorder, previous treatments, the general health and/or age of the subject, and other diseases present. Moreover, treatment of a subject with a therapeutically effective amount of a composition can include a single treatment or a series of treatments. Estimates of effective dosages and in vivo half-lives for the individual nucleic acid inhibitors encompassed by the invention can be made using conventional methodologies or on the basis of in vivo testing using an appropriate animal model.

[0889] The pharmaceutical compositions of the present invention can be administered in a number of ways depending upon whether local or systemic treatment is desired and upon the area to be treated. Administration can be topical (e.g., by a transdermal patch), pulmonary, e.g., by inhalation or insufflation of powders or aerosols, including by nebulizer; intratracheal, intranasal, epidermal and transdermal, oral or parenteral. Parenteral administration includes intravenous, intraarterial, subcutaneous, intraperitoneal or intramuscular injection or infusion; subdermal, e.g., via an implanted device; or intracranial, e.g., by intraparenchymal, intrathecal or intraventricular, administration.

The nucleic acid inhibitor can be delivered in a manner to target a particular cell or tissue, such as the liver (e.g., the hepatocytes of the liver).

[0890] Pharmaceutical compositions and formulations for topical administration can include transdermal patches, ointments, lotions, creams, gels, drops, suppositories, sprays, liquids and powders. Conventional pharmaceutical carriers, aqueous, powder or oily bases, thickeners and the like can be necessary or desirable. Coated condoms, gloves and the like can also be useful. Suitable topical formulations include those in which the iRNAs featured in the invention are in admixture with a topical delivery agent such as lipids, liposomes, fatty acids, fatty acid esters, steroids, chelating agents and surfactants. Suitable lipids and liposomes include neutral (e.g., dioleoylphosphatidyl DOPE ethanolamine, dimyristoylphosphatidyl choline DMPC, distearolyphosphatidyl choline) negative (e.g., dimyristoylphosphatidyl glycerol DMPG) and cationic (e.g., dioleoyltetramethylaminopropyl DOTAP and dioleoylphosphatidyl ethanolamine DOTMA). Nucleic acid inhibitors featured in the invention can be encapsulated within liposomes or can form complexes thereto, in particular to cationic liposomes. Alternatively, nucleic acid inhibitors can be complexed to lipids, in particular to cationic lipids. Suitable fatty acids and esters include but are not limited to arachidonic acid, oleic acid, eicosanoic acid, lauric acid, caprylic acid, capric acid, myristic acid, palmitic acid, stearic acid, linoleic acid, linolenic acid, dicaprate, tricaprate, monoolein, dilaurin, glyceryl 1-monocaprate, 1-dodecylazacycloheptan-2-one, an acylcarnitine, an acylcholine, or a C₁₋₂₀ alkyl ester (e.g., isopropylmyristate IPM), monoglyceride, diglyceride or pharmaceutically acceptable salt thereof. Topical formulations are described in detail in U.S. Pat. No. 6,747,014, which is incorporated herein by reference.

[0891] Compositions and formulations for oral administration include powders or granules, microparticulates, nanoparticulates, suspensions or solutions in water or non-aqueous media, capsules, gel capsules, sachets, tablets or minitablets. Thickeners, flavoring agents, diluents, emulsifiers, dispersing aids or binders can be desirable. In some embodiments, oral formulations are those in which nucleic acid inhibitors featured in the invention are administered in conjunction with one or more penetration enhancer surfactants and chelators. Suitable surfactants include fatty acids and/or esters or salts thereof, bile acids and/or salts thereof. Suitable bile acids/salts include chenodeoxycholic acid (CDCA) and ursodeoxychenodeoxycholic acid (UDCA), cholic acid, dehydrocholic acid, deoxycholic acid, glucholic acid, glycholic acid, glycodeoxycholic acid, taurocholic acid, taurodeoxycholic acid, sodium tauro-24,25-dihydro-fusidate and sodium glycodihydrofusidate. Suitable fatty acids include arachidonic acid, undecanoic acid, oleic acid, lauric acid, caprylic acid, capric acid, myristic acid, palmitic acid, stearic acid, linoleic acid, linolenic acid, dicaprate, tricaprate, monoolein, dilaurin, glyceryl 1-monocaprate, 1-dodecylazacycloheptan-2-one, an acylcarnitine, an acylcholine, or a monoglyceride, a diglyceride or a pharmaceutically acceptable salt thereof (e.g., sodium). In some embodiments, combinations of penetration enhancers are used, for example, fatty acids/salts in combination with bile acids/salts. One exemplary combination is the sodium salt of lauric acid, capric acid and UDCA. Further penetration enhancers include polyoxyethylene-9-lauryl ether, polyoxyethylene-20-cetyl ether. DsRNAs featured in the invention can be delivered orally, in granular form including sprayed dried particles, or complexed to form micro or nanoparticles. DsRNA complexing agents include poly-amino acids; polyimines; polyacrylates; polyalkylacrylates, polyoxethanes, polyalkylcyanoacrylates; cationized gelatins, albumins, starches, acrylates, polyethyleneglycols (PEG) and starches; polyalkylcyanoacrylates; DEAE-derivatized polyimines, pollulans, celluloses and starches. Suitable complexing agents include chitosan, N-trimethylchitosan, poly-L-lysine, polyhistidine, polyornithine, polyspermines, protamine, polyvinylpyridine, polythiodiethylaminomethylethylene P(TDAE), polyaminostyrene (e.g., p-amino), poly(methylcyanoacrylate), poly(ethylcyanoacrylate), poly(butylcyanoacrylate), poly(isobutylcyanoacrylate), poly(isohexylcynaoacrylate), DEAE-methacrylate, DEAE-hexylacrylate, DEAE-acrylamide, DEAE-albumin and DEAE-dextran, polymethylacrylate, polyhexylacrylate, poly(D,L-lactic acid), poly(DL-lactic-co-glycolic acid (PLGA), alginate, and polyethyleneglycol (PEG). Oral formulations for dsRNAs and their preparation are described in detail in U.S. Pat. No. 6,887,906, US Publn. No. 20030027780, and U.S. Pat. No. 6,747,014, each of which is incorporated herein by reference.

[0892] Compositions and formulations for parenteral, intraparenchymal (into the brain), intrathecal, intraventricular or intrahepatic administration can include sterile aqueous solutions which can also contain buffers, diluents and other suitable additives such as, but not limited to, penetration enhancers, carrier compounds and other pharmaceutically acceptable carriers or excipients.

[0893] Pharmaceutical compositions of the present invention include, but are not limited to, solutions, emulsions, and liposome-containing formulations. These compositions can be generated from a variety of components that include, but are not limited to, preformed liquids, self-emulsifying solids and self-emulsifying semisolids.

[0894] The pharmaceutical formulations of the present invention, which can conveniently be presented in unit dosage form, can be prepared according to conventional techniques well known in the pharmaceutical industry. Such techniques include the step of bringing into association the active ingredients with the pharmaceutical carrier(s) or excipient(s). In general, the formulations are prepared by uniformly and intimately bringing into association the active ingredients with liquid carriers or finely divided solid carriers or both, and then, if necessary, shaping the product.

[0895] The compositions of the present invention can be formulated into any of many possible dosage forms such as, but not limited to, tablets, capsules, gel capsules, liquid syrups, soft gels, suppositories, and enemas. The compositions of the present invention can also be formulated as suspensions in aqueous, non-aqueous or mixed media. Aqueous suspensions can further contain substances which increase the viscosity of the suspension including, for example, sodium carboxymethylcellulose, sorbitol and/or dextran. The suspension can also contain stabilizers.

### A. Additional Formulations

i. Emulsions

[0896] The compositions of the present invention can be prepared and formulated as emulsions. Emulsions are typically heterogeneous systems of one liquid dispersed in another in the form of droplets usually exceeding 0.1 μm in diameter (see e.g., Ansel's Pharmaceutical Dosage Forms and Drug Delivery Systems, Allen, L V., Popovich N G., and Ansel H C., 2004, Lippincott Williams & Wilkins (8th ed.), New York, NY; Idson, in Pharmaceutical Dosage Forms, Lieberman, Rieger and Banker (Eds.), 1988, Marcel Dekker, Inc., New York, N.Y., volume 1, p. 199; Rosoff, in Pharmaceutical Dosage Forms, Lieberman, Rieger and Banker (Eds.), 1988, Marcel Dekker, Inc., New York, N.Y., Volume 1, p. 245; Block in Pharmaceutical Dosage Forms, Lieberman, Rieger and Banker (Eds.), 1988, Marcel Dekker, Inc., New York, N.Y., volume 2, p. 335; Higuchi et al., in Remington's Pharmaceutical Sciences, Mack Publishing Co., Easton, Pa., 1985, p. 301). Emulsions are often biphasic systems comprising two immiscible liquid phases intimately mixed and dispersed with each other. In general, emulsions can be of either the water-in-oil (w/o) or the oil-in-water (o/w) variety. When an aqueous phase is finely divided into and dispersed as minute droplets into a bulk oily phase, the resulting composition is called a water-in-oil (w/o) emulsion. Alternatively, when an oily phase is finely divided into and dispersed as minute droplets into a bulk aqueous phase, the resulting composition is called an oil-in-water (o/w) emulsion. Emulsions can contain additional components in addition to the dispersed phases, and the active drug which can be present as a solution in either aqueous phase, oily phase or itself as a separate phase. Pharmaceutical excipients such as emulsifiers, stabilizers, dyes, and anti-oxidants can also be present in emulsions as needed.

[0897] Pharmaceutical emulsions can also be multiple emulsions that are comprised of more than two phases such as, for example, in the case of oil-in-water-in-oil (o/w/o) and water-in-oil-in-water (w/o/w) emulsions. Such complex formulations often provide certain advantages that simple binary emulsions do not. Multiple emulsions in which individual oil droplets of an o/w emulsion enclose small water droplets constitute a w/o/w emulsion. Likewise a system of oil droplets enclosed in globules of water stabilized in an oily continuous phase provides an o/w/o emulsion.

[0898] Emulsions are characterized by little or no thermodynamic stability. Often, the dispersed or discontinuous phase of the emulsion is well dispersed into the external or continuous phase and maintained in this form through the means of emulsifiers or the viscosity of the formulation. Either of the phases of the emulsion can be a semisolid or a solid, as is the case of emulsion-style ointment bases and creams. Other means of stabilizing emulsions entail the use of emulsifiers that can be incorporated into either phase of the emulsion. Emulsifiers can broadly be classified into four categories: synthetic surfactants, naturally occurring emulsifiers, absorption bases, and finely dispersed solids (see e.g., Ansel's Pharmaceutical Dosage Forms and Drug Delivery Systems, Allen, L V., Popovich N G., and Ansel H C., 2004, Lippincott Williams & Wilkins (8th ed.), New York, NY; Idson, in Pharmaceutical Dosage Forms, Lieberman, Rieger and Banker (Eds.), 1988, Marcel Dekker, Inc., New York, N.Y., volume 1, p. 199).

[0899] Synthetic surfactants, also known as surface active agents, have found wide applicability in the formulation of emulsions and have been reviewed in the literature (see e.g., Ansel's Pharmaceutical Dosage Forms and Drug Delivery Systems, Allen, L V., Popovich N G., and Ansel H C., 2004, Lippincott Williams & Wilkins (8th ed.), New York, NY; Rieger, in Pharmaceutical Dosage Forms, Lieberman, Rieger and Banker (Eds.), 1988, Marcel Dekker, Inc., New York, N.Y., volume 1, p. 285; Idson, in Pharmaceutical Dosage Forms, Lieberman, Rieger and Banker (Eds.), Marcel Dekker, Inc., New York, N.Y., 1988, volume 1, p. 199). Surfactants are typically amphiphilic and comprise a hydrophilic and a hydrophobic portion. The ratio of the hydrophilic to the hydrophobic nature of the surfactant has been termed the hydrophile/lipophile balance (HLB) and is a valuable tool in categorizing and selecting surfactants in the preparation of formulations. Surfactants can be classified into different classes based on the nature of the hydrophilic group: nonionic, anionic, cationic and amphoteric (see e.g., Ansel's Pharmaceutical Dosage Forms and Drug Delivery Systems, Allen, L V., Popovich N G., and Ansel H C., 2004, Lippincott Williams & Wilkins (8th ed.), New York, NY Rieger, in Pharmaceutical Dosage Forms, Lieberman, Rieger and Banker (Eds.), 1988, Marcel Dekker, Inc., New York, N.Y., volume 1, p. 285).

[0900] Naturally occurring emulsifiers used in emulsion formulations include lanolin, beeswax, phosphatides, lecithin and acacia. Absorption bases possess hydrophilic properties such that they can soak up water to form w/o emulsions yet retain their semisolid consistencies, such as anhydrous lanolin and hydrophilic petrolatum. Finely divided solids have also been used as good emulsifiers especially in combination with surfactants and in viscous preparations. These include polar inorganic solids, such as heavy metal hydroxides, nonswelling clays such as bentonite, attapulgite, hectorite, kaolin, montmorillonite, colloidal aluminum silicate and colloidal magnesium aluminum silicate, pigments and nonpolar solids such as carbon or glyceryl tristearate.

[0901] A large variety of non-emulsifying materials are also included in emulsion formulations and contribute to the properties of emulsions. These include fats, oils, waxes, fatty acids, fatty alcohols, fatty esters, humectants, hydrophilic colloids, preservatives and antioxidants (Block, in Pharmaceutical Dosage Forms, Lieberman, Rieger and Banker (Eds.), 1988, Marcel Dekker, Inc., New York, N.Y., volume 1, p. 335; Idson, in Pharmaceutical Dosage Forms, Lieberman, Rieger and Banker (Eds.), 1988, Marcel Dekker, Inc., New York, N.Y., volume 1, p. 199).

[0902] Hydrophilic colloids or hydrocolloids include naturally occurring gums and synthetic polymers such as polysaccharides (for example, acacia, agar, alginic acid, carrageenan, guar gum, karaya gum, and tragacanth), cellulose derivatives (for example, carboxymethylcellulose and carboxypropylcellulose), and synthetic polymers (for example, carbomers, cellulose ethers, and carboxyvinyl polymers). These disperse or swell in water to form colloidal solutions that stabilize emulsions by forming strong interfacial films around the dispersed-phase droplets and by increasing the viscosity of the external phase.

[0903] Since emulsions often contain a number of ingredients such as carbohydrates, proteins, sterols and phosphatides that can readily support the growth of microbes, these formulations often incorporate preservatives. Commonly used preservatives included in emulsion formulations include methyl paraben, propyl paraben, quaternary ammonium salts, benzalkonium chloride, esters of p-hydroxybenzoic acid, and boric acid. Antioxidants are also commonly added to emulsion formulations to prevent deterioration of the formulation. Antioxidants used can be free radical scavengers such as tocopherols, alkyl gallates, butylated hydroxyanisole, butylated hydroxytoluene, or reducing agents such as ascorbic acid and sodium metabisulfite, and antioxidant synergists such as citric acid, tartaric acid, and lecithin.

[0904] The application of emulsion formulations via dermatological, oral and parenteral routes and methods for their manufacture have been reviewed in the literature (see e.g., Ansel's Pharmaceutical Dosage Forms and Drug Delivery Systems, Allen, L V., Popovich N G., and Ansel H C., 2004, Lippincott Williams & Wilkins (8th ed.), New York, NY; Idson, in Pharmaceutical Dosage Forms, Lieberman, Rieger and Banker (Eds.), 1988, Marcel Dekker, Inc., New York, N.Y., volume 1, p. 199). Emulsion formulations for oral delivery have been very widely used because of ease of formulation, as well as efficacy from an absorption and bioavailability standpoint (see e.g., Ansel's Pharmaceutical Dosage Forms and Drug Delivery Systems, Allen, L V., Popovich N G., and Ansel H C., 2004, Lippincott Williams & Wilkins (8th ed.), New York, NY; Rosoff, in Pharmaceutical Dosage Forms, Lieberman, Rieger and Banker (Eds.), 1988, Marcel Dekker, Inc., New York, N.Y., volume 1, p. 245; Idson, in Pharmaceutical Dosage Forms, Lieberman, Rieger and Banker (Eds.), 1988, Marcel Dekker, Inc., New York, N.Y., volume 1, p. 199). Mineral-oil base laxatives, oil-soluble vitamins and high fat nutritive preparations are among the materials that have commonly been administered orally as o/w emulsions.

ii. Microemulsions

[0905] In one embodiment of the present invention, the compositions of iRNAs and nucleic acids are formulated as microemulsions. A microemulsion can be defined as a system of water, oil and amphiphile which is a single optically isotropic and thermodynamically stable liquid solution (see e.g., Ansel's Pharmaceutical Dosage Forms and Drug Delivery Systems, Allen, L V., Popovich N G., and Ansel H C., 2004, Lippincott Williams & Wilkins (8th ed.), New York, NY; Rosoff, in Pharmaceutical Dosage Forms, Lieberman, Rieger and Banker (Eds.), 1988, Marcel Dekker, Inc., New York, N.Y., volume 1, p. 245). Typically microemulsions are systems that are prepared by first dispersing an oil in an aqueous surfactant solution and then adding a sufficient amount of a fourth component, generally an intermediate chain-length alcohol to form a transparent system. Therefore, microemulsions have also been described as thermodynamically stable, isotropically clear dispersions of two immiscible liquids that are stabilized by interfacial films of surface-active molecules (Leung and Shah, in: Controlled Release of Drugs: Polymers and Aggregate Systems, Rosoff, M., Ed., 1989, VCH Publishers, New York, pages 185-215). Microemulsions commonly are prepared via a combination of three to five components that include oil, water, surfactant, cosurfactant and electrolyte. Whether the microemulsion is of the water-in-oil (w/o) or an oil-in-water (o/w) type is dependent on the properties of the oil and surfactant used and on the structure and geometric packing of the polar heads and hydrocarbon tails of the surfactant molecules (Schott, in Remington's Pharmaceutical Sciences, Mack Publishing Co., Easton, Pa., 1985, p. 271).

[0906] The phenomenological approach utilizing phase diagrams has been extensively studied and has yielded a comprehensive knowledge, to one skilled in the art, of how to formulate microemulsions (see e.g., Ansel's Pharmaceutical Dosage Forms and Drug Delivery Systems, Allen, L V., Popovich N G., and Ansel H C., 2004, Lippincott Williams & Wilkins (8th ed.), New York, NY; Rosoff, in Pharmaceutical Dosage Forms, Lieberman, Rieger and Banker (Eds.), 1988, Marcel Dekker, Inc., New York, N.Y., volume 1, p. 245; Block, in Pharmaceutical Dosage Forms, Lieberman, Rieger and Banker (Eds.), 1988, Marcel Dekker, Inc., New York, N.Y., volume 1, p. 335). Compared to conventional emulsions, microemulsions offer the advantage of solubilizing water-insoluble drugs in a formulation of thermodynamically stable droplets that are formed spontaneously.

[0907] Surfactants used in the preparation of microemulsions include, but are not limited to, ionic surfactants, non-ionic surfactants, Brij 96, polyoxyethylene oleyl ethers, polyglycerol fatty acid esters, tetraglycerol monolaurate (ML310), tetraglycerol monooleate (MO310), hexaglycerol monooleate (PO310), hexaglycerol pentaoleate (PO500), decaglycerol monocaprate (MCA750), decaglycerol monooleate (MO750), decaglycerol sesquioleate (SO750), decaglycerol decaoleate (DAO750), alone or in combination with cosurfactants. The cosurfactant, usually a short-chain alcohol such as ethanol, 1-propanol, and 1-butanol, serves to increase the interfacial fluidity by penetrating into the surfactant film and consequently creating a disordered film because of the void space generated among surfactant molecules. Microemulsions can, however, be prepared without the use of cosurfactants and alcohol-free self-emulsifying microemulsion systems are known in the art. The aqueous phase can typically be, but is not limited to, water, an aqueous solution of the drug, glycerol, PEG300, PEG400, polyglycerols, propylene glycols, and derivatives of ethylene glycol. The oil phase can include, but is not limited to, materials such as Captex 300, Captex 355, Capmul MCM, fatty acid esters, medium chain (C8-C12) mono, di, and tri-glycerides, polyoxyethylated glyceryl fatty acid esters, fatty alcohols, polyglycolized glycerides, saturated polyglycolized C8-C10 glycerides, vegetable oils and silicone oil.

Microemulsions are particularly of interest from the standpoint of drug solubilization and the enhanced absorption of drugs. Lipid based microemulsions (both o/w and w/o) have been proposed to enhance the oral bioavailability of drugs, including peptides (see e.g., U.S. Pat. Nos. 6,191,105; 7,063,860; 7,070,802; 7,157,099; Constantinides et al., Pharmaceutical Research, 1994, 11, 1385-1390; Ritschel, Meth. Find. Exp. Clin. Pharmacol., 1993, 13, 205). Microemulsions afford advantages of improved drug solubilization, protection of drug from enzymatic hydrolysis, possible enhancement of drug absorption due to surfactant-induced alterations in membrane fluidity and permeability, ease of preparation, ease of oral administration over solid dosage forms, improved clinical potency, and decreased toxicity (see e.g., U.S. Pat. Nos. 6,191,105; 7,063,860; 7,070,802; 7,157,099; Constantinides et al., Pharmaceutical Research, 1994, 11, 1385; Ho et al., J. Pharm. Sci., 1996, 85, 138-143). Often microemulsions can form spontaneously when their components are brought together at ambient temperature. This can be particularly advantageous when formulating thermolabile drugs, peptides or iRNAs. Microemulsions have also been effective in the transdermal delivery of active components in both cosmetic and pharmaceutical applications. It is expected that the microemulsion compositions and formulations of the present invention will facilitate the increased systemic absorption of iRNAs and nucleic acids from the gastrointestinal tract, as well as improve the local cellular uptake of iRNAs and nucleic acids.

[0908] Microemulsions of the present invention can also contain additional components and additives such as sorbitan monostearate (Grill 3), Labrasol, and penetration enhancers to improve the properties of the formulation and to enhance the absorption of the iRNAs and nucleic acids of the present invention. Penetration enhancers used in the microemulsions of the present invention can be classified as belonging to one of five broad categories—surfactants, fatty acids, bile salts, chelating agents, and non-chelating non-surfactants (Lee et al., Critical Reviews in Therapeutic Drug Carrier Systems, 1991, p. 92). Each of these classes has been discussed above.

iii. Microparticles

[0909] A nucleic acid inhibitor of the invention may be incorporated into a particle, e.g., a microparticle. Microparticles can be produced by spray-drying, but may also be produced by other methods including lyophilization, evaporation, fluid bed drying, vacuum drying, or a combination of these techniques.

iv. Penetration Enhancers

[0910] In one embodiment, the present invention employs various penetration enhancers to effect the efficient delivery of nucleic acids, particularly iRNAs, to the skin of animals. Most drugs are present in solution in both ionized and nonionized forms. However, usually only lipid soluble or lipophilic drugs readily cross cell membranes. It has been discovered that even non-lipophilic drugs can cross cell membranes if the membrane to be crossed is treated with a penetration enhancer. In addition to aiding the diffusion of non-lipophilic drugs across cell membranes, penetration enhancers also enhance the permeability of lipophilic drugs.

[0911] Penetration enhancers can be classified as belonging to one of five broad categories, i.e., surfactants, fatty acids, bile salts, chelating agents, and non-chelating non-surfactants (see e.g., Malmsten, M. Surfactants and polymers in drug delivery, Informa Health Care, New York, NY, 2002; Lee et al., Critical Reviews in Therapeutic Drug Carrier Systems, 1991, p. 92). Each of the above mentioned classes of penetration enhancers are described below in greater detail.

[0912] Surfactants (or “surface-active agents”) are chemical entities which, when dissolved in an aqueous solution, reduce the surface tension of the solution or the interfacial tension between the aqueous solution and another liquid, with the result that absorption of iRNAs through the mucosa is enhanced. In addition to bile salts and fatty acids, these penetration enhancers include, for example, sodium lauryl sulfate, polyoxyethylene-9-lauryl ether and polyoxyethylene-20-cetyl ether) (see e.g., Malmsten, M. Surfactants and polymers in drug delivery, Informa Health Care, New York, NY, 2002; Lee et al., Critical Reviews in Therapeutic Drug Carrier Systems, 1991, p. 92); and perfluorochemical emulsions, such as FC-43. Takahashi et al., J. Pharm. Pharmacol., 1988, 40, 252).

[0913] Various fatty acids and their derivatives which act as penetration enhancers include, for example, oleic acid, lauric acid, capric acid (n-decanoic acid), myristic acid, palmitic acid, stearic acid, linoleic acid, linolenic acid, dicaprate, tricaprate, monoolein (1-monooleoyl-rac-glycerol), dilaurin, caprylic acid, arachidonic acid, glycerol 1-monocaprate, 1-dodecylazacycloheptan-2-one, acylcarnitines, acylcholines, C₁₋₂₀ alkyl esters thereof (e.g., methyl, isopropyl and t-butyl), and mono- and di-glycerides thereof (i.e., oleate, laurate, caprate, myristate, palmitate, stearate, linoleate, etc.) (see e.g., Touitou, E., et al. Enhancement in Drug Delivery, CRC Press, Danvers, M A, 2006; Lee et al., Critical Reviews in Therapeutic Drug Carrier Systems, 1991, p. 92; Muranishi, Critical Reviews in Therapeutic Drug Carrier Systems, 1990, 7, 1-33; El Hariri et al., J. Pharm. Pharmacol., 1992, 44, 651-654).

[0914] The physiological role of bile includes the facilitation of dispersion and absorption of lipids and fat-soluble vitamins (see e.g., Malmsten, M. Surfactants and polymers in drug delivery, Informa Health Care, New York, NY, 2002; Brunton, Chapter 38 in: Goodman & Gilman's The Pharmacological Basis of Therapeutics, 9th Ed., Hardman et al. Eds., McGraw-Hill, New York, 1996, pp. 934-935). Various natural bile salts, and their synthetic derivatives, act as penetration enhancers. Thus the term “bile salts” includes any of the naturally occurring components of bile as well as any of their synthetic derivatives. Suitable bile salts include, for example, cholic acid (or its pharmaceutically acceptable sodium salt, sodium cholate), dehydrocholic acid (sodium dehydrocholate), deoxycholic acid (sodium deoxycholate), glucholic acid (sodium glucholate), glycholic acid (sodium glycocholate), glycodeoxycholic acid (sodium glycodeoxycholate), taurocholic acid (sodium taurocholate), taurodeoxycholic acid (sodium taurodeoxycholate), chenodeoxycholic acid (sodium chenodeoxycholate), ursodeoxycholic acid (UDCA), sodium tauro-24,25-dihydro-fusidate (STDHF), sodium glycodihydrofusidate and polyoxyethylene-9-lauryl ether (POE) (see e.g., Malmsten, M. Surfactants and polymers in drug delivery, Informa Health Care, New York, NY, 2002; Lee et al., Critical Reviews in Therapeutic Drug Carrier Systems, 1991, page 92; Swinyard, Chapter 39 In: Remington's Pharmaceutical Sciences, 18th Ed., Gennaro, ed., Mack Publishing Co., Easton, Pa., 1990, pages 782-783; Muranishi, Critical Reviews in Therapeutic Drug Carrier Systems, 1990, 7, 1-33; Yamamoto et al., J. Pharm. Exp. Ther., 1992, 263, 25; Yamashita et al., J. Pharm. Sci., 1990, 79, 579-583).

[0915] Chelating agents, as used in connection with the present invention, can be defined as compounds that remove metallic ions from solution by forming complexes therewith, with the result that absorption of nucleic acid inhibitors s through the mucosa is enhanced. With regards to their use as penetration enhancers in the present invention, chelating agents have the added advantage of also serving as DNase inhibitors, as most characterized DNA nucleases require a divalent metal ion for catalysis and are thus inhibited by chelating agents (Jarrett, J. Chromatogr., 1993, 618, 315-339). Suitable chelating agents include but are not limited to disodium ethylenediaminetetraacetate (EDTA), citric acid, salicylates (e.g., sodium salicylate, 5-methoxysalicylate and homovanilate), N-acyl derivatives of collagen, laureth-9 and N-amino acyl derivatives of beta-diketones (enamines)(see e.g., Katdare, A. et al., Excipient development for pharmaceutical, biotechnology, and drug delivery, CRC Press, Danvers, M A, 2006; Lee et al., Critical Reviews in Therapeutic Drug Carrier Systems, 1991, page 92; Muranishi, Critical Reviews in Therapeutic Drug Carrier Systems, 1990, 7, 1-33; Buur et al., J. Control Rel., 1990, 14, 43-51).

[0916] As used herein, non-chelating non-surfactant penetration enhancing compounds can be defined as compounds that demonstrate insignificant activity as chelating agents or as surfactants but that nonetheless enhance absorption of iRNAs through the alimentary mucosa (see e.g., Muranishi, Critical Reviews in Therapeutic Drug Carrier Systems, 1990, 7, 1-33). This class of penetration enhancers includes, for example, unsaturated cyclic ureas, 1-alkyl- and 1-alkenylazacyclo-alkanone derivatives (Lee et al., Critical Reviews in Therapeutic Drug Carrier Systems, 1991, page 92); and non-steroidal anti-inflammatory agents such as diclofenac sodium, indomethacin and phenylbutazone (Yamashita et al., J. Pharm. Pharmacol., 1987, 39, 621-626).

[0917] Agents that enhance uptake of nucleic acid inhibitors at the cellular level can also be added to the pharmaceutical and other compositions of the present invention. For example, cationic lipids, such as lipofectin (Junichi et al, U.S. Pat. No. 5,705,188), cationic glycerol derivatives, and polycationic molecules, such as polylysine (Lollo et al., PCT Application WO 97/30731), are also known to enhance the cellular uptake of dsRNAs. Examples of commercially available transfection reagents include, for example Lipofectamine™ (Invitrogen; Carlsbad, CA), Lipofectamine 2000™ (Invitrogen; Carlsbad, CA), 293Fectin™ (Invitrogen; Carlsbad, CA), Cellfectin™ (Invitrogen; Carlsbad, CA), DMRIE-C™ (Invitrogen; Carlsbad, CA), FreeStyle™ MAX (Invitrogen; Carlsbad, CA), Lipofectamine™ 2000 CD (Invitrogen; Carlsbad, CA), Lipofectamine™ (Invitrogen; Carlsbad, CA), RNAiMAX (Invitrogen; Carlsbad, CA), Oligofectamine™ (Invitrogen; Carlsbad, CA), Optifect™ (Invitrogen; Carlsbad, CA), X-tremeGENE Q2 Transfection Reagent (Roche; Grenzacherstrasse, Switzerland), DOTAP Liposomal Transfection Reagent (Grenzacherstrasse, Switzerland), DOSPER Liposomal Transfection Reagent (Grenzacherstrasse, Switzerland), or Fugene (Grenzacherstrasse, Switzerland), Transfectam® Reagent (Promega; Madison, WI), TransFast™ Transfection Reagent (Promega; Madison, WI), Tfx™-20 Reagent (Promega; Madison, WI), Tfx™-50 Reagent (Promega; Madison, WI), DreamFect™ (OZ Biosciences; Marseille, France), EcoTransfect (OZ Biosciences; Marseille, France), TransPass^{a} D1 Transfection Reagent (New England Biolabs; Ipswich, MA, USA), LyoVec™/LipoGen™ (Invitrogen; San Diego, CA, USA), PerFectin Transfection Reagent (Genlantis; San Diego, CA, USA), NeuroPORTER Transfection Reagent (Genlantis; San Diego, CA, USA), GenePORTER Transfection reagent (Genlantis; San Diego, CA, USA), GenePORTER 2 Transfection reagent (Genlantis; San Diego, CA, USA), Cytofectin Transfection Reagent (Genlantis; San Diego, CA, USA), BaculoPORTER Transfection Reagent (Genlantis; San Diego, CA, USA), TroganPORTER™ transfection Reagent (Genlantis; San Diego, CA, USA), RiboFect (Bioline; Taunton, MA, USA), PlasFect (Bioline; Taunton, MA, USA), UniFECTOR (B-Bridge International; Mountain View, CA, USA), SureFECTOR (B-Bridge International; Mountain View, CA, USA), or HiFect™ (B-Bridge International, Mountain View, CA, USA), among others.

[0918] Other agents can be utilized to enhance the penetration of the administered nucleic acids, including glycols such as ethylene glycol and propylene glycol, pyrrols such as 2-pyrrol, azones, and terpenes such as limonene and menthone.

v. Carriers

[0919] Certain compositions of the present invention also incorporate carrier compounds in the formulation. As used herein, “carrier compound” or “carrier” can refer to a nucleic acid, or analog thereof, which is inert (i.e., does not possess biological activity per se) but is recognized as a nucleic acid by in vivo processes that reduce the bioavailability of a nucleic acid having biological activity by, for example, degrading the biologically active nucleic acid or promoting its removal from circulation. The coadministration of a nucleic acid and a carrier compound, typically with an excess of the latter substance, can result in a substantial reduction of the amount of nucleic acid recovered in the liver, kidney or other extracirculatory reservoirs, presumably due to competition between the carrier compound and the nucleic acid for a common receptor. For example, the recovery of a partially phosphorothioate dsRNA in hepatic tissue can be reduced when it is coadministered with polyinosinic acid, dextran sulfate, polycytidic acid or 4-acetamido-4′isothiocyano-stilbene-2,2′-disulfonic acid (Miyao et al., DsRNA Res. Dev., 1995, 5, 115-121; Takakura et al., DsRNA & Nucl. Acid Drug Dev., 1996, 6, 177-183.

vi. Excipients

[0920] In contrast to a carrier compound, a “pharmaceutical carrier” or “excipient” is a pharmaceutically acceptable solvent, suspending agent or any other pharmacologically inert vehicle for delivering one or more nucleic acids to an animal. The excipient can be liquid or solid and is selected, with the planned manner of administration in mind, so as to provide for the desired bulk, consistency, etc., when combined with a nucleic acid and the other components of a given pharmaceutical composition. Typical pharmaceutical carriers include, but are not limited to, binding agents (e.g., pregelatinized maize starch, polyvinylpyrrolidone or hydroxypropyl methylcellulose, etc.); fillers (e.g., lactose and other sugars, microcrystalline cellulose, pectin, gelatin, calcium sulfate, ethyl cellulose, polyacrylates or calcium hydrogen phosphate, etc.); lubricants (e.g., magnesium stearate, talc, silica, colloidal silicon dioxide, stearic acid, metallic stearates, hydrogenated vegetable oils, corn starch, polyethylene glycols, sodium benzoate, sodium acetate, etc.); disintegrants (e.g., starch, sodium starch glycolate, etc.); and wetting agents (e.g., sodium lauryl sulphate, etc). Pharmaceutically acceptable organic or inorganic excipients suitable for non-parenteral administration which do not deleteriously react with nucleic acids can also be used to formulate the compositions of the present invention. Suitable pharmaceutically acceptable carriers include, but are not limited to, water, salt solutions, alcohols, polyethylene glycols, gelatin, lactose, amylose, magnesium stearate, talc, silicic acid, viscous paraffin, hydroxymethylcellulose, polyvinylpyrrolidone and the like.

[0921] Formulations for topical administration of nucleic acid inhibitors can include sterile and non-sterile aqueous solutions, non-aqueous solutions in common solvents such as alcohols, or solutions of the nucleic acids in liquid or solid oil bases. The solutions can also contain buffers, diluents and other suitable additives. Pharmaceutically acceptable organic or inorganic excipients suitable for non-parenteral administration which do not deleteriously react with nucleic acids can be used. Suitable pharmaceutically acceptable excipients include, but are not limited to, water, salt solutions, alcohol, polyethylene glycols, gelatin, lactose, amylose, magnesium stearate, talc, silicic acid, viscous paraffin, hydroxymethylcellulose, polyvinylpyrrolidone and the like.

vii. Other Components

[0922] The compositions of the present invention can additionally contain other adjunct components conventionally found in pharmaceutical compositions, at their art-established usage levels. Thus, for example, the compositions can contain additional, compatible, pharmaceutically-active materials such as, for example, antipruritics, astringents, local anesthetics or anti-inflammatory agents, or can contain additional materials useful in physically formulating various dosage forms of the compositions of the present invention, such as dyes, flavoring agents, preservatives, antioxidants, opacifiers, thickening agents and stabilizers. However, such materials, when added, should not unduly interfere with the biological activities of the components of the compositions of the present invention. The formulations can be sterilized and, if desired, mixed with auxiliary agents, e.g., lubricants, preservatives, stabilizers, wetting agents, emulsifiers, salts for influencing osmotic pressure, buffers, colorings, flavorings and/or aromatic substances and the like which do not deleteriously interact with the nucleic acid(s) of the formulation.

[0923] Aqueous suspensions can contain substances which increase the viscosity of the suspension including, for example, sodium carboxymethylcellulose, sorbitol and/or dextran. The suspension can also contain stabilizers.

[0924] In some embodiments, pharmaceutical compositions featured in the invention include (a) one or more nucleic acid inhibitors and (b) one or more agents which function by a non-RNAi mechanism and which are useful in treating a kidney stone disease. Examples of such agents include, but are not limited to pyridoxine, an ACE inhibitor (angiotensin converting enzyme inhibitors), e.g., benazepril (Lotensin); an angiotensin II receptor antagonist (ARB) (e.g., losartan potassium, such as Merck & Co.'s Cozaar®), e.g., Candesartan (Atacand); an HMG-CoA reductase inhibitor (e.g., a statin); dietary oxalate degrading compounds, e.g., Oxalate decarboxylase (Oxazyme); calcium binding agents, e.g., Sodium cellulose phosphate (Calcibind); diuretics, e.g., thiazide diuretics, such as hydrochlorothiazide (Microzide); phosphate binders, e.g., Sevelamer (Renagel); magnesium and Vitamin B6 supplements; potassium citrate; orthophosphates, bisphosphonates; oral phosphate and citrate solutions; high fluid intake, urinary tract endoscopy; extracorporeal shock wave lithotripsy; kidney dialysis; kidney stone removal (e.g., surgery); and kidney/liver transplant; or a combination of any of the foregoing.

[0925] Toxicity and therapeutic efficacy of such compounds can be determined by standard pharmaceutical procedures in cell cultures or experimental animals, e.g., for determining the LD₅₀ (the dose lethal to 50% of the population) and the ED₅₀ (the dose therapeutically effective in 50% of the population). The dose ratio between toxic and therapeutic effects is the therapeutic index and it can be expressed as the ratio LD₅₀/ED₅₀. Compounds that exhibit high therapeutic indices are preferred. The data obtained from cell culture assays and animal studies can be used in formulating a range of dosage for use in humans. The dosage of compositions featured herein in the invention lies generally within a range of circulating concentrations that include the ED₅₀ with little or no toxicity. The dosage can vary within this range depending upon the dosage form employed and the route of administration utilized. For any compound used in the methods featured in the invention, the therapeutically effective dose can be estimated initially from cell culture assays. A dose can be formulated in animal models to achieve a circulating plasma concentration range of the compound or, when appropriate, of the polypeptide product of a target sequence (e.g., achieving a decreased concentration of the polypeptide) that includes the IC₅₀ (i.e., the concentration of the test compound which achieves a half-maximal inhibition of symptoms) as determined in cell culture. Such information can be used to more accurately determine useful doses in humans. Levels in plasma can be measured, for example, by high performance liquid chromatography.

### VII. Kits of the Invention

[0926] In certain aspects, the instant disclosure provides kits that include a suitable container containing a pharmaceutical formulation of a nucleic acid inhibitor. In certain embodiments the individual components of the pharmaceutical formulation may be provided in one container. Alternatively, it may be desirable to provide the components of the pharmaceutical formulation separately in two or more containers, e.g., one container for a nucleic acid inhibitor preparation, and at least another for a carrier compound. The kit may be packaged in a number of different configurations such as one or more containers in a single box. The different components can be combined, e.g., according to instructions provided with the kit. The components can be combined according to a method described herein, e.g., to prepare and administer a pharmaceutical composition. The kit can also include a delivery device.

[0927] Unless otherwise defined, all technical and scientific terms used herein have the same meaning as commonly understood by one of ordinary skill in the art to which this invention belongs. Although methods and materials similar or equivalent to those described herein can be used in the practice or testing of the RNAi agents and methods featured in the invention, suitable methods and materials are described below. All publications, patent applications, patents, and other references mentioned herein are incorporated by reference in their entirety. In case of conflict, the present specification, including definitions, will control. In addition, the materials, methods, and examples are illustrative only and not intended to be limiting.

[0928] A Sequence Listing is filed herewith and forms part of the specification as filed. A supplemental informal sequence listing is also included as part of the specification.

### EXAMPLES

[0929] Example 1. Treating Subjects Having or at Risk of Developing a Non-Primary Hyperoxaluria Disease with a Nucleic Acid Inhibitor of LDHA, a Nucleic Acid Inhibitor of PRODH2 and/or a Nucleic Acid Inhibitor of HAO1

[0930] Primary hyperoxaluria is a well-known disease associated with high levels of oxalate. Specifically, primary hyperoxaluria is characterized by impaired glyoxylate metabolism resulting in overproduction and accumulation of oxalate throughout the body, typically manifesting as kidney and bladder stones. There are three major types of primary hyperoxaluria that differ in their severity and genetic cause. Autosomal recessive mutations in the AGXT gene cause primary hyperoxaluria type 1 (PH1); autosomal recessive mutations in the GRHPR gene cause primary hyperoxaluria type 2 (PH2); and autosomal recessive mutations in the HOGA1 gene cause primary hyperoxaluria type 3 (PH3) (see, FIG. 1).

[0931] Therapeutics that reduce oxalate levels have entered the clinic for the treatment of subjects having PH1 and PH2. Specifically, Lumasiran, an RNA interference (RNAi) therapeutic targeting glycolate oxidase (GO) for treatment of PH1 is currently being evaluated in a Phase III clinical trail (see, e.g., NCT03681184), and DCR-PHXC, an RNA interference (RNAi) therapeutic targeting LDHA for the treatment of PH1 and PH2 has entered Phase II clinical trials (see, e.g., NCT03847909).

[0932] However, there are also a significant number of subjects that do not have primary hyperoxaluria, e.g., PH1, PH2, or PH3, but yet still would benefit from treatment with agents that reduce oxalate. For example, subjects having or at risk of developing a non-primary hyperoxaluria disease or disorder, as described herein, would benefit from treatment with agents that reduce oxalate.

[0933] Specifically, subjects having a non-primary hyperoxaluria disease or disorder that would benefit from reduction in oxalate include subjects having elevated levels of oxalate who suffer from enteric hyperoxaluria, dietary hyperoxaluria, idiopathic hyperoxaluria, a kidney stone disease, chronic kidney disease (CKD), end-stage renal disease (ESRD), coronary artery disease, cutaneous oxalate deposition, or ethylene glycol poisoning, or those who are planning to undergo kidney transplantation or have undergone kidney transplantation. Subjects having a non-primary hyperoxaluria disease or disorder do not have primary hyperoxaluria (PH), i.e., PH1, PH2, or PH3.

[0934] Subjects at risk of developing a non-primary hyperoxaluria disease or disorder that would benefit from reduction in oxalate include subjects having normal levels of oxalate who suffer from a kidney stone disease, end-stage renal disease (ESRD), coronary artery disease, diabetes, cutaneous oxalate deposition, or ethylene glycol poisoning. Subjects at risk of developing a non-primary hyperoxaluria disease or disorder do not have primary hyperoxaluria (PH), i.e., PH1, PH2, or PH3.

[0935] Accordingly, the present invention provides methods for treating subjects having or at risk of developing a non-primary hyperoxaluria disease or disorder that would benefit from reduction in oxalate using nucleic acid inhibitors, e.g., double stranded ribonucleic acid (dsRNA) agents or single stranded antisense polynucleotide agents targeting lactate dehydrogenase A (LDHA), hydroxyacid oxidase (HAO1) and/or proline dehydrogenase 2 (PRODH2), as described herein.

[0936] Tables 2-16 provide exemplary nucleic acid inhibitors for LDHA, HAO1 and/or PRODH2 for use in the methods of the present invention.

TABLE 1
Abbreviations of nucleotide monomers used in nucleic acid sequence representation.
It will be understood that these monomers, when present in an oligonucleotide, are mutually linked by
5′-3′-phosphodiester bonds; and it is understood that when the nucleotide contains a 2′-fluoro
modification, then the fluoro replaces the hydroxy at that position in the parent nucleotide (i.e., it is a
2′-deoxy-2′-fluoronucleotide).

| Abbreviation | Nucleotide(s) |
|---|---|
| A | Adenosine-3′-phosphate |
| Ab | beta-L-adenosine-3′-phosphate |
| Abs | beta-L-adenosine-3′-phosphorothioate |
| Af | 2′-fluoroadenosine-3′-phosphate |
| Afs | 2′-fluoroadenosine-3′-phosphorothioate |
| As | adenosine-3′-phosphorothioate |
| C | cytidine-3′-phosphate |
| Cb | beta-L-cytidine-3′-phosphate |
| Cbs | beta-L-cytidine-3′-phosphorothioate |
| Cf | 2′-fluorocytidine-3′-phosphate |
| Cfs | 2′-fluorocytidine-3′-phosphorothioate |
| Cs | cytidine-3′-phosphorothioate |
| G | guanosine-3′-phosphate |
| Gb | beta-L-guanosine-3′-phosphate |
| Gbs | beta-L-guanosine-3′-phosphorothioate |
| Gf | 2′-fluoroguanosine-3′-phosphate |
| Gfs | 2′-fluoroguanosine-3′-phosphorothioate |
| Gs | guanosine-3′-phosphorothioate |
| T | 5′-methyluridine-3′-phosphate |
| Tf | 2′-fluoro-5-methyluridine-3′-phosphate |
| Tfs | 2′-fluoro-5-methyluridine-3′-phosphorothioate |
| Ts | 5-methyluridine-3′-phosphorothioate |
| U | Uridine-3′-phosphate |
| Uf | 2′-fluorouridine-3′-phosphate |
| Ufs | 2′-fluorouridine-3′-phosphorothioate |
| Us | uridine-3′-phosphorothioate |
| N | any nucleotide, modified or unmodified |
| a | 2′-O-methyladenosine-3′-phosphate |
| as | 2′-O-methyladenosine-3′-phosphorothioate |
| c | 2′-O-methylcytidine-3′-phosphate |
| cs | 2′-O-methylcytidine-3′-phosphorothioate |
| g | 2′-O-methylguanosine-3′-phosphate |
| gs | 2′-O-methylguanosine-3′-phosphorothioate |
| t | 2′-O-methyl-5-methyluridine-3′-phosphate |
| ts | 2′-O-methyl-5-methyluridine-3′-phosphorothioate |
| u | 2′-O-methyluridine-3′-phosphate |
| us | 2′-O-methyluridine-3′-phosphorothioate |
| s | phosphorothioate linkage |
| L96 | N-[tris(GalNAc-alkyl)-amidodecanoyl)]-4-hydroxyprolinol |
| | (Hyp-(GalNAc-alkyl)3) |
| | [chemical structure] |
| Y34 | 2-hydroxymethyl-tetrahydrofurane-4-methoxy-3-phosphate (abasic 2′-OMe |
| | furanose) |
| | [chemical structure] |
| Y44 | inverted abasic DNA (2-hydroxymethyl-tetrahydrofurane-5-phosphate) |
| | [chemical structure] |
| L10 | N-(cholesterylcarboxamidocaproyl)-4-hydroxyprolinol (Hyp-C6-Chol) |
| | [chemical structure] |
| (Agn) | Adenosine-glycol nucleic acid (GNA) S-Isomer |
| (Cgn) | Cytidine-glycol nucleic acid (GNA) S-Isomer |
| (Ggn) | Guanosine-glycol nucleic acid (GNA) S-Isomer |
| (Tgn) | Thymidine-glycol nucleic acid (GNA) S-Isomer |
| P | Phosphate |
| VP | Vinyl-phosphonate |
| dA | 2′-deoxyadenosine-3′-phosphate |
| dAs | 2′-deoxyadenosine-3′-phosphorothioate |
| dC | 2′-deoxycytidine-3′-phosphate |
| dCs | 2′-deoxycytidine-3′-phosphorothioate |
| dG | 2′-deoxyguanosine-3′-phosphate |
| dGs | 2′-deoxyguanosine-3′-phosphorothioate |
| dT | 2′-deoxythymidine-3′-phosphate |
| dTs | 2′-deoxythymidine-3′-phosphorothioate |
| dU | 2′-deoxyuridine |
| dUs | 2′-deoxyuridine-3′-phosphorothioate |
| (C2p) | cytidine-2′-phosphate |
| (G2p) | guanosine-2′-phosphate |
| (U2p) | uridine-2′-phosphate |
| (A2p) | adenosine-2′-phosphate |
| (Ahd) | 2′-O-hexadecyl-adenosine-3′-phosphate |
| (Ahds) | 2′-O-hexadecyl-adenosine-3′-phosphorothioate |
| (Chd) | 2′-O-hexadecyl-cytidine-3′-phosphate |
| (Chds) | 2′-O-hexadecyl-cytidine-3′-phosphorothioate |
| (Ghd) | 2′-O-hexadecyl-guanosine-3′-phosphate |
| (Ghds) | 2′-O-hexadecyl-guanosine-3′-phosphorothioate |
| (Uhd) | 2′-O-hexadecyl-uridine-3′-phosphate |
| (Uhds) | 2′-O-hexadecyl-uridine-3′-phosphorothioate |
| s | phosphorothioate |

TABLE 2
UNMODIFIED HUMAN/CYNOMOLGUS CROSS-REACTIVE LDHA IRNA SEQUENCES

| | | SEQ | Position | | SEQ | Position |
|---|---|---|---|---|---|---|
| Duplex | Sense Sequence | ID | in NM_ | Antisense Sequence | ID | in NM_ |
| Name | 5′ to 3′ | NO | 005566.3 | 5′ to 3′ | NO | 005566.3 |
| AD-159469 | UUUAUCUGAUCUGUGAUUAAA | 3210 | 1347-1367 | UUUAAUCACAGAUCAGAUAAAAA | 3396 | 1345-1367 |
| AD-159607 | ACUGGUUAGUGUGAAAUAGUU | 3211 | 1489-1509 | AACUAUUUCACACUAACCAGUUG | 3397 | 1487-1509 |
| AD-159713 | AACAUGCCUAGUCCAACAUUU | 3212 | 1615-1635 | AAAUGUUGGACUAGGCAUGUUCA | 3398 | 1613-1635 |
| AD-158504 | CAAGUCCAAUAUGGCAACUCU | 3213 | 263-283 | AGAGUUGCCAUAUUGGACUUGGA | 3399 | 261-283 |
| AD-159233 | UCCACCAUGAUUAAGGGUCUU | 3214 | 1092-1112 | AAGACCCUUAAUCAUGGUGGAAA | 3400 | 1090-1112 |
| AD-159411 | UCAUUUCACUGUCUAGGCUAA | 3215 | 1289-1309 | UUAGCCUAGACAGUGAAAUGAUA | 3401 | 1287-1309 |
| AD-159462 | UGUCCUUUUUAUCUGAUCUGU | 3216 | 1340-1360 | ACAGAUCAGAUAAAAAGGACAAC | 3402 | 1338-1360 |
| AD-159742 | CCAGUGUAUAAAUCCAAUAUA | 3217 | 1662-1682 | UAUAUUGGAUUUAUACACUGGAU | 3403 | 1660-1682 |
| AD-159863 | UCCAAGUGUUAUACCAACUAA | 3218 | 1791-1811 | UUAGUUGGUAUAACACUUGGAUA | 3404 | 1789-1811 |
| AD-158626 | GUCAUCGAAGACAAAUUGAAA | 3219 | 429-449 | UUUCAAUUUGUCUUCGAUGACAU | 3405 | 427-449 |
| AD-158687 | GAACACCAAAGAUUGUCUCUA | 3220 | 490-510 | UAGAGACAAUCUUUGGUGUUCUA | 3406 | 488-510 |
| AD-158688 | AACACCAAAGAUUGUCUCUGA | 3221 | 491-511 | UCAGAGACAAUCUUUGGUGUUCU | 3407 | 489-511 |
| AD-159458 | AUGUUGUCCUUUUUAUCUGAU | 3222 | 1336-1356 | AUCAGAUAAAAAGGACAACAUGC | 3408 | 1334-1356 |
| AD-159519 | UCAACUCCUGAAGUUAGAAAU | 3223 | 1401-1421 | AUUUCUAACUUCAGGAGUUGAUG | 3409 | 1399-1421 |
| AD-159858 | AACUAUCCAAGUGUUAUACCA | 3224 | 1786-1806 | UGGUAUAACACUUGGAUAGUUGG | 3410 | 1784-1806 |
| AD-158681 | UCCUUAGAACACCAAAGAUUA | 3225 | 484-504 | UAAUCUUUGGUGUUCUAAGGAAA | 3411 | 482-504 |
| AD-159583 | GGUAUUAAUCUUGUGUAGUCU | 3226 | 1465-1485 | AGACUACACAAGAUUAAUACCAU | 3412 | 1463-1485 |
| AD-159700 | GGCUCCUUCACUGAACAUGCA | 3227 | 1602-1622 | UGCAUGUUCAGUGAAGGAGCCAG | 3413 | 1600-1622 |
| AD-159807 | UAUCAGUAGUGUACAUUACCA | 3228 | 1728-1748 | UGGUAAUGUACACUACUGAUAUA | 3414 | 1726-1748 |
| AD-158673 | CAGCCUUUUCCUUAGAACACA | 3229 | 476-496 | UGUGUUCUAAGGAAAAGGCUGCC | 3415 | 474-496 |
| AD-159608 | CUGGUUAGUGUGAAAUAGUUA | 3230 | 1490-1510 | UAACUAUUUCACACUAACCAGUU | 3416 | 1488-1510 |
| AD-159803 | ACUAUAUCAGUAGUGUACAUU | 3231 | 1724-1744 | AAUGUACACUACUGAUAUAGUUC | 3417 | 1722-1744 |
| AD-159805 | UAUAUCAGUAGUGUACAUUAA | 3232 | 1726-1746 | UUAAUGUACACUACUGAUAUAGU | 3418 | 1724-1746 |
| AD-159489 | GUAAUAUUUUAAGAUGGACUA | 3233 | 1371-1391 | UAGUCCAUCUUAAAAUAUUACUG | 3419 | 1369-1391 |
| AD-159495 | UUUUAAGAUGGACUGGGAAAA | 3234 | 1377-1397 | UUUUCCCAGUCCAUCUUAAAAUA | 3420 | 1375-1397 |
| AD-159609 | UGGUUAGUGUGAAAUAGUUCU | 3235 | 1491-1511 | AGAACUAUUUCACACUAACCAGU | 3421 | 1489-1511 |
| AD-159706 | UUCACUGAACAUGCCUAGUCA | 3236 | 1608-1628 | UGACUAGGCAUGUUCAGUGAAGG | 3422 | 1606-1628 |
| AD-159855 | ACCAACUAUCCAAGUGUUAUA | 3237 | 1783-1803 | UAUAACACUUGGAUAGUUGGUUG | 3423 | 1781-1803 |
| AD-159864 | CCAAGUGUUAUACCAACUAAA | 3238 | 1792-1812 | UUUAGUUGGUAUAACACUUGGAU | 3424 | 1790-1812 |
| AD-158491 | UUCCUUUUGGUUCCAAGUCCA | 3239 | 250-270 | UGGACUUGGAACCAAAAGGAAUC | 3425 | 248-270 |
| AD-158672 | GCAGCCUUUUCCUUAGAACAA | 3240 | 475-495 | UUGUUCUAAGGAAAAGGCUGCCA | 3426 | 473-495 |
| AD-159488 | AGUAAUAUUUUAAGAUGGACU | 3241 | 1370-1390 | AGUCCAUCUUAAAAUAUUACUGC | 3427 | 1368-1390 |
| AD-159553 | AAAAUCCACAGCUAUAUCCUA | 3242 | 1435-1455 | UAGGAUAUAGCUGUGGAUUUUAC | 3428 | 1433-1455 |
| AD-159703 | UCCUUCACUGAACAUGCCUAA | 3243 | 1605-1625 | UUAGGCAUGUUCAGUGAAGGAGC | 3429 | 1603-1625 |
| AD-159708 | CACUGAACAUGCCUAGUCCAA | 3244 | 1610-1630 | UUGGACUAGGCAUGUUCAGUGAA | 3430 | 1608-1630 |
| AD-159866 | AAGUGUUAUACCAACUAAAAC | 3245 | 1794-1814 | GUUUUAGUUGGUAUAACACUUGG | 3431 | 1792-1814 |
| AD-159232 | UUCCACCAUGAUUAAGGGUCU | 3246 | 1091-1111 | AGACCCUUAAUCAUGGUGGAAAC | 3432 | 1089-1111 |
| AD-159712 | GAACAUGCCUAGUCCAACAUU | 3247 | 1614-1634 | AAUGUUGGACUAGGCAUGUUCAG | 3433 | 1612-1634 |
| AD-159808 | AUCAGUAGUGUACAUUACCAU | 3248 | 1729-1749 | AUGGUAAUGUACACUACUGAUAU | 3434 | 1727-1749 |
| AD-159862 | AUCCAAGUGUUAUACCAACUA | 3249 | 1790-1810 | UAGUUGGUAUAACACUUGGAUAG | 3435 | 1788-1810 |
| AD-158503 | CCAAGUCCAAUAUGGCAACUA | 3250 | 262-282 | UAGUUGCCAUAUUGGACUUGGAA | 3436 | 260-282 |
| AD-159311 | AUCUCAGACCUUGUGAAGGUA | 3251 | 1170-1190 | UACCUUCACAAGGUCUGAGAUUC | 3437 | 1168-1190 |
| AD-159412 | CAUUUCACUGUCUAGGCUACA | 3252 | 1290-1310 | UGUAGCCUAGACAGUGAAAUGAU | 3438 | 1288-1310 |
| AD-159558 | CCACAGCUAUAUCCUGAUGCU | 3253 | 1440-1460 | AGCAUCAGGAUAUAGCUGUGGAU | 3439 | 1438-1460 |
| AD-159705 | CUUCACUGAACAUGCCUAGUA | 3254 | 1607-1627 | UACUAGGCAUGUUCAGUGAAGGA | 3440 | 1605-1627 |
| AD-159113 | GUGGUUGAGAGUGCUUAUGAA | 3255 | 972-992 | UUCAUAAGCACUCUCAACCACCU | 3441 | 970-992 |
| AD-159139 | CAAACUCAAAGGCUACACAUA | 3256 | 998-1018 | UAUGUGUAGCCUUUGAGUUUGAU | 3442 | 996-1018 |
| AD-159806 | AUAUCAGUAGUGUACAUUACA | 3257 | 1727-1747 | UGUAAUGUACACUACUGAUAUAG | 3443 | 1725-1747 |
| AD-159853 | CAACCAACUAUCCAAGUGUUA | 3258 | 1781-1801 | UAACACUUGGAUAGUUGGUUGCA | 3444 | 1779-1801 |
| AD-158627 | UCAUCGAAGACAAAUUGAAGA | 3259 | 430-450 | UCUUCAAUUUGUCUUCGAUGACA | 3445 | 428-450 |
| AD-159182 | GCAGAUUUGGCAGAGAGUAUA | 3260 | 1041-1061 | UAUACUCUCUGCCAAAUCUGCUA | 3446 | 1039-1061 |
| AD-159702 | CUCCUUCACUGAACAUGCCUA | 3261 | 1604-1624 | UAGGCAUGUUCAGUGAAGGAGCC | 3447 | 1602-1624 |
| AD-159715 | CAUGCCUAGUCCAACAUUUUU | 3262 | 1617-1637 | AAAAAUGUUGGACUAGGCAUGUU | 3448 | 1615-1637 |
| AD-158575 | UGCCAUCAGUAUCUUAAUGAA | 3263 | 377-397 | UUCAUUAAGAUACUGAUGGCACA | 3449 | 375-397 |
| AD-158576 | GCCAUCAGUAUCUUAAUGAAA | 3264 | 378-398 | UUUCAUUAAGAUACUGAUGGCAC | 3450 | 376-398 |
| AD-158684 | UUAGAACACCAAAGAUUGUCU | 3265 | 487-507 | AGACAAUCUUUGGUGUUCUAAGG | 3451 | 485-507 |
| AD-159410 | AUCAUUUCACUGUCUAGGCUA | 3266 | 1288-1308 | UAGCCUAGACAGUGAAAUGAUAU | 3452 | 1286-1308 |
| AD-159416 | UCACUGUCUAGGCUACAACAA | 3267 | 1294-1314 | UUGUUGUAGCCUAGACAGUGAAA | 3453 | 1292-1314 |
| AD-159738 | GGAUCCAGUGUAUAAAUCCAA | 3268 | 1658-1678 | UUGGAUUUAUACACUGGAUCCCA | 3454 | 1656-1678 |
| AD-159857 | CAACUAUCCAAGUGUUAUACA | 3269 | 1785-1805 | UGUAUAACACUUGGAUAGUUGGU | 3455 | 1783-1805 |
| AD-158497 | UUGGUUCCAAGUCCAAUAUGA | 3270 | 256-276 | UCAUAUUGGACUUGGAACCAAAA | 3456 | 254-276 |
| AD-159124 | UGCUUAUGAGGUGAUCAAACU | 3271 | 983-1003 | AGUUUGAUCACCUCAUAAGCACU | 3457 | 981-1003 |
| AD-159140 | AAACUCAAAGGCUACACAUCA | 3272 | 999-1019 | UGAUGUGUAGCCUUUGAGUUUGA | 3458 | 997-1019 |
| AD-159312 | UCUCAGACCUUGUGAAGGUGA | 3273 | 1171-1191 | UCACCUUCACAAGGUCUGAGAUU | 3459 | 1169-1191 |
| AD-159552 | UAAAAUCCACAGCUAUAUCCU | 3274 | 1434-1454 | AGGAUAUAGCUGUGGAUUUUACA | 3460 | 1432-1454 |
| AD-159704 | CCUUCACUGAACAUGCCUAGU | 3275 | 1606-1626 | ACUAGGCAUGUUCAGUGAAGGAG | 3461 | 1604-1626 |
| AD-159737 | GGGAUCCAGUGUAUAAAUCCA | 3276 | 1657-1677 | UGGAUUUAUACACUGGAUCCCAG | 3462 | 1655-1677 |
| AD-159869 | CAAUAAACCUUGAACAGUGAA | 3277 | 1818-1838 | UUCACUGUUCAAGGUUUAUUGGG | 3463 | 1816-1838 |
| AD-158570 | GGCCUGUGCCAUCAGUAUCUU | 3278 | 371-391 | AAGAUACUGAUGGCACAGGCCAU | 3464 | 369-391 |
| AD-158618 | UUGUUGAUGUCAUCGAAGACA | 3279 | 421-441 | UGUCUUCGAUGACAUCAACAAGA | 3465 | 419-441 |
| AD-159788 | GGAUCUUAUUUUGUGAACUAU | 3280 | 1708-1728 | AUAGUUCACAAAAUAAGAUCCUU | 3466 | 1706-1728 |
| AD-159786 | AAGGAUCUUAUUUUGUGAACU | 3281 | 1706-1726 | AGUUCACAAAAUAAGAUCCUUUG | 3467 | 1704-1726 |
| AD-159760 | AUCAUGUCUUGUGCAUAAUUA | 3282 | 1680-1700 | UAAUUAUGCACAAGACAUGAUAU | 3468 | 1678-1700 |
| AD-159404 | UGUCAUAUCAUUUCACUGUCU | 3283 | 1282-1302 | AGACAGUGAAAUGAUAUGACAUC | 3469 | 1280-1302 |
| AD-159406 | UCAUAUCAUUUCACUGUCUAA | 3284 | 1284-1304 | UUAGACAGUGAAAUGAUAUGACA | 3470 | 1282-1304 |
| AD-158536 | AUUUAUAAUCUUCUAAAGGAA | 3285 | 297-317 | UUCCUUUAGAAGAUUAUAAAUCA | 3471 | 295-317 |
| AD-159545 | UGGUUUGUAAAAUCCACAGCU | 3286 | 1427-1447 | AGCUGUGGAUUUUACAAACCAUU | 3472 | 1425-1447 |
| AD-159574 | AUGCUGGAUGGUAUUAAUCUU | 3287 | 1456-1476 | AAGAUUAAUACCAUCCAGCAUCA | 3473 | 1454-1476 |
| AD-159802 | AACUAUAUCAGUAGUGUACAU | 3288 | 1723-1743 | AUGUACACUACUGAUAUAGUUCA | 3474 | 1721-1743 |
| AD-159518 | AUCAACUCCUGAAGUUAGAAA | 3289 | 1400-1420 | UUUCUAACUUCAGGAGUUGAUGU | 3475 | 1398-1420 |
| AD-159577 | CUGGAUGGUAUUAAUCUUGUA | 3290 | 1459-1479 | UACAAGAUUAAUACCAUCCAGCA | 3476 | 1457-1479 |
| AD-159409 | UAUCAUUUCACUGUCUAGGCU | 3291 | 1287-1307 | AGCCUAGACAGUGAAAUGAUAUG | 3477 | 1285-1307 |
| AD-159551 | GUAAAAUCCACAGCUAUAUCA | 3292 | 1433-1453 | UGAUAUAGCUGUGGAUUUUACAA | 3478 | 1431-1453 |
| AD-159276 | UCCUUAGUGUUCCUUGCAUUU | 3293 | 1135-1155 | AAAUGCAAGGAACACUAAGGAAG | 3479 | 1133-1155 |
| AD-159407 | CAUAUCAUUUCACUGUCUAGA | 3294 | 1285-1305 | UCUAGACAGUGAAAUGAUAUGAC | 3480 | 1283-1305 |
| AD-159515 | AACAUCAACUCCUGAAGUUAA | 3295 | 1397-1417 | UUAACUUCAGGAGUUGAUGUUUU | 3481 | 1395-1417 |
| AD-159570 | CCUGAUGCUGGAUGGUAUUAA | 3296 | 1452-1472 | UUAAUACCAUCCAGCAUCAGGAU | 3482 | 1450-1472 |
| AD-159849 | AAUGCAACCAACUAUCCAAGU | 3297 | 1777-1797 | ACUUGGAUAGUUGGUUGCAUUGU | 3483 | 1775-1797 |
| AD-159252 | UUUACGGAAUAAAGGAUGAUA | 3298 | 1111-1131 | UAUCAUCCUUUAUUCCGUAAAGA | 3484 | 1109-1131 |
| AD-159275 | UUCCUUAGUGUUCCUUGCAUU | 3299 | 1134-1154 | AAUGCAAGGAACACUAAGGAAGA | 3485 | 1132-1154 |
| AD-159848 | CAAUGCAACCAACUAUCCAAA | 3300 | 1776-1796 | UUUGGAUAGUUGGUUGCAUUGUU | 3486 | 1774-1796 |
| AD-159184 | AGAUUUGGCAGAGAGUAUAAU | 3301 | 1043-1063 | AUUAUACUCUCUGCCAAAUCUGC | 3487 | 1041-1063 |
| AD-159231 | UUUCCACCAUGAUUAAGGGUA | 3302 | 1090-1110 | UACCCUUAAUCAUGGUGGAAACU | 3488 | 1088-1110 |
| AD-159607 | ACUGGUUAGUGUGAAAUAGUU | 3303 | 1489-1509 | AACUAUUUCACACUAACCAGUUG | 3489 | 1487-1509 |
| AD-158504 | CAAGUCCAAUAUGGCAACUCU | 3304 | 263-283 | AGAGUUGCCAUAUUGGACUUGGA | 3490 | 261-283 |
| AD-159233 | UCCACCAUGAUUAAGGGUCUU | 3305 | 1092-1112 | AAGACCCUUAAUCAUGGUGGAAA | 3491 | 1090-1112 |
| AD-159411 | UCAUUUCACUGUCUAGGCUAA | 3306 | 1289-1309 | UUAGCCUAGACAGUGAAAUGAUA | 3492 | 1287-1309 |
| AD-159462 | UGUCCUUUUUAUCUGAUCUGU | 3307 | 1340-1360 | ACAGAUCAGAUAAAAAGGACAAC | 3493 | 1338-1360 |
| AD-159742 | CCAGUGUAUAAAUCCAAUAUA | 3308 | 1662-1682 | UAUAUUGGAUUUAUACACUGGAU | 3494 | 1660-1682 |
| AD-159863 | UCCAAGUGUUAUACCAACUAA | 3309 | 1791-1811 | UUAGUUGGUAUAACACUUGGAUA | 3495 | 1789-1811 |
| AD-158687 | GAACACCAAAGAUUGUCUCUA | 3310 | 490-510 | UAGAGACAAUCUUUGGUGUUCUA | 3496 | 488-510 |
| AD-158688 | AACACCAAAGAUUGUCUCUGA | 3311 | 491-511 | UCAGAGACAAUCUUUGGUGUUCU | 3497 | 489-511 |
| AD-159458 | AUGUUGUCCUUUUUAUCUGAU | 3312 | 1336-1356 | AUCAGAUAAAAAGGACAACAUGC | 3498 | 1334-1356 |
| AD-159519 | UCAACUCCUGAAGUUAGAAAU | 3313 | 1401-1421 | AUUUCUAACUUCAGGAGUUGAUG | 3499 | 1399-1421 |
| AD-159858 | AACUAUCCAAGUGUUAUACCA | 3314 | 1786-1806 | UGGUAUAACACUUGGAUAGUUGG | 3500 | 1784-1806 |
| AD-159583 | GGUAUUAAUCUUGUGUAGUCU | 3315 | 1465-1485 | AGACUACACAAGAUUAAUACCAU | 3501 | 1463-1485 |
| AD-159700 | GGCUCCUUCACUGAACAUGCA | 3316 | 1602-1622 | UGCAUGUUCAGUGAAGGAGCCAG | 3502 | 1600-1622 |
| AD-159807 | UAUCAGUAGUGUACAUUACCA | 3317 | 1728-1748 | UGGUAAUGUACACUACUGAUAUA | 3503 | 1726-1748 |
| AD-158673 | CAGCCUUUUCCUUAGAACACA | 3318 | 476-496 | UGUGUUCUAAGGAAAAGGCUGCC | 3504 | 474-496 |
| AD-159608 | CUGGUUAGUGUGAAAUAGUUA | 3319 | 1490-1510 | UAACUAUUUCACACUAACCAGUU | 3505 | 1488-1510 |
| AD-159803 | ACUAUAUCAGUAGUGUACAUU | 3320 | 1724-1744 | AAUGUACACUACUGAUAUAGUUC | 3506 | 1722-1744 |
| AD-159805 | UAUAUCAGUAGUGUACAUUAA | 3321 | 1726-1746 | UUAAUGUACACUACUGAUAUAGU | 3507 | 1724-1746 |
| AD-159489 | GUAAUAUUUUAAGAUGGACUA | 3322 | 1371-1391 | UAGUCCAUCUUAAAAUAUUACUG | 3508 | 1369-1391 |
| AD-159495 | UUUUAAGAUGGACUGGGAAAA | 3323 | 1377-1397 | UUUUCCCAGUCCAUCUUAAAAUA | 3509 | 1375-1397 |
| AD-159706 | UUCACUGAACAUGCCUAGUCA | 3324 | 1608-1628 | UGACUAGGCAUGUUCAGUGAAGG | 3510 | 1606-1628 |
| AD-159855 | ACCAACUAUCCAAGUGUUAUA | 3325 | 1783-1803 | UAUAACACUUGGAUAGUUGGUUG | 3511 | 1781-1803 |
| AD-159864 | CCAAGUGUUAUACCAACUAAA | 3326 | 1792-1812 | UUUAGUUGGUAUAACACUUGGAU | 3512 | 1790-1812 |
| AD-159488 | AGUAAUAUUUUAAGAUGGACU | 3327 | 1370-1390 | AGUCCAUCUUAAAAUAUUACUGC | 3513 | 1368-1390 |
| AD-159553 | AAAAUCCACAGCUAUAUCCUA | 3328 | 1435-1455 | UAGGAUAUAGCUGUGGAUUUUAC | 3514 | 1433-1455 |
| AD-159703 | UCCUUCACUGAACAUGCCUAA | 3329 | 1605-1625 | UUAGGCAUGUUCAGUGAAGGAGC | 3515 | 1603-1625 |
| AD-159708 | CACUGAACAUGCCUAGUCCAA | 3330 | 1610-1630 | UUGGACUAGGCAUGUUCAGUGAA | 3516 | 1608-1630 |
| AD-159866 | AAGUGUUAUACCAACUAAAAC | 3331 | 1794-1814 | GUUUUAGUUGGUAUAACACUUGG | 3517 | 1792-1814 |
| AD-159232 | UUCCACCAUGAUUAAGGGUCU | 3332 | 1091-1111 | AGACCCUUAAUCAUGGUGGAAAC | 3518 | 1089-1111 |
| AD-159712 | GAACAUGCCUAGUCCAACAUU | 3333 | 1614-1634 | AAUGUUGGACUAGGCAUGUUCAG | 3519 | 1612-1634 |
| AD-159808 | AUCAGUAGUGUACAUUACCAU | 3334 | 1729-1749 | AUGGUAAUGUACACUACUGAUAU | 3520 | 1727-1749 |
| AD-159862 | AUCCAAGUGUUAUACCAACUA | 3335 | 1790-1810 | UAGUUGGUAUAACACUUGGAUAG | 3521 | 1788-1810 |
| AD-158503 | CCAAGUCCAAUAUGGCAACUA | 3336 | 262-282 | UAGUUGCCAUAUUGGACUUGGAA | 3522 | 260-282 |
| AD-159412 | CAUUUCACUGUCUAGGCUACA | 3337 | 1290-1310 | UGUAGCCUAGACAGUGAAAUGAU | 3523 | 1288-1310 |
| AD-159558 | CCACAGCUAUAUCCUGAUGCU | 3338 | 1440-1460 | AGCAUCAGGAUAUAGCUGUGGAU | 3524 | 1438-1460 |
| AD-159705 | CUUCACUGAACAUGCCUAGUA | 3339 | 1607-1627 | UACUAGGCAUGUUCAGUGAAGGA | 3525 | 1605-1627 |
| AD-159113 | GUGGUUGAGAGUGCUUAUGAA | 3340 | 972-992 | UUCAUAAGCACUCUCAACCACCU | 3526 | 970-992 |
| AD-159806 | AUAUCAGUAGUGUACAUUACA | 3341 | 1727-1747 | UGUAAUGUACACUACUGAUAUAG | 3527 | 1725-1747 |
| AD-159853 | CAACCAACUAUCCAAGUGUUA | 3342 | 1781-1801 | UAACACUUGGAUAGUUGGUUGCA | 3528 | 1779-1801 |
| AD-159182 | GCAGAUUUGGCAGAGAGUAUA | 3343 | 1041-1061 | UAUACUCUCUGCCAAAUCUGCUA | 3529 | 1039-1061 |
| AD-159702 | CUCCUUCACUGAACAUGCCUA | 3344 | 1604-1624 | UAGGCAUGUUCAGUGAAGGAGCC | 3530 | 1602-1624 |
| AD-159715 | CAUGCCUAGUCCAACAUUUUU | 3345 | 1617-1637 | AAAAAUGUUGGACUAGGCAUGUU | 3531 | 1615-1637 |
| AD-158575 | UGCCAUCAGUAUCUUAAUGAA | 3346 | 377-397 | UUCAUUAAGAUACUGAUGGCACA | 3532 | 375-397 |
| AD-158576 | GCCAUCAGUAUCUUAAUGAAA | 3347 | 378-398 | UUUCAUUAAGAUACUGAUGGCAC | 3533 | 376-398 |
| AD-158684 | UUAGAACACCAAAGAUUGUCU | 3348 | 487-507 | AGACAAUCUUUGGUGUUCUAAGG | 3534 | 485-507 |
| AD-159410 | AUCAUUUCACUGUCUAGGCUA | 3349 | 1288-1308 | UAGCCUAGACAGUGAAAUGAUAU | 3535 | 1286-1308 |
| AD-159416 | UCACUGUCUAGGCUACAACAA | 3350 | 1294-1314 | UUGUUGUAGCCUAGACAGUGAAA | 3536 | 1292-1314 |
| AD-159857 | CAACUAUCCAAGUGUUAUACA | 3351 | 1785-1805 | UGUAUAACACUUGGAUAGUUGGU | 3537 | 1783-1805 |
| AD-158497 | UUGGUUCCAAGUCCAAUAUGA | 3352 | 256-276 | UCAUAUUGGACUUGGAACCAAAA | 3538 | 254-276 |
| AD-159124 | UGCUUAUGAGGUGAUCAAACU | 3353 | 983-1003 | AGUUUGAUCACCUCAUAAGCACU | 3539 | 981-1003 |
| AD-159312 | UCUCAGACCUUGUGAAGGUGA | 3354 | 1171-1191 | UCACCUUCACAAGGUCUGAGAUU | 3540 | 1169-1191 |
| AD-159552 | UAAAAUCCACAGCUAUAUCCU | 3355 | 1434-1454 | AGGAUAUAGCUGUGGAUUUUACA | 3541 | 1432-1454 |
| AD-159704 | CCUUCACUGAACAUGCCUAGU | 3356 | 1606-1626 | ACUAGGCAUGUUCAGUGAAGGAG | 3542 | 1604-1626 |
| AD-159737 | GGGAUCCAGUGUAUAAAUCCA | 3357 | 1657-1677 | UGGAUUUAUACACUGGAUCCCAG | 3543 | 1655-1677 |
| AD-159869 | CAAUAAACCUUGAACAGUGAA | 3358 | 1818-1838 | UUCACUGUUCAAGGUUUAUUGGG | 3544 | 1816-1838 |
| AD-158570 | GGCCUGUGCCAUCAGUAUCUU | 3359 | 371-391 | AAGAUACUGAUGGCACAGGCCAU | 3545 | 369-391 |
| AD-158618 | UUGUUGAUGUCAUCGAAGACA | 3360 | 421-441 | UGUCUUCGAUGACAUCAACAAGA | 3546 | 419-441 |
| AD-159184 | AGAUUUGGCAGAGAGUAUAAU | 3361 | 1043-1063 | AUUAUACUCUCUGCCAAAUCUGC | 3547 | 1041-1063 |
| AD-159231 | UUUCCACCAUGAUUAAGGGUA | 3362 | 1090-1110 | UACCCUUAAUCAUGGUGGAAACU | 3548 | 1088-1110 |
| AD-159423 | CUAGGCUACAACAGGAUUCUA | 3363 | 1301-1321 | UAGAAUCCUGUUGUAGCCUAGAC | 3549 | 1299-1321 |
| AD-159446 | UGGAGGUUGUGCAUGUUGUCA | 3364 | 1324-1344 | UGACAACAUGCACAACCUCCACC | 3550 | 1322-1344 |
| AD-159701 | GCUCCUUCACUGAACAUGCCU | 3365 | 1603-1623 | AGGCAUGUUCAGUGAAGGAGCCA | 3551 | 1601-1623 |
| AD-158494 | CUUUUGGUUCCAAGUCCAAUA | 3366 | 253-273 | UAUUGGACUUGGAACCAAAAGGA | 3552 | 251-273 |
| AD-158571 | GCCUGUGCCAUCAGUAUCUUA | 3367 | 372-392 | UAAGAUACUGAUGGCACAGGCCA | 3553 | 370-392 |
| AD-159125 | GCUUAUGAGGUGAUCAAACUA | 3368 | 984-1004 | UAGUUUGAUCACCUCAUAAGCAC | 3554 | 982-1004 |
| AD-159126 | CUUAUGAGGUGAUCAAACUCA | 3369 | 985-1005 | UGAGUUUGAUCACCUCAUAAGCA | 3555 | 983-1005 |
| AD-159287 | CCUUGCAUUUUGGGACAGAAU | 3370 | 1146-1166 | AUUCUGUCCCAAAAUGCAAGGAA | 3556 | 1144-1166 |
| AD-158499 | GGUUCCAAGUCCAAUAUGGCA | 3371 | 258-278 | UGCCAUAUUGGACUUGGAACCAA | 3557 | 256-278 |
| AD-159417 | CACUGUCUAGGCUACAACAGA | 3372 | 1295-1315 | UCUGUUGUAGCCUAGACAGUGAA | 3558 | 1293-1315 |
| AD-159418 | ACUGUCUAGGCUACAACAGGA | 3373 | 1296-1316 | UCCUGUUGUAGCCUAGACAGUGA | 3559 | 1294-1316 |
| AD-158550 | AAUAAGAUUACAGUUGUUGGA | 3374 | 333-353 | UCCAACAACUGUAAUCUUAUUCU | 3560 | 331-353 |
| AD-159116 | GUUGAGAGUGCUUAUGAGGUA | 3375 | 975-995 | UACCUCAUAAGCACUCUCAACCA | 3561 | 973-995 |
| AD-159421 | GUCUAGGCUACAACAGGAUUA | 3376 | 1299-1319 | UAAUCCUGUUGUAGCCUAGACAG | 3562 | 1297-1319 |
| AD-159422 | UCUAGGCUACAACAGGAUUCU | 3377 | 1300-1320 | AGAAUCCUGUUGUAGCCUAGACA | 3563 | 1298-1320 |
| AD-159445 | GUGGAGGUUGUGCAUGUUGUA | 3378 | 1323-1343 | UACAACAUGCACAACCUCCACCU | 3564 | 1321-1343 |
| AD-159130 | UGAGGUGAUCAAACUCAAAGA | 3379 | 989-1009 | UCUUUGAGUUUGAUCACCUCAUA | 3565 | 987-1009 |
| AD-159134 | GUGAUCAAACUCAAAGGCUAA | 3380 | 993-1013 | UUAGCCUUUGAGUUUGAUCACCU | 3566 | 991-1013 |
| AD-159343 | UGAGGAAGAGGCCCGUUUGAA | 3381 | 1202-1222 | UUCAAACGGGCCUCUUCCUCAGA | 3567 | 1200-1222 |
| AD-159105 | ACAAGCAGGUGGUUGAGAGUA | 3382 | 964-984 | UACUCUCAACCACCUGCUUGUGA | 3568 | 962-984 |
| AD-159183 | CAGAUUUGGCAGAGAGUAUAA | 3383 | 1042-1062 | UUAUACUCUCUGCCAAAUCUGCU | 3569 | 1040-1062 |
| AD-159123 | GUGCUUAUGAGGUGAUCAAAC | 3384 | 982-1002 | GUUUGAUCACCUCAUAAGCACUC | 3570 | 980-1002 |
| AD-159181 | AGCAGAUUUGGCAGAGAGUAU | 3385 | 1040-1060 | AUACUCUCUGCCAAAUCUGCUAC | 3571 | 1038-1060 |
| AD-159186 | AUUUGGCAGAGAGUAUAAUGA | 3386 | 1045-1065 | UCAUUAUACUCUCUGCCAAAUCU | 3572 | 1043-1065 |
| AD-159187 | UUUGGCAGAGAGUAUAAUGAA | 3387 | 1046-1066 | UUCAUUAUACUCUCUGCCAAAUC | 3573 | 1044-1066 |
| AD-159288 | CUUGCAUUUUGGGACAGAAUA | 3388 | 1147-1167 | UAUUCUGUCCCAAAAUGCAAGGA | 3574 | 1145-1167 |
| AD-159306 | AUGGAAUCUCAGACCUUGUGA | 3389 | 1165-1185 | UCACAAGGUCUGAGAUUCCAUUC | 3575 | 1163-1185 |
| AD-159559 | CACAGCUAUAUCCUGAUGCUA | 3390 | 1441-1461 | UAGCAUCAGGAUAUAGCUGUGGA | 3576 | 1439-1461 |
| AD-159344 | GAGGAAGAGGCCCGUUUGAAA | 3391 | 1203-1223 | UUUCAAACGGGCCUCUUCCUCAG | 3577 | 1201-1223 |
| AD-159341 | UCUGAGGAAGAGGCCCGUUUA | 3392 | 1200-1220 | UAAACGGGCCUCUUCCUCAGAAG | 3578 | 1198-1220 |
| AD-159729 | CACAUCCUGGGAUCCAGUGUA | 3393 | 1649-1669 | UACACUGGAUCCCAGGAUGUGAC | 3579 | 1647-1669 |
| AD-158674 | AGCCUUUUCCUUAGAACACCA | 3394 | 477-497 | UGGUGUUCUAAGGAAAAGGCUGC | 3580 | 475-497 |
| AD-159604 | UCAACUGGUUAGUGUGAAAUA | 3395 | 1486-1506 | UAUUUCACACUAACCAGUUGAAG | 3581 | 1484-1506 |

TABLE 3
MODIFIED HUMAN/CYNOMOLGUS CROSS-REACTIVE LDHA IRNA SEQUENCES

| Duplex | | SEQ ID | | SEQ ID | | SEQ ID |
|---|---|---|---|---|---|---|
| Name | Sense Sequence 5′ to 3′ | NO | Antisense Sequence 5′ to 3′ | NO | mRNA target sequence | NO |
| AD-159469 | ususuaucUfgAfUfCfugugauuaaaL96 | 3582 | usUfsuaaUfcAfCfagauCfaGfauaaasasa | 3768 | UUUUUAUCUGAUCUGUGAUUAAA | 3954 |
| AD-159607 | ascsugguUfaGfUfGfugaaauaguuL96 | 3583 | asAfscuaUfuUfCfacacUfaAfccagususg | 3769 | CAACUGGUUAGUGUGAAAUAGUU | 3955 |
| AD-159713 | asascaugCfcUfAfGfuccaacauuuL96 | 3584 | asAfsaugUfuGfGfacuaGfgCfauguuscsa | 3770 | UGAACAUGCCUAGUCCAACAUUU | 3956 |
| AD-158504 | csasagucCfaAfUfAfuggcaacucuL96 | 3585 | asGfsaguUfgCfCfauauUfgGfacuugsgsa | 3771 | UCCAAGUCCAAUAUGGCAACUCU | 3957 |
| AD-159233 | uscscaccAfuGfAfUfuaagggucuuL96 | 3586 | asAfsgacCfcUfUfaaucAfuGfguggasasa | 3772 | UUUCCACCAUGAUUAAGGGUCUU | 3958 |
| AD-159411 | uscsauuuCfaCfUfGfucuaggcuaaL96 | 3587 | usUfsagcCfuAfGfacagUfgAfaaugasusa | 3773 | UAUCAUUUCACUGUCUAGGCUAC | 3959 |
| AD-159462 | usgsuccuUfuUfUfAfucugaucuguL96 | 3588 | asCfsagaUfcAfGfauaaAfaAfggacasasc | 3774 | GUUGUCCUUUUUAUCUGAUCUGU | 3960 |
| AD-159742 | cscsagugUfaUfAfAfauccaauauaL96 | 3589 | usAfsuauUfgGfAfuuuaUfaCfacuggsasu | 3775 | AUCCAGUGUAUAAAUCCAAUAUC | 3961 |
| AD-159863 | uscscaagUfgUfUfAfuaccaacuaaL96 | 3590 | usUfsaguUfgGfUfauaaCfaCfuuggasusa | 3776 | UAUCCAAGUGUUAUACCAACUAA | 3962 |
| AD-158626 | gsuscaucGfaAfGfAfcaaauugaaaL96 | 3591 | usUfsucaAfuUfUfgucuUfcGfaugacsasu | 3777 | AUGUCAUCGAAGACAAAUUGAAG | 3963 |
| AD-158687 | gsasacacCfaAfAfGfauugucucuaL96 | 3592 | usAfsgagAfcAfAfucuuUfgGfuguucsusa | 3778 | UAGAACACCAAAGAUUGUCUCUG | 3964 |
| AD-158688 | asascaccAfaAfGfAfuugucucugaL96 | 3593 | usCfsagaGfaCfAfaucuUfuGfguguuscsu | 3779 | AGAACACCAAAGAUUGUCUCUGG | 3965 |
| AD-159458 | asusguugUfcCfUfUfuuuaucugauL96 | 3594 | asUfscagAfuAfAfaaagGfaCfaacausgsc | 3780 | GCAUGUUGUCCUUUUUAUCUGAU | 3966 |
| AD-159519 | uscsaacuCfcUfGfAfaguuagaaauL96 | 3595 | asUfsuucUfaAfCfuucaGfgAfguugasusg | 3781 | CAUCAACUCCUGAAGUUAGAAAU | 3967 |
| AD-159858 | asascuauCfcAfAfGfuguuauaccaL96 | 3596 | usGfsguaUfaAfCfacuuGfgAfuaguusgsg | 3782 | CCAACUAUCCAAGUGUUAUACCA | 3968 |
| AD-158681 | uscscuuaGfaAfCfAfccaaagauuaL96 | 3597 | usAfsaucUfuUfGfguguUfcUfaaggasasa | 3783 | UUUCCUUAGAACACCAAAGAUUG | 3969 |
| AD-159583 | gsgsuauuAfaUfCfUfuguguagucuL96 | 3598 | asGfsacuAfcAfCfaagaUfuAfauaccsasu | 3784 | AUGGUAUUAAUCUUGUGUAGUCU | 3970 |
| AD-159700 | gsgscuccUfuCfAfCfugaacaugcaL96 | 3599 | usGfscauGfuUfCfagugAfaGfgagccsasg | 3785 | CUGGCUCCUUCACUGAACAUGCC | 3971 |
| AD-159807 | usasucagUfaGfUfGfuacauuaccaL96 | 3600 | usGfsguaAfuGfUfacacUfaCfugauasusa | 3786 | UAUAUCAGUAGUGUACAUUACCA | 3972 |
| AD-158673 | csasgccuUfuUfCfCfuuagaacacaL96 | 3601 | usGfsuguUfcUfAfaggaAfaAfggcugscsc | 3787 | GGCAGCCUUUUCCUUAGAACACC | 3973 |
| AD-159608 | csusgguuAfgUfGfUfgaaauaguuaL96 | 3602 | usAfsacuAfuUfUfcacaCfuAfaccagsusu | 3788 | AACUGGUUAGUGUGAAAUAGUUC | 3974 |
| AD-159803 | ascsuauaUfcAfGfUfaguguacauuL96 | 3603 | asAfsuguAfcAfCfuacuGfaUfauagususc | 3789 | GAACUAUAUCAGUAGUGUACAUU | 3975 |
| AD-159805 | usasuaucAfgUfAfGfuguacauuaaL96 | 3604 | usUfsaauGfuAfCfacuaCfuGfauauasgsu | 3790 | ACUAUAUCAGUAGUGUACAUUAC | 3976 |
| AD-159489 | gsusaauaUfuUfUfAfagauggacuaL96 | 3605 | usAfsgucCfaUfCfuuaaAfaUfauuacsusg | 3791 | CAGUAAUAUUUUAAGAUGGACUG | 3977 |
| AD-159495 | ususuuaaGfaUfGfGfacugggaaaaL96 | 3606 | usUfsuucCfcAfGfuccaUfcUfuaaaasusa | 3792 | UAUUUUAAGAUGGACUGGGAAAA | 3978 |
| AD-159609 | usgsguuaGfuGfUfGfaaauaguucuL96 | 3607 | asGfsaacUfaUfUfucacAfcUfaaccasgsu | 3793 | ACUGGUUAGUGUGAAAUAGUUCU | 3979 |
| AD-159706 | ususcacuGfaAfCfAfugccuagucaL96 | 3608 | usGfsacuAfgGfCfauguUfcAfgugaasgsg | 3794 | CCUUCACUGAACAUGCCUAGUCC | 3980 |
| AD-159855 | ascscaacUfaUfCfCfaaguguuauaL96 | 3609 | usAfsuaaCfaCfUfuggaUfaGfuuggususg | 3795 | CAACCAACUAUCCAAGUGUUAUA | 3981 |
| AD-159864 | cscsaaguGfuUfAfUfaccaacuaaaL96 | 3610 | usUfsuagUfuGfGfuauaAfcAfcuuggsasu | 3796 | AUCCAAGUGUUAUACCAACUAAA | 3982 |
| AD-158491 | ususccuuUfuGfGfUfuccaaguccaL96 | 3611 | usGfsgacUfuGfGfaaccAfaAfaggaasusc | 3797 | GAUUCCUUUUGGUUCCAAGUCCA | 3983 |
| AD-158672 | gscsagccUfuUfUfCfcuuagaacaaL96 | 3612 | usUfsguuCfuAfAfggaaAfaGfgcugcscsa | 3798 | UGGCAGCCUUUUCCUUAGAACAC | 3984 |
| AD-159488 | asgsuaauAfuUfUfUfaagauggacuL96 | 3613 | asGfsuccAfuCfUfuaaaAfuAfuuacusgsc | 3799 | GCAGUAAUAUUUUAAGAUGGACU | 3985 |
| AD-159553 | asasaaucCfaCfAfGfcuauauccuaL96 | 3614 | usAfsggaUfaUfAfgcugUfgGfauuuusasc | 3800 | GUAAAAUCCACAGCUAUAUCCUG | 3986 |
| AD-159703 | uscscuucAfcUfGfAfacaugccuaaL96 | 3615 | usUfsaggCfaUfGfuucaGfuGfaaggasgsc | 3801 | GCUCCUUCACUGAACAUGCCUAG | 3987 |
| AD-159708 | csascugaAfcAfUfGfccuaguccaaL96 | 3616 | usUfsggaCfuAfGfgcauGfuUfcagugsasa | 3802 | UUCACUGAACAUGCCUAGUCCAA | 3988 |
| AD-159866 | asasguguUfaUfAfCfcaacuaaaacL96 | 3617 | gsUfsuuuAfgUfUfgguaUfaAfcacuusgsg | 3803 | CCAAGUGUUAUACCAACUAAAAC | 3989 |
| AD-159232 | ususccacCfaUfGfAfuuaagggucuL96 | 3618 | asGfsaccCfuUfAfaucaUfgGfuggaasasc | 3804 | GUUUCCACCAUGAUUAAGGGUCU | 3990 |
| AD-159712 | gsasacauGfcCfUfAfguccaacauuL96 | 3619 | asAfsuguUfgGfAfcuagGfcAfuguucsasg | 3805 | CUGAACAUGCCUAGUCCAACAUU | 3991 |
| AD-159808 | asuscaguAfgUfGfUfacauuaccauL96 | 3620 | asUfsgguAfaUfGfuacaCfuAfcugausasu | 3806 | AUAUCAGUAGUGUACAUUACCAU | 3992 |
| AD-159862 | asusccaaGfuGfUfUfauaccaacuaL96 | 3621 | usAfsguuGfgUfAfuaacAfcUfuggausasg | 3807 | CUAUCCAAGUGUUAUACCAACUA | 3993 |
| AD-158503 | cscsaaguCfcAfAfUfauggcaacuaL96 | 3622 | usAfsguuGfcCfAfuauuGfgAfcuuggsasa | 3808 | UUCCAAGUCCAAUAUGGCAACUC | 3994 |
| AD-159311 | asuscucaGfaCfCfUfugugaagguaL96 | 3623 | usAfsccuUfcAfCfaaggUfcUfgagaususc | 3809 | GAAUCUCAGACCUUGUGAAGGUG | 3995 |
| AD-159412 | csasuuucAfcUfGfUfcuaggcuacaL96 | 3624 | usGfsuagCfcUfAfgacaGfuGfaaaugsasu | 3810 | AUCAUUUCACUGUCUAGGCUACA | 3996 |
| AD-159558 | cscsacagCfuAfUfAfuccugaugcuL96 | 3625 | asGfscauCfaGfGfauauAfgCfuguggsasu | 3811 | AUCCACAGCUAUAUCCUGAUGCU | 3997 |
| AD-159705 | csusucacUfgAfAfCfaugccuaguaL96 | 3626 | usAfscuaGfgCfAfuguuCfaGfugaagsgsa | 3812 | UCCUUCACUGAACAUGCCUAGUC | 3998 |
| AD-159113 | gsusgguuGfaGfAfGfugcuuaugaaL96 | 3627 | usUfscauAfaGfCfacucUfcAfaccacscsu | 3813 | AGGUGGUUGAGAGUGCUUAUGAG | 3999 |
| AD-159139 | csasaacuCfaAfAfGfgcuacacauaL96 | 3628 | usAfsuguGfuAfGfccuuUfgAfguuugsasu | 3814 | AUCAAACUCAAAGGCUACACAUC | 4000 |
| AD-159806 | asusaucaGfuAfGfUfguacauuacaL96 | 3629 | usGfsuaaUfgUfAfcacuAfcUfgauausasg | 3815 | CUAUAUCAGUAGUGUACAUUACC | 4001 |
| AD-159853 | csasaccaAfcUfAfUfccaaguguuaL96 | 3630 | usAfsacaCfuUfGfgauaGfuUfgguugscsa | 3816 | UGCAACCAACUAUCCAAGUGUUA | 4002 |
| AD-158627 | uscsaucgAfaGfAfCfaaauugaagaL96 | 3631 | usCfsuucAfaUfUfugucUfuCfgaugascsa | 3817 | UGUCAUCGAAGACAAAUUGAAGG | 4003 |
| AD-159182 | gscsagauUfuGfGfCfagagaguauaL96 | 3632 | usAfsuacUfcUfCfugccAfaAfucugcsusa | 3818 | UAGCAGAUUUGGCAGAGAGUAUA | 4004 |
| AD-159702 | csusccuuCfaCfUfGfaacaugccuaL96 | 3633 | usAfsggcAfuGfUfucagUfgAfaggagscsc | 3819 | GGCUCCUUCACUGAACAUGCCUA | 4005 |
| AD-159715 | csasugccUfaGfUfCfcaacauuuuuL96 | 3634 | asAfsaaaUfgUfUfggacUfaGfgcaugsusu | 3820 | AACAUGCCUAGUCCAACAUUUUU | 4006 |
| AD-158575 | usgsccauCfaGfUfAfucuuaaugaaL96 | 3635 | usUfscauUfaAfGfauacUfgAfuggcascsa | 3821 | UGUGCCAUCAGUAUCUUAAUGAA | 4007 |
| AD-158576 | gscscaucAfgUfAfUfcuuaaugaaaL96 | 3636 | usUfsucaUfuAfAfgauaCfuGfauggcsasc | 3822 | GUGCCAUCAGUAUCUUAAUGAAG | 4008 |
| AD-158684 | ususagaaCfaCfCfAfaagauugucuL96 | 3637 | asGfsacaAfuCfUfuuggUfgUfucuaasgsg | 3823 | CCUUAGAACACCAAAGAUUGUCU | 4009 |
| AD-159410 | asuscauuUfcAfCfUfgucuaggcuaL96 | 3638 | usAfsgccUfaGfAfcaguGfaAfaugausasu | 3824 | AUAUCAUUUCACUGUCUAGGCUA | 4010 |
| AD-159416 | uscsacugUfcUfAfGfgcuacaacaaL96 | 3639 | usUfsguuGfuAfGfccuaGfaCfagugasasa | 3825 | UUUCACUGUCUAGGCUACAACAG | 4011 |
| AD-159738 | gsgsauccAfgUfGfUfauaaauccaaL96 | 3640 | usUfsggaUfuUfAfuacaCfuGfgauccscsa | 3826 | UGGGAUCCAGUGUAUAAAUCCAA | 4012 |
| AD-159857 | csasacuaUfcCfAfAfguguuauacaL96 | 3641 | usGfsuauAfaCfAfcuugGfaUfaguugsgsu | 3827 | ACCAACUAUCCAAGUGUUAUACC | 4013 |
| AD-158497 | ususgguuCfcAfAfGfuccaauaugaL96 | 3642 | usCfsauaUfuGfGfacuuGfgAfaccaasasa | 3828 | UUUUGGUUCCAAGUCCAAUAUGG | 4014 |
| AD-159124 | usgscuuaUfgAfGfGfugaucaaacuL96 | 3643 | asGfsuuuGfaUfCfaccuCfaUfaagcascsu | 3829 | AGUGCUUAUGAGGUGAUCAAACU | 4015 |
| AD-159140 | asasacucAfaAfGfGfcuacacaucaL96 | 3644 | usGfsaugUfgUfAfgccuUfuGfaguuusgsa | 3830 | UCAAACUCAAAGGCUACACAUCC | 4016 |
| AD-159312 | uscsucagAfcCfUfUfgugaaggugaL96 | 3645 | usCfsaccUfuCfAfcaagGfuCfugagasusu | 3831 | AAUCUCAGACCUUGUGAAGGUGA | 4017 |
| AD-159552 | usasaaauCfcAfCfAfgcuauauccuL96 | 3646 | asGfsgauAfuAfGfcuguGfgAfuuuuascsa | 3832 | UGUAAAAUCCACAGCUAUAUCCU | 4018 |
| AD-159704 | cscsuucaCfuGfAfAfcaugccuaguL96 | 3647 | asCfsuagGfcAfUfguucAfgUfgaaggsasg | 3833 | CUCCUUCACUGAACAUGCCUAGU | 4019 |
| AD-159737 | gsgsgaucCfaGfUfGfuauaaauccaL96 | 3648 | usGfsgauUfuAfUfacacUfgGfaucccsasg | 3834 | CUGGGAUCCAGUGUAUAAAUCCA | 4020 |
| AD-159869 | csasauaaAfcCfUfUfgaacagugaaL96 | 3649 | usUfscacUfgUfUfcaagGfuUfuauugsgsg | 3835 | CCCAAUAAACCUUGAACAGUGAC | 4021 |
| AD-158570 | gsgsccugUfgCfCfAfucaguaucuuL96 | 3650 | asAfsgauAfcUfGfauggCfaCfaggccsasu | 3836 | AUGGCCUGUGCCAUCAGUAUCUU | 4022 |
| AD-158618 | ususguugAfuGfUfCfaucgaagacaL96 | 3651 | usGfsucuUfcGfAfugacAfuCfaacaasgsa | 3837 | UCUUGUUGAUGUCAUCGAAGACA | 4023 |
| AD-159788 | gsgsaucuUfaUfUfUfugugaacuauL96 | 3652 | asUfsaguUfcAfCfaaaaUfaAfgauccsusu | 3838 | AAGGAUCUUAUUUUGUGAACUAU | 4024 |
| AD-159786 | asasggauCfuUfAfUfuuugugaacuL96 | 3653 | asGfsuucAfcAfAfaauaAfgAfuccuususg | 3839 | CAAAGGAUCUUAUUUUGUGAACU | 4025 |
| AD-159760 | asuscaugUfcUfUfGfugcauaauuaL96 | 3654 | usAfsauuAfuGfCfacaaGfaCfaugausasu | 3840 | AUAUCAUGUCUUGUGCAUAAUUC | 4026 |
| AD-159404 | usgsucauAfuCfAfUfuucacugucuL96 | 3655 | asGfsacaGfuGfAfaaugAfuAfugacasusc | 3841 | GAUGUCAUAUCAUUUCACUGUCU | 4027 |
| AD-159406 | uscsauauCfaUfUfUfcacugucuaaL96 | 3656 | usUfsagaCfaGfUfgaaaUfgAfuaugascsa | 3842 | UGUCAUAUCAUUUCACUGUCUAG | 4028 |
| AD-158536 | asusuuauAfaUfCfUfucuaaaggaaL96 | 3657 | usUfsccuUfuAfGfaagaUfuAfuaaauscsa | 3843 | UGAUUUAUAAUCUUCUAAAGGAA | 4029 |
| AD-159545 | usgsguuuGfuAfAfAfauccacagcuL96 | 3658 | asGfscugUfgGfAfuuuuAfcAfaaccasusu | 3844 | AAUGGUUUGUAAAAUCCACAGCU | 4030 |
| AD-159574 | asusgcugGfaUfGfGfuauuaaucuuL96 | 3659 | asAfsgauUfaAfUfaccaUfcCfagcauscsa | 3845 | UGAUGCUGGAUGGUAUUAAUCUU | 4031 |
| AD-159802 | asascuauAfuCfAfGfuaguguacauL96 | 3660 | asUfsguaCfaCfUfacugAfuAfuaguuscsa | 3846 | UGAACUAUAUCAGUAGUGUACAU | 4032 |
| AD-159518 | asuscaacUfcCfUfGfaaguuagaaaL96 | 3661 | usUfsucuAfaCfUfucagGfaGfuugausgsu | 3847 | ACAUCAACUCCUGAAGUUAGAAA | 4033 |
| AD-159577 | csusggauGfgUfAfUfuaaucuuguaL96 | 3662 | usAfscaaGfaUfUfaauaCfcAfuccagscsa | 3848 | UGCUGGAUGGUAUUAAUCUUGUG | 4034 |
| AD-159409 | usasucauUfuCfAfCfugucuaggcuL96 | 3663 | asGfsccuAfgAfCfagugAfaAfugauasusg | 3849 | CAUAUCAUUUCACUGUCUAGGCU | 4035 |
| AD-159551 | gsusaaaaUfcCfAfCfagcuauaucaL96 | 3664 | usGfsauaUfaGfCfugugGfaUfuuuacsasa | 3850 | UUGUAAAAUCCACAGCUAUAUCC | 4036 |
| AD-159276 | uscscuuaGfuGfUfUfccuugcauuuL96 | 3665 | asAfsaugCfaAfGfgaacAfcUfaaggasasg | 3851 | CUUCCUUAGUGUUCCUUGCAUUU | 4037 |
| AD-159407 | csasuaucAfuUfUfCfacugucuagaL96 | 3666 | usCfsuagAfcAfGfugaaAfuGfauaugsasc | 3852 | GUCAUAUCAUUUCACUGUCUAGG | 4038 |
| AD-159515 | asascaucAfaCfUfCfcugaaguuaaL96 | 3667 | usUfsaacUfuCfAfggagUfuGfauguususu | 3853 | AAAACAUCAACUCCUGAAGUUAG | 4039 |
| AD-159570 | cscsugauGfcUfGfGfaugguauuaaL96 | 3668 | usUfsaauAfcCfAfuccaGfcAfucaggsasu | 3854 | AUCCUGAUGCUGGAUGGUAUUAA | 4040 |
| AD-159849 | asasugcaAfcCfAfAfcuauccaaguL96 | 3669 | asCfsuugGfaUfAfguugGfuUfgcauusgsu | 3855 | ACAAUGCAACCAACUAUCCAAGU | 4041 |
| AD-159252 | ususuacgGfaAfUfAfaaggaugauaL96 | 3670 | usAfsucaUfcCfUfuuauUfcCfguaaasgsa | 3856 | UCUUUACGGAAUAAAGGAUGAUG | 4042 |
| AD-159275 | ususccuuAfgUfGfUfuccuugcauuL96 | 3671 | asAfsugcAfaGfGfaacaCfuAfaggaasgsa | 3857 | UCUUCCUUAGUGUUCCUUGCAUU | 4043 |
| AD-159848 | csasaugcAfaCfCfAfacuauccaaaL96 | 3672 | usUfsuggAfuAfGfuuggUfuGfcauugsusu | 3858 | AACAAUGCAACCAACUAUCCAAG | 4044 |
| AD-159184 | asgsauuuGfgCfAfGfagaguauaauL96 | 3673 | asUfsuauAfcUfCfucugCfcAfaaucusgsc | 3859 | GCAGAUUUGGCAGAGAGUAUAAU | 4045 |
| AD-159231 | ususuccaCfcAfUfGfauuaaggguaL96 | 3674 | usAfscccUfuAfAfucauGfgUfggaaascsu | 3860 | AGUUUCCACCAUGAUUAAGGGUC | 4046 |
| AD-159607 | ascsugguUfaGfUfGfugaaauaguuL96 | 3675 | asAfscuaUfuUfCfacacUfaAfccagususg | 3861 | CAACUGGUUAGUGUGAAAUAGUU | 4047 |
| AD-158504 | csasagucCfaAfUfAfuggcaacucuL96 | 3676 | asGfsaguUfgCfCfauauUfgGfacuugsgsa | 3862 | UCCAAGUCCAAUAUGGCAACUCU | 4048 |
| AD-159233 | uscscaccAfuGfAfUfuaagggucuuL96 | 3677 | asAfsgacCfcUfUfaaucAfuGfguggasasa | 3863 | UUUCCACCAUGAUUAAGGGUCUU | 4049 |
| AD-159411 | uscsauuuCfaCfUfGfucuaggcuaaL96 | 3678 | usUfsagcCfuAfGfacagUfgAfaaugasusa | 3864 | UAUCAUUUCACUGUCUAGGCUAC | 4050 |
| AD-159462 | usgsuccuUfuUfUfAfucugaucuguL96 | 3679 | asCfsagaUfcAfGfauaaAfaAfggacasasc | 3865 | GUUGUCCUUUUUAUCUGAUCUGU | 4051 |
| AD-159742 | cscsagugUfaUfAfAfauccaauauaL96 | 3680 | usAfsuauUfgGfAfuuuaUfaCfacuggsasu | 3866 | AUCCAGUGUAUAAAUCCAAUAUC | 4052 |
| AD-159863 | uscscaagUfgUfUfAfuaccaacuaaL96 | 3681 | usUfsaguUfgGfUfauaaCfaCfuuggasusa | 3867 | UAUCCAAGUGUUAUACCAACUAA | 4053 |
| AD-158687 | gsasacacCfaAfAfGfauugucucuaL96 | 3682 | usAfsgagAfcAfAfucuuUfgGfuguucsusa | 3868 | UAGAACACCAAAGAUUGUCUCUG | 4054 |
| AD-158688 | asascaccAfaAfGfAfuugucucugaL96 | 3683 | usCfsagaGfaCfAfaucuUfuGfguguuscsu | 3869 | AGAACACCAAAGAUUGUCUCUGG | 4055 |
| AD-159458 | asusguugUfcCfUfUfuuuaucugauL96 | 3684 | asUfscagAfuAfAfaaagGfaCfaacausgsc | 3870 | GCAUGUUGUCCUUUUUAUCUGAU | 4056 |
| AD-159519 | uscsaacuCfcUfGfAfaguuagaaauL96 | 3685 | asUfsuucUfaAfCfuucaGfgAfguugasusg | 3871 | CAUCAACUCCUGAAGUUAGAAAU | 4057 |
| AD-159858 | asascuauCfcAfAfGfuguuauaccaL96 | 3686 | usGfsguaUfaAfCfacuuGfgAfuaguusgsg | 3872 | CCAACUAUCCAAGUGUUAUACCA | 4058 |
| AD-159583 | gsgsuauuAfaUfCfUfuguguagucuL96 | 3687 | asGfsacuAfcAfCfaagaUfuAfauaccsasu | 3873 | AUGGUAUUAAUCUUGUGUAGUCU | 4059 |
| AD-159700 | gsgscuccUfuCfAfCfugaacaugcaL96 | 3688 | usGfscauGfuUfCfagugAfaGfgagccsasg | 3874 | CUGGCUCCUUCACUGAACAUGCC | 4060 |
| AD-159807 | usasucagUfaGfUfGfuacauuaccaL96 | 3689 | usGfsguaAfuGfUfacacUfaCfugauasusa | 3875 | UAUAUCAGUAGUGUACAUUACCA | 4061 |
| AD-158673 | csasgccuUfuUfCfCfuuagaacacaL96 | 3690 | usGfsuguUfcUfAfaggaAfaAfggcugscsc | 3876 | GGCAGCCUUUUCCUUAGAACACC | 4062 |
| AD-159608 | csusgguuAfgUfGfUfgaaauaguuaL96 | 3691 | usAfsacuAfuUfUfcacaCfuAfaccagsusu | 3877 | AACUGGUUAGUGUGAAAUAGUUC | 4063 |
| AD-159803 | ascsuauaUfcAfGfUfaguguacauuL96 | 3692 | asAfsuguAfcAfCfuacuGfaUfauagususc | 3878 | GAACUAUAUCAGUAGUGUACAUU | 4064 |
| AD-159805 | usasuaucAfgUfAfGfuguacauuaaL96 | 3693 | usUfsaauGfuAfCfacuaCfuGfauauasgsu | 3879 | ACUAUAUCAGUAGUGUACAUUAC | 4065 |
| AD-159489 | gsusaauaUfuUfUfAfagauggacuaL96 | 3694 | usAfsgucCfaUfCfuuaaAfaUfauuacsusg | 3880 | CAGUAAUAUUUUAAGAUGGACUG | 4066 |
| AD-159495 | ususuuaaGfaUfGfGfacugggaaaaL96 | 3695 | usUfsuucCfcAfGfuccaUfcUfuaaaasusa | 3881 | UAUUUUAAGAUGGACUGGGAAAA | 4067 |
| AD-159706 | ususcacuGfaAfCfAfugccuagucaL96 | 3696 | usGfsacuAfgGfCfauguUfcAfgugaasgsg | 3882 | CCUUCACUGAACAUGCCUAGUCC | 4068 |
| AD-159855 | ascscaacUfaUfCfCfaaguguuauaL96 | 3697 | usAfsuaaCfaCfUfuggaUfaGfuuggususg | 3883 | CAACCAACUAUCCAAGUGUUAUA | 4069 |
| AD-159864 | cscsaaguGfuUfAfUfaccaacuaaaL96 | 3698 | usUfsuagUfuGfGfuauaAfcAfcuuggsasu | 3884 | AUCCAAGUGUUAUACCAACUAAA | 4070 |
| AD-159488 | asgsuaauAfuUfUfUfaagauggacuL96 | 3699 | asGfsuccAfuCfUfuaaaAfuAfuuacusgsc | 3885 | GCAGUAAUAUUUUAAGAUGGACU | 4071 |
| AD-159553 | asasaaucCfaCfAfGfcuauauccuaL96 | 3700 | usAfsggaUfaUfAfgcugUfgGfauuuusasc | 3886 | GUAAAAUCCACAGCUAUAUCCUG | 4072 |
| AD-159703 | uscscuucAfcUfGfAfacaugccuaaL96 | 3701 | usUfsaggCfaUfGfuucaGfuGfaaggasgsc | 3887 | GCUCCUUCACUGAACAUGCCUAG | 4073 |
| AD-159708 | csascugaAfcAfUfGfccuaguccaaL96 | 3702 | usUfsggaCfuAfGfgcauGfuUfcagugsasa | 3888 | UUCACUGAACAUGCCUAGUCCAA | 4074 |
| AD-159866 | asasguguUfaUfAfCfcaacuaaaacL96 | 3703 | gsUfsuuuAfgUfUfgguaUfaAfcacuusgsg | 3889 | CCAAGUGUUAUACCAACUAAAAC | 4075 |
| AD-159232 | ususccacCfaUfGfAfuuaagggucuL96 | 3704 | asGfsaccCfuUfAfaucaUfgGfuggaasasc | 3890 | GUUUCCACCAUGAUUAAGGGUCU | 4076 |
| AD-159712 | gsasacauGfcCfUfAfguccaacauuL96 | 3705 | asAfsuguUfgGfAfcuagGfcAfuguucsasg | 3891 | CUGAACAUGCCUAGUCCAACAUU | 4077 |
| AD-159808 | asuscaguAfgUfGfUfacauuaccauL96 | 3706 | asUfsgguAfaUfGfuacaCfuAfcugausasu | 3892 | AUAUCAGUAGUGUACAUUACCAU | 4078 |
| AD-159862 | asusccaaGfuGfUfUfauaccaacuaL96 | 3707 | usAfsguuGfgUfAfuaacAfcUfuggausasg | 3893 | CUAUCCAAGUGUUAUACCAACUA | 4079 |
| AD-158503 | cscsaaguCfcAfAfUfauggcaacuaL96 | 3708 | usAfsguuGfcCfAfuauuGfgAfcuuggsasa | 3894 | UUCCAAGUCCAAUAUGGCAACUC | 4080 |
| AD-159412 | csasuuucAfcUfGfUfcuaggcuacaL96 | 3709 | usGfsuagCfcUfAfgacaGfuGfaaaugsasu | 3895 | AUCAUUUCACUGUCUAGGCUACA | 4081 |
| AD-159558 | cscsacagCfuAfUfAfuccugaugcuL96 | 3710 | asGfscauCfaGfGfauauAfgCfuguggsasu | 3896 | AUCCACAGCUAUAUCCUGAUGCU | 4082 |
| AD-159705 | csusucacUfgAfAfCfaugccuaguaL96 | 3711 | usAfscuaGfgCfAfuguuCfaGfugaagsgsa | 3897 | UCCUUCACUGAACAUGCCUAGUC | 4083 |
| AD-159113 | gsusgguuGfaGfAfGfugcuuaugaaL96 | 3712 | usUfscauAfaGfCfacucUfcAfaccacscsu | 3898 | AGGUGGUUGAGAGUGCUUAUGAG | 4084 |
| AD-159806 | asusaucaGfuAfGfUfguacauuacaL96 | 3713 | usGfsuaaUfgUfAfcacuAfcUfgauausasg | 3899 | CUAUAUCAGUAGUGUACAUUACC | 4085 |
| AD-159853 | csasaccaAfcUfAfUfccaaguguuaL96 | 3714 | usAfsacaCfuUfGfgauaGfuUfgguugscsa | 3900 | UGCAACCAACUAUCCAAGUGUUA | 4086 |
| AD-159182 | gscsagauUfuGfGfCfagagaguauaL96 | 3715 | usAfsuacUfcUfCfugccAfaAfucugcsusa | 3901 | UAGCAGAUUUGGCAGAGAGUAUA | 4087 |
| AD-159702 | csusccuuCfaCfUfGfaacaugccuaL96 | 3716 | usAfsggcAfuGfUfucagUfgAfaggagscsc | 3902 | GGCUCCUUCACUGAACAUGCCUA | 4088 |
| AD-159715 | csasugccUfaGfUfCfcaacauuuuuL96 | 3717 | asAfsaaaUfgUfUfggacUfaGfgcaugsusu | 3903 | AACAUGCCUAGUCCAACAUUUUU | 4089 |
| AD-158575 | usgsccauCfaGfUfAfucuuaaugaaL96 | 3718 | usUfscauUfaAfGfauacUfgAfuggcascsa | 3904 | UGUGCCAUCAGUAUCUUAAUGAA | 4090 |
| AD-158576 | gscscaucAfgUfAfUfcuuaaugaaaL96 | 3719 | usUfsucaUfuAfAfgauaCfuGfauggcsasc | 3905 | GUGCCAUCAGUAUCUUAAUGAAG | 4091 |
| AD-158684 | ususagaaCfaCfCfAfaagauugucuL96 | 3720 | asGfsacaAfuCfUfuuggUfgUfucuaasgsg | 3906 | CCUUAGAACACCAAAGAUUGUCU | 4092 |
| AD-159410 | asuscauuUfcAfCfUfgucuaggcuaL96 | 3721 | usAfsgccUfaGfAfcaguGfaAfaugausasu | 3907 | AUAUCAUUUCACUGUCUAGGCUA | 4093 |
| AD-159416 | uscsacugUfcUfAfGfgcuacaacaaL96 | 3722 | usUfsguuGfuAfGfccuaGfaCfagugasasa | 3908 | UUUCACUGUCUAGGCUACAACAG | 4094 |
| AD-159857 | csasacuaUfcCfAfAfguguuauacaL96 | 3723 | usGfsuauAfaCfAfcuugGfaUfaguugsgsu | 3909 | ACCAACUAUCCAAGUGUUAUACC | 4095 |
| AD-158497 | ususgguuCfcAfAfGfuccaauaugaL96 | 3724 | usCfsauaUfuGfGfacuuGfgAfaccaasasa | 3910 | UUUUGGUUCCAAGUCCAAUAUGG | 4096 |
| AD-159124 | usgscuuaUfgAfGfGfugaucaaacuL96 | 3725 | asGfsuuuGfaUfCfaccuCfaUfaagcascsu | 3911 | AGUGCUUAUGAGGUGAUCAAACU | 4097 |
| AD-159312 | uscsucagAfcCfUfUfgugaaggugaL96 | 3726 | usCfsaccUfuCfAfcaagGfuCfugagasusu | 3912 | AAUCUCAGACCUUGUGAAGGUGA | 4098 |
| AD-159552 | usasaaauCfcAfCfAfgcuauauccuL96 | 3727 | asGfsgauAfuAfGfcuguGfgAfuuuuascsa | 3913 | UGUAAAAUCCACAGCUAUAUCCU | 4099 |
| AD-159704 | cscsuucaCfuGfAfAfcaugccuaguL96 | 3728 | asCfsuagGfcAfUfguucAfgUfgaaggsasg | 3914 | CUCCUUCACUGAACAUGCCUAGU | 4100 |
| AD-159737 | gsgsgaucCfaGfUfGfuauaaauccaL96 | 3729 | usGfsgauUfuAfUfacacUfgGfaucccsasg | 3915 | CUGGGAUCCAGUGUAUAAAUCCA | 4101 |
| AD-159869 | csasauaaAfcCfUfUfgaacagugaaL96 | 3730 | usUfscacUfgUfUfcaagGfuUfuauugsgsg | 3916 | CCCAAUAAACCUUGAACAGUGAC | 4102 |
| AD-158570 | gsgsccugUfgCfCfAfucaguaucuuL96 | 3731 | asAfsgauAfcUfGfauggCfaCfaggccsasu | 3917 | AUGGCCUGUGCCAUCAGUAUCUU | 4103 |
| AD-158618 | ususguugAfuGfUfCfaucgaagacaL96 | 3732 | usGfsucuUfcGfAfugacAfuCfaacaasgsa | 3918 | UCUUGUUGAUGUCAUCGAAGACA | 4104 |
| AD-159184 | asgsauuuGfgCfAfGfagaguauaauL96 | 3733 | asUfsuauAfcUfCfucugCfcAfaaucusgsc | 3919 | GCAGAUUUGGCAGAGAGUAUAAU | 4105 |
| AD-159231 | ususuccaCfcAfUfGfauuaaggguaL96 | 3734 | usAfscccUfuAfAfucauGfgUfggaaascsu | 3920 | AGUUUCCACCAUGAUUAAGGGUC | 4106 |
| AD-159423 | csusaggcUfaCfAfAfcaggauucuaL96 | 3735 | usAfsgaaUfcCfUfguugUfaGfccuagsasc | 3921 | GUCUAGGCUACAACAGGAUUCUA | 4107 |
| AD-159446 | usgsgaggUfuGfUfGfcauguugucaL96 | 3736 | usGfsacaAfcAfUfgcacAfaCfcuccascsc | 3922 | GGUGGAGGUUGUGCAUGUUGUCC | 4108 |
| AD-159701 | gscsuccuUfcAfCfUfgaacaugccuL96 | 3737 | asGfsgcaUfgUfUfcaguGfaAfggagcscsa | 3923 | UGGCUCCUUCACUGAACAUGCCU | 4109 |
| AD-158494 | csusuuugGfuUfCfCfaaguccaauaL96 | 3738 | usAfsuugGfaCfUfuggaAfcCfaaaagsgsa | 3924 | UCCUUUUGGUUCCAAGUCCAAUA | 4110 |
| AD-158571 | gscscuguGfcCfAfUfcaguaucuuaL96 | 3739 | usAfsagaUfaCfUfgaugGfcAfcaggcscsa | 3925 | UGGCCUGUGCCAUCAGUAUCUUA | 4111 |
| AD-159125 | gscsuuauGfaGfGfUfgaucaaacuaL96 | 3740 | usAfsguuUfgAfUfcaccUfcAfuaagcsasc | 3926 | GUGCUUAUGAGGUGAUCAAACUC | 4112 |
| AD-159126 | csusuaugAfgGfUfGfaucaaacucaL96 | 3741 | usGfsaguUfuGfAfucacCfuCfauaagscsa | 3927 | UGCUUAUGAGGUGAUCAAACUCA | 4113 |
| AD-159287 | cscsuugcAfuUfUfUfgggacagaauL96 | 3742 | asUfsucuGfuCfCfcaaaAfuGfcaaggsasa | 3928 | UUCCUUGCAUUUUGGGACAGAAU | 4114 |
| AD-158499 | gsgsuuccAfaGfUfCfcaauauggcaL96 | 3743 | usGfsccaUfaUfUfggacUfuGfgaaccsasa | 3929 | UUGGUUCCAAGUCCAAUAUGGCA | 4115 |
| AD-159417 | csascuguCfuAfGfGfcuacaacagaL96 | 3744 | usCfsuguUfgUfAfgccuAfgAfcagugsasa | 3930 | UUCACUGUCUAGGCUACAACAGG | 4116 |
| AD-159418 | ascsugucUfaGfGfCfuacaacaggaL96 | 3745 | usCfscugUfuGfUfagccUfaGfacagusgsa | 3931 | UCACUGUCUAGGCUACAACAGGA | 4117 |
| AD-158550 | asasuaagAfuUfAfCfaguuguuggaL96 | 3746 | usCfscaaCfaAfCfuguaAfuCfuuauuscsu | 3932 | AGAAUAAGAUUACAGUUGUUGGG | 4118 |
| AD-159116 | gsusugagAfgUfGfCfuuaugagguaL96 | 3747 | usAfsccuCfaUfAfagcaCfuCfucaacscsa | 3933 | UGGUUGAGAGUGCUUAUGAGGUG | 4119 |
| AD-159421 | gsuscuagGfcUfAfCfaacaggauuaL96 | 3748 | usAfsaucCfuGfUfuguaGfcCfuagacsasg | 3934 | CUGUCUAGGCUACAACAGGAUUC | 4120 |
| AD-159422 | uscsuaggCfuAfCfAfacaggauucuL96 | 3749 | asGfsaauCfcUfGfuuguAfgCfcuagascsa | 3935 | UGUCUAGGCUACAACAGGAUUCU | 4121 |
| AD-159445 | gsusggagGfuUfGfUfgcauguuguaL96 | 3750 | usAfscaaCfaUfGfcacaAfcCfuccacscsu | 3936 | AGGUGGAGGUUGUGCAUGUUGUC | 4122 |
| AD-159130 | usgsagguGfaUfCfAfaacucaaagaL96 | 3751 | usCfsuuuGfaGfUfuugaUfcAfccucasusa | 3937 | UAUGAGGUGAUCAAACUCAAAGG | 4123 |
| AD-159134 | gsusgaucAfaAfCfUfcaaaggcuaaL96 | 3752 | usUfsagcCfuUfUfgaguUfuGfaucacscsu | 3938 | AGGUGAUCAAACUCAAAGGCUAC | 4124 |
| AD-159343 | usgsaggaAfgAfGfGfcccguuugaaL96 | 3753 | usUfscaaAfcGfGfgccuCfuUfccucasgsa | 3939 | UCUGAGGAAGAGGCCCGUUUGAA | 4125 |
| AD-159105 | ascsaagcAfgGfUfGfguugagaguaL96 | 3754 | usAfscucUfcAfAfccacCfuGfcuugusgsa | 3940 | UCACAAGCAGGUGGUUGAGAGUG | 4126 |
| AD-159183 | csasgauuUfgGfCfAfgagaguauaaL96 | 3755 | usUfsauaCfuCfUfcugcCfaAfaucugscsu | 3941 | AGCAGAUUUGGCAGAGAGUAUAA | 4127 |
| AD-159123 | gsusgcuuAfuGfAfGfgugaucaaacL96 | 3756 | gsUfsuugAfuCfAfccucAfuAfagcacsusc | 3942 | GAGUGCUUAUGAGGUGAUCAAAC | 4128 |
| AD-159181 | asgscagaUfuUfGfGfcagagaguauL96 | 3757 | asUfsacuCfuCfUfgccaAfaUfcugcusasc | 3943 | GUAGCAGAUUUGGCAGAGAGUAU | 4129 |
| AD-159186 | asusuuggCfaGfAfGfaguauaaugaL96 | 3758 | usCfsauuAfuAfCfucucUfgCfcaaauscsu | 3944 | AGAUUUGGCAGAGAGUAUAAUGA | 4130 |
| AD-159187 | ususuggcAfgAfGfAfguauaaugaaL96 | 3759 | usUfscauUfaUfAfcucuCfuGfccaaasusc | 3945 | GAUUUGGCAGAGAGUAUAAUGAA | 4131 |
| AD-159288 | csusugcaUfuUfUfGfggacagaauaL96 | 3760 | usAfsuucUfgUfCfccaaAfaUfgcaagsgsa | 3946 | UCCUUGCAUUUUGGGACAGAAUG | 4132 |
| AD-159306 | asusggaaUfcUfCfAfgaccuugugaL96 | 3761 | usCfsacaAfgGfUfcugaGfaUfuccaususc | 3947 | GAAUGGAAUCUCAGACCUUGUGA | 4133 |
| AD-159559 | csascagcUfaUfAfUfccugaugcuaL96 | 3762 | usAfsgcaUfcAfGfgauaUfaGfcugugsgsa | 3948 | UCCACAGCUAUAUCCUGAUGCUG | 4134 |
| AD-159344 | gsasggaaGfaGfGfCfccguuugaaaL96 | 3763 | usUfsucaAfaCfGfggccUfcUfuccucsasg | 3949 | CUGAGGAAGAGGCCCGUUUGAAG | 4135 |
| AD-159341 | uscsugagGfaAfGfAfggcccguuuaL96 | 3764 | usAfsaacGfgGfCfcucuUfcCfucagasasg | 3950 | CUUCUGAGGAAGAGGCCCGUUUG | 4136 |
| AD-159729 | csascaucCfuGfGfGfauccaguguaL96 | 3765 | usAfscacUfgGfAfucccAfgGfaugugsasc | 3951 | GUCACAUCCUGGGAUCCAGUGUA | 4137 |
| AD-158674 | asgsccuuUfuCfCfUfuagaacaccaL96 | 3766 | usGfsgugUfuCfUfaaggAfaAfaggcusgsc | 3952 | GCAGCCUUUUCCUUAGAACACCA | 4138 |
| AD-159604 | uscsaacuGfgUfUfAfgugugaaauaL96 | 3767 | usAfsuuuCfaCfAfcuaaCfcAfguugasasg | 3953 | CUUCAACUGGUUAGUGUGAAAUA | 4139 |

TABLE 4
Modified Human/Mouse/Cyno/Rat, Mouse, Mouse/Rat, and Human/Cyno Cross-Reactive HAO1 iRNA Sequences

| Duplex | | | | | |
|---|---|---|---|---|---|
| Name | Sense Strand Sequence 5′ to 3′ | SEQ ID NO: | Antisense Strand Sequence 5′ to 3′ | SEQ ID NO: | Species |
| AD-62933 | GfsasAfuGfuGfaAfAfGfuCfaUfcGfaCfaAfL96 | 4140 | usUfsgUfcGfaUfgAfcuuUfcAfcAfuUfcsusg | 89 | Hs/Mm |
| AD-62939 | UfsusUfuCfaAfuGfGfGfuGfuCfcUfaGfgAfL96 | 4141 | usCfscUfaGfgAfcAfcccAfuUfgAfaAfasgsu | 90 | Hs/Mm |
| AD-62944 | GfsasAfaGfuCfaUfCfGfaCfaAfgAfcAfuUfL96 | 4142 | asAfsuGfuCfuUfgUfcgaUfgAfcUfuUfcsasc | 91 | Hs/Mm |
| AD-62949 | UfscsAfuCfgAfcAfAfGfaCfaUfuGfgUfgAfL96 | 4143 | usCfsaCfcAfaUfgUfcuuGfuCfgAfuGfascsu | 92 | Hs/Mm |
| AD-62954 | UfsusUfcAfaUfgGfGfUfgUfcCfuAfgGfaAfL96 | 4144 | usUfscCfuAfgGfaCfaccCfaUfuGfaAfasasg | 93 | Hs/Mm |
| AD-62959 | AfsasUfgGfgUfgUfCfCfuAfgGfaAfcCfuUfL96 | 4145 | asAfsgGfuUfcCfuAfggaCfaCfcCfaUfusgsa | 94 | Hs/Mm |
| AD-62964 | GfsasCfaGfuGfcAfCfAfaUfaUfuUfuCfcAfL96 | 4146 | usGfsgAfaAfaUfaUfuguGfcAfcUfgUfcsasg | 95 | Hs/Mm |
| AD-62969 | AfscsUfuUfuCfaAfUfGfgGfuGfuCfcUfaAfL96 | 4147 | usUfsaGfgAfcAfcCfcauUfgAfaAfaGfuscsa | 96 | Hs/Mm |
| AD-62934 | AfsasGfuCfaUfcGfAfCfaAfgAfcAfuUfgAfL96 | 4148 | usCfsaAfuGfuCfuUfgucGfaUfgAfcUfususc | 97 | Hs/Mm |
| AD-62940 | AfsusCfgAfcAfaGfAfCfaUfuGfgUfgAfgAfL96 | 4149 | usCfsuCfaCfcAfaUfgucUfuGfuCfgAfusgsa | 98 | Hs/Mm |
| AD-62945 | GfsgsGfaGfaAfaGfGfUfgUfuCfaAfgAfuAfL96 | 4150 | usAfsuCfuUfgAfaCfaccUfuUfcUfcCfcscsc | 99 | Hs/Mm |
| AD-62950 | CfsusUfuUfcAfaUfGfGfgUfgUfcCfuAfgAfL96 | 4311 | usCfsuAfgGfaCfaCfccaUfuGfaAfaAfgsusc | 100 | Hs/Mm |
| AD-62955 | UfscsAfaUfgGfgUfGfUfcCfuAfgGfaAfcAfL96 | 4312 | usGfsuUfcCfuAfgGfacaCfcCfaUfuGfasasa | 101 | Hs/Mm |
| AD-62960 | UfsusGfaCfuUfuUfCfAfaUfgGfgUfgUfcAfL96 | 4313 | usGfsaCfaCfcCfaUfugaAfaAfgUfcAfasasa | 102 | Hs/Mm |
| AD-62965 | AfsasAfgUfcAfuCfGfAfcAfaGfaCfaUfuAfL96 | 4314 | usAfsaUfgUfcUfuGfucgAfuGfaCfuUfuscsa | 103 | Hs/Mm |
| AD-62970 | CfsasGfgGfgGfaGfAfAfaGfgUfgUfuCfaAfL96 | 4315 | usUfsgAfaCfaCfcUfuucUfcCfcCfcUfgsgsa | 104 | Hs/Mm |
| AD-62935 | CfsasUfuGfgUfgAfGfGfaAfaAfaUfcCfuUfL96 | 4316 | asAfsgGfaUfuUfuUfccuCfaCfcAfaUfgsusc | 105 | Hs/Mm |
| AD-62941 | AfscsAfuUfgGfuGfAfGfgAfaAfaAfuCfcUfL96 | 4317 | asGfsgAfuUfuUfuCfcucAfcCfaAfuGfuscsu | 106 | Hs/Mm |
| AD-62946 | AfsgsGfgGfgAfgAfAfAfgGfuGfuUfcAfaAfL96 | 4318 | usUfsuGfaAfcAfcCfuuuCfuCfcCfcCfusgsg | 107 | Hs/Mm |
| AD-62951 | AfsusGfgUfgGfuAfAfUfuUfgUfgAfuUfuUfL96 | 37 | asAfsaAfuCfaCfaAfauuAfcCfaCfcAfuscsc | 108 | Hs |
| AD-62956 | GfsasCfuUfgCfaUfCfCfuGfgAfaAfuAfuAfL96 | 38 | usAfsuAfuUfuCfcAfggaUfgCfaAfgUfcscsa | 109 | Hs |
| AD-62961 | GfsgsAfaGfgGfaAfGfGfuAfgAfaGfuCfuUfL96 | 39 | asAfsgAfcUfuCfuAfccuUfcCfcUfuCfcsasc | 110 | Hs |
| AD-62966 | UfsgsUfcUfuCfuGfUfUfuAfgAfuUfuCfcUfL96 | 40 | asGfsgAfaAfuCfuAfaacAfgAfaGfaCfasgsg | 111 | Hs |
| AD-62971 | CfsusUfuGfgCfuGfUfUfuCfcAfaGfaUfcUfL96 | 41 | asGfsaUfcUfuGfgAfaacAfgCfcAfaAfgsgsa | 112 | Hs |
| AD-62936 | AfsasUfgUfgUfuUfGfGfgCfaAfcGfuCfaUfL96 | 42 | asUfsgAfcGfuUfgCfccaAfaCfaCfaUfususu | 113 | Hs |
| AD-62942 | UfsgsUfgAfcUfgUfGfGfaCfaCfcCfcUfuAfL96 | 43 | usAfsaGfgGfgUfgUfccaCfaGfuCfaCfasasa | 114 | Hs |
| AD-62947 | GfsasUfgGfgGfuGfCfCfaGfcUfaCfuAfuUfL96 | 44 | asAfsuAfgUfaGfcUfggcAfcCfcCfaUfcscsa | 115 | Hs |
| AD-62952 | GfsasAfaAfuGfuGfUfUfuGfgGfcAfaCfgUfL96 | 45 | asCfsgUfuGfcCfcAfaacAfcAfuUfuUfcsasa | 116 | Hs |
| AD-62957 | GfsgsCfuGfuUfuCfCfAfaGfaUfcUfgAfcAfL96 | 46 | usGfsuCfaGfaUfcUfuggAfaAfcAfgCfcsasa | 117 | Hs |
| AD-62962 | UfscsCfaAfcAfaAfAfUfaGfcCfaCfcCfcUfL96 | 47 | asGfsgGfgUfgGfcUfauuUfuGfuUfgGfasasa | 118 | Hs |
| AD-62967 | GfsusCfuUfcUfgUfUfUfaGfaUfuUfcCfuUfL96 | 48 | asAfsgGfaAfaUfcUfaaaCfaGfaAfgAfcsasg | 119 | Hs |
| AD-62972 | UfsgsGfaAfgGfgAfAfGfgUfaGfaAfgUfcUfL96 | 49 | asGfsaCfuUfcUfaCfcuuCfcCfuUfcCfascsa | 120 | Hs |
| AD-62937 | UfscsCfuUfuGfgCfUfGfuUfuCfcAfaGfaUfL96 | 50 | asUfscUfuGfgAfaAfcagCfcAfaAfgGfasusu | 121 | Hs |
| AD-62943 | CfsasUfcUfcUfcAfGfCfuGfgGfaUfgAfuAfL96 | 51 | usAfsuCfaUfcCfcAfgcuGfaGfaGfaUfgsgsg | 122 | Hs |
| AD-62948 | GfsgsGfgUfgCfcAfGfCfuAfcUfaUfuGfaUfL96 | 52 | asUfscAfaUfaGfuAfgcuGfgCfaCfcCfcsasu | 123 | Hs |
| AD-62953 | AfsusGfuGfuUfuGfGfGfcAfaCfgUfcAfuAfL96 | 53 | usAfsuGfaCfgUfuGfcccAfaAfcAfcAfususu | 124 | Hs |
| AD-62958 | CfsusGfuUfuAfgAfUfUfuCfcUfuAfaGfaAfL96 | 54 | usUfscUfuAfaGfgAfaauCfuAfaAfcAfgsasa | 125 | Hs |
| AD-62963 | AfsgsAfaAfgAfaAfUfGfgAfcUfuGfcAfuAfL96 | 55 | usAfsuGfcAfaGfuCfcauUfuCfuUfuCfusasg | 126 | Hs |
| AD-62968 | GfscsAfuCfcUfgGfAfAfaUfaUfaUfuAfaAfL96 | 56 | usUfsuAfaUfaUfaUfuucCfaGfgAfuGfcsasa | 127 | Hs |
| AD-62973 | CfscsUfgUfcAfgAfCfCfaUfgGfgAfaCfuAfL96 | 57 | usAfsgUfuCfcCfaUfgguCfuGfaCfaGfgscsu | 128 | Hs |
| AD-62938 | AfsasAfcAfuGfgUfGfUfgGfaUfgGfgAfuAfL96 | 58 | usAfsuCfcCfaUfcCfacaCfcAfuGfuUfusasa | 129 | Hs |
| AD-62974 | CfsusCfaGfgAfuGfAfAfaAfaUfuUfuGfaAfL96 | 59 | usUfscAfaAfaUfuUfuucAfuCfcUfgAfgsusu | 130 | Hs |
| AD-62978 | CfsasGfcAfuGfuAfUfUfaCfuUfgAfcAfaAfL96 | 60 | usUfsuGfuCfaAfgUfaauAfcAfuGfcUfgsasa | 131 | Hs |
| AD-62982 | UfsasUfgAfaCfaAfCfAfuGfcUfaAfaUfcAfL96 | 61 | usGfsaUfuUfaGfcAfuguUfgUfuCfaUfasasu | 132 | Hs |
| AD-62986 | AfsusAfuAfuCfcAfAfAfuGfuUfuUfaGfgAfL96 | 62 | usCfscUfaAfaAfcAfuuuGfgAfuAfuAfususc | 133 | Hs |
| AD-62990 | CfscsAfgAfuGfgAfAfGfcUfgUfaUfcCfaAfL96 | 63 | usUfsgGfaUfaCfaGfcuuCfcAfuCfuGfgsasa | 134 | Hs |
| AD-62994 | GfsasCfuUfuCfaUfCfCfuGfgAfaAfuAfuAfL96 | 64 | usAfsuAfuUfuCfcAfggaUfgAfaAfgUfcscsa | 135 | Hs |
| AD-62998 | CfscsCfcGfgCfuAfAfUfuUfgUfaUfcAfaUfL96 | 65 | asUfsuGfaUfaCfaAfauuAfgCfcGfgGfgsgsa | 136 | Hs |
| AD-63002 | UfsusAfaAfcAfuGfGfCfuUfgAfaUfgGfgAfL96 | 66 | usCfscCfaUfuCfaAfgccAfuGfuUfuAfascsa | 137 | Hs |
| AD-62975 | AfsasUfgUfgUfuUfAfGfaCfaAfcGfuCfaUfL96 | 67 | asUfsgAfcGfuUfgUfcuaAfaCfaCfaUfususu | 138 | Mm |
| AD-62979 | AfscsUfaAfaGfgAfAfGfaAfuUfcCfgGfuUfL96 | 68 | asAfscCfgGfaAfuUfcuuCfcUfuUfaGfusasu | 139 | Mm |
| AD-62983 | UfsasUfaUfcCfaAfAfUfgUfuUfuAfgGfaUfL96 | 69 | asUfscCfuAfaAfaCfauuUfgGfaUfaUfasusu | 140 | Mm |
| AD-62987 | GfsusGfcGfgAfaAfGfGfcAfcUfgAfuGfuUfL96 | 70 | asAfscAfuCfaGfuGfccuUfuCfcGfcAfcsasc | 141 | Mm |
| AD-62991 | UfsasAfaAfcAfgUfGfGfuUfcUfuAfaAfuUfL96 | 71 | asAfsuUfuAfaGfaAfccaCfuGfuUfuUfasasa | 142 | Mm |
| AD-62995 | AfsusGfaAfaAfaUfUfUfuGfaAfaCfcAfgUfL96 | 72 | asCfsuGfgUfuUfcAfaaaUfuUfuUfcAfuscsc | 143 | Mm |
| AD-62999 | AfsasCfaAfaAfuAfGfCfaAfuCfcCfuUfuUfL96 | 73 | asAfsaAfgGfgAfuUfgcuAfuUfuUfgUfusgsg | 144 | Mm |
| AD-63003 | CfsusGfaAfaCfaGfAfUfcUfgUfcGfaCfuUfL96 | 74 | asAfsgUfcGfaCfaGfaucUfgUfuUfcAfgscsa | 145 | Mm |
| AD-62976 | UfsusGfuUfgCfaAfAfGfgGfcAfuUfuUfgAfL96 | 75 | usCfsaAfaAfuGfcCfcuuUfgCfaAfcAfasusu | 146 | Mm |
| AD-62980 | CfsusCfaUfuGfuUfUfAfuUfaAfcCfuGfuAfL96 | 76 | usAfscAfgGfuUfaAfuaaAfcAfaUfgAfgsasu | 147 | Mm |
| AD-62984 | CfsasAfcAfaAfaUfAfGfcAfaUfcCfcUfuUfL96 | 77 | asAfsaGfgGfaUfuGfcuaUfuUfuGfuUfgsgsa | 148 | Mm |
| AD-62992 | CfsasUfuGfuUfuAfUfUfaAfcCfuGfuAfuUfL96 | 78 | asAfsuAfcAfgGfuUfaauAfaAfcAfaUfgsasg | 149 | Mm |
| AD-62996 | UfsasUfcAfgCfuGfGfGfaAfgAfuAfuCfaAfL96 | 79 | usUfsgAfuAfuCfuUfcccAfgCfuGfaUfasgsa | 150 | Mm |
| AD-63000 | UfsgsUfcCfuAfgGfAfAfcCfuUfuUfaGfaAfL96 | 80 | usUfscUfaAfaAfgGfuucCfuAfgGfaCfascsc | 151 | Mm |
| AD-63004 | UfscsCfaAfcAfaAfAfUfaGfcAfaUfcCfcUfL96 | 81 | asGfsgGfaUfuGfcUfauuUfuGfuUfgGfasasa | 152 | Mm |
| AD-62977 | GfsgsUfgUfgCfgGfAfAfaGfgCfaCfuGfaUfL96 | 82 | asUfscAfgUfgCfcUfuucCfgCfaCfaCfcscsc | 153 | Mm |
| AD-62981 | UfsusGfaAfaCfcAfGfUfaCfuUfuAfuCfaUfL96 | 83 | asUfsgAfuAfaAfgUfacuGfgUfuUfcAfasasa | 154 | Mm |
| AD-62985 | UfsasCfuUfcCfaAfAfGfuCfuAfuAfuAfuAfL96 | 84 | usAfsuAfuAfuAfgAfcuuUfgGfaAfgUfascsu | 155 | Mm |
| AD-62989 | UfscsCfuAfgGfaAfCfCfuUfuUfaGfaAfaUfL96 | 85 | asUfsuUfcUfaAfaAfgguUfcCfuAfgGfascsa | 156 | Mm |
| AD-62993 | CfsusCfcUfgAfgGfAfAfaAfuUfuUfgGfaAfL96 | 86 | usUfscCfaAfaAfuUfuucCfuCfaGfgAfgsasa | 157 | Mm |
| AD-62997 | GfscsUfcCfgGfaAfUfGfuUfgCfuGfaAfaUfL96 | 87 | asUfsuUfcAfgCfaAfcauUfcCfgGfaGfcsasu | 158 | Mm |
| AD-63001 | GfsusGfuUfuGfuGfGfGfgAfgAfcCfaAfuAfL96 | 88 | usAfsuUfgGfuCfuCfcccAfcAfaAfcAfcsasg | 159 | Mm |

TABLE 5
Additional Modified Human/Mouse/Cyno/Rat, Human/Mouse/Rat, Human/Mouse/Cyno, Mouse, Mouse/Rat, and
Human/Cyno Cross-Reactive HAO1 iRNA Sequences

| | | SEQ | | SEQ | |
|---|---|---|---|---|---|
| Duplex | | ID | | ID | |
| Name | Sense Strand Sequence 5′ to 3′ | NO: | Antisense Strand Sequence 5′ to 3′ | NO: | Species |
| AD-62933.2 | GfsasAfuGfuGfaAfAfGfuCfaUfcGfaCfaAfL96 | 4140 | usUfsgUfcGfaUfgAfcuuUfcAfcAfuUfcsusg | 89 | Hs/Mm |
| AD-62939.2 | UfsusUfuCfaAfuGfGfGfuGfuCfcUfaGfgAfL96 | 4141 | usCfscUfaGfgAfcAfcccAfuUfgAfaAfasgsu | 90 | Hs/Mm |
| AD-62944.2 | GfsasAfaGfuCfaUfCfGfaCfaAfgAfcAfuUfL96 | 4142 | asAfsuGfuCfuUfgUfcgaUfgAfcUfuUfcsasc | 91 | Hs/Mm |
| AD-62949.2 | UfscsAfuCfgAfcAfAfGfaCfaUfuGfgUfgAfL96 | 4143 | usCfsaCfcAfaUfgUfcuuGfuCfgAfuGfascsu | 92 | Hs/Mm |
| AD-62954.2 | UfsusUfcAfaUfgGfGfUfgUfcCfuAfgGfaAfL96 | 4144 | usUfscCfuAfgGfaCfaccCfaUfuGfaAfasasg | 93 | Hs/Mm |
| AD-62959.2 | AfsasUfgGfgUfgUfCfCfuAfgGfaAfcCfuUfL96 | 4145 | asAfsgGfuUfcCfuAfggaCfaCfcCfaUfusgsa | 94 | Hs/Mm |
| AD-62964.2 | GfsasCfaGfuGfcAfCfAfaUfaUfuUfuCfcAfL96 | 4146 | usGfsgAfaAfaUfaUfuguGfcAfcUfgUfcsasg | 95 | Hs/Mm |
| AD-62969.2 | AfscsUfuUfuCfaAfUfGfgGfuGfuCfcUfaAfL96 | 4147 | usUfsaGfgAfcAfcCfcauUfgAfaAfaGfuscsa | 96 | Hs/Mm |
| AD-62934.2 | AfsasGfuCfaUfcGfAfCfaAfgAfcAfuUfgAfL96 | 4148 | usCfsaAfuGfuCfuUfgucGfaUfgAfcUfususc | 97 | Hs/Mm |
| AD-62940.2 | AfsusCfgAfcAfaGfAfCfaUfuGfgUfgAfgAfL96 | 4149 | usCfsuCfaCfcAfaUfgucUfuGfuCfgAfusgsa | 98 | Hs/Mm |
| AD-62945.2 | GfsgsGfaGfaAfaGfGfUfgUfuCfaAfgAfuAfL96 | 4150 | usAfsuCfuUfgAfaCfaccUfuUfcUfcCfcscsc | 99 | Hs/Mm |
| AD-62950.2 | CfsusUfuUfcAfaUfGfGfgUfgUfcCfuAfgAfL96 | 4311 | usCfsuAfgGfaCfaCfccaUfuGfaAfaAfgsusc | 100 | Hs/Mm |
| AD-62955.2 | UfscsAfaUfgGfgUfGfUfcCfuAfgGfaAfcAfL96 | 4312 | usGfsuUfcCfuAfgGfacaCfcCfaUfuGfasasa | 101 | Hs/Mm |
| AD-62960.2 | UfsusGfaCfuUfuUfCfAfaUfgGfgUfgUfcAfL96 | 4313 | usGfsaCfaCfcCfaUfugaAfaAfgUfcAfasasa | 102 | Hs/Mm |
| AD-62965.2 | AfsasAfgUfcAfuCfGfAfcAfaGfaCfaUfuAfL96 | 4314 | usAfsaUfgUfcUfuGfucgAfuGfaCfuUfuscsa | 103 | Hs/Mm |
| AD-62970.2 | CfsasGfgGfgGfaGfAfAfaGfgUfgUfuCfaAfL96 | 4315 | usUfsgAfaCfaCfcUfuucUfcCfcCfcUfgsgsa | 104 | Hs/Mm |
| AD-62935.2 | CfsasUfuGfgUfgAfGfGfaAfaAfaUfcCfuUfL96 | 4316 | asAfsgGfaUfuUfuUfccuCfaCfcAfaUfgsusc | 105 | Hs/Mm |
| AD-62941.2 | AfscsAfuUfgGfuGfAfGfgAfaAfaAfuCfcUfL96 | 4317 | asGfsgAfuUfuUfuCfcucAfcCfaAfuGfuscsu | 106 | Hs/Mm |
| AD-62946.2 | AfsgsGfgGfgAfgAfAfAfgGfuGfuUfcAfaAfL96 | 4318 | usUfsuGfaAfcAfcCfuuuCfuCfcCfcCfusgsg | 107 | Hs/Mm |
| AD-62951.2 | AfsusGfgUfgGfuAfAfUfuUfgUfgAfuUfuUfL96 | 37 | asAfsaAfuCfaCfaAfauuAfcCfaCfcAfuscsc | 108 | Hs |
| AD-62956.2 | GfsasCfuUfgCfaUfCfCfuGfgAfaAfuAfuAfL96 | 38 | usAfsuAfuUfuCfcAfggaUfgCfaAfgUfcscsa | 109 | Hs |
| AD-62961.2 | GfsgsAfaGfgGfaAfGfGfuAfgAfaGfuCfuUfL96 | 39 | asAfsgAfcUfuCfuAfccuUfcCfcUfuCfcsasc | 110 | Hs |
| AD-62966.2 | UfsgsUfcUfuCfuGfUfUfuAfgAfuUfuCfcUfL96 | 40 | asGfsgAfaAfuCfuAfaacAfgAfaGfaCfasgsg | 111 | Hs |
| AD-62971.2 | CfsusUfuGfgCfuGfUfUfuCfcAfaGfaUfcUfL96 | 41 | asGfsaUfcUfuGfgAfaacAfgCfcAfaAfgsgsa | 112 | Hs |
| AD-62936.2 | AfsasUfgUfgUfuUfGfGfgCfaAfcGfuCfaUfL96 | 42 | asUfsgAfcGfuUfgCfccaAfaCfaCfaUfususu | 113 | Hs |
| AD-62942.2 | UfsgsUfgAfcUfgUfGfGfaCfaCfcCfcUfuAfL96 | 43 | usAfsaGfgGfgUfgUfccaCfaGfuCfaCfasasa | 114 | Hs |
| AD-62947.2 | GfsasUfgGfgGfuGfCfCfaGfcUfaCfuAfuUfL96 | 44 | asAfsuAfgUfaGfcUfggcAfcCfcCfaUfcscsa | 115 | Hs |
| AD-62952.2 | GfsasAfaAfuGfuGfUfUfuGfgGfcAfaCfgUfL96 | 45 | asCfsgUfuGfcCfcAfaacAfcAfuUfuUfcsasa | 116 | Hs |
| AD-62957.2 | GfsgsCfuGfuUfuCfCfAfaGfaUfcUfgAfcAfL96 | 46 | usGfsuCfaGfaUfcUfuggAfaAfcAfgCfcsasa | 117 | Hs |
| AD-62962.2 | UfscsCfaAfcAfaAfAfUfaGfcCfaCfcCfcUfL96 | 47 | asGfsgGfgUfgGfcUfauuUfuGfuUfgGfasasa | 118 | Hs |
| AD-62967.2 | GfsusCfuUfcUfgUfUfUfaGfaUfuUfcCfuUfL96 | 48 | asAfsgGfaAfaUfcUfaaaCfaGfaAfgAfcsasg | 119 | Hs |
| AD-62972.2 | UfsgsGfaAfgGfgAfAfGfgUfaGfaAfgUfcUfL96 | 49 | asGfsaCfuUfcUfaCfcuuCfcCfuUfcCfascsa | 120 | Hs |
| AD-62937.2 | UfscsCfuUfuGfgCfUfGfuUfuCfcAfaGfaUfL96 | 50 | asUfscUfuGfgAfaAfcagCfcAfaAfgGfasusu | 121 | Hs |
| AD-62943.2 | CfsasUfcUfcUfcAfGfCfuGfgGfaUfgAfuAfL96 | 51 | usAfsuCfaUfcCfcAfgcuGfaGfaGfaUfgsgsg | 122 | Hs |
| AD-62948.2 | GfsgsGfgUfgCfcAfGfCfuAfcUfaUfuGfaUfL96 | 52 | asUfscAfaUfaGfuAfgcuGfgCfaCfcCfcsasu | 123 | Hs |
| AD-62953.2 | AfsusGfuGfuUfuGfGfGfcAfaCfgUfcAfuAfL96 | 53 | usAfsuGfaCfgUfuGfcccAfaAfcAfcAfususu | 124 | Hs |
| AD-62958.2 | CfsusGfuUfuAfgAfUfUfuCfcUfuAfaGfaAfL96 | 54 | usUfscUfuAfaGfgAfaauCfuAfaAfcAfgsasa | 125 | Hs |
| AD-62963.2 | AfsgsAfaAfgAfaAfUfGfgAfcUfuGfcAfuAfL96 | 55 | usAfsuGfcAfaGfuCfcauUfuCfuUfuCfusasg | 126 | Hs |
| AD-62968.2 | GfscsAfuCfcUfgGfAfAfaUfaUfaUfuAfaAfL96 | 56 | usUfsuAfaUfaUfaUfuucCfaGfgAfuGfcsasa | 127 | Hs |
| AD-62973.2 | CfscsUfgUfcAfgAfCfCfaUfgGfgAfaCfuAfL96 | 57 | usAfsgUfuCfcCfaUfgguCfuGfaCfaGfgscsu | 128 | Hs |
| AD-62938.2 | AfsasAfcAfuGfgUfGfUfgGfaUfgGfgAfuAfL96 | 58 | usAfsuCfcCfaUfcCfacaCfcAfuGfuUfusasa | 129 | Hs |
| AD-62974.2 | CfsusCfaGfgAfuGfAfAfaAfaUfuUfuGfaAfL96 | 59 | usUfscAfaAfaUfuUfuucAfuCfcUfgAfgsusu | 130 | Hs |
| AD-62978.2 | CfsasGfcAfuGfuAfUfUfaCfuUfgAfcAfaAfL96 | 60 | usUfsuGfuCfaAfgUfaauAfcAfuGfcUfgsasa | 131 | Hs |
| AD-62982.2 | UfsasUfgAfaCfaAfCfAfuGfcUfaAfaUfcAfL96 | 61 | usGfsaUfuUfaGfcAfuguUfgUfuCfaUfasasu | 132 | Hs |
| AD-62986.2 | AfsusAfuAfuCfcAfAfAfuGfuUfuUfaGfgAfL96 | 62 | usCfscUfaAfaAfcAfuuuGfgAfuAfuAfususc | 133 | Hs |
| AD-62990.2 | CfscsAfgAfuGfgAfAfGfcUfgUfaUfcCfaAfL96 | 63 | usUfsgGfaUfaCfaGfcuuCfcAfuCfuGfgsasa | 134 | Hs |
| AD-62994.2 | GfsasCfuUfuCfaUfCfCfuGfgAfaAfuAfuAfL96 | 64 | usAfsuAfuUfuCfcAfggaUfgAfaAfgUfcscsa | 135 | Hs |
| AD-62998.2 | CfscsCfcGfgCfuAfAfUfuUfgUfaUfcAfaUfL96 | 65 | asUfsuGfaUfaCfaAfauuAfgCfcGfgGfgsgsa | 136 | Hs |
| AD-63002.2 | UfsusAfaAfcAfuGfGfCfuUfgAfaUfgGfgAfL96 | 66 | usCfscCfaUfuCfaAfgccAfuGfuUfuAfascsa | 137 | Hs |
| AD-62975.2 | AfsasUfgUfgUfuUfAfGfaCfaAfcGfuCfaUfL96 | 67 | asUfsgAfcGfuUfgUfcuaAfaCfaCfaUfususu | 138 | Mm |
| AD-62979.2 | AfscsUfaAfaGfgAfAfGfaAfuUfcCfgGfuUfL96 | 68 | asAfscCfgGfaAfuUfcuuCfcUfuUfaGfusasu | 139 | Mm |
| AD-62983.2 | UfsasUfaUfcCfaAfAfUfgUfuUfuAfgGfaUfL96 | 69 | asUfscCfuAfaAfaCfauuUfgGfaUfaUfasusu | 140 | Mm |
| AD-62987.2 | GfsusGfcGfgAfaAfGfGfcAfcUfgAfuGfuUfL96 | 70 | asAfscAfuCfaGfuGfccuUfuCfcGfcAfcsasc | 141 | Mm |
| AD-62991.2 | UfsasAfaAfcAfgUfGfGfuUfcUfuAfaAfuUfL96 | 71 | asAfsuUfuAfaGfaAfccaCfuGfuUfuUfasasa | 142 | Mm |
| AD-62995.2 | AfsusGfaAfaAfaUfUfUfuGfaAfaCfcAfgUfL96 | 72 | asCfsuGfgUfuUfcAfaaaUfuUfuUfcAfuscsc | 143 | Mm |
| AD-62999.2 | AfsasCfaAfaAfuAfGfCfaAfuCfcCfuUfuUfL96 | 73 | asAfsaAfgGfgAfuUfgcuAfuUfuUfgUfusgsg | 144 | Mm |
| AD-63003.2 | CfsusGfaAfaCfaGfAfUfcUfgUfcGfaCfuUfL96 | 74 | asAfsgUfcGfaCfaGfaucUfgUfuUfcAfgscsa | 145 | Mm |
| AD-62976.2 | UfsusGfuUfgCfaAfAfGfgGfcAfuUfuUfgAfL96 | 75 | usCfsaAfaAfuGfcCfcuuUfgCfaAfcAfasusu | 146 | Mm |
| AD-62980.2 | CfsusCfaUfuGfuUfUfAfuUfaAfcCfuGfuAfL96 | 76 | usAfscAfgGfuUfaAfuaaAfcAfaUfgAfgsasu | 147 | Mm |
| AD-62984.2 | CfsasAfcAfaAfaUfAfGfcAfaUfcCfcUfuUfL96 | 77 | asAfsaGfgGfaUfuGfcuaUfuUfuGfuUfgsgsa | 148 | Mm |
| AD-62992.2 | CfsasUfuGfuUfuAfUfUfaAfcCfuGfuAfuUfL96 | 78 | asAfsuAfcAfgGfuUfaauAfaAfcAfaUfgsasg | 149 | Mm |
| AD-62996.2 | UfsasUfcAfgCfuGfGfGfaAfgAfuAfuCfaAfL96 | 79 | usUfsgAfuAfuCfuUfcccAfgCfuGfaUfasgsa | 150 | Mm |
| AD-63000.2 | UfsgsUfcCfuAfgGfAfAfcCfuUfuUfaGfaAfL96 | 80 | usUfscUfaAfaAfgGfuucCfuAfgGfaCfascsc | 151 | Mm |
| AD-63004.2 | UfscsCfaAfcAfaAfAfUfaGfcAfaUfcCfcUfL96 | 81 | asGfsgGfaUfuGfcUfauuUfuGfuUfgGfasasa | 152 | Mm |
| AD-62977.2 | GfsgsUfgUfgCfgGfAfAfaGfgCfaCfuGfaUfL96 | 82 | asUfscAfgUfgCfcUfuucCfgCfaCfaCfcscsc | 153 | Mm |
| AD-62981.2 | UfsusGfaAfaCfcAfGfUfaCfuUfuAfuCfaUfL96 | 83 | asUfsgAfuAfaAfgUfacuGfgUfuUfcAfasasa | 154 | Mm |
| AD-62985.2 | UfsasCfuUfcCfaAfAfGfuCfuAfuAfuAfuAfL96 | 84 | usAfsuAfuAfuAfgAfcuuUfgGfaAfgUfascsu | 155 | Mm |
| AD-62989.2 | UfscsCfuAfgGfaAfCfCfuUfuUfaGfaAfaUfL96 | 85 | asUfsuUfcUfaAfaAfgguUfcCfuAfgGfascsa | 156 | Mm |
| AD-62993.2 | CfsusCfcUfgAfgGfAfAfaAfuUfuUfgGfaAfL96 | 86 | usUfscCfaAfaAfuUfuucCfuCfaGfgAfgsasa | 157 | Mm |
| AD-62997.2 | GfscsUfcCfgGfaAfUfGfuUfgCfuGfaAfaUfL96 | 87 | asUfsuUfcAfgCfaAfcauUfcCfgGfaGfcsasu | 158 | Mm |
| AD-63001.2 | GfsusGfuUfuGfuGfGfGfgAfgAfcCfaAfuAfL96 | 88 | usAfsuUfgGfuCfuCfcccAfcAfaAfcAfcsasg | 159 | Mm |
| AD-62933.1 | GfsasAfuGfuGfaAfAfGfuCfaUfcGfaCfaAfL96 | 160 | usUfsgUfcGfaUfgAfcuuUfcAfcAfuUfcsusg | 277 | |
| AD-65630.1 | Y44gsasAfuGfuGfaAfAfGfuCfaUfcGfaCfaAfL96 | 161 | PusUfsgUfcGfaUfgAfcuuUfcAfcAfuUfcsusg | 278 | |
| AD-65636.1 | gsasauguGfaAfAfGfucauCfgacaaL96 | 162 | usUfsgUfcGfaUfgAfcuuUfcAfcAfuUfcsusg | 279 | |
| AD-65642.1 | gsasauguGfaAfAfGfucaucgacaaL96 | 163 | usUfsgUfcGfaUfgAfcuuUfcAfcAfuUfcsusg | 280 | |
| AD-65647.1 | gsasauguGfaaAfGfucaucgacaaL96 | 164 | usUfsgUfcGfaUfgAfcuuUfcAfcAfuUfcsusg | 281 | |
| AD-65652.1 | gsasauguGfaaaGfucaucGfacaaL96 | 165 | usUfsgUfcGfaUfgAfcuuUfcAfcAfuUfcsusg | 282 | |
| AD-65657.1 | gsasaugugaaaGfucaucGfacaaL96 | 166 | usUfsgUfcGfaUfgAfcuuUfcAfcAfuUfcsusg | 283 | |
| AD-65662.1 | gsasauguGfaaaGfucaucgacaaL96 | 167 | usUfsgUfcGfaUfgAfcuuUfcAfcAfuUfcsusg | 284 | |
| AD-65625.1 | AfsusGfuGfaAfAfGfuCfaUfcGfaCfaAfL96 | 168 | usUfsgUfcGfaUfgAfcuuUfcAfcAfususc | 285 | |
| AD-65631.1 | asusguGfaAfAfGfucaucgacaaL96 | 169 | usUfsgucGfaugacuuUfcAfcaususc | 286 | |
| AD-65637.1 | GfsasAfuGfuGfaAfAfGfuCfaUfcGfaCfaAfL96 | 170 | usUfsgucGfaUfgAfcuuUfcAfcauucsusg | 287 | |
| AD-65643.1 | GfsasAfuGfuGfaAfAfGfuCfaUfcGfaCfaAfL96 | 171 | usUfsgucGfaUfGfacuuUfcAfcauucsusg | 288 | |
| AD-65648.1 | GfsasAfuGfuGfaAfAfGfuCfaUfcGfaCfaAfL96 | 172 | usUfsgucGfaugacuuUfcAfcauucsusg | 289 | |
| AD-65653.1 | GfsasAfuGfuGfaAfAfGfuCfaUfcGfaCfaAfL96 | 173 | usUfsgucGfaugacuuUfcacauucsusg | 290 | |
| AD-65658.1 | GfsasAfuGfuGfaAfAfGfuCfaUfcGfaCfaAfL96 | 174 | usUfsgucgaugacuuUfcacauucsusg | 291 | |
| AD-65663.1 | gsasauguGfaAfAfGfucaucgacaaL96 | 175 | usUfsgucGfaUfgAfcuuUfcAfcauucsusg | 292 | |
| AD-65626.1 | gsasauguGfaAfAfGfucaucgacaaL96 | 176 | usUfsgucGfaUfGfacuuUfcAfcauucsusg | 293 | |
| AD-65638.1 | gsasauguGfaaAfGfucaucgacaaL96 | 177 | usUfsgucGfaUfgAfcuuUfcAfcauucsusg | 294 | |
| AD-65644.1 | gsasauguGfaaAfGfucaucgacaaL96 | 178 | usUfsgucGfaUfGfacuuUfcAfcauucsusg | 295 | |
| AD-65649.1 | gsasauguGfaaAfGfucaucgacaaL96 | 179 | usUfsgucGfaugacuuUfcAfcauucsusg | 296 | |
| AD-65654.1 | gsasaugugaaagucau(Cgn)gacaaL96 | 180 | usUfsgUfcGfaUfgAfcuuUfcAfcAfuUfcsusg | 297 | |
| AD-65659.1 | gsasaugdTgaaagucau(Cgn)gacaaL96 | 181 | usUfsgUfcGfaUfgAfcuuUfcAfcAfuUfcsusg | 298 | |
| AD-65627.1 | gsasaudGugaaadGucau(Cgn)gacaaL96 | 182 | usUfsgUfcGfaUfgAfcuuUfcAfcAfuUfcsusg | 299 | |
| AD-65633.1 | gsasaugdTgaaadGucau(Cgn)gacaaL96 | 183 | usUfsgUfcGfaUfgAfcuuUfcAfcAfuUfcsusg | 300 | |
| AD-65639.1 | gsasaugudGaaadGucau(Cgn)gacaaL96 | 184 | usUfsgUfcGfaUfgAfcuuUfcAfcAfuUfcsusg | 301 | |
| AD-65645.1 | gsasaugugaaadGucaucdGacaaL96 | 185 | usUfsgUfcGfaUfgAfcuuUfcAfcAfuUfcsusg | 302 | |
| AD-65650.1 | gsasaugugaaadGucaucdTacaaL96 | 186 | usUfsgUfcGfaUfgAfcuuUfcAfcAfuUfcsusg | 303 | |
| AD-65655.1 | gsasaugugaaadGucaucY34acaaL96 | 187 | usUfsgUfcGfaUfgAfcuuUfcAfcAfuUfcsusg | 304 | |
| AD-65660.1 | gsasaugugaaadGucadTcdTacaaL96 | 188 | usUfsgUfcGfaUfgAfcuuUfcAfcAfuUfcsusg | 305 | |
| AD-65665.1 | gsasaugugaaadGucaucdGadCaaL96 | 189 | usUfsgUfcGfaUfgAfcuuUfcAfcAfuUfcsusg | 306 | |
| AD-65628.1 | gsasaugugaaadGucaucdTadCaaL96 | 190 | usUfsgUfcGfaUfgAfcuuUfcAfcAfuUfcsusg | 307 | |
| AD-65634.1 | gsasaugugaaadGucaucY34adCaaL96 | 191 | usUfsgUfcGfaUfgAfcuuUfcAfcAfuUfcsusg | 308 | |
| AD-65646.1 | GfsasAfuGfuGfaAfAfGfuCfaUfcGfaCfaAfL96 | 192 | usdTsgucgaugdAcuudTcacauucsusg | 309 | |
| AD-65656.1 | GfsasAfuGfuGfaAfAfGfuCfaUfcGfaCfaAfL96 | 193 | usUsgucgaugacuudTcacauucsusg | 310 | |
| AD-65661.1 | GfsasAfuGfuGfaAfAfGfuCfaUfcGfaCfaAfL96 | 194 | usdTsgucdGaugacuudTcacauucsusg | 311 | |
| AD-65666.1 | GfsasAfuGfuGfaAfAfGfuCfaUfcGfaCfaAfL96 | 195 | usUsgucdGaugacuudTcacauucsusg | 312 | |
| AD-65629.1 | GfsasAfuGfuGfaAfAfGfuCfaUfcGfaCfaAfL96 | 196 | usdTsgucgaugacuudTcdAcauucsusg | 313 | |
| AD-65635.1 | GfsasAfuGfuGfaAfAfGfuCfaUfcGfaCfaAfL96 | 197 | usdTsgucdGaugacuudTcdAcauucsusg | 314 | |
| AD-65641.1 | gsasaugugaaadGucau(Cgn)gacaaL96 | 198 | usdTsgucgaugdAcuudTcacauucsusg | 315 | |
| AD-62994.1 | GfsasCfuUfuCfaUfCfCfuGfgAfaAfuAfuAfL96 | 199 | usAfsuAfuUfuCfcAfggaUfgAfaAfgUfcscsa | 316 | |
| AD-65595.1 | gsascuuuCfaUfCfCfuggaAfauauaL96 | 200 | usAfsuAfuUfuCfcAfggaUfgAfaAfgUfcscsa | 317 | |
| AD-65600.1 | gsascuuuCfaUfCfCfuggaaauauaL96 | 201 | usAfsuAfuUfuCfcAfggaUfgAfaAfgUfcscsa | 318 | |
| AD-65610.1 | gsascuuuCfaucCfuggaaAfuauaL96 | 202 | usAfsuAfuUfuCfcAfggaUfgAfaAfgUfcscsa | 319 | |
| AD-65615.1 | gsascuuucaucCfuggaaAfuauaL96 | 203 | usAfsuAfuUfuCfcAfggaUfgAfaAfgUfcscsa | 320 | |
| AD-65620.1 | gsascuuuCfaucCfuggaaauauaL96 | 204 | usAfsuAfuUfuCfcAfggaUfgAfaAfgUfcscsa | 321 | |
| AD-65584.1 | CfsusUfuCfaUfCfCfuGfgAfaAfuAfuAfL96 | 205 | usAfsuAfuUfuCfcAfggaUfgAfaAfgsusc | 322 | |
| AD-65590.1 | csusuuCfaUfCfCfuggaaauauaL96 | 206 | usAfsuauUfuccaggaUfgAfaagsusc | 323 | |
| AD-65596.1 | GfsasCfuUfuCfaUfCfCfuGfgAfaAfuAfuAfL96 | 207 | usAfsuauUfuCfcAfggaUfgAfaagucscsa | 324 | |
| AD-65601.1 | GfsasCfuUfuCfaUfCfCfuGfgAfaAfuAfuAfL96 | 208 | usAfsuauUfuCfCfaggaUfgAfaagucscsa | 325 | |
| AD-65606.1 | GfsasCfuUfuCfaUfCfCfuGfgAfaAfuAfuAfL96 | 209 | usAfsuauUfuccaggaUfgAfaagucscsa | 326 | |
| AD-65611.1 | GfsasCfuUfuCfaUfCfCfuGfgAfaAfuAfuAfL96 | 210 | usAfsuauUfuccaggaUfgaaagucscsa | 327 | |
| AD-65616.1 | GfsasCfuUfuCfaUfCfCfuGfgAfaAfuAfuAfL96 | 211 | usAfsuauuuccaggaUfgaaagucscsa | 328 | |
| AD-65621.1 | gsascuuuCfaUfCfCfuggaaauauaL96 | 212 | usAfsuauUfuCfcAfggaUfgAfaagucscsa | 329 | |
| AD-65585.1 | gsascuuuCfaUfCfCfuggaaauauaL96 | 213 | usAfsuauUfuCfCfaggaUfgAfaagucscsa | 330 | |
| AD-65591.1 | gsascuuuCfaUfCfCfuggaaauauaL96 | 214 | usAfsuauUfuccaggaUfgAfaagucscsa | 331 | |
| AD-65597.1 | gsascuuuCfauCfCfuggaaauauaL96 | 215 | usAfsuauUfuCfcAfggaUfgAfaagucscsa | 332 | |
| AD-65602.1 | gsascuuuCfauCfCfuggaaauauaL96 | 216 | usAfsuauUfuCfCfaggaUfgAfaagucscsa | 333 | |
| AD-65607.1 | gsascuuuCfauCfCfuggaaauauaL96 | 217 | usAfsuauUfuccaggaUfgAfaagucscsa | 334 | |
| AD-65612.1 | gsascuuucauccuggaa(Agn)uauaL96 | 218 | usAfsuAfuUfuCfcAfggaUfgAfaAfgUfcscsa | 335 | |
| AD-65622.1 | gsascuuucaucdCuggaa(Agn)uauaL96 | 219 | usAfsuAfuUfuCfcAfggaUfgAfaAfgUfcscsa | 336 | |
| AD-65586.1 | gsascudTucaucdCuggaa(Agn)uauaL96 | 220 | usAfsuAfuUfuCfcAfggaUfgAfaAfgUfcscsa | 337 | |
| AD-65592.1 | gsascuudTcaucdCuggaa(Agn)uauaL96 | 221 | usAfsuAfuUfuCfcAfggaUfgAfaAfgUfcscsa | 338 | |
| AD-65598.1 | gsascuuudCaucdCuggaa(Agn)uauaL96 | 222 | usAfsuAfuUfuCfcAfggaUfgAfaAfgUfcscsa | 339 | |
| AD-65603.1 | gsascuuucaucdCuggaadAuauaL96 | 223 | usAfsuAfuUfuCfcAfggaUfgAfaAfgUfcscsa | 340 | |
| AD-65608.1 | gsascuuucaucdCuggaadTuauaL96 | 224 | usAfsuAfuUfuCfcAfggaUfgAfaAfgUfcscsa | 341 | |
| AD-65613.1 | gsascuuucaucdCuggaaY34uauaL96 | 225 | usAfsuAfuUfuCfcAfggaUfgAfaAfgUfcscsa | 342 | |
| AD-65618.1 | gsascuuucaucdCuggdAadTuauaL96 | 226 | usAfsuAfuUfuCfcAfggaUfgAfaAfgUfcscsa | 343 | |
| AD-65623.1 | gsascuuucaucdCuggaadTudAuaL96 | 227 | usAfsuAfuUfuCfcAfggaUfgAfaAfgUfcscsa | 344 | |
| AD-65587.1 | gsascuuucaucdCuggaa(Agn)udAuaL96 | 228 | usAfsuAfuUfuCfcAfggaUfgAfaAfgUfcscsa | 345 | |
| AD-65593.1 | gsascuudTcaucdCuggaadAudAuaL96 | 229 | usAfsuAfuUfuCfcAfggaUfgAfaAfgUfcscsa | 346 | |
| AD-65599.1 | GfsasCfuUfuCfaUfCfCfuGfgAfaAfuAfuAfL96 | 230 | usdAsuauuuccdAggadTgaaagucscsa | 347 | |
| AD-65604.1 | GfsasCfuUfuCfaUfCfCfuGfgAfaAfuAfuAfL96 | 231 | usdAsuauuuccaggadTgaaagucscsa | 348 | |
| AD-65609.1 | GfsasCfuUfuCfaUfCfCfuGfgAfaAfuAfuAfL96 | 232 | usAsuauuuccaggadTgaaagucscsa | 349 | |
| AD-65614.1 | GfsasCfuUfuCfaUfCfCfuGfgAfaAfuAfuAfL96 | 233 | usdAsuaudTuccaggadTgaaagucscsa | 350 | |
| AD-65619.1 | GfsasCfuUfuCfaUfCfCfuGfgAfaAfuAfuAfL96 | 234 | usAsuaudTuccaggadTgaaagucscsa | 351 | |
| AD-65624.1 | GfsasCfuUfuCfaUfCfCfuGfgAfaAfuAfuAfL96 | 235 | usdAsuauuuccaggadTgdAaagucscsa | 352 | |
| AD-65588.1 | GfsasCfuUfuCfaUfCfCfuGfgAfaAfuAfuAfL96 | 236 | usdAsuaudTuccaggadTgdAaagucscsa | 353 | |
| AD-65594.1 | gsascuuucaucdCuggaa(Agn)uauaL96 | 237 | usdAsuauuuccdAggadTgaaagucscsa | 354 | |
| AD-68309.1 | asgsaaagGfuGfUfUfcaagaugucaL96 | 238 | usGfsacaUfcUfUfgaacAfcCfuuucuscsc | 355 | |
| AD-68303.1 | csasuccuGfgAfAfAfuauauuaacuL96 | 239 | asGfsuuaAfuAfUfauuuCfcAfggaugsasa | 356 | |
| AD-65626.5 | gsasauguGfaAfAfGfucaucgacaaL96 | 240 | usUfsgucGfaUfGfacuuUfcAfcauucsusg | 357 | |
| AD-68295.1 | asgsugcaCfaAfUfAfuuuucccauaL96 | 241 | usAfsuggGfaAfAfauauUfgUfgcacusgsu | 358 | |
| AD-68273.1 | gsasaaguCfaUfCfGfacaagacauuL96 | 242 | asAfsuguCfuUfGfucgaUfgAfcuuucsasc | 359 | |
| AD-68297.1 | asasugugAfaAfGfUfcaucgacaaaL96 | 243 | usUfsuguCfgAfUfgacuUfuCfacauuscsu | 360 | |
| AD-68287.1 | csusggaaAfuAfUfAfuuaacuguuaL96 | 244 | usAfsacaGfuUfAfauauAfuUfuccagsgsa | 361 | |
| AD-68300.1 | asusuuucCfcAfUfCfuguauuauuuL96 | 245 | asAfsauaAfuAfCfagauGfgGfaaaausasu | 362 | |
| AD-68306.1 | usgsucguUfcUfUfUfuccaacaaaaL96 | 246 | usUfsuugUfuGfGfaaaaGfaAfcgacascsc | 363 | |
| AD-68292.1 | asusccugGfaAfAfUfauauuaacuaL96 | 247 | usAfsguuAfaUfAfuauuUfcCfaggausgsa | 364 | |
| AD-68298.1 | gscsauuuUfgAfGfAfggugaugauaL96 | 248 | usAfsucaUfcAfCfcucuCfaAfaaugescsc | 365 | |
| AD-68277.1 | csasggggGfaGfAfAfagguguucaaL96 | 249 | usUfsgaaCfaCfCfuuucUfcCfcccugsgsa | 366 | |
| AD-68289.1 | gsgsaaauAfuAfUfUfaacuguuaaaL96 | 250 | usUfsuaaCfaGfUfuaauAfuAfuuuccsasg | 367 | |
| AD-68272.1 | csasuuggUfgAfGfGfaaaaauccuuL96 | 251 | asAfsggaUfuUfUfuccuCfaCfcaaugsusc | 368 | |
| AD-68282.1 | gsgsgagaAfaGfGfUfguucaagauaL96 | 252 | usAfsucuUfgAfAfcaccUfuUfcucccscsc | 369 | |
| AD-68285.1 | gsgscauuUfuGfAfGfaggugaugauL96 | 253 | asUfscauCfaCfCfucucAfaAfaugccscsu | 370 | |
| AD-68290.1 | usascaaaGfgGfUfGfucguucuuuuL96 | 254 | asAfsaagAfaCfGfacacCfcUfuuguasusu | 371 | |
| AD-68296.1 | usgsggauCfuUfGfGfugucgaaucaL96 | 255 | usGfsauuCfgAfCfaccaAfgAfucccasusu | 372 | |
| AD-68288.1 | csusgacaGfuGfCfAfcaauauuuuaL96 | 256 | usAfsaaaUfaUfUfgugcAfcUfgucagsasu | 373 | |
| AD-68299.1 | csasgugcAfcAfAfUfauuuucccauL96 | 257 | asUfsgggAfaAfAfuauuGfuGfcacugsusc | 374 | |
| AD-68275.1 | ascsuuuuCfaAfUfGfgguguccuaaL96 | 258 | usUfsaggAfcAfCfccauUfgAfaaaguscsa | 375 | |
| AD-68274.1 | ascsauugGfuGfAfGfgaaaaauccuL96 | 259 | asGfsgauUfuUfUfccucAfcCfaauguscsu | 376 | |
| AD-68294.1 | ususgcuuUfuGfAfCfuuuucaaugaL96 | 260 | usCfsauuGfaAfAfagucAfaAfagcaasusg | 377 | |
| AD-68302.1 | csasuuuuGfaGfAfGfgugaugaugaL96 | 261 | usCfsaucAfuCfAfccucUfcAfaaaugscsc | 378 | |
| AD-68279.1 | ususgacuUfuUfCfAfaugggugucaL96 | 262 | usGfsacaCfcCfAfuugaAfaAfgucaasasa | 379 | |
| AD-68304.1 | csgsacuuCfuGfUfUfuuaggacagaL96 | 263 | usCfsuguCfcUfAfaaacAfgAfagucgsasc | 380 | |
| AD-68286.1 | csuscugaGfuGfGfGfugccagaauaL96 | 264 | usAfsuucUfgGfCfacccAfcUfcagagscsc | 381 | |
| AD-68291.1 | gsgsgugcCfaGfAfAfugugaaaguaL96 | 265 | usAfscuuUfcAfCfauucUfgGfcacccsasc | 382 | |
| AD-68283.1 | uscsaaugGfgUfGfUfccuaggaacaL96 | 266 | usGfsuucCfuAfGfgacaCfcCfauugasasa | 383 | |
| AD-68280.1 | asasagucAfuCfGfAfcaagacauuaL96 | 267 | usAfsaugUfcUfUfgucgAfuGfacuuuscsa | 384 | |
| AD-68293.1 | asusuuugAfgAfGfGfugaugaugcaL96 | 268 | usGfscauCfaUfCfaccuCfuCfaaaausgsc | 385 | |
| AD-68276.1 | asuscgacAfaGfAfCfauuggugagaL96 | 269 | usCfsucaCfcAfAfugucUfuGfucgausgsa | 386 | |
| AD-68308.1 | gsgsugccAfgAfAfUfgugaaagucaL96 | 270 | usGfsacuUfuCfAfcauuCfuGfgcaccscsa | 387 | |
| AD-68278.1 | gsascaguGfcAfCfAfauauuuuccaL96 | 271 | usGfsgaaAfaUfAfuuguGfcAfcugucsasg | 388 | |
| AD-68307.1 | ascsaaagAfgAfCfAfcugugcagaaL96 | 272 | usUfscugCfaCfAfguguCfuCfuuuguscsa | 389 | |
| AD-68284.1 | ususuucaAfuGfGfGfuguccuaggaL96 | 273 | usCfscuaGfgAfCfacccAfuUfgaaaasgsu | 390 | |
| AD-68301.1 | cscsguuuCfcAfAfGfaucugacaguL96 | 274 | asCfsuguCfaGfAfucuuGfgAfaacggscsc | 391 | |
| AD-68281.1 | asgsggggAfgAfAfAfgguguucaaaL96 | 275 | usUfsugaAfcAfCfcuuuCfuCfccccusgsg | 392 | |
| AD-68305.1 | asgsucauCfgAfCfAfagacauugguL96 | 276 | asCfscaaUfgUfCfuuguCfgAfugacususu | 393 | |

TABLE 6
Unmodified Human/Mouse/Cyno/Rat, Human/Mouse/Cyno, and Human/Cyno Cross-Reactive HAO1 iRNA Sequences

| | SEQ | | SEQ | | |
|---|---|---|---|---|---|
| Duplex | ID | | ID | | Position in |
| Name | NO: | Sense Strand Sequence 5′ to 3′ | NO: | Antisense Strand Sequence 5′ to 3′ | NM_017545.2 |
| AD-62933 | 394 | GAAUGUGAAAGUCAUCGACAA | 443 | UUGUCGAUGACUUUCACAUUCUG | 1072-1094 |
| AD-62939 | 395 | UUUUCAAUGGGUGUCCUAGGA | 444 | UCCUAGGACACCCAUUGAAAAGU | 1302-1324 |
| AD-62944 | 396 | GAAAGUCAUCGACAAGACAUU | 445 | AAUGUCUUGUCGAUGACUUUCAC | 1078-1100 |
| AD-62949 | 397 | UCAUCGACAAGACAUUGGUGA | 446 | UCACCAAUGUCUUGUCGAUGACU | 1083-1105 |
| AD-62954 | 398 | UUUCAAUGGGUGUCCUAGGAA | 447 | UUCCUAGGACACCCAUUGAAAAG | 1303-1325 |
| AD-62959 | 399 | AAUGGGUGUCCUAGGAACCUU | 448 | AAGGUUCCUAGGACACCCAUUGA | 1307-1329 |
| AD-62964 | 400 | GACAGUGCACAAUAUUUUCCA | 449 | UGGAAAAUAUUGUGCACUGUCAG | 1134-1156_C21A |
| AD-62969 | 401 | ACUUUUCAAUGGGUGUCCUAA | 450 | UUAGGACACCCAUUGAAAAGUCA | 1300-1322_G21A |
| AD-62934 | 402 | AAGUCAUCGACAAGACAUUGA | 451 | UCAAUGUCUUGUCGAUGACUUUC | 1080-1102_G21A |
| AD-62940 | 403 | AUCGACAAGACAUUGGUGAGA | 452 | UCUCACCAAUGUCUUGUCGAUGA | 1085-1107_G21A |
| AD-62945 | 404 | GGGAGAAAGGUGUUCAAGAUA | 453 | UAUCUUGAACACCUUUCUCCCCC | 996-1018_G21A |
| AD-62950 | 405 | CUUUUCAAUGGGUGUCCUAGA | 454 | UCUAGGACACCCAUUGAAAAGUC | 1301-1323_G21A |
| AD-62955 | 406 | UCAAUGGGUGUCCUAGGAACA | 455 | UGUUCCUAGGACACCCAUUGAAA | 1305-1327_C21A |
| AD-62960 | 407 | UUGACUUUUCAAUGGGUGUCA | 456 | UGACACCCAUUGAAAAGUCAAAA | 1297-1319_C21A |
| AD-62965 | 408 | AAAGUCAUCGACAAGACAUUA | 457 | UAAUGUCUUGUCGAUGACUUUCA | 1079-1101_G21A |
| AD-62970 | 409 | CAGGGGGAGAAAGGUGUUCAA | 458 | UUGAACACCUUUCUCCCCCUGGA | 992-1014 |
| AD-62935 | 410 | CAUUGGUGAGGAAAAAUCCUU | 459 | AAGGAUUUUUCCUCACCAAUGUC | 1095-1117 |
| AD-62941 | 411 | ACAUUGGUGAGGAAAAAUCCU | 460 | AGGAUUUUUCCUCACCAAUGUCU | 1094-1116 |
| AD-62946 | 412 | AGGGGGAGAAAGGUGUUCAAA | 461 | UUUGAACACCUUUCUCCCCCUGG | 993-1015_G21A |
| AD-62974 | 413 | CUCAGGAUGAAAAAUUUUGAA | 462 | UUCAAAAUUUUUCAUCCUGAGUU | 563-585 |
| AD-62978 | 414 | CAGCAUGUAUUACUUGACAAA | 463 | UUUGUCAAGUAAUACAUGCUGAA | 1173-1195 |
| AD-62982 | 415 | UAUGAACAACAUGCUAAAUCA | 464 | UGAUUUAGCAUGUUGUUCAUAAU | 53-75 |
| AD-62986 | 416 | AUAUAUCCAAAUGUUUUAGGA | 465 | UCCUAAAACAUUUGGAUAUAUUC | 1679-1701 |
| AD-62990 | 417 | CCAGAUGGAAGCUGUAUCCAA | 466 | UUGGAUACAGCUUCCAUCUGGAA | 156-178 |
| AD-62994 | 418 | GACUUUCAUCCUGGAAAUAUA | 467 | UAUAUUUCCAGGAUGAAAGUCCA | 1341-1363 |
| AD-62998 | 419 | CCCCGGCUAAUUUGUAUCAAU | 468 | AUUGAUACAAAUUAGCCGGGGGA | 29-51 |
| AD-63002 | 420 | UUAAACAUGGCUUGAAUGGGA | 469 | UCCCAUUCAAGCCAUGUUUAACA | 765-787 |
| AD-62975 | 421 | AAUGUGUUUAGACAACGUCAU | 470 | AUGACGUUGUCUAAACACAUUUU | 1388-1410 |
| AD-62979 | 422 | ACUAAAGGAAGAAUUCCGGUU | 471 | AACCGGAAUUCUUCCUUUAGUAU | 1027-1049 |
| AD-62983 | 423 | UAUAUCCAAAUGUUUUAGGAU | 472 | AUCCUAAAACAUUUGGAUAUAUU | 1680-1702 |
| AD-62987 | 424 | GUGCGGAAAGGCACUGAUGUU | 473 | AACAUCAGUGCCUUUCCGCACAC | 902-924 |
| AD-62991 | 425 | UAAAACAGUGGUUCUUAAAUU | 474 | AAUUUAAGAACCACUGUUUUAAA | 1521-1543 |
| AD-62995 | 426 | AUGAAAAAUUUUGAAACCAGU | 475 | ACUGGUUUCAAAAUUUUUCAUCC | 569-591 |
| AD-62999 | 427 | AACAAAAUAGCAAUCCCUUUU | 476 | AAAAGGGAUUGCUAUUUUGUUGG | 1264-1286 |
| AD-63003 | 428 | CUGAAACAGAUCUGUCGACUU | 477 | AAGUCGACAGAUCUGUUUCAGCA | 195-217 |
| AD-62976 | 429 | UUGUUGCAAAGGGCAUUUUGA | 478 | UCAAAAUGCCCUUUGCAACAAUU | 720-742 |
| AD-62980 | 430 | CUCAUUGUUUAUUAACCUGUA | 479 | UACAGGUUAAUAAACAAUGAGAU | 1483-1505 |
| AD-62984 | 431 | CAACAAAAUAGCAAUCCCUUU | 480 | AAAGGGAUUGCUAUUUUGUUGGA | 1263-1285 |
| AD-62992 | 432 | CAUUGUUUAUUAACCUGUAUU | 481 | AAUACAGGUUAAUAAACAAUGAG | 1485-1507 |
| AD-62996 | 433 | UAUCAGCUGGGAAGAUAUCAA | 482 | UUGAUAUCUUCCCAGCUGAUAGA | 670-692 |
| AD-63000 | 434 | UGUCCUAGGAACCUUUUAGAA | 483 | UUCUAAAAGGUUCCUAGGACACC | 1313-1335 |
| AD-63004 | 435 | UCCAACAAAAUAGCAAUCCCU | 484 | AGGGAUUGCUAUUUUGUUGGAAA | 1261-1283 |
| AD-62977 | 436 | GGUGUGCGGAAAGGCACUGAU | 485 | AUCAGUGCCUUUCCGCACACCCC | 899-921 |
| AD-62981 | 437 | UUGAAACCAGUACUUUAUCAU | 486 | AUGAUAAAGUACUGGUUUCAAAA | 579-601 |
| AD-62985 | 438 | UACUUCCAAAGUCUAUAUAUA | 487 | UAUAUAUAGACUUUGGAAGUACU | 75-97_G21A |
| AD-62989 | 439 | UCCUAGGAACCUUUUAGAAAU | 488 | AUUUCUAAAAGGUUCCUAGGACA | 1315-1337_G21U |
| AD-62993 | 440 | CUCCUGAGGAAAAUUUUGGAA | 489 | UUCCAAAAUUUUCCUCAGGAGAA | 603-625_G21A |
| AD-62997 | 441 | GCUCCGGAAUGUUGCUGAAAU | 490 | AUUUCAGCAACAUUCCGGAGCAU | 181-203_C21U |
| AD-63001 | 442 | GUGUUUGUGGGGAGACCAAUA | 491 | UAUUGGUCUCCCCACAAACACAG | 953-975_C21A |

TABLE 7
Additional Unmodified Human/Cyno/Mouse/Rat, Human/Mouse/Cyno, Human/Cyno, and Mouse/Rat HAO1 iRNA
Sequences

| | SEQ ID | Sense strand sequence | SEQ ID | Antisense strand sequence | Position in |
|---|---|---|---|---|---|
| Duplex Name | NO: | 5′ to 3′ | NO: | 5′ to 3′ | NM 017545.2 |
| AD-62933.2 | 394 | GAAUGUGAAAGUCAUCGACAA | 443 | UUGUCGAUGACUUUCACAUUCUG | 1072-1094 |
| AD-62939.2 | 395 | UUUUCAAUGGGUGUCCUAGGA | 444 | UCCUAGGACACCCAUUGAAAAGU | 1302-1324 |
| AD-62944.2 | 396 | GAAAGUCAUCGACAAGACAUU | 445 | AAUGUCUUGUCGAUGACUUUCAC | 1078-1100 |
| AD-62949.2 | 397 | UCAUCGACAAGACAUUGGUGA | 446 | UCACCAAUGUCUUGUCGAUGACU | 1083-1105 |
| AD-62954.2 | 398 | UUUCAAUGGGUGUCCUAGGAA | 447 | UUCCUAGGACACCCAUUGAAAAG | 1303-1325 |
| AD-62959.2 | 399 | AAUGGGUGUCCUAGGAACCUU | 448 | AAGGUUCCUAGGACACCCAUUGA | 1307-1329 |
| AD-62964.2 | 400 | GACAGUGCACAAUAUUUUCCA | 449 | UGGAAAAUAUUGUGCACUGUCAG | 1134-1156_C21A |
| AD-62969.2 | 401 | ACUUUUCAAUGGGUGUCCUAA | 450 | UUAGGACACCCAUUGAAAAGUCA | 1300-1322_G21A |
| AD-62934.2 | 402 | AAGUCAUCGACAAGACAUUGA | 451 | UCAAUGUCUUGUCGAUGACUUUC | 1080-1102_G21A |
| AD-62940.2 | 403 | AUCGACAAGACAUUGGUGAGA | 452 | UCUCACCAAUGUCUUGUCGAUGA | 1085-1107_G21A |
| AD-62945.2 | 404 | GGGAGAAAGGUGUUCAAGAUA | 453 | UAUCUUGAACACCUUUCUCCCCC | 996-1018_G21A |
| AD-62950.2 | 405 | CUUUUCAAUGGGUGUCCUAGA | 454 | UCUAGGACACCCAUUGAAAAGUC | 1301-1323_G21A |
| AD-62955.2 | 406 | UCAAUGGGUGUCCUAGGAACA | 455 | UGUUCCUAGGACACCCAUUGAAA | 1305-1327_C21A |
| AD-62960.2 | 407 | UUGACUUUUCAAUGGGUGUCA | 456 | UGACACCCAUUGAAAAGUCAAAA | 1297-1319_C21A |
| AD-62965.2 | 408 | AAAGUCAUCGACAAGACAUUA | 457 | UAAUGUCUUGUCGAUGACUUUCA | 1079-1101_G21A |
| AD-62970.2 | 409 | CAGGGGGAGAAAGGUGUUCAA | 458 | UUGAACACCUUUCUCCCCCUGGA | 992-1014 |
| AD-62935.2 | 410 | CAUUGGUGAGGAAAAAUCCUU | 459 | AAGGAUUUUUCCUCACCAAUGUC | 1095-1117 |
| AD-62941.2 | 411 | ACAUUGGUGAGGAAAAAUCCU | 460 | AGGAUUUUUCCUCACCAAUGUCU | 1094-1116 |
| AD-62946.2 | 412 | AGGGGGAGAAAGGUGUUCAAA | 461 | UUUGAACACCUUUCUCCCCCUGG | 993-1015_G21A |
| AD-62974.2 | 413 | CUCAGGAUGAAAAAUUUUGAA | 462 | UUCAAAAUUUUUCAUCCUGAGUU | 563-585 |
| AD-62978.2 | 414 | CAGCAUGUAUUACUUGACAAA | 463 | UUUGUCAAGUAAUACAUGCUGAA | 1173-1195 |
| AD-62982.2 | 415 | UAUGAACAACAUGCUAAAUCA | 464 | UGAUUUAGCAUGUUGUUCAUAAU | 53-75 |
| AD-62986.2 | 416 | AUAUAUCCAAAUGUUUUAGGA | 465 | UCCUAAAACAUUUGGAUAUAUUC | 1679-1701 |
| AD-62990.2 | 417 | CCAGAUGGAAGCUGUAUCCAA | 466 | UUGGAUACAGCUUCCAUCUGGAA | 156-178 |
| AD-62994.2 | 418 | GACUUUCAUCCUGGAAAUAUA | 467 | UAUAUUUCCAGGAUGAAAGUCCA | 1341-1363 |
| AD-62998.2 | 419 | CCCCGGCUAAUUUGUAUCAAU | 468 | AUUGAUACAAAUUAGCCGGGGGA | 29-51 |
| AD-63002.2 | 420 | UUAAACAUGGCUUGAAUGGGA | 469 | UCCCAUUCAAGCCAUGUUUAACA | 765-787 |
| AD-62975.2 | 421 | AAUGUGUUUAGACAACGUCAU | 470 | AUGACGUUGUCUAAACACAUUUU | 1388-1410 |
| AD-62979.2 | 422 | ACUAAAGGAAGAAUUCCGGUU | 471 | AACCGGAAUUCUUCCUUUAGUAU | 1027-1049 |
| AD-62983.2 | 423 | UAUAUCCAAAUGUUUUAGGAU | 472 | AUCCUAAAACAUUUGGAUAUAUU | 1680-1702 |
| AD-62987.2 | 424 | GUGCGGAAAGGCACUGAUGUU | 473 | AACAUCAGUGCCUUUCCGCACAC | 902-924 |
| AD-62991.2 | 425 | UAAAACAGUGGUUCUUAAAUU | 474 | AAUUUAAGAACCACUGUUUUAAA | 1521-1543 |
| AD-62995.2 | 426 | AUGAAAAAUUUUGAAACCAGU | 475 | ACUGGUUUCAAAAUUUUUCAUCC | 569-591 |
| AD-62999.2 | 427 | AACAAAAUAGCAAUCCCUUUU | 476 | AAAAGGGAUUGCUAUUUUGUUGG | 1264-1286 |
| AD-63003.2 | 428 | CUGAAACAGAUCUGUCGACUU | 477 | AAGUCGACAGAUCUGUUUCAGCA | 195-217 |
| AD-62976.2 | 429 | UUGUUGCAAAGGGCAUUUUGA | 478 | UCAAAAUGCCCUUUGCAACAAUU | 720-742 |
| AD-62980.2 | 430 | CUCAUUGUUUAUUAACCUGUA | 479 | UACAGGUUAAUAAACAAUGAGAU | 1483-1505 |
| AD-62984.2 | 431 | CAACAAAAUAGCAAUCCCUUU | 480 | AAAGGGAUUGCUAUUUUGUUGGA | 1263-1285 |
| AD-62992.2 | 432 | CAUUGUUUAUUAACCUGUAUU | 481 | AAUACAGGUUAAUAAACAAUGAG | 1485-1507 |
| AD-62996.2 | 433 | UAUCAGCUGGGAAGAUAUCAA | 482 | UUGAUAUCUUCCCAGCUGAUAGA | 670-692 |
| AD-63000.2 | 434 | UGUCCUAGGAACCUUUUAGAA | 483 | UUCUAAAAGGUUCCUAGGACACC | 1313-1335 |
| AD-63004.2 | 435 | UCCAACAAAAUAGCAAUCCCU | 484 | AGGGAUUGCUAUUUUGUUGGAAA | 1261-1283 |
| AD-62977.2 | 436 | GGUGUGCGGAAAGGCACUGAU | 485 | AUCAGUGCCUUUCCGCACACCCC | 899-921 |
| AD-62981.2 | 437 | UUGAAACCAGUACUUUAUCAU | 486 | AUGAUAAAGUACUGGUUUCAAAA | 579-601 |
| AD-62985.2 | 438 | UACUUCCAAAGUCUAUAUAUA | 487 | UAUAUAUAGACUUUGGAAGUACU | 75-97_G21A |
| AD-62989.2 | 439 | UCCUAGGAACCUUUUAGAAAU | 488 | AUUUCUAAAAGGUUCCUAGGACA | 1315-1337_G21U |
| AD-62993.2 | 440 | CUCCUGAGGAAAAUUUUGGAA | 489 | UUCCAAAAUUUUCCUCAGGAGAA | 603-625_G21A |
| AD-62997.2 | 441 | GCUCCGGAAUGUUGCUGAAAU | 490 | AUUUCAGCAACAUUCCGGAGCAU | 181-203_C21U |
| AD-63001.2 | 442 | GUGUUUGUGGGGAGACCAAUA | 491 | UAUUGGUCUCCCCACAAACACAG | 953-975_C21A |
| AD-62951.2 | 492 | AUGGUGGUAAUUUGUGAUUUU | 514 | AAAAUCACAAAUUACCACCAUCC | 1642-1664 |
| AD-62956.2 | 493 | GACUUGCAUCCUGGAAAUAUA | 515 | UAUAUUUCCAGGAUGCAAGUCCA | 1338-1360 |
| AD-62961.2 | 494 | GGAAGGGAAGGUAGAAGUCUU | 516 | AAGACUUCUACCUUCCCUUCCAC | 864-886 |
| AD-62966.2 | 495 | UGUCUUCUGUUUAGAUUUCCU | 517 | AGGAAAUCUAAACAGAAGACAGG | 1506-1528 |
| AD-62971.2 | 496 | CUUUGGCUGUUUCCAAGAUCU | 518 | AGAUCUUGGAAACAGCCAAAGGA | 1109-1131 |
| AD-62936.2 | 497 | AAUGUGUUUGGGCAACGUCAU | 519 | AUGACGUUGCCCAAACACAUUUU | 1385-1407 |
| AD-62942.2 | 498 | UGUGACUGUGGACACCCCUUA | 520 | UAAGGGGUGUCCACAGUCACAAA | 486-508 |
| AD-62947.2 | 499 | GAUGGGGUGCCAGCUACUAUU | 521 | AAUAGUAGCUGGCACCCCAUCCA | 814-836 |
| AD-62952.2 | 500 | GAAAAUGUGUUUGGGCAACGU | 522 | ACGUUGCCCAAACACAUUUUCAA | 1382-1404 |
| AD-62957.2 | 501 | GGCUGUUUCCAAGAUCUGACA | 523 | UGUCAGAUCUUGGAAACAGCCAA | 1113-1135 |
| AD-62962.2 | 502 | UCCAACAAAAUAGCCACCCCU | 524 | AGGGGUGGCUAUUUUGUUGGAAA | 1258-1280 |
| AD-62967.2 | 503 | GUCUUCUGUUUAGAUUUCCUU | 525 | AAGGAAAUCUAAACAGAAGACAG | 1507-1529 |
| AD-62972.2 | 504 | UGGAAGGGAAGGUAGAAGUCU | 526 | AGACUUCUACCUUCCCUUCCACA | 863-885 |
| AD-62937.2 | 505 | UCCUUUGGCUGUUUCCAAGAU | 527 | AUCUUGGAAACAGCCAAAGGAUU | 1107-1129 |
| AD-62943.2 | 506 | CAUCUCUCAGCUGGGAUGAUA | 528 | UAUCAUCCCAGCUGAGAGAUGGG | 662-684 |
| AD-62948.2 | 507 | GGGGUGCCAGCUACUAUUGAU | 529 | AUCAAUAGUAGCUGGCACCCCAU | 817-839 |
| AD-62953.2 | 508 | AUGUGUUUGGGCAACGUCAUA | 530 | UAUGACGUUGCCCAAACACAUUU | 1386-1408_C21A |
| AD-62958.2 | 509 | CUGUUUAGAUUUCCUUAAGAA | 531 | UUCUUAAGGAAAUCUAAACAGAA | 1512-1534_C21A |
| AD-62963.2 | 510 | AGAAAGAAAUGGACUUGCAUA | 532 | UAUGCAAGUCCAUUUCUUUCUAG | 1327-1349_C21A |
| AD-62968.2 | 511 | GCAUCCUGGAAAUAUAUUAAA | 533 | UUUAAUAUAUUUCCAGGAUGCAA | 1343-1365_C21A |
| AD-62973.2 | 512 | CCUGUCAGACCAUGGGAACUA | 534 | UAGUUCCCAUGGUCUGACAGGCU | 308-330_G21A |
| AD-62938.2 | 513 | AAACAUGGUGUGGAUGGGAUA | 535 | UAUCCCAUCCACACCAUGUUUAA | 763-785_C21A |
| AD-62933.1 | 536 | GAAUGUGAAAGUCAUCGACAA | 653 | UUGUCGAUGACUUUCACAUUCUG | 1072-1094 |
| AD-65630.1 | 537 | GAAUGUGAAAGUCAUCGACAA | 654 | UUGUCGAUGACUUUCACAUUCUG | 1072-1094 |
| AD-65636.1 | 538 | GAAUGUGAAAGUCAUCGACAA | 655 | UUGUCGAUGACUUUCACAUUCUG | 1072-1094 |
| AD-65642.1 | 539 | GAAUGUGAAAGUCAUCGACAA | 656 | UUGUCGAUGACUUUCACAUUCUG | 1072-1094 |
| AD-65647.1 | 540 | GAAUGUGAAAGUCAUCGACAA | 657 | UUGUCGAUGACUUUCACAUUCUG | 1072-1094 |
| AD-65652.1 | 541 | GAAUGUGAAAGUCAUCGACAA | 658 | UUGUCGAUGACUUUCACAUUCUG | 1072-1094 |
| AD-65657.1 | 542 | GAAUGUGAAAGUCAUCGACAA | 659 | UUGUCGAUGACUUUCACAUUCUG | 1072-1094 |
| AD-65662.1 | 543 | GAAUGUGAAAGUCAUCGACAA | 660 | UUGUCGAUGACUUUCACAUUCUG | 1072-1094 |
| AD-65625.1 | 544 | AUGUGAAAGUCAUCGACAA | 661 | UUGUCGAUGACUUUCACAUUC | 1072-1094 |
| AD-65631.1 | 545 | AUGUGAAAGUCAUCGACAA | 662 | UUGUCGAUGACUUUCACAUUC | 1072-1094 |
| AD-65637.1 | 546 | GAAUGUGAAAGUCAUCGACAA | 663 | UUGUCGAUGACUUUCACAUUCUG | 1072-1094 |
| AD-65643.1 | 547 | GAAUGUGAAAGUCAUCGACAA | 664 | UUGUCGAUGACUUUCACAUUCUG | 1072-1094 |
| AD-65648.1 | 548 | GAAUGUGAAAGUCAUCGACAA | 665 | UUGUCGAUGACUUUCACAUUCUG | 1072-1094 |
| AD-65653.1 | 549 | GAAUGUGAAAGUCAUCGACAA | 666 | UUGUCGAUGACUUUCACAUUCUG | 1072-1094 |
| AD-65658.1 | 550 | GAAUGUGAAAGUCAUCGACAA | 667 | UUGUCGAUGACUUUCACAUUCUG | 1072-1094 |
| AD-65663.1 | 551 | GAAUGUGAAAGUCAUCGACAA | 668 | UUGUCGAUGACUUUCACAUUCUG | 1072-1094 |
| AD-65626.1 | 552 | GAAUGUGAAAGUCAUCGACAA | 669 | UUGUCGAUGACUUUCACAUUCUG | 1072-1094 |
| AD-65638.1 | 553 | GAAUGUGAAAGUCAUCGACAA | 670 | UUGUCGAUGACUUUCACAUUCUG | 1072-1094 |
| AD-65644.1 | 554 | GAAUGUGAAAGUCAUCGACAA | 671 | UUGUCGAUGACUUUCACAUUCUG | 1072-1094 |
| AD-65649.1 | 555 | GAAUGUGAAAGUCAUCGACAA | 672 | UUGUCGAUGACUUUCACAUUCUG | 1072-1094 |
| AD-65654.1 | 556 | GAAUGUGAAAGUCAUCGACAA | 673 | UUGUCGAUGACUUUCACAUUCUG | 1072-1094 |
| AD-65659.1 | 557 | GAAUGTGAAAGUCAUCGACAA | 674 | UUGUCGAUGACUUUCACAUUCUG | 1072-1094 |
| AD-65627.1 | 558 | GAAUGUGAAAGUCAUCGACAA | 675 | UUGUCGAUGACUUUCACAUUCUG | 1072-1094 |
| AD-65633.1 | 559 | GAAUGTGAAAGUCAUCGACAA | 676 | UUGUCGAUGACUUUCACAUUCUG | 1072-1094 |
| AD-65639.1 | 560 | GAAUGUGAAAGUCAUCGACAA | 677 | UUGUCGAUGACUUUCACAUUCUG | 1072-1094 |
| AD-65645.1 | 561 | GAAUGUGAAAGUCAUCGACAA | 678 | UUGUCGAUGACUUUCACAUUCUG | 1072-1094 |
| AD-65650.1 | 562 | GAAUGUGAAAGUCAUCTACAA | 679 | UUGUCGAUGACUUUCACAUUCUG | 1072-1094 |
| AD-65655.1 | 563 | GAAUGUGAAAGUCAUCACAA | 680 | UUGUCGAUGACUUUCACAUUCUG | 1072-1094 |
| AD-65660.1 | 564 | GAAUGUGAAAGUCATCTACAA | 681 | UUGUCGAUGACUUUCACAUUCUG | 1072-1094 |
| AD-65665.1 | 565 | GAAUGUGAAAGUCAUCGACAA | 682 | UUGUCGAUGACUUUCACAUUCUG | 1072-1094 |
| AD-65628.1 | 566 | GAAUGUGAAAGUCAUCTACAA | 683 | UUGUCGAUGACUUUCACAUUCUG | 1072-1094 |
| AD-65634.1 | 567 | GAAUGUGAAAGUCAUCACAA | 684 | UUGUCGAUGACUUUCACAUUCUG | 1072-1094 |
| AD-65646.1 | 568 | GAAUGUGAAAGUCAUCGACAA | 685 | UTGUCGAUGACUUTCACAUUCUG | 1072-1094 |
| AD-65656.1 | 569 | GAAUGUGAAAGUCAUCGACAA | 686 | UUGUCGAUGACUUTCACAUUCUG | 1072-1094 |
| AD-65661.1 | 570 | GAAUGUGAAAGUCAUCGACAA | 687 | UTGUCGAUGACUUTCACAUUCUG | 1072-1094 |
| AD-65666.1 | 571 | GAAUGUGAAAGUCAUCGACAA | 688 | UUGUCGAUGACUUTCACAUUCUG | 1072-1094 |
| AD-65629.1 | 572 | GAAUGUGAAAGUCAUCGACAA | 689 | UTGUCGAUGACUUTCACAUUCUG | 1072-1094 |
| AD-65635.1 | 573 | GAAUGUGAAAGUCAUCGACAA | 690 | UTGUCGAUGACUUTCACAUUCUG | 1072-1094 |
| AD-65641.1 | 574 | GAAUGUGAAAGUCAUCGACAA | 691 | UTGUCGAUGACUUTCACAUUCUG | 1072-1094 |
| AD-62994.1 | 575 | GACUUUCAUCCUGGAAAUAUA | 692 | UAUAUUUCCAGGAUGAAAGUCCA | 1341-1363 |
| AD-65595.1 | 576 | GACUUUCAUCCUGGAAAUAUA | 693 | UAUAUUUCCAGGAUGAAAGUCCA | 1341-1363 |
| AD-65600.1 | 577 | GACUUUCAUCCUGGAAAUAUA | 694 | UAUAUUUCCAGGAUGAAAGUCCA | 1341-1363 |
| AD-65610.1 | 578 | GACUUUCAUCCUGGAAAUAUA | 695 | UAUAUUUCCAGGAUGAAAGUCCA | 1341-1363 |
| AD-65615.1 | 579 | GACUUUCAUCCUGGAAAUAUA | 696 | UAUAUUUCCAGGAUGAAAGUCCA | 1341-1363 |
| AD-65620.1 | 580 | GACUUUCAUCCUGGAAAUAUA | 697 | UAUAUUUCCAGGAUGAAAGUCCA | 1341-1363 |
| AD-65584.1 | 581 | CUUUCAUCCUGGAAAUAUA | 698 | UAUAUUUCCAGGAUGAAAGUC | 1341-1361 |
| AD-65590.1 | 582 | CUUUCAUCCUGGAAAUAUA | 699 | UAUAUUUCCAGGAUGAAAGUC | 1341-1361 |
| AD-65596.1 | 583 | GACUUUCAUCCUGGAAAUAUA | 700 | UAUAUUUCCAGGAUGAAAGUCCA | 1341-1363 |
| AD-65601.1 | 584 | GACUUUCAUCCUGGAAAUAUA | 701 | UAUAUUUCCAGGAUGAAAGUCCA | 1341-1363 |
| AD-65606.1 | 585 | GACUUUCAUCCUGGAAAUAUA | 702 | UAUAUUUCCAGGAUGAAAGUCCA | 1341-1363 |
| AD-65611.1 | 586 | GACUUUCAUCCUGGAAAUAUA | 703 | UAUAUUUCCAGGAUGAAAGUCCA | 1341-1363 |
| AD-65616.1 | 587 | GACUUUCAUCCUGGAAAUAUA | 704 | UAUAUUUCCAGGAUGAAAGUCCA | 1341-1363 |
| AD-65621.1 | 588 | GACUUUCAUCCUGGAAAUAUA | 705 | UAUAUUUCCAGGAUGAAAGUCCA | 1341-1363 |
| AD-65585.1 | 589 | GACUUUCAUCCUGGAAAUAUA | 706 | UAUAUUUCCAGGAUGAAAGUCCA | 1341-1363 |
| AD-65591.1 | 590 | GACUUUCAUCCUGGAAAUAUA | 707 | UAUAUUUCCAGGAUGAAAGUCCA | 1341-1363 |
| AD-65597.1 | 591 | GACUUUCAUCCUGGAAAUAUA | 708 | UAUAUUUCCAGGAUGAAAGUCCA | 1341-1363 |
| AD-65602.1 | 592 | GACUUUCAUCCUGGAAAUAUA | 709 | UAUAUUUCCAGGAUGAAAGUCCA | 1341-1363 |
| AD-65607.1 | 593 | GACUUUCAUCCUGGAAAUAUA | 710 | UAUAUUUCCAGGAUGAAAGUCCA | 1341-1363 |
| AD-65612.1 | 594 | GACUUUCAUCCUGGAAAUAUA | 711 | UAUAUUUCCAGGAUGAAAGUCCA | 1341-1363 |
| AD-65622.1 | 595 | GACUUUCAUCCUGGAAAUAUA | 712 | UAUAUUUCCAGGAUGAAAGUCCA | 1341-1363 |
| AD-65586.1 | 596 | GACUTUCAUCCUGGAAAUAUA | 713 | UAUAUUUCCAGGAUGAAAGUCCA | 1341-1363 |
| AD-65592.1 | 597 | GACUUTCAUCCUGGAAAUAUA | 714 | UAUAUUUCCAGGAUGAAAGUCCA | 1341-1363 |
| AD-65598.1 | 598 | GACUUUCAUCCUGGAAAUAUA | 715 | UAUAUUUCCAGGAUGAAAGUCCA | 1341-1363 |
| AD-65603.1 | 599 | GACUUUCAUCCUGGAAAUAUA | 716 | UAUAUUUCCAGGAUGAAAGUCCA | 1341-1363 |
| AD-65608.1 | 600 | GACUUUCAUCCUGGAATUAUA | 717 | UAUAUUUCCAGGAUGAAAGUCCA | 1341-1363 |
| AD-65613.1 | 601 | GACUUUCAUCCUGGAAUAUA | 718 | UAUAUUUCCAGGAUGAAAGUCCA | 1341-1363 |
| AD-65618.1 | 602 | GACUUUCAUCCUGGAATUAUA | 719 | UAUAUUUCCAGGAUGAAAGUCCA | 1341-1363 |
| AD-65623.1 | 603 | GACUUUCAUCCUGGAATUAUA | 720 | UAUAUUUCCAGGAUGAAAGUCCA | 1341-1363 |
| AD-65587.1 | 604 | GACUUUCAUCCUGGAAAUAUA | 721 | UAUAUUUCCAGGAUGAAAGUCCA | 1341-1363 |
| AD-65593.1 | 605 | GACUUTCAUCCUGGAAAUAUA | 722 | UAUAUUUCCAGGAUGAAAGUCCA | 1341-1363 |
| AD-65599.1 | 606 | GACUUUCAUCCUGGAAAUAUA | 723 | UAUAUUUCCAGGATGAAAGUCCA | 1341-1363 |
| AD-65604.1 | 607 | GACUUUCAUCCUGGAAAUAUA | 724 | UAUAUUUCCAGGATGAAAGUCCA | 1341-1363 |
| AD-65609.1 | 608 | GACUUUCAUCCUGGAAAUAUA | 725 | UAUAUUUCCAGGATGAAAGUCCA | 1341-1363 |
| AD-65614.1 | 609 | GACUUUCAUCCUGGAAAUAUA | 726 | UAUAUTUCCAGGATGAAAGUCCA | 1341-1363 |
| AD-65619.1 | 610 | GACUUUCAUCCUGGAAAUAUA | 727 | UAUAUTUCCAGGATGAAAGUCCA | 1341-1363 |
| AD-65624.1 | 611 | GACUUUCAUCCUGGAAAUAUA | 728 | UAUAUUUCCAGGATGAAAGUCCA | 1341-1363 |
| AD-65588.1 | 612 | GACUUUCAUCCUGGAAAUAUA | 729 | UAUAUTUCCAGGATGAAAGUCCA | 1341-1363 |
| AD-65594.1 | 613 | GACUUUCAUCCUGGAAAUAUA | 730 | UAUAUUUCCAGGATGAAAGUCCA | 1341-1363 |
| AD-68309.1 | 614 | AGAAAGGUGUUCAAGAUGUCA | 731 | UGACAUCUUGAACACCUUUCUCC | 1001-1022_C21A |
| AD-68303.1 | 615 | CAUCCUGGAAAUAUAUUAACU | 732 | AGUUAAUAUAUUUCCAGGAUGAA | 1349-1370 |
| AD-65626.5 | 616 | GAAUGUGAAAGUCAUCGACAA | 733 | UUGUCGAUGACUUUCACAUUCUG | 1072-1094 |
| AD-68295.1 | 617 | AGUGCACAAUAUUUUCCCAUA | 734 | UAUGGGAAAAUAUUGUGCACUGU | 1139-1160_C21A |
| AD-68273.1 | 618 | GAAAGUCAUCGACAAGACAUU | 735 | AAUGUCUUGUCGAUGACUUUCAC | 1080-1100 |
| AD-68297.1 | 619 | AAUGUGAAAGUCAUCGACAAA | 736 | UUUGUCGAUGACUUUCACAUUCU | 1075-1096_G21A |
| AD-68287.1 | 620 | CUGGAAAUAUAUUAACUGUUA | 737 | UAACAGUUAAUAUAUUUCCAGGA | 1353-1374 |
| AD-68300.1 | 621 | AUUUUCCCAUCUGUAUUAUUU | 738 | AAAUAAUACAGAUGGGAAAAUAU | 1149-1170 |
| AD-68306.1 | 622 | UGUCGUUCUUUUCCAACAAAA | 739 | UUUUGUUGGAAAAGAACGACACC | 1252-1273 |
| AD-68292.1 | 623 | AUCCUGGAAAUAUAUUAACUA | 740 | UAGUUAAUAUAUUUCCAGGAUGA | 1350-1371_G21A |
| AD-68298.1 | 624 | GCAUUUUGAGAGGUGAUGAUA | 741 | UAUCAUCACCUCUCAAAAUGCCC | 734-755_G21A |
| AD-68277.1 | 625 | CAGGGGGAGAAAGGUGUUCAA | 742 | UUGAACACCUUUCUCCCCCUGGA | 994-1014 |
| AD-68289.1 | 626 | GGAAAUAUAUUAACUGUUAAA | 743 | UUUAACAGUUAAUAUAUUUCCAG | 1355-1376 |
| AD-68272.1 | 627 | CAUUGGUGAGGAAAAAUCCUU | 744 | AAGGAUUUUUCCUCACCAAUGUC | 1097-1117 |
| AD-68282.1 | 628 | GGGAGAAAGGUGUUCAAGAUA | 745 | UAUCUUGAACACCUUUCUCCCCC | 998-1018_G21A |
| AD-68285.1 | 629 | GGCAUUUUGAGAGGUGAUGAU | 746 | AUCAUCACCUCUCAAAAUGCCCU | 733-754 |
| AD-68290.1 | 630 | UACAAAGGGUGUCGUUCUUUU | 747 | AAAAGAACGACACCCUUUGUAUU | 1243-1264 |
| AD-68296.1 | 631 | UGGGAUCUUGGUGUCGAAUCA | 748 | UGAUUCGACACCAAGAUCCCAUU | 783-804 |
| AD-68288.1 | 632 | CUGACAGUGCACAAUAUUUUA | 749 | UAAAAUAUUGUGCACUGUCAGAU | 1134-1155_C21A |
| AD-68299.1 | 633 | CAGUGCACAAUAUUUUCCCAU | 750 | AUGGGAAAAUAUUGUGCACUGUC | 1138-1159 |
| AD-68275.1 | 634 | ACUUUUCAAUGGGUGUCCUAA | 751 | UUAGGACACCCAUUGAAAAGUCA | 1302-1322_G21A |
| AD-68274.1 | 635 | ACAUUGGUGAGGAAAAAUCCU | 752 | AGGAUUUUUCCUCACCAAUGUCU | 1096-1116 |
| AD-68294.1 | 636 | UUGCUUUUGACUUUUCAAUGA | 753 | UCAUUGAAAAGUCAAAAGCAAUG | 1293-1314_G21A |
| AD-68302.1 | 637 | CAUUUUGAGAGGUGAUGAUGA | 754 | UCAUCAUCACCUCUCAAAAUGCC | 735-756_C21A |
| AD-68279.1 | 638 | UUGACUUUUCAAUGGGUGUCA | 755 | UGACACCCAUUGAAAAGUCAAAA | 1299-1319_C21A |
| AD-68304.1 | 639 | CGACUUCUGUUUUAGGACAGA | 756 | UCUGUCCUAAAACAGAAGUCGAC | 212-233 |
| AD-68286.1 | 640 | CUCUGAGUGGGUGCCAGAAUA | 757 | UAUUCUGGCACCCACUCAGAGCC | 1058-1079_G21A |
| AD-68291.1 | 641 | GGGUGCCAGAAUGUGAAAGUA | 758 | UACUUUCACAUUCUGGCACCCAC | 1066-1087_C21A |
| AD-68283.1 | 642 | UCAAUGGGUGUCCUAGGAACA | 759 | UGUUCCUAGGACACCCAUUGAAA | 1307-1327_C21A |
| AD-68280.1 | 643 | AAAGUCAUCGACAAGACAUUA | 760 | UAAUGUCUUGUCGAUGACUUUCA | 1081-1101_G21A |
| AD-68293.1 | 644 | AUUUUGAGAGGUGAUGAUGCA | 761 | UGCAUCAUCACCUCUCAAAAUGC | 736-757_C21A |
| AD-68276.1 | 645 | AUCGACAAGACAUUGGUGAGA | 762 | UCUCACCAAUGUCUUGUCGAUGA | 1087-1107_G21A |
| AD-68308.1 | 646 | GGUGCCAGAAUGUGAAAGUCA | 763 | UGACUUUCACAUUCUGGCACCCA | 1067-1088 |
| AD-68278.1 | 647 | GACAGUGCACAAUAUUUUCCA | 764 | UGGAAAAUAUUGUGCACUGUCAG | 1136-1156_C21A |
| AD-68307.1 | 648 | ACAAAGAGACACUGUGCAGAA | 765 | UUCUGCACAGUGUCUCUUUGUCA | 1191-1212_G21A |
| AD-68284.1 | 649 | UUUUCAAUGGGUGUCCUAGGA | 766 | UCCUAGGACACCCAUUGAAAAGU | 1304-1324 |
| AD-68301.1 | 650 | CCGUUUCCAAGAUCUGACAGU | 767 | ACUGUCAGAUCUUGGAAACGGCC | 1121-1142 |
| AD-68281.1 | 651 | AGGGGGAGAAAGGUGUUCAAA | 768 | UUUGAACACCUUUCUCCCCCUGG | 995-1015_G21A |
| AD-68305.1 | 652 | AGUCAUCGACAAGACAUUGGU | 769 | ACCAAUGUCUUGUCGAUGACUUU | 1083-1104 |

TABLE 8
Additional Human/Mouse/Cyno HAO1 Modified and Unmodified Sense Strand iRNA Sequences

| | | Unmodified sense strand sequence | |
|---|---|---|---|
| Duplex Name | Modified sense strand sequence 5′ to 3′ | 5′ to 3′ | SEQ ID NO: |
| AD-40257.1 | uucAAuGGGuGuccuAGGAdTsdT | UUCAAUGGGUGUCCUAGGA | 770 & 771 |
| AD-40257.2 | uucAAuGGGuGuccuAGGAdTsdT | UUCAAUGGGUGUCCUAGGA | 770 & 771 |
| AD-63102.1 | AcAAcuGGAGGGAcAucGudTsdT | ACAACUGGAGGGACAUCGU | 772 & 773 |
| AD-63102.2 | AcAAcuGGAGGGAcAucGudTsdT | ACAACUGGAGGGACAUCGU | 772 & 773 |
| AD-63102.3 | AcAAcuGGAGGGAcAucGudTsdT | ACAACUGGAGGGACAUCGU | 772 & 773 |

TABLE 9
Additional Human/Mouse/Cyno HAO1 Modified and Unmodified Antisense Strand iRNA Sequences

| | Modified antisense strand sequence 5′ | Unmodified antisense strand | |
|---|---|---|---|
| Duplex Name | to 3′ | sequence 5′ to 3′ | SEQ ID NO: |
| AD-40257.1 | UCCuAGGAcACCcAUUGAAdTsdT | UCCUAGGACACCCAUUGAA | 774 & 775 |
| AD-40257.2 | UCCuAGGAcACCcAUUGAAdTsdT | UCCUAGGACACCCAUUGAA | 774 & 775 |
| AD-63102.1 | ACGAUGUCCCUCcAGUUGUdTsdT | ACGAUGUCCCUCCAGUUGU | 776 & 777 |
| AD-63102.2 | ACGAUGUCCCUCcAGUUGUdTsdT | ACGAUGUCCCUCCAGUUGU | 776 & 777 |
| AD-63102.3 | ACGAUGUCCCUCcAGUUGUdTsdT | ACGAUGUCCCUCCAGUUGU | 776 & 777 |

TABLE 10
Additional Human/Cyno/Mouse/Rat and Human/Cyno/Rat HAO1 Modified Sense Strand iRNA Sequences

| Duplex Name | Modified sense strand sequence | SEQ ID NO: |
|---|---|---|
| AD-62989.2 | UfscsCfuAfgGfaAfCfCfuUfuUfaGfaAfaUfL96 | 778 |
| AD-62994.2 | GfsasCfuUfuCfaUfCfCfuGfgAfaAfuAfuAfL96 | 779 |
| AD-62933.2 | GfsasAfuGfuGfaAfAfGfuCfaUfcGfaCfaAfL96 | 780 |
| AD-62935.2 | CfsasUfuGfgUfgAfGfGfaAfaAfaUfcCfuUfL96 | 781 |
| AD-62940.2 | AfsusCfgAfcAfaGfAfCfaUfuGfgUfgAfgAfL96 | 782 |
| AD-62941.2 | AfscsAfuUfgGfuGfAfGfgAfaAfaAfuCfcUfL96 | 783 |
| AD-62944.2 | GfsasAfaGfuCfaUfCfGfaCfaAfgAfcAfuUfL96 | 784 |
| AD-62965.2 | AfsasAfgUfcAfuCfGfAfcAfaGfaCfaUfuAfL96 | 785 |

TABLE 11
Additional Human/Cyno/Mouse/Rat and Human/Cyno/Rat HA01 Modified Antisense Strand iRNA Sequences

| Duplex Name | Modified antisense strand | SEQ ID NO: |
|---|---|---|
| AD-62989.2 | asUfsuUfcUfaAfaAfgguUfcCfuAfgGfascsa | 786 |
| AD-62994.2 | usAfsuAfuUfuCfcAfggaUfgAfaAfgUfcscsa | 787 |
| AD-62933.2 | usUfsgUfcGfaUfgAfcuuUfcAfcAfuUfcsusg | 788 |
| AD-62935.2 | asAfsgGfaUfuUfuUfccuCfaCfcAfaUfgsusc | 789 |
| AD-62940.2 | usCfsuCfaCfcAfaUfgucUfuGfuCfgAfusgsa | 790 |
| AD-62941.2 | asGfsgAfuUfuUfuCfcucAfcCfaAfuGfuscsu | 791 |
| AD-62944.2 | asAfsuGfuCfuUfgUfcgaUfgAfcUfuUfcsasc | 792 |
| AD-62965.2 | usAfsaUfgUfcUfuGfucgAfuGfaCfuUfuscsa | 793 |

TABLE 12
Additional Human Unmodified and Modifieded Sense and Antisense Strand HAO1 iRNA Sequences Targeting
NM_017545.2

| | SEQ ID | | SEQ ID | | |
|---|---|---|---|---|---|
| Unmodified sequence 5′ to 3′ | NO: | Modified sequence 5′ to 3′ | NO: | Strand | Length |
| AUGUAUGUUACUUCUUAGAGA | 794 | asusguauGfuUfAfCfuucuuagagaL96 | 1890 | sense | 21 |
| UCUCUAAGAAGUAACAUACAUCC | 795 | usCfsucuAfaGfAfaguaAfcAfuacauscsc | 1891 | antisense | 23 |
| UGUAUGUUACUUCUUAGAGAG | 796 | usgsuaugUfuAfCfUfucuuagagagL96 | 1892 | sense | 21 |
| CUCUCUAAGAAGUAACAUACAUC | 797 | csUfscucUfaAfGfaaguAfaCfauacasusc | 1893 | antisense | 23 |
| UAGGAUGUAUGUUACUUCUUA | 798 | usasggauGfuAfUfGfuuacuucuuaL96 | 1894 | sense | 21 |
| UAAGAAGUAACAUACAUCCUAAA | 799 | usAfsagaAfgUfAfacauAfcAfuccuasasa | 1895 | antisense | 23 |
| UUAGGAUGUAUGUUACUUCUU | 800 | ususaggaUfgUfAfUfguuacuucuuL96 | 1896 | sense | 21 |
| AAGAAGUAACAUACAUCCUAAAA | 801 | asAfsgaaGfuAfAfcauaCfaUfccuaasasa | 1897 | antisense | 23 |
| AGAAAGGUGUUCAAGAUGUCC | 802 | asgsaaagGfuGfUfUfcaagauguccL96 | 1898 | sense | 21 |
| GGACAUCUUGAACACCUUUCUCC | 803 | gsGfsacaUfcUfUfgaacAfcCfuuucuscsc | 1899 | antisense | 23 |
| GAAAGGUGUUCAAGAUGUCCU | 804 | gsasaaggUfgUfUfCfaagauguccuL96 | 1900 | sense | 21 |
| AGGACAUCUUGAACACCUUUCUC | 805 | asGfsgacAfuCfUfugaaCfaCfcuuucsusc | 1901 | antisense | 23 |
| GGGGAGAAAGGUGUUCAAGAU | 806 | gsgsggagAfaAfGfGfuguucaagauL96 | 1902 | sense | 21 |
| AUCUUGAACACCUUUCUCCCCCU | 807 | asUfscuuGfaAfCfaccuUfuCfuccccscsu | 1903 | antisense | 23 |
| GGGGGAGAAAGGUGUUCAAGA | 808 | gsgsgggaGfaAfAfGfguguucaagaL96 | 1904 | sense | 21 |
| UCUUGAACACCUUUCUCCCCCUG | 809 | usCfsuugAfaCfAfccuuUfcUfcccccsusg | 1905 | antisense | 23 |
| AGAAACUUUGGCUGAUAAUAU | 810 | asgsaaacUfuUfGfGfcugauaauauL96 | 1906 | sense | 21 |
| AUAUUAUCAGCCAAAGUUUCUUC | 811 | asUfsauuAfuCfAfgccaAfaGfuuucususc | 1907 | antisense | 23 |
| GAAACUUUGGCUGAUAAUAUU | 812 | gsasaacuUfuGfGfCfugauaauauuL96 | 1908 | sense | 21 |
| AAUAUUAUCAGCCAAAGUUUCUU | 813 | asAfsuauUfaUfCfagccAfaAfguuucsusu | 1909 | antisense | 23 |
| AUGAAGAAACUUUGGCUGAUA | 814 | asusgaagAfaAfCfUfuuggcugauaL96 | 1910 | sense | 21 |
| UAUCAGCCAAAGUUUCUUCAUCA | 815 | usAfsucaGfcCfAfaaguUfuCfuucauscsa | 1911 | antisense | 23 |
| GAUGAAGAAACUUUGGCUGAU | 816 | gsasugaaGfaAfAfCfuuuggcugauL96 | 1912 | sense | 21 |
| AUCAGCCAAAGUUUCUUCAUCAU | 817 | asUfscagCfcAfAfaguuUfcUfucaucsasu | 1913 | antisense | 23 |
| AAGGCACUGAUGUUCUGAAAG | 818 | asasggcaCfuGfAfUfguucugaaagL96 | 1914 | sense | 21 |
| CUUUCAGAACAUCAGUGCCUUUC | 819 | csUfsuucAfgAfAfcaucAfgUfgccuususc | 1915 | antisense | 23 |
| AGGCACUGAUGUUCUGAAAGC | 820 | asgsgcacUfgAfUfGfuucugaaagcL96 | 1916 | sense | 21 |
| GCUUUCAGAACAUCAGUGCCUUU | 821 | gsCfsuuuCfaGfAfacauCfaGfugccususu | 1917 | antisense | 23 |
| CGGAAAGGCACUGAUGUUCUG | 822 | csgsgaaaGfgCfAfCfugauguucugL96 | 1918 | sense | 21 |
| CAGAACAUCAGUGCCUUUCCGCA | 823 | csAfsgaaCfaUfCfagugCfcUfuuccgscsa | 1919 | antisense | 23 |
| GCGGAAAGGCACUGAUGUUCU | 824 | gscsggaaAfgGfCfAfcugauguucuL96 | 1920 | sense | 21 |
| AGAACAUCAGUGCCUUUCCGCAC | 825 | asGfsaacAfuCfAfgugcCfuUfuccgcsasc | 1921 | antisense | 23 |
| AGAAGACUGACAUCAUUGCCA | 826 | asgsaagaCfuGfAfCfaucauugccaL96 | 1922 | sense | 21 |
| UGGCAAUGAUGUCAGUCUUCUCA | 827 | usGfsgcaAfuGfAfugucAfgUfcuucuscsa | 1923 | antisense | 23 |
| GAAGACUGACAUCAUUGCCAA | 828 | gsasagacUfgAfCfAfucauugccaaL96 | 1924 | sense | 21 |
| UUGGCAAUGAUGUCAGUCUUCUC | 829 | usUfsggcAfaUfGfauguCfaGfucuucsusc | 1925 | antisense | 23 |
| GCUGAGAAGACUGACAUCAUU | 830 | gscsugagAfaGfAfCfugacaucauuL96 | 1926 | sense | 21 |
| AAUGAUGUCAGUCUUCUCAGCCA | 831 | asAfsugaUfgUfCfagucUfuCfucagcscsa | 1927 | antisense | 23 |
| GGCUGAGAAGACUGACAUCAU | 832 | gsgscugaGfaAfGfAfcugacaucauL96 | 1928 | sense | 21 |
| AUGAUGUCAGUCUUCUCAGCCAU | 833 | asUfsgauGfuCfAfgucuUfcUfcagccsasu | 1929 | antisense | 23 |
| UAAUGCCUGAUUCACAACUUU | 834 | usasaugcCfuGfAfUfucacaacuuuL96 | 1930 | sense | 21 |
| AAAGUUGUGAAUCAGGCAUUACC | 835 | asAfsaguUfgUfGfaaucAfgGfcauuascsc | 1931 | antisense | 23 |
| AAUGCCUGAUUCACAACUUUG | 836 | asasugccUfgAfUfUfcacaacuuugL96 | 1932 | sense | 21 |
| CAAAGUUGUGAAUCAGGCAUUAC | 837 | csAfsaagUfuGfUfgaauCfaGfgcauusasc | 1933 | antisense | 23 |
| UUGGUAAUGCCUGAUUCACAA | 838 | ususgguaAfuGfCfCfugauucacaaL96 | 1934 | sense | 21 |
| UUGUGAAUCAGGCAUUACCAACA | 839 | usUfsgugAfaUfCfaggcAfuUfaccaascsa | 1935 | antisense | 23 |
| GUUGGUAAUGCCUGAUUCACA | 840 | gsusugguAfaUfGfCfcugauucacaL96 | 1936 | sense | 21 |
| UGUGAAUCAGGCAUUACCAACAC | 841 | usGfsugaAfuCfAfggcaUfuAfccaacsasc | 1937 | antisense | 23 |
| UAUCAAAUGGCUGAGAAGACU | 842 | usasucaaAfuGfGfCfugagaagacuL96 | 1938 | sense | 21 |
| AGUCUUCUCAGCCAUUUGAUAUC | 843 | asGfsucuUfcUfCfagccAfuUfugauasusc | 1939 | antisense | 23 |
| AUCAAAUGGCUGAGAAGACUG | 844 | asuscaaaUfgGfCfUfgagaagacugL96 | 1940 | sense | 21 |
| CAGUCUUCUCAGCCAUUUGAUAU | 845 | csAfsgucUfuCfUfcagcCfaUfuugausasu | 1941 | antisense | 23 |
| AAGAUAUCAAAUGGCUGAGAA | 846 | asasgauaUfcAfAfAfuggcugagaaL96 | 1942 | sense | 21 |
| UUCUCAGCCAUUUGAUAUCUUCC | 847 | usUfscucAfgCfCfauuuGfaUfaucuuscsc | 1943 | antisense | 23 |
| GAAGAUAUCAAAUGGCUGAGA | 848 | gsasagauAfuCfAfAfauggcugagaL96 | 1944 | sense | 21 |
| UCUCAGCCAUUUGAUAUCUUCCC | 849 | usCfsucaGfcCfAfuuugAfuAfucuucscsc | 1945 | antisense | 23 |
| UCUGACAGUGCACAAUAUUUU | 850 | uscsugacAfgUfGfCfacaauauuuuL96 | 1946 | sense | 21 |
| AAAAUAUUGUGCACUGUCAGAUC | 851 | asAfsaauAfuUfGfugcaCfuGfucagasusc | 1947 | antisense | 23 |
| CUGACAGUGCACAAUAUUUUC | 852 | csusgacaGfuGfCfAfcaauauuuucL96 | 1948 | sense | 21 |
| GAAAAUAUUGUGCACUGUCAGAU | 853 | gsAfsaaaUfaUfUfgugcAfcUfgucagsasu | 1949 | antisense | 23 |
| AAGAUCUGACAGUGCACAAUA | 854 | asasgaucUfgAfCfAfgugcacaauaL96 | 1950 | sense | 21 |
| UAUUGUGCACUGUCAGAUCUUGG | 855 | usAfsuugUfgCfAfcuguCfaGfaucuusgsg | 1951 | antisense | 23 |
| CAAGAUCUGACAGUGCACAAU | 856 | csasagauCfuGfAfCfagugcacaauL96 | 1952 | sense | 21 |
| AUUGUGCACUGUCAGAUCUUGGA | 857 | asUfsuguGfcAfCfugucAfgAfucuugsgsa | 1953 | antisense | 23 |
| ACUGAUGUUCUGAAAGCUCUG | 858 | ascsugauGfuUfCfUfgaaagcucugL96 | 1954 | sense | 21 |
| CAGAGCUUUCAGAACAUCAGUGC | 859 | csAfsgagCfuUfUfcagaAfcAfucagusgsc | 1955 | antisense | 23 |
| CUGAUGUUCUGAAAGCUCUGG | 860 | csusgaugUfuCfUfGfaaagcucuggL96 | 1956 | sense | 21 |
| CCAGAGCUUUCAGAACAUCAGUG | 861 | csCfsagaGfcUfUfucagAfaCfaucagsusg | 1957 | antisense | 23 |
| AGGCACUGAUGUUCUGAAAGC | 862 | asgsgcacUfgAfUfGfuucugaaagcL96 | 1958 | sense | 21 |
| GCUUUCAGAACAUCAGUGCCUUU | 863 | gsCfsuuuCfaGfAfacauCfaGfugccususu | 1959 | antisense | 23 |
| AAGGCACUGAUGUUCUGAAAG | 864 | asasggcaCfuGfAfUfguucugaaagL96 | 1960 | sense | 21 |
| CUUUCAGAACAUCAGUGCCUUUC | 865 | csUfsuucAfgAfAfcaucAfgUfgccuususc | 1961 | antisense | 23 |
| AACAACAUGCUAAAUCAGUAC | 866 | asascaacAfuGfCfUfaaaucaguacL96 | 1962 | sense | 21 |
| GUACUGAUUUAGCAUGUUGUUCA | 867 | gsUfsacuGfaUfUfuagcAfuGfuuguuscsa | 1963 | antisense | 23 |
| ACAACAUGCUAAAUCAGUACU | 868 | ascsaacaUfgCfUfAfaaucaguacuL96 | 1964 | sense | 21 |
| AGUACUGAUUUAGCAUGUUGUUC | 869 | asGfsuacUfgAfUfuuagCfaUfguugususc | 1965 | antisense | 23 |
| UAUGAACAACAUGCUAAAUCA | 870 | usasugaaCfaAfCfAfugcuaaaucaL96 | 1966 | sense | 21 |
| UGAUUUAGCAUGUUGUUCAUAAU | 871 | usGfsauuUfaGfCfauguUfgUfucauasasu | 1967 | antisense | 23 |
| UUAUGAACAACAUGCUAAAUC | 872 | ususaugaAfcAfAfCfaugcuaaaucL96 | 1968 | sense | 21 |
| GAUUUAGCAUGUUGUUCAUAAUC | 873 | gsAfsuuuAfgCfAfuguuGfuUfcauaasusc | 1969 | antisense | 23 |
| UCUUUAGUGUCUGAAUAUAUC | 874 | uscsuuuaGfuGfUfCfugaauauaucL96 | 1970 | sense | 21 |
| GAUAUAUUCAGACACUAAAGAUG | 875 | gsAfsuauAfuUfCfagacAfcUfaaagasusg | 1971 | antisense | 23 |
| CUUUAGUGUCUGAAUAUAUCC | 876 | csusuuagUfgUfCfUfgaauauauccL96 | 1972 | sense | 21 |
| GGAUAUAUUCAGACACUAAAGAU | 877 | gsGfsauaUfaUfUfcagaCfaCfuaaagsasu | 1973 | antisense | 23 |
| CACAUCUUUAGUGUCUGAAUA | 878 | csascaucUfuUfAfGfugucugaauaL96 | 1974 | sense | 21 |
| UAUUCAGACACUAAAGAUGUGAU | 879 | usAfsuucAfgAfCfacuaAfaGfaugugsasu | 1975 | antisense | 23 |
| UCACAUCUUUAGUGUCUGAAU | 880 | uscsacauCfuUfUfAfgugucugaauL96 | 1976 | sense | 21 |
| AUUCAGACACUAAAGAUGUGAUU | 881 | asUfsucaGfaCfAfcuaaAfgAfugugasusu | 1977 | antisense | 23 |
| UGAUACUUCUUUGAAUGUAGA | 882 | usgsauacUfuCfUfUfugaauguagaL96 | 1978 | sense | 21 |
| UCUACAUUCAAAGAAGUAUCACC | 883 | usCfsuacAfuUfCfaaagAfaGfuaucascsc | 1979 | antisense | 23 |
| GAUACUUCUUUGAAUGUAGAU | 884 | gsasuacuUfcUfUfUfgaauguagauL96 | 1980 | sense | 21 |
| AUCUACAUUCAAAGAAGUAUCAC | 885 | asUfscuaCfaUfUfcaaaGfaAfguaucsasc | 1981 | antisense | 23 |
| UUGGUGAUACUUCUUUGAAUG | 886 | ususggugAfuAfCfUfucuuugaaugL96 | 1982 | sense | 21 |
| CAUUCAAAGAAGUAUCACCAAUU | 887 | csAfsuucAfaAfGfaaguAfuCfaccaasusu | 1983 | antisense | 23 |
| AUUGGUGAUACUUCUUUGAAU | 888 | asusugguGfaUfAfCfuucuuugaauL96 | 1984 | sense | 21 |
| AUUCAAAGAAGUAUCACCAAUUA | 889 | asUfsucaAfaGfAfaguaUfcAfccaaususa | 1985 | antisense | 23 |
| AAUAACCUGUGAAAAUGCUCC | 890 | asasuaacCfuGfUfGfaaaaugcuccL96 | 1986 | sense | 21 |
| GGAGCAUUUUCACAGGUUAUUGC | 891 | gsGfsagcAfuUfUfucacAfgGfuuauusgsc | 1987 | antisense | 23 |
| AUAACCUGUGAAAAUGCUCCC | 892 | asusaaccUfgUfGfAfaaaugcucccL96 | 1988 | sense | 21 |
| GGGAGCAUUUUCACAGGUUAUUG | 893 | gsGfsgagCfaUfUfuucaCfaGfguuaususg | 1989 | antisense | 23 |
| UAGCAAUAACCUGUGAAAAUG | 894 | usasgcaaUfaAfCfCfugugaaaaugL96 | 1990 | sense | 21 |
| CAUUUUCACAGGUUAUUGCUAUC | 895 | csAfsuuuUfcAfCfagguUfaUfugcuasusc | 1991 | antisense | 23 |
| AUAGCAAUAACCUGUGAAAAU | 896 | asusagcaAfuAfAfCfcugugaaaauL96 | 1992 | sense | 21 |
| AUUUUCACAGGUUAUUGCUAUCC | 897 | asUfsuuuCfaCfAfgguuAfuUfgcuauscsc | 1993 | antisense | 23 |
| AAUCACAUCUUUAGUGUCUGA | 898 | asasucacAfuCfUfUfuagugucugaL96 | 1994 | sense | 21 |
| UCAGACACUAAAGAUGUGAUUGG | 899 | usCfsagaCfaCfUfaaagAfuGfugauusgsg | 1995 | antisense | 23 |
| AUCACAUCUUUAGUGUCUGAA | 900 | asuscacaUfcUfUfUfagugucugaaL96 | 1996 | sense | 21 |
| UUCAGACACUAAAGAUGUGAUUG | 901 | usUfscagAfcAfCfuaaaGfaUfgugaususg | 1997 | antisense | 23 |
| UUCCAAUCACAUCUUUAGUGU | 902 | ususccaaUfcAfCfAfucuuuaguguL96 | 1998 | sense | 21 |
| ACACUAAAGAUGUGAUUGGAAAU | 903 | asCfsacuAfaAfGfauguGfaUfuggaasasu | 1999 | antisense | 23 |
| UUUCCAAUCACAUCUUUAGUG | 904 | ususuccaAfuCfAfCfaucuuuagugL96 | 2000 | sense | 21 |
| CACUAAAGAUGUGAUUGGAAAUC | 905 | csAfscuaAfaGfAfugugAfuUfggaaasusc | 2001 | antisense | 23 |
| ACGGGCAUGAUGUUGAGUUCC | 906 | ascsgggcAfuGfAfUfguugaguuccL96 | 2002 | sense | 21 |
| GGAACUCAACAUCAUGCCCGUUC | 907 | gsGfsaacUfcAfAfcaucAfuGfcccgususc | 2003 | antisense | 23 |
| CGGGCAUGAUGUUGAGUUCCU | 908 | csgsggcaUfgAfUfGfuugaguuccuL96 | 2004 | sense | 21 |
| AGGAACUCAACAUCAUGCCCGUU | 909 | asGfsgaaCfuCfAfacauCfaUfgcccgsusu | 2005 | antisense | 23 |
| GGGAACGGGCAUGAUGUUGAG | 910 | gsgsgaacGfgGfCfAfugauguugagL96 | 2006 | sense | 21 |
| CUCAACAUCAUGCCCGUUCCCAG | 911 | csUfscaaCfaUfCfaugcCfcGfuucccsasg | 2007 | antisense | 23 |
| UGGGAACGGGCAUGAUGUUGA | 912 | usgsggaaCfgGfGfCfaugauguugaL96 | 2008 | sense | 21 |
| UCAACAUCAUGCCCGUUCCCAGG | 913 | usCfsaacAfuCfAfugccCfgUfucccasgsg | 2009 | antisense | 23 |
| ACUAAGGUGAAAAGAUAAUGA | 914 | ascsuaagGfuGfAfAfaagauaaugaL96 | 2010 | sense | 21 |
| UCAUUAUCUUUUCACCUUAGUGU | 915 | usCfsauuAfuCfUfuuucAfcCfuuagusgsu | 2011 | antisense | 23 |
| CUAAGGUGAAAAGAUAAUGAU | 916 | csusaaggUfgAfAfAfagauaaugauL96 | 2012 | sense | 21 |
| AUCAUUAUCUUUUCACCUUAGUG | 917 | asUfscauUfaUfCfuuuuCfaCfcuuagsusg | 2013 | antisense | 23 |
| AAACACUAAGGUGAAAAGAUA | 918 | asasacacUfaAfGfGfugaaaagauaL96 | 2014 | sense | 21 |
| UAUCUUUUCACCUUAGUGUUUGC | 919 | usAfsucuUfuUfCfaccuUfaGfuguuusgsc | 2015 | antisense | 23 |
| CAAACACUAAGGUGAAAAGAU | 920 | csasaacaCfuAfAfGfgugaaaagauL96 | 2016 | sense | 21 |
| AUCUUUUCACCUUAGUGUUUGCU | 921 | asUfscuuUfuCfAfccuuAfgUfguuugscsu | 2017 | antisense | 23 |
| AGGUAGCACUGGAGAGAAUUG | 922 | asgsguagCfaCfUfGfgagagaauugL96 | 2018 | sense | 21 |
| CAAUUCUCUCCAGUGCUACCUUC | 923 | csAfsauuCfuCfUfccagUfgCfuaccususc | 2019 | antisense | 23 |
| GGUAGCACUGGAGAGAAUUGG | 924 | gsgsuagcAfcUfGfGfagagaauuggL96 | 2020 | sense | 21 |
| CCAAUUCUCUCCAGUGCUACCUU | 925 | csCfsaauUfcUfCfuccaGfuGfcuaccsusu | 2021 | antisense | 23 |
| GAGAAGGUAGCACUGGAGAGA | 926 | gsasgaagGfuAfGfCfacuggagagaL96 | 2022 | sense | 21 |
| UCUCUCCAGUGCUACCUUCUCAA | 927 | usCfsucuCfcAfGfugcuAfcCfuucucsasa | 2023 | antisense | 23 |
| UGAGAAGGUAGCACUGGAGAG | 928 | usgsagaaGfgUfAfGfcacuggagagL96 | 2024 | sense | 21 |
| CUCUCCAGUGCUACCUUCUCAAA | 929 | csUfscucCfaGfUfgcuaCfcUfucucasasa | 2025 | antisense | 23 |
| AGUGGACUUGCUGCAUAUGUG | 930 | asgsuggaCfuUfGfCfugcauaugugL96 | 2026 | sense | 21 |
| CACAUAUGCAGCAAGUCCACUGU | 931 | csAfscauAfuGfCfagcaAfgUfccacusgsu | 2027 | antisense | 23 |
| GUGGACUUGCUGCAUAUGUGG | 932 | gsusggacUfuGfCfUfgcauauguggL96 | 2028 | sense | 21 |
| CCACAUAUGCAGCAAGUCCACUG | 933 | csCfsacaUfaUfGfcagcAfaGfuccacsusg | 2029 | antisense | 23 |
| CGACAGUGGACUUGCUGCAUA | 934 | csgsacagUfgGfAfCfuugcugcauaL96 | 2030 | sense | 21 |
| UAUGCAGCAAGUCCACUGUCGUC | 935 | usAfsugcAfgCfAfagucCfaCfugucgsusc | 2031 | antisense | 23 |
| ACGACAGUGGACUUGCUGCAU | 936 | ascsgacaGfuGfGfAfcuugcugcauL96 | 2032 | sense | 21 |
| AUGCAGCAAGUCCACUGUCGUCU | 937 | asUfsgcaGfcAfAfguccAfcUfgucguscsu | 2033 | antisense | 23 |
| AAGGUGUUCAAGAUGUCCUCG | 938 | asasggugUfuCfAfAfgauguccucgL96 | 2034 | sense | 21 |
| CGAGGACAUCUUGAACACCUUUC | 939 | csGfsaggAfcAfUfcuugAfaCfaccuususc | 2035 | antisense | 23 |
| AGGUGUUCAAGAUGUCCUCGA | 940 | asgsguguUfcAfAfGfauguccucgaL96 | 2036 | sense | 21 |
| UCGAGGACAUCUUGAACACCUUU | 941 | usCfsgagGfaCfAfucuuGfaAfcaccususu | 2037 | antisense | 23 |
| GAGAAAGGUGUUCAAGAUGUC | 942 | gsasgaaaGfgUfGfUfucaagaugucL96 | 2038 | sense | 21 |
| GACAUCUUGAACACCUUUCUCCC | 943 | gsAfscauCfuUfGfaacaCfcUfuucucscsc | 2039 | antisense | 23 |
| GGAGAAAGGUGUUCAAGAUGU | 944 | gsgsagaaAfgGfUfGfuucaagauguL96 | 2040 | sense | 21 |
| ACAUCUUGAACACCUUUCUCCCC | 945 | asCfsaucUfuGfAfacacCfuUfucuccscsc | 2041 | antisense | 23 |
| AACCGUCUGGAUGAUGUGCGU | 946 | asasccguCfuGfGfAfugaugugcguL96 | 2042 | sense | 21 |
| ACGCACAUCAUCCAGACGGUUGC | 947 | asCfsgcaCfaUfCfauccAfgAfcgguusgsc | 2043 | antisense | 23 |
| ACCGUCUGGAUGAUGUGCGUA | 948 | ascscgucUfgGfAfUfgaugugcguaL96 | 2044 | sense | 21 |
| UACGCACAUCAUCCAGACGGUUG | 949 | usAfscgcAfcAfUfcaucCfaGfacggususg | 2045 | antisense | 23 |
| GGGCAACCGUCUGGAUGAUGU | 950 | gsgsgcaaCfcGfUfCfuggaugauguL96 | 2046 | sense | 21 |
| ACAUCAUCCAGACGGUUGCCCAG | 951 | asCfsaucAfuCfCfagacGfgUfugcccsasg | 2047 | antisense | 23 |
| UGGGCAACCGUCUGGAUGAUG | 952 | usgsggcaAfcCfGfUfcuggaugaugL96 | 2048 | sense | 21 |
| CAUCAUCCAGACGGUUGCCCAGG | 953 | csAfsucaUfcCfAfgacgGfuUfgcccasgsg | 2049 | antisense | 23 |
| GAAACUUUGGCUGAUAAUAUU | 954 | gsasaacuUfuGfGfCfugauaauauuL96 | 2050 | sense | 21 |
| AAUAUUAUCAGCCAAAGUUUCUU | 955 | asAfsuauUfaUfCfagccAfaAfguuucsusu | 2051 | antisense | 23 |
| AAACUUUGGCUGAUAAUAUUG | 956 | asasacuuUfgGfCfUfgauaauauugL96 | 2052 | sense | 21 |
| CAAUAUUAUCAGCCAAAGUUUCU | 957 | csAfsauaUfuAfUfcagcCfaAfaguuuscsu | 2053 | antisense | 23 |
| UGAAGAAACUUUGGCUGAUAA | 958 | usgsaagaAfaCfUfUfuggcugauaaL96 | 2054 | sense | 21 |
| UUAUCAGCCAAAGUUUCUUCAUC | 959 | usUfsaucAfgCfCfaaagUfuUfcuucasusc | 2055 | antisense | 23 |
| AUGAAGAAACUUUGGCUGAUA | 960 | asusgaagAfaAfCfUfuuggcugauaL96 | 2056 | sense | 21 |
| UAUCAGCCAAAGUUUCUUCAUCA | 961 | usAfsucaGfcCfAfaaguUfuCfuucauscsa | 2057 | antisense | 23 |
| AAAGGUGUUCAAGAUGUCCUC | 962 | asasagguGfuUfCfAfagauguccucL96 | 2058 | sense | 21 |
| GAGGACAUCUUGAACACCUUUCU | 963 | gsAfsggaCfaUfCfuugaAfcAfccuuuscsu | 2059 | antisense | 23 |
| AAGGUGUUCAAGAUGUCCUCG | 964 | asasggugUfuCfAfAfgauguccucgL96 | 2060 | sense | 21 |
| CGAGGACAUCUUGAACACCUUUC | 965 | csGfsaggAfcAfUfcuugAfaCfaccuususc | 2061 | antisense | 23 |
| GGAGAAAGGUGUUCAAGAUGU | 966 | gsgsagaaAfgGfUfGfuucaagauguL96 | 2062 | sense | 21 |
| ACAUCUUGAACACCUUUCUCCCC | 967 | asCfsaucUfuGfAfacacCfuUfucuccscsc | 2063 | antisense | 23 |
| GGGAGAAAGGUGUUCAAGAUG | 968 | gsgsgagaAfaGfGfUfguucaagaugL96 | 2064 | sense | 21 |
| CAUCUUGAACACCUUUCUCCCCC | 969 | csAfsucuUfgAfAfcaccUfuUfcucccscsc | 2065 | antisense | 23 |
| AAAUCAGUACUUCCAAAGUCU | 970 | asasaucaGfuAfCfUfuccaaagucuL96 | 2066 | sense | 21 |
| AGACUUUGGAAGUACUGAUUUAG | 971 | asGfsacuUfuGfGfaaguAfcUfgauuusasg | 2067 | antisense | 23 |
| AAUCAGUACUUCCAAAGUCUA | 972 | asasucagUfaCfUfUfccaaagucuaL96 | 2068 | sense | 21 |
| UAGACUUUGGAAGUACUGAUUUA | 973 | usAfsgacUfuUfGfgaagUfaCfugauususa | 2069 | antisense | 23 |
| UGCUAAAUCAGUACUUCCAAA | 974 | usgscuaaAfuCfAfGfuacuuccaaaL96 | 2070 | sense | 21 |
| UUUGGAAGUACUGAUUUAGCAUG | 975 | usUfsuggAfaGfUfacugAfuUfuagcasusg | 2071 | antisense | 23 |
| AUGCUAAAUCAGUACUUCCAA | 976 | asusgcuaAfaUfCfAfguacuuccaaL96 | 2072 | sense | 21 |
| UUGGAAGUACUGAUUUAGCAUGU | 977 | usUfsggaAfgUfAfcugaUfuUfagcausgsu | 2073 | antisense | 23 |
| ACAUCUUUAGUGUCUGAAUAU | 978 | ascsaucuUfuAfGfUfgucugaauauL96 | 2074 | sense | 21 |
| AUAUUCAGACACUAAAGAUGUGA | 979 | asUfsauuCfaGfAfcacuAfaAfgaugusgsa | 2075 | antisense | 23 |
| CAUCUUUAGUGUCUGAAUAUA | 980 | csasucuuUfaGfUfGfucugaauauaL96 | 2076 | sense | 21 |
| UAUAUUCAGACACUAAAGAUGUG | 981 | usAfsuauUfcAfGfacacUfaAfagaugsusg | 2077 | antisense | 23 |
| AAUCACAUCUUUAGUGUCUGA | 982 | asasucacAfuCfUfUfuagugucugaL96 | 2078 | sense | 21 |
| UCAGACACUAAAGAUGUGAUUGG | 983 | usCfsagaCfaCfUfaaagAfuGfugauusgsg | 2079 | antisense | 23 |
| CAAUCACAUCUUUAGUGUCUG | 984 | csasaucaCfaUfCfUfuuagugucugL96 | 2080 | sense | 21 |
| CAGACACUAAAGAUGUGAUUGGA | 985 | csAfsgacAfcUfAfaagaUfgUfgauugsgsa | 2081 | antisense | 23 |
| GCAUGUAUUACUUGACAAAGA | 986 | gscsauguAfuUfAfCfuugacaaagaL96 | 2082 | sense | 21 |
| UCUUUGUCAAGUAAUACAUGCUG | 987 | usCfsuuuGfuCfAfaguaAfuAfcaugcsusg | 2083 | antisense | 23 |
| CAUGUAUUACUUGACAAAGAG | 988 | csasuguaUfuAfCfUfugacaaagagL96 | 2084 | sense | 21 |
| CUCUUUGUCAAGUAAUACAUGCU | 989 | csUfscuuUfgUfCfaaguAfaUfacaugscsu | 2085 | antisense | 23 |
| UUCAGCAUGUAUUACUUGACA | 990 | ususcagcAfuGfUfAfuuacuugacaL96 | 2086 | sense | 21 |
| UGUCAAGUAAUACAUGCUGAAAA | 991 | usGfsucaAfgUfAfauacAfuGfcugaasasa | 2087 | antisense | 23 |
| UUUCAGCAUGUAUUACUUGAC | 992 | ususucagCfaUfGfUfauuacuugacL96 | 2088 | sense | 21 |
| GUCAAGUAAUACAUGCUGAAAAA | 993 | gsUfscaaGfuAfAfuacaUfgCfugaaasasa | 2089 | antisense | 23 |
| AUGUUACUUCUUAGAGAGAAA | 994 | asusguuaCfuUfCfUfuagagagaaaL96 | 2090 | sense | 21 |
| UUUCUCUCUAAGAAGUAACAUAC | 995 | usUfsucuCfuCfUfaagaAfgUfaacausasc | 2091 | antisense | 23 |
| UGUUACUUCUUAGAGAGAAAU | 996 | usgsuuacUfuCfUfUfagagagaaauL96 | 2092 | sense | 21 |
| AUUUCUCUCUAAGAAGUAACAUA | 997 | asUfsuucUfcUfCfuaagAfaGfuaacasusa | 2093 | antisense | 23 |
| AUGUAUGUUACUUCUUAGAGA | 998 | asusguauGfuUfAfCfuucuuagagaL96 | 2094 | sense | 21 |
| UCUCUAAGAAGUAACAUACAUCC | 999 | usCfsucuAfaGfAfaguaAfcAfuacauscsc | 2095 | antisense | 23 |
| GAUGUAUGUUACUUCUUAGAG | 1000 | gsasuguaUfgUfUfAfcuucuuagagL96 | 2096 | sense | 21 |
| CUCUAAGAAGUAACAUACAUCCU | 1001 | csUfscuaAfgAfAfguaaCfaUfacaucscsu | 2097 | antisense | 23 |
| ACAACUUUGAGAAGGUAGCAC | 1002 | ascsaacuUfuGfAfGfaagguagcacL96 | 2098 | sense | 21 |
| GUGCUACCUUCUCAAAGUUGUGA | 1003 | gsUfsgcuAfcCfUfucucAfaAfguugusgsa | 2099 | antisense | 23 |
| CAACUUUGAGAAGGUAGCACU | 1004 | csasacuuUfgAfGfAfagguagcacuL96 | 2100 | sense | 21 |
| AGUGCUACCUUCUCAAAGUUGUG | 1005 | asGfsugcUfaCfCfuucuCfaAfaguugsusg | 2101 | antisense | 23 |
| AUUCACAACUUUGAGAAGGUA | 1006 | asusucacAfaCfUfUfugagaagguaL96 | 2102 | sense | 21 |
| UACCUUCUCAAAGUUGUGAAUCA | 1007 | usAfsccuUfcUfCfaaagUfuGfugaauscsa | 2103 | antisense | 23 |
| GAUUCACAACUUUGAGAAGGU | 1008 | gsasuucaCfaAfCfUfuugagaagguL96 | 2104 | sense | 21 |
| ACCUUCUCAAAGUUGUGAAUCAG | 1009 | asCfscuuCfuCfAfaaguUfgUfgaaucsasg | 2105 | antisense | 23 |
| AACAUGCUAAAUCAGUACUUC | 1010 | asascaugCfuAfAfAfucaguacuucL96 | 2106 | sense | 21 |
| GAAGUACUGAUUUAGCAUGUUGU | 1011 | gsAfsaguAfcUfGfauuuAfgCfauguusgsu | 2107 | antisense | 23 |
| ACAUGCUAAAUCAGUACUUCC | 1012 | ascsaugcUfaAfAfUfcaguacuuccL96 | 2108 | sense | 21 |
| GGAAGUACUGAUUUAGCAUGUUG | 1013 | gsGfsaagUfaCfUfgauuUfaGfcaugususg | 2109 | antisense | 23 |
| GAACAACAUGCUAAAUCAGUA | 1014 | gsasacaaCfaUfGfCfuaaaucaguaL96 | 2110 | sense | 21 |
| UACUGAUUUAGCAUGUUGUUCAU | 1015 | usAfscugAfuUfUfagcaUfgUfuguucsasu | 2111 | antisense | 23 |
| UGAACAACAUGCUAAAUCAGU | 1016 | usgsaacaAfcAfUfGfcuaaaucaguL96 | 2112 | sense | 21 |
| ACUGAUUUAGCAUGUUGUUCAUA | 1017 | asCfsugaUfuUfAfgcauGfuUfguucasusa | 2113 | antisense | 23 |
| AAACCAGUACUUUAUCAUUUU | 1018 | asasaccaGfuAfCfUfuuaucauuuuL96 | 2114 | sense | 21 |
| AAAAUGAUAAAGUACUGGUUUCA | 1019 | asAfsaauGfaUfAfaaguAfcUfgguuuscsa | 2115 | antisense | 23 |
| AACCAGUACUUUAUCAUUUUC | 1020 | asasccagUfaCfUfUfuaucauuuucL96 | 2116 | sense | 21 |
| GAAAAUGAUAAAGUACUGGUUUC | 1021 | gsAfsaaaUfgAfUfaaagUfaCfugguususc | 2117 | antisense | 23 |
| UUUGAAACCAGUACUUUAUCA | 1022 | ususugaaAfcCfAfGfuacuuuaucaL96 | 2118 | sense | 21 |
| UGAUAAAGUACUGGUUUCAAAAU | 1023 | usGfsauaAfaGfUfacugGfuUfucaaasasu | 2119 | antisense | 23 |
| UUUUGAAACCAGUACUUUAUC | 1024 | ususuugaAfaCfCfAfguacuuuaucL96 | 2120 | sense | 21 |
| GAUAAAGUACUGGUUUCAAAAUU | 1025 | gsAfsuaaAfgUfAfcuggUfuUfcaaaasusu | 2121 | antisense | 23 |
| GAGAAGAUGGGCUACAAGGCC | 1026 | gsasgaagAfuGfGfGfcuacaaggccL96 | 2122 | sense | 21 |
| GGCCUUGUAGCCCAUCUUCUCUG | 1027 | gsGfsccuUfgUfAfgcccAfuCfuucucsusg | 2123 | antisense | 23 |
| AGAAGAUGGGCUACAAGGCCA | 1028 | asgsaagaUfgGfGfCfuacaaggccaL96 | 2124 | sense | 21 |
| UGGCCUUGUAGCCCAUCUUCUCU | 1029 | usGfsgccUfuGfUfagccCfaUfcuucuscsu | 2125 | antisense | 23 |
| GGCAGAGAAGAUGGGCUACAA | 1030 | gsgscagaGfaAfGfAfugggcuacaaL96 | 2126 | sense | 21 |
| UUGUAGCCCAUCUUCUCUGCCUG | 1031 | usUfsguaGfcCfCfaucuUfcUfcugccsusg | 2127 | antisense | 23 |
| AGGCAGAGAAGAUGGGCUACA | 1032 | asgsgcagAfgAfAfGfaugggcuacaL96 | 2128 | sense | 21 |
| UGUAGCCCAUCUUCUCUGCCUGC | 1033 | usGfsuagCfcCfAfucuuCfuCfugccusgsc | 2129 | antisense | 23 |
| AACGGGCAUGAUGUUGAGUUC | 1034 | asascgggCfaUfGfAfuguugaguucL96 | 2130 | sense | 21 |
| GAACUCAACAUCAUGCCCGUUCC | 1035 | gsAfsacuCfaAfCfaucaUfgCfccguuscsc | 2131 | antisense | 23 |
| ACGGGCAUGAUGUUGAGUUCC | 1036 | ascsgggcAfuGfAfUfguugaguuccL96 | 2132 | sense | 21 |
| GGAACUCAACAUCAUGCCCGUUC | 1037 | gsGfsaacUfcAfAfcaucAfuGfcccgususc | 2133 | antisense | 23 |
| UGGGAACGGGCAUGAUGUUGA | 1038 | usgsggaaCfgGfGfCfaugauguugaL96 | 2134 | sense | 21 |
| UCAACAUCAUGCCCGUUCCCAGG | 1039 | usCfsaacAfuCfAfugccCfgUfucccasgsg | 2135 | antisense | 23 |
| CUGGGAACGGGCAUGAUGUUG | 1040 | csusgggaAfcGfGfGfcaugauguugL96 | 2136 | sense | 21 |
| CAACAUCAUGCCCGUUCCCAGGG | 1041 | csAfsacaUfcAfUfgcccGfuUfcccagsgsg | 2137 | antisense | 23 |
| AUGUGGCUAAAGCAAUAGACC | 1042 | asusguggCfuAfAfAfgcaauagaccL96 | 2138 | sense | 21 |
| GGUCUAUUGCUUUAGCCACAUAU | 1043 | gsGfsucuAfuUfGfcuuuAfgCfcacausasu | 2139 | antisense | 23 |
| UGUGGCUAAAGCAAUAGACCC | 1044 | usgsuggcUfaAfAfGfcaauagacccL96 | 2140 | sense | 21 |
| GGGUCUAUUGCUUUAGCCACAUA | 1045 | gsGfsgucUfaUfUfgcuuUfaGfccacasusa | 2141 | antisense | 23 |
| GCAUAUGUGGCUAAAGCAAUA | 1046 | gscsauauGfuGfGfCfuaaagcaauaL96 | 2142 | sense | 21 |
| UAUUGCUUUAGCCACAUAUGCAG | 1047 | usAfsuugCfuUfUfagccAfcAfuaugcsasg | 2143 | antisense | 23 |
| UGCAUAUGUGGCUAAAGCAAU | 1048 | usgscauaUfgUfGfGfcuaaagcaauL96 | 2144 | sense | 21 |
| AUUGCUUUAGCCACAUAUGCAGC | 1049 | asUfsugcUfuUfAfgccaCfaUfaugcasgsc | 2145 | antisense | 23 |
| AGGAUGCUCCGGAAUGUUGCU | 1050 | asgsgaugCfuCfCfGfgaauguugcuL96 | 2146 | sense | 21 |
| AGCAACAUUCCGGAGCAUCCUUG | 1051 | asGfscaaCfaUfUfccggAfgCfauccususg | 2147 | antisense | 23 |
| GGAUGCUCCGGAAUGUUGCUG | 1052 | gsgsaugcUfcCfGfGfaauguugcugL96 | 2148 | sense | 21 |
| CAGCAACAUUCCGGAGCAUCCUU | 1053 | csAfsgcaAfcAfUfuccgGfaGfcauccsusu | 2149 | antisense | 23 |
| UCCAAGGAUGCUCCGGAAUGU | 1054 | uscscaagGfaUfGfCfuccggaauguL96 | 2150 | sense | 21 |
| ACAUUCCGGAGCAUCCUUGGAUA | 1055 | asCfsauuCfcGfGfagcaUfcCfuuggasusa | 2151 | antisense | 23 |
| AUCCAAGGAUGCUCCGGAAUG | 1056 | asusccaaGfgAfUfGfcuccggaaugL96 | 2152 | sense | 21 |
| CAUUCCGGAGCAUCCUUGGAUAC | 1057 | csAfsuucCfgGfAfgcauCfcUfuggausasc | 2153 | antisense | 23 |
| UCACAUCUUUAGUGUCUGAAU | 1058 | uscsacauCfuUfUfAfgugucugaauL96 | 2154 | sense | 21 |
| AUUCAGACACUAAAGAUGUGAUU | 1059 | asUfsucaGfaCfAfcuaaAfgAfugugasusu | 2155 | antisense | 23 |
| CACAUCUUUAGUGUCUGAAUA | 1060 | csascaucUfuUfAfGfugucugaauaL96 | 2156 | sense | 21 |
| UAUUCAGACACUAAAGAUGUGAU | 1061 | usAfsuucAfgAfCfacuaAfaGfaugugsasu | 2157 | antisense | 23 |
| CCAAUCACAUCUUUAGUGUCU | 1062 | cscsaaucAfcAfUfCfuuuagugucuL96 | 2158 | sense | 21 |
| AGACACUAAAGAUGUGAUUGGAA | 1063 | asGfsacaCfuAfAfagauGfuGfauuggsasa | 2159 | antisense | 23 |
| UCCAAUCACAUCUUUAGUGUC | 1064 | uscscaauCfaCfAfUfcuuuagugucL96 | 2160 | sense | 21 |
| GACACUAAAGAUGUGAUUGGAAA | 1065 | gsAfscacUfaAfAfgaugUfgAfuuggasasa | 2161 | antisense | 23 |
| AAAUGUGUUUAGACAACGUCA | 1066 | asasauguGfuUfUfAfgacaacgucaL96 | 2162 | sense | 21 |
| UGACGUUGUCUAAACACAUUUUC | 1067 | usGfsacgUfuGfUfcuaaAfcAfcauuususc | 2163 | antisense | 23 |
| AAUGUGUUUAGACAACGUCAU | 1068 | asasugugUfuUfAfGfacaacgucauL96 | 2164 | sense | 21 |
| AUGACGUUGUCUAAACACAUUUU | 1069 | asUfsgacGfuUfGfucuaAfaCfacauususu | 2165 | antisense | 23 |
| UUGAAAAUGUGUUUAGACAAC | 1070 | ususgaaaAfuGfUfGfuuuagacaacL96 | 2166 | sense | 21 |
| GUUGUCUAAACACAUUUUCAAUG | 1071 | gsUfsuguCfuAfAfacacAfuUfuucaasusg | 2167 | antisense | 23 |
| AUUGAAAAUGUGUUUAGACAA | 1072 | asusugaaAfaUfGfUfguuuagacaaL96 | 2168 | sense | 21 |
| UUGUCUAAACACAUUUUCAAUGU | 1073 | usUfsgucUfaAfAfcacaUfuUfucaausgsu | 2169 | antisense | 23 |
| UACUAAAGGAAGAAUUCCGGU | 1074 | usascuaaAfgGfAfAfgaauuccgguL96 | 2170 | sense | 21 |
| ACCGGAAUUCUUCCUUUAGUAUC | 1075 | asCfscggAfaUfUfcuucCfuUfuaguasusc | 2171 | antisense | 23 |
| ACUAAAGGAAGAAUUCCGGUU | 1076 | ascsuaaaGfgAfAfGfaauuccgguuL96 | 2172 | sense | 21 |
| AACCGGAAUUCUUCCUUUAGUAU | 1077 | asAfsccgGfaAfUfucuuCfcUfuuagusasu | 2173 | antisense | 23 |
| GAGAUACUAAAGGAAGAAUUC | 1078 | gsasgauaCfuAfAfAfggaagaauucL96 | 2174 | sense | 21 |
| GAAUUCUUCCUUUAGUAUCUCGA | 1079 | gsAfsauuCfuUfCfcuuuAfgUfaucucsgsa | 2175 | antisense | 23 |
| CGAGAUACUAAAGGAAGAAUU | 1080 | csgsagauAfcUfAfAfaggaagaauuL96 | 2176 | sense | 21 |
| AAUUCUUCCUUUAGUAUCUCGAG | 1081 | asAfsuucUfuCfCfuuuaGfuAfucucgsasg | 2177 | antisense | 23 |
| AACUUUGGCUGAUAAUAUUGC | 1082 | asascuuuGfgCfUfGfauaauauugcL96 | 2178 | sense | 21 |
| GCAAUAUUAUCAGCCAAAGUUUC | 1083 | gsCfsaauAfuUfAfucagCfcAfaaguususc | 2179 | antisense | 23 |
| ACUUUGGCUGAUAAUAUUGCA | 1084 | ascsuuugGfcUfGfAfuaauauugcaL96 | 2180 | sense | 21 |
| UGCAAUAUUAUCAGCCAAAGUUU | 1085 | usGfscaaUfaUfUfaucaGfcCfaaagususu | 2181 | antisense | 23 |
| AAGAAACUUUGGCUGAUAAUA | 1086 | asasgaaaCfuUfUfGfgcugauaauaL96 | 2182 | sense | 21 |
| UAUUAUCAGCCAAAGUUUCUUCA | 1087 | usAfsuuaUfcAfGfccaaAfgUfuucuuscsa | 2183 | antisense | 23 |
| GAAGAAACUUUGGCUGAUAAU | 1088 | gsasagaaAfcUfUfUfggcugauaauL96 | 2184 | sense | 21 |
| AUUAUCAGCCAAAGUUUCUUCAU | 1089 | asUfsuauCfaGfCfcaaaGfuUfucuucsasu | 2185 | antisense | 23 |
| AAAUGGCUGAGAAGACUGACA | 1090 | asasauggCfuGfAfGfaagacugacaL96 | 2186 | sense | 21 |
| UGUCAGUCUUCUCAGCCAUUUGA | 1091 | usGfsucaGfuCfUfucucAfgCfcauuusgsa | 2187 | antisense | 23 |
| AAUGGCUGAGAAGACUGACAU | 1092 | asasuggcUfgAfGfAfagacugacauL96 | 2188 | sense | 21 |
| AUGUCAGUCUUCUCAGCCAUUUG | 1093 | asUfsgucAfgUfCfuucuCfaGfccauususg | 2189 | antisense | 23 |
| UAUCAAAUGGCUGAGAAGACU | 1094 | usasucaaAfuGfGfCfugagaagacuL96 | 2190 | sense | 21 |
| AGUCUUCUCAGCCAUUUGAUAUC | 1095 | asGfsucuUfcUfCfagccAfuUfugauasusc | 2191 | antisense | 23 |
| AUAUCAAAUGGCUGAGAAGAC | 1096 | asusaucaAfaUfGfGfcugagaagacL96 | 2192 | sense | 21 |
| GUCUUCUCAGCCAUUUGAUAUCU | 1097 | gsUfscuuCfuCfAfgccaUfuUfgauauscsu | 2193 | antisense | 23 |
| GUGGUUCUUAAAUUGUAAGCU | 1098 | gsusgguuCfuUfAfAfauuguaagcuL96 | 2194 | sense | 21 |
| AGCUUACAAUUUAAGAACCACUG | 1099 | asGfscuuAfcAfAfuuuaAfgAfaccacsusg | 2195 | antisense | 23 |
| UGGUUCUUAAAUUGUAAGCUC | 1100 | usgsguucUfuAfAfAfuuguaagcucL96 | 2196 | sense | 21 |
| GAGCUUACAAUUUAAGAACCACU | 1101 | gsAfsgcuUfaCfAfauuuAfaGfaaccascsu | 2197 | antisense | 23 |
| AACAGUGGUUCUUAAAUUGUA | 1102 | asascaguGfgUfUfCfuuaaauuguaL96 | 2198 | sense | 21 |
| UACAAUUUAAGAACCACUGUUUU | 1103 | usAfscaaUfuUfAfagaaCfcAfcuguususu | 2199 | antisense | 23 |
| AAACAGUGGUUCUUAAAUUGU | 1104 | asasacagUfgGfUfUfcuuaaauuguL96 | 2200 | sense | 21 |
| ACAAUUUAAGAACCACUGUUUUA | 1105 | asCfsaauUfuAfAfgaacCfaCfuguuususa | 2201 | antisense | 23 |
| AAGUCAUCGACAAGACAUUGG | 1106 | asasgucaUfcGfAfCfaagacauuggL96 | 2202 | sense | 21 |
| CCAAUGUCUUGUCGAUGACUUUC | 1107 | csCfsaauGfuCfUfugucGfaUfgacuususc | 2203 | antisense | 23 |
| AGUCAUCGACAAGACAUUGGU | 1108 | asgsucauCfgAfCfAfagacauugguL96 | 2204 | sense | 21 |
| ACCAAUGUCUUGUCGAUGACUUU | 1109 | asCfscaaUfgUfCfuuguCfgAfugacususu | 2205 | antisense | 23 |
| GUGAAAGUCAUCGACAAGACA | 1110 | gsusgaaaGfuCfAfUfcgacaagacaL96 | 2206 | sense | 21 |
| UGUCUUGUCGAUGACUUUCACAU | 1111 | usGfsucuUfgUfCfgaugAfcUfuucacsasu | 2207 | antisense | 23 |
| UGUGAAAGUCAUCGACAAGAC | 1112 | usgsugaaAfgUfCfAfucgacaagacL96 | 2208 | sense | 21 |
| GUCUUGUCGAUGACUUUCACAUU | 1113 | gsUfscuuGfuCfGfaugaCfuUfucacasusu | 2209 | antisense | 23 |
| GAUAAUAUUGCAGCAUUUUCC | 1114 | gsasuaauAfuUfGfCfagcauuuuccL96 | 2210 | sense | 21 |
| GGAAAAUGCUGCAAUAUUAUCAG | 1115 | gsGfsaaaAfuGfCfugcaAfuAfuuaucsasg | 2211 | antisense | 23 |
| AUAAUAUUGCAGCAUUUUCCA | 1116 | asusaauaUfuGfCfAfgcauuuuccaL96 | 2212 | sense | 21 |
| UGGAAAAUGCUGCAAUAUUAUCA | 1117 | usGfsgaaAfaUfGfcugcAfaUfauuauscsa | 2213 | antisense | 23 |
| GGCUGAUAAUAUUGCAGCAUU | 1118 | gsgscugaUfaAfUfAfuugcagcauuL96 | 2214 | sense | 21 |
| AAUGCUGCAAUAUUAUCAGCCAA | 1119 | asAfsugcUfgCfAfauauUfaUfcagccsasa | 2215 | antisense | 23 |
| UGGCUGAUAAUAUUGCAGCAU | 1120 | usgsgcugAfuAfAfUfauugcagcauL96 | 2216 | sense | 21 |
| AUGCUGCAAUAUUAUCAGCCAAA | 1121 | asUfsgcuGfcAfAfuauuAfuCfagccasasa | 2217 | antisense | 23 |
| GCUAAUUUGUAUCAAUGAUUA | 1122 | gscsuaauUfuGfUfAfucaaugauuaL96 | 2218 | sense | 21 |
| UAAUCAUUGAUACAAAUUAGCCG | 1123 | usAfsaucAfuUfGfauacAfaAfuuagcscsg | 2219 | antisense | 23 |
| CUAAUUUGUAUCAAUGAUUAU | 1124 | csusaauuUfgUfAfUfcaaugauuauL96 | 2220 | sense | 21 |
| AUAAUCAUUGAUACAAAUUAGCC | 1125 | asUfsaauCfaUfUfgauaCfaAfauuagscsc | 2221 | antisense | 23 |
| CCCGGCUAAUUUGUAUCAAUG | 1126 | cscscggcUfaAfUfUfuguaucaaugL96 | 2222 | sense | 21 |
| CAUUGAUACAAAUUAGCCGGGGG | 1127 | csAfsuugAfuAfCfaaauUfaGfccgggsgsg | 2223 | antisense | 23 |
| CCCCGGCUAAUUUGUAUCAAU | 1128 | cscsccggCfuAfAfUfuuguaucaauL96 | 2224 | sense | 21 |
| AUUGAUACAAAUUAGCCGGGGGA | 1129 | asUfsugaUfaCfAfaauuAfgCfcggggsgsa | 2225 | antisense | 23 |
| UAAUUGGUGAUACUUCUUUGA | 1130 | usasauugGfuGfAfUfacuucuuugaL96 | 2226 | sense | 21 |
| UCAAAGAAGUAUCACCAAUUACC | 1131 | usCfsaaaGfaAfGfuaucAfcCfaauuascsc | 2227 | antisense | 23 |
| AAUUGGUGAUACUUCUUUGAA | 1132 | asasuuggUfgAfUfAfcuucuuugaaL96 | 2228 | sense | 21 |
| UUCAAAGAAGUAUCACCAAUUAC | 1133 | usUfscaaAfgAfAfguauCfaCfcaauusasc | 2229 | antisense | 23 |
| GCGGUAAUUGGUGAUACUUCU | 1134 | gscsgguaAfuUfGfGfugauacuucuL96 | 2230 | sense | 21 |
| AGAAGUAUCACCAAUUACCGCCA | 1135 | asGfsaagUfaUfCfaccaAfuUfaccgcscsa | 2231 | antisense | 23 |
| GGCGGUAAUUGGUGAUACUUC | 1136 | gsgscgguAfaUfUfGfgugauacuucL96 | 2232 | sense | 21 |
| GAAGUAUCACCAAUUACCGCCAC | 1137 | gsAfsaguAfuCfAfccaaUfuAfccgccsasc | 2233 | antisense | 23 |
| CAGUGGUUCUUAAAUUGUAAG | 1138 | csasguggUfuCfUfUfaaauuguaagL96 | 2234 | sense | 21 |
| CUUACAAUUUAAGAACCACUGUU | 1139 | csUfsuacAfaUfUfuaagAfaCfcacugsusu | 2235 | antisense | 23 |
| AGUGGUUCUUAAAUUGUAAGC | 1140 | asgsugguUfcUfUfAfaauuguaagcL96 | 2236 | sense | 21 |
| GCUUACAAUUUAAGAACCACUGU | 1141 | gsCfsuuaCfaAfUfuuaaGfaAfccacusgsu | 2237 | antisense | 23 |
| AAAACAGUGGUUCUUAAAUUG | 1142 | asasaacaGfuGfGfUfucuuaaauugL96 | 2238 | sense | 21 |
| CAAUUUAAGAACCACUGUUUUAA | 1143 | csAfsauuUfaAfGfaaccAfcUfguuuusasa | 2239 | antisense | 23 |
| UAAAACAGUGGUUCUUAAAUU | 1144 | usasaaacAfgUfGfGfuucuuaaauuL96 | 2240 | sense | 21 |
| AAUUUAAGAACCACUGUUUUAAA | 1145 | asAfsuuuAfaGfAfaccaCfuGfuuuuasasa | 2241 | antisense | 23 |
| ACCUGUAUUCUGUUUACAUGU | 1146 | ascscuguAfuUfCfUfguuuacauguL96 | 2242 | sense | 21 |
| ACAUGUAAACAGAAUACAGGUUA | 1147 | asCfsaugUfaAfAfcagaAfuAfcaggususa | 2243 | antisense | 23 |
| CCUGUAUUCUGUUUACAUGUC | 1148 | cscsuguaUfuCfUfGfuuuacaugucL96 | 2244 | sense | 21 |
| GACAUGUAAACAGAAUACAGGUU | 1149 | gsAfscauGfuAfAfacagAfaUfacaggsusu | 2245 | antisense | 23 |
| AUUAACCUGUAUUCUGUUUAC | 1150 | asusuaacCfuGfUfAfuucuguuuacL96 | 2246 | sense | 21 |
| GUAAACAGAAUACAGGUUAAUAA | 1151 | gsUfsaaaCfaGfAfauacAfgGfuuaausasa | 2247 | antisense | 23 |
| UAUUAACCUGUAUUCUGUUUA | 1152 | usasuuaaCfcUfGfUfauucuguuuaL96 | 2248 | sense | 21 |
| UAAACAGAAUACAGGUUAAUAAA | 1153 | usAfsaacAfgAfAfuacaGfgUfuaauasasa | 2249 | antisense | 23 |
| AAGAAACUUUGGCUGAUAAUA | 1154 | asasgaaaCfuUfUfGfgcugauaauaL96 | 2250 | sense | 21 |
| UAUUAUCAGCCAAAGUUUCUUCA | 1155 | usAfsuuaUfcAfGfccaaAfgUfuucuuscsa | 2251 | antisense | 23 |
| AGAAACUUUGGCUGAUAAUAU | 1156 | asgsaaacUfuUfGfGfcugauaauauL96 | 2252 | sense | 21 |
| AUAUUAUCAGCCAAAGUUUCUUC | 1157 | asUfsauuAfuCfAfgccaAfaGfuuucususc | 2253 | antisense | 23 |
| GAUGAAGAAACUUUGGCUGAU | 1158 | gsasugaaGfaAfAfCfuuuggcugauL96 | 2254 | sense | 21 |
| AUCAGCCAAAGUUUCUUCAUCAU | 1159 | asUfscagCfcAfAfaguuUfcUfucaucsasu | 2255 | antisense | 23 |
| UGAUGAAGAAACUUUGGCUGA | 1160 | usgsaugaAfgAfAfAfcuuuggcugaL96 | 2256 | sense | 21 |
| UCAGCCAAAGUUUCUUCAUCAUU | 1161 | usCfsagcCfaAfAfguuuCfuUfcaucasusu | 2257 | antisense | 23 |
| GAAAGGUGUUCAAGAUGUCCU | 1162 | gsasaaggUfgUfUfCfaagauguccuL96 | 2258 | sense | 21 |
| AGGACAUCUUGAACACCUUUCUC | 1163 | asGfsgacAfuCfUfugaaCfaCfcuuucsusc | 2259 | antisense | 23 |
| AAAGGUGUUCAAGAUGUCCUC | 1164 | asasagguGfuUfCfAfagauguccucL96 | 2260 | sense | 21 |
| GAGGACAUCUUGAACACCUUUCU | 1165 | gsAfsggaCfaUfCfuugaAfcAfccuuuscsu | 2261 | antisense | 23 |
| GGGAGAAAGGUGUUCAAGAUG | 1166 | gsgsgagaAfaGfGfUfguucaagaugL96 | 2262 | sense | 21 |
| CAUCUUGAACACCUUUCUCCCCC | 1167 | csAfsucuUfgAfAfcaccUfuUfcucccscsc | 2263 | antisense | 23 |
| GGGGAGAAAGGUGUUCAAGAU | 1168 | gsgsggagAfaAfGfGfuguucaagauL96 | 2264 | sense | 21 |
| AUCUUGAACACCUUUCUCCCCCU | 1169 | asUfscuuGfaAfCfaccuUfuCfuccccscsu | 2265 | antisense | 23 |
| AUCUUGGUGUCGAAUCAUGGG | 1170 | asuscuugGfuGfUfCfgaaucaugggL96 | 2266 | sense | 21 |
| CCCAUGAUUCGACACCAAGAUCC | 1171 | csCfscauGfaUfUfcgacAfcCfaagauscsc | 2267 | antisense | 23 |
| UCUUGGUGUCGAAUCAUGGGG | 1172 | uscsuuggUfgUfCfGfaaucauggggL96 | 2268 | sense | 21 |
| CCCCAUGAUUCGACACCAAGAUC | 1173 | csCfsccaUfgAfUfucgaCfaCfcaagasusc | 2269 | antisense | 23 |
| UGGGAUCUUGGUGUCGAAUCA | 1174 | usgsggauCfuUfGfGfugucgaaucaL96 | 2270 | sense | 21 |
| UGAUUCGACACCAAGAUCCCAUU | 1175 | usGfsauuCfgAfCfaccaAfgAfucccasusu | 2271 | antisense | 23 |
| AUGGGAUCUUGGUGUCGAAUC | 1176 | asusgggaUfcUfUfGfgugucgaaucL96 | 2272 | sense | 21 |
| GAUUCGACACCAAGAUCCCAUUC | 1177 | gsAfsuucGfaCfAfccaaGfaUfcccaususc | 2273 | antisense | 23 |
| GCUACAAGGCCAUAUUUGUGA | 1178 | gscsuacaAfgGfCfCfauauuugugaL96 | 2274 | sense | 21 |
| UCACAAAUAUGGCCUUGUAGCCC | 1179 | usCfsacaAfaUfAfuggcCfuUfguagescsc | 2275 | antisense | 23 |
| CUACAAGGCCAUAUUUGUGAC | 1180 | csusacaaGfgCfCfAfuauuugugacL96 | 2276 | sense | 21 |
| GUCACAAAUAUGGCCUUGUAGCC | 1181 | gsUfscacAfaAfUfauggCfcUfuguagscsc | 2277 | antisense | 23 |
| AUGGGCUACAAGGCCAUAUUU | 1182 | asusgggcUfaCfAfAfggccauauuuL96 | 2278 | sense | 21 |
| AAAUAUGGCCUUGUAGCCCAUCU | 1183 | asAfsauaUfgGfCfcuugUfaGfcccauscsu | 2279 | antisense | 23 |
| GAUGGGCUACAAGGCCAUAUU | 1184 | gsasugggCfuAfCfAfaggccauauuL96 | 2280 | sense | 21 |
| AAUAUGGCCUUGUAGCCCAUCUU | 1185 | asAfsuauGfgCfCfuuguAfgCfccaucsusu | 2281 | antisense | 23 |
| ACUGGAGAGAAUUGGAAUGGG | 1186 | ascsuggaGfaGfAfAfuuggaaugggL96 | 2282 | sense | 21 |
| CCCAUUCCAAUUCUCUCCAGUGC | 1187 | csCfscauUfcCfAfauucUfcUfccagusgsc | 2283 | antisense | 23 |
| CUGGAGAGAAUUGGAAUGGGU | 1188 | csusggagAfgAfAfUfuggaauggguL96 | 2284 | sense | 21 |
| ACCCAUUCCAAUUCUCUCCAGUG | 1189 | asCfsccaUfuCfCfaauuCfuCfuccagsusg | 2285 | antisense | 23 |
| UAGCACUGGAGAGAAUUGGAA | 1190 | usasgcacUfgGfAfGfagaauuggaaL96 | 2286 | sense | 21 |
| UUCCAAUUCUCUCCAGUGCUACC | 1191 | usUfsccaAfuUfCfucucCfaGfugcuascsc | 2287 | antisense | 23 |
| GUAGCACUGGAGAGAAUUGGA | 1192 | gsusagcaCfuGfGfAfgagaauuggaL96 | 2288 | sense | 21 |
| UCCAAUUCUCUCCAGUGCUACCU | 1193 | usCfscaaUfuCfUfcuccAfgUfgcuacscsu | 2289 | antisense | 23 |
| ACAGUGGACACACCUUACCUG | 1194 | ascsagugGfaCfAfCfaccuuaccugL96 | 2290 | sense | 21 |
| CAGGUAAGGUGUGUCCACUGUCA | 1195 | csAfsgguAfaGfGfugugUfcCfacuguscsa | 2291 | antisense | 23 |
| CAGUGGACACACCUUACCUGG | 1196 | csasguggAfcAfCfAfccuuaccuggL96 | 2292 | sense | 21 |
| CCAGGUAAGGUGUGUCCACUGUC | 1197 | csCfsaggUfaAfGfguguGfuCfcacugsusc | 2293 | antisense | 23 |
| UGUGACAGUGGACACACCUUA | 1198 | usgsugacAfgUfGfGfacacaccuuaL96 | 2294 | sense | 21 |
| UAAGGUGUGUCCACUGUCACAAA | 1199 | usAfsaggUfgUfGfuccaCfuGfucacasasa | 2295 | antisense | 23 |
| UUGUGACAGUGGACACACCUU | 1200 | ususgugaCfaGfUfGfgacacaccuuL96 | 2296 | sense | 21 |
| AAGGUGUGUCCACUGUCACAAAU | 1201 | asAfsgguGfuGfUfccacUfgUfcacaasasu | 2297 | antisense | 23 |
| GAAGACUGACAUCAUUGCCAA | 1202 | gsasagacUfgAfCfAfucauugccaaL96 | 2298 | sense | 21 |
| UUGGCAAUGAUGUCAGUCUUCUC | 1203 | usUfsggcAfaUfGfauguCfaGfucuucsusc | 2299 | antisense | 23 |
| AAGACUGACAUCAUUGCCAAU | 1204 | asasgacuGfaCfAfUfcauugccaauL96 | 2300 | sense | 21 |
| AUUGGCAAUGAUGUCAGUCUUCU | 1205 | asUfsuggCfaAfUfgaugUfcAfgucuuscsu | 2301 | antisense | 23 |
| CUGAGAAGACUGACAUCAUUG | 1206 | csusgagaAfgAfCfUfgacaucauugL96 | 2302 | sense | 21 |
| CAAUGAUGUCAGUCUUCUCAGCC | 1207 | csAfsaugAfuGfUfcaguCfuUfcucagscsc | 2303 | antisense | 23 |
| GCUGAGAAGACUGACAUCAUU | 1208 | gscsugagAfaGfAfCfugacaucauuL96 | 2304 | sense | 21 |
| AAUGAUGUCAGUCUUCUCAGCCA | 1209 | asAfsugaUfgUfCfagucUfuCfucagcscsa | 2305 | antisense | 23 |
| GCUCAGGUUCAAAGUGUUGGU | 1210 | gscsucagGfuUfCfAfaaguguugguL96 | 2306 | sense | 21 |
| ACCAACACUUUGAACCUGAGCUU | 1211 | asCfscaaCfaCfUfuugaAfcCfugagcsusu | 2307 | antisense | 23 |
| CUCAGGUUCAAAGUGUUGGUA | 1212 | csuscaggUfuCfAfAfaguguugguaL96 | 2308 | sense | 21 |
| UACCAACACUUUGAACCUGAGCU | 1213 | usAfsccaAfcAfCfuuugAfaCfcugagscsu | 2309 | antisense | 23 |
| GUAAGCUCAGGUUCAAAGUGU | 1214 | gsusaagcUfcAfGfGfuucaaaguguL96 | 2310 | sense | 21 |
| ACACUUUGAACCUGAGCUUACAA | 1215 | asCfsacuUfuGfAfaccuGfaGfcuuacsasa | 2311 | antisense | 23 |
| UGUAAGCUCAGGUUCAAAGUG | 1216 | usgsuaagCfuCfAfGfguucaaagugL96 | 2312 | sense | 21 |
| CACUUUGAACCUGAGCUUACAAU | 1217 | csAfscuuUfgAfAfccugAfgCfuuacasasu | 2313 | antisense | 23 |
| AUGUAUUACUUGACAAAGAGA | 1218 | asusguauUfaCfUfUfgacaaagagaL96 | 2314 | sense | 21 |
| UCUCUUUGUCAAGUAAUACAUGC | 1219 | usCfsucuUfuGfUfcaagUfaAfuacausgsc | 2315 | antisense | 23 |
| UGUAUUACUUGACAAAGAGAC | 1220 | usgsuauuAfcUfUfGfacaaagagacL96 | 2316 | sense | 21 |
| GUCUCUUUGUCAAGUAAUACAUG | 1221 | gsUfscucUfuUfGfucaaGfuAfauacasusg | 2317 | antisense | 23 |
| CAGCAUGUAUUACUUGACAAA | 1222 | csasgcauGfuAfUfUfacuugacaaaL96 | 2318 | sense | 21 |
| UUUGUCAAGUAAUACAUGCUGAA | 1223 | usUfsuguCfaAfGfuaauAfcAfugcugsasa | 2319 | antisense | 23 |
| UCAGCAUGUAUUACUUGACAA | 1224 | uscsagcaUfgUfAfUfuacuugacaaL96 | 2320 | sense | 21 |
| UUGUCAAGUAAUACAUGCUGAAA | 1225 | usUfsgucAfaGfUfaauaCfaUfgcugasasa | 2321 | antisense | 23 |
| CUGCAACUGUAUAUCUACAAG | 1226 | csusgcaaCfuGfUfAfuaucuacaagL96 | 2322 | sense | 21 |
| CUUGUAGAUAUACAGUUGCAGCC | 1227 | csUfsuguAfgAfUfauacAfgUfugcagscsc | 2323 | antisense | 23 |
| UGCAACUGUAUAUCUACAAGG | 1228 | usgscaacUfgUfAfUfaucuacaaggL96 | 2324 | sense | 21 |
| CCUUGUAGAUAUACAGUUGCAGC | 1229 | csCfsuugUfaGfAfuauaCfaGfuugcasgsc | 2325 | antisense | 23 |
| UUGGCUGCAACUGUAUAUCUA | 1230 | ususggcuGfcAfAfCfuguauaucuaL96 | 2326 | sense | 21 |
| UAGAUAUACAGUUGCAGCCAACG | 1231 | usAfsgauAfuAfCfaguuGfcAfgccaascsg | 2327 | antisense | 23 |
| GUUGGCUGCAACUGUAUAUCU | 1232 | gsusuggcUfgCfAfAfcuguauaucuL96 | 2328 | sense | 21 |
| AGAUAUACAGUUGCAGCCAACGA | 1233 | asGfsauaUfaCfAfguugCfaGfccaacsgsa | 2329 | antisense | 23 |
| CAAAUGAUGAAGAAACUUUGG | 1234 | csasaaugAfuGfAfAfgaaacuuuggL96 | 2330 | sense | 21 |
| CCAAAGUUUCUUCAUCAUUUGCC | 1235 | csCfsaaaGfuUfUfcuucAfuCfauuugscsc | 2331 | antisense | 23 |
| AAAUGAUGAAGAAACUUUGGC | 1236 | asasaugaUfgAfAfGfaaacuuuggcL96 | 2332 | sense | 21 |
| GCCAAAGUUUCUUCAUCAUUUGC | 1237 | gsCfscaaAfgUfUfucuuCfaUfcauuusgsc | 2333 | antisense | 23 |
| GGGGCAAAUGAUGAAGAAACU | 1238 | gsgsggcaAfaUfGfAfugaagaaacuL96 | 2334 | sense | 21 |
| AGUUUCUUCAUCAUUUGCCCCAG | 1239 | asGfsuuuCfuUfCfaucaUfuUfgccccsasg | 2335 | antisense | 23 |
| UGGGGCAAAUGAUGAAGAAAC | 1240 | usgsgggcAfaAfUfGfaugaagaaacL96 | 2336 | sense | 21 |
| GUUUCUUCAUCAUUUGCCCCAGA | 1241 | gsUfsuucUfuCfAfucauUfuGfccccasgsa | 2337 | antisense | 23 |
| CAAAGGGUGUCGUUCUUUUCC | 1242 | csasaaggGfuGfUfCfguucuuuuccL96 | 2338 | sense | 21 |
| GGAAAAGAACGACACCCUUUGUA | 1243 | gsGfsaaaAfgAfAfcgacAfcCfcuuugsusa | 2339 | antisense | 23 |
| AAAGGGUGUCGUUCUUUUCCA | 1244 | asasagggUfgUfCfGfuucuuuuccaL96 | 2340 | sense | 21 |
| UGGAAAAGAACGACACCCUUUGU | 1245 | usGfsgaaAfaGfAfacgaCfaCfccuuusgsu | 2341 | antisense | 23 |
| AAUACAAAGGGUGUCGUUCUU | 1246 | asasuacaAfaGfGfGfugucguucuuL96 | 2342 | sense | 21 |
| AAGAACGACACCCUUUGUAUUGA | 1247 | asAfsgaaCfgAfCfacccUfuUfguauusgsa | 2343 | antisense | 23 |
| CAAUACAAAGGGUGUCGUUCU | 1248 | csasauacAfaAfGfGfgugucguucuL96 | 2344 | sense | 21 |
| AGAACGACACCCUUUGUAUUGAA | 1249 | asGfsaacGfaCfAfcccuUfuGfuauugsasa | 2345 | antisense | 23 |
| AAAGGCACUGAUGUUCUGAAA | 1250 | asasaggcAfcUfGfAfuguucugaaaL96 | 2346 | sense | 21 |
| UUUCAGAACAUCAGUGCCUUUCC | 1251 | usUfsucaGfaAfCfaucaGfuGfccuuuscsc | 2347 | antisense | 23 |
| AAGGCACUGAUGUUCUGAAAG | 1252 | asasggcaCfuGfAfUfguucugaaagL96 | 2348 | sense | 21 |
| CUUUCAGAACAUCAGUGCCUUUC | 1253 | csUfsuucAfgAfAfcaucAfgUfgccuususc | 2349 | antisense | 23 |
| GCGGAAAGGCACUGAUGUUCU | 1254 | gscsggaaAfgGfCfAfcugauguucuL96 | 2350 | sense | 21 |
| AGAACAUCAGUGCCUUUCCGCAC | 1255 | asGfsaacAfuCfAfgugcCfuUfuccgcsasc | 2351 | antisense | 23 |
| UGCGGAAAGGCACUGAUGUUC | 1256 | usgscggaAfaGfGfCfacugauguucL96 | 2352 | sense | 21 |
| GAACAUCAGUGCCUUUCCGCACA | 1257 | gsAfsacaUfcAfGfugccUfuUfccgcascsa | 2353 | antisense | 23 |
| AAGGAUGCUCCGGAAUGUUGC | 1258 | asasggauGfcUfCfCfggaauguugcL96 | 2354 | sense | 21 |
| GCAACAUUCCGGAGCAUCCUUGG | 1259 | gsCfsaacAfuUfCfcggaGfcAfuccuusgsg | 2355 | antisense | 23 |
| AGGAUGCUCCGGAAUGUUGCU | 1260 | asgsgaugCfuCfCfGfgaauguugcuL96 | 2356 | sense | 21 |
| AGCAACAUUCCGGAGCAUCCUUG | 1261 | asGfscaaCfaUfUfccggAfgCfauccususg | 2357 | antisense | 23 |
| AUCCAAGGAUGCUCCGGAAUG | 1262 | asusccaaGfgAfUfGfcuccggaaugL96 | 2358 | sense | 21 |
| CAUUCCGGAGCAUCCUUGGAUAC | 1263 | csAfsuucCfgGfAfgcauCfcUfuggausasc | 2359 | antisense | 23 |
| UAUCCAAGGAUGCUCCGGAAU | 1264 | usasuccaAfgGfAfUfgcuccggaauL96 | 2360 | sense | 21 |
| AUUCCGGAGCAUCCUUGGAUACA | 1265 | asUfsuccGfgAfGfcaucCfuUfggauascsa | 2361 | antisense | 23 |
| AAUGGGUGGCGGUAAUUGGUG | 1266 | asasugggUfgGfCfGfguaauuggugL96 | 2362 | sense | 21 |
| CACCAAUUACCGCCACCCAUUCC | 1267 | csAfsccaAfuUfAfccgcCfaCfccauuscsc | 2363 | antisense | 23 |
| AUGGGUGGCGGUAAUUGGUGA | 1268 | asusggguGfgCfGfGfuaauuggugaL96 | 2364 | sense | 21 |
| UCACCAAUUACCGCCACCCAUUC | 1269 | usCfsaccAfaUfUfaccgCfcAfcccaususc | 2365 | antisense | 23 |
| UUGGAAUGGGUGGCGGUAAUU | 1270 | ususggaaUfgGfGfUfggcgguaauuL96 | 2366 | sense | 21 |
| AAUUACCGCCACCCAUUCCAAUU | 1271 | asAfsuuaCfcGfCfcaccCfaUfuccaasusu | 2367 | antisense | 23 |
| AUUGGAAUGGGUGGCGGUAAU | 1272 | asusuggaAfuGfGfGfuggcgguaauL96 | 2368 | sense | 21 |
| AUUACCGCCACCCAUUCCAAUUC | 1273 | asUfsuacCfgCfCfacccAfuUfccaaususc | 2369 | antisense | 23 |
| GGAAAGGCACUGAUGUUCUGA | 1274 | gsgsaaagGfcAfCfUfgauguucugaL96 | 2370 | sense | 21 |
| UCAGAACAUCAGUGCCUUUCCGC | 1275 | usCfsagaAfcAfUfcaguGfcCfuuuccsgsc | 2371 | antisense | 23 |
| GAAAGGCACUGAUGUUCUGAA | 1276 | gsasaaggCfaCfUfGfauguucugaaL96 | 2372 | sense | 21 |
| UUCAGAACAUCAGUGCCUUUCCG | 1277 | usUfscagAfaCfAfucagUfgCfcuuucscsg | 2373 | antisense | 23 |
| GUGCGGAAAGGCACUGAUGUU | 1278 | gsusgcggAfaAfGfGfcacugauguuL96 | 2374 | sense | 21 |
| AACAUCAGUGCCUUUCCGCACAC | 1279 | asAfscauCfaGfUfgccuUfuCfcgcacsasc | 2375 | antisense | 23 |
| UGUGCGGAAAGGCACUGAUGU | 1280 | usgsugcgGfaAfAfGfgcacugauguL96 | 2376 | sense | 21 |
| ACAUCAGUGCCUUUCCGCACACC | 1281 | asCfsaucAfgUfGfccuuUfcCfgcacascsc | 2377 | antisense | 23 |
| AAUUGUAAGCUCAGGUUCAAA | 1282 | asasuuguAfaGfCfUfcagguucaaaL96 | 2378 | sense | 21 |
| UUUGAACCUGAGCUUACAAUUUA | 1283 | usUfsugaAfcCfUfgagcUfuAfcaauususa | 2379 | antisense | 23 |
| AUUGUAAGCUCAGGUUCAAAG | 1284 | asusuguaAfgCfUfCfagguucaaagL96 | 2380 | sense | 21 |
| CUUUGAACCUGAGCUUACAAUUU | 1285 | csUfsuugAfaCfCfugagCfuUfacaaususu | 2381 | antisense | 23 |
| CUUAAAUUGUAAGCUCAGGUU | 1286 | csusuaaaUfuGfUfAfagcucagguuL96 | 2382 | sense | 21 |
| AACCUGAGCUUACAAUUUAAGAA | 1287 | asAfsccuGfaGfCfuuacAfaUfuuaagsasa | 2383 | antisense | 23 |
| UCUUAAAUUGUAAGCUCAGGU | 1288 | uscsuuaaAfuUfGfUfaagcucagguL96 | 2384 | sense | 21 |
| ACCUGAGCUUACAAUUUAAGAAC | 1289 | asCfscugAfgCfUfuacaAfuUfuaagasasc | 2385 | antisense | 23 |
| GCAAACACUAAGGUGAAAAGA | 1290 | gscsaaacAfcUfAfAfggugaaaagaL96 | 2386 | sense | 21 |
| UCUUUUCACCUUAGUGUUUGCUA | 1291 | usCfsuuuUfcAfCfcuuaGfuGfuuugcsusa | 2387 | antisense | 23 |
| CAAACACUAAGGUGAAAAGAU | 1292 | csasaacaCfuAfAfGfgugaaaagauL96 | 2388 | sense | 21 |
| AUCUUUUCACCUUAGUGUUUGCU | 1293 | asUfscuuUfuCfAfccuuAfgUfguuugscsu | 2389 | antisense | 23 |
| GGUAGCAAACACUAAGGUGAA | 1294 | gsgsuagcAfaAfCfAfcuaaggugaaL96 | 2390 | sense | 21 |
| UUCACCUUAGUGUUUGCUACCUC | 1295 | usUfscacCfuUfAfguguUfuGfcuaccsusc | 2391 | antisense | 23 |
| AGGUAGCAAACACUAAGGUGA | 1296 | asgsguagCfaAfAfCfacuaaggugaL96 | 2392 | sense | 21 |
| UCACCUUAGUGUUUGCUACCUCC | 1297 | usCfsaccUfuAfGfuguuUfgCfuaccuscsc | 2393 | antisense | 23 |
| AGGUAGCAAACACUAAGGUGA | 1298 | asgsguagCfaAfAfCfacuaaggugaL96 | 2394 | sense | 21 |
| UCACCUUAGUGUUUGCUACCUCC | 1299 | usCfsaccUfuAfGfuguuUfgCfuaccuscsc | 2395 | antisense | 23 |
| GGUAGCAAACACUAAGGUGAA | 1300 | gsgsuagcAfaAfCfAfcuaaggugaaL96 | 2396 | sense | 21 |
| UUCACCUUAGUGUUUGCUACCUC | 1301 | usUfscacCfuUfAfguguUfuGfcuaccsusc | 2397 | antisense | 23 |
| UUGGAGGUAGCAAACACUAAG | 1302 | ususggagGfuAfGfCfaaacacuaagL96 | 2398 | sense | 21 |
| CUUAGUGUUUGCUACCUCCAAUU | 1303 | csUfsuagUfgUfUfugcuAfcCfuccaasusu | 2399 | antisense | 23 |
| AUUGGAGGUAGCAAACACUAA | 1304 | asusuggaGfgUfAfGfcaaacacuaaL96 | 2400 | sense | 21 |
| UUAGUGUUUGCUACCUCCAAUUU | 1305 | usUfsaguGfuUfUfgcuaCfcUfccaaususu | 2401 | antisense | 23 |
| UAAAGUGCUGUAUCCUUUAGU | 1306 | usasaaguGfcUfGfUfauccuuuaguL96 | 2402 | sense | 21 |
| ACUAAAGGAUACAGCACUUUAGC | 1307 | asCfsuaaAfgGfAfuacaGfcAfcuuuasgsc | 2403 | antisense | 23 |
| AAAGUGCUGUAUCCUUUAGUA | 1308 | asasagugCfuGfUfAfuccuuuaguaL96 | 2404 | sense | 21 |
| UACUAAAGGAUACAGCACUUUAG | 1309 | usAfscuaAfaGfGfauacAfgCfacuuusasg | 2405 | antisense | 23 |
| AGGCUAAAGUGCUGUAUCCUU | 1310 | asgsgcuaAfaGfUfGfcuguauccuuL96 | 2406 | sense | 21 |
| AAGGAUACAGCACUUUAGCCUGC | 1311 | asAfsggaUfaCfAfgcacUfuUfagccusgsc | 2407 | antisense | 23 |
| CAGGCUAAAGUGCUGUAUCCU | 1312 | csasggcuAfaAfGfUfgcuguauccuL96 | 2408 | sense | 21 |
| AGGAUACAGCACUUUAGCCUGCC | 1313 | asGfsgauAfcAfGfcacuUfuAfgccugscsc | 2409 | antisense | 23 |
| AAGACAUUGGUGAGGAAAAAU | 1314 | asasgacaUfuGfGfUfgaggaaaaauL96 | 2410 | sense | 21 |
| AUUUUUCCUCACCAAUGUCUUGU | 1315 | asUfsuuuUfcCfUfcaccAfaUfgucuusgsu | 2411 | antisense | 23 |
| AGACAUUGGUGAGGAAAAAUC | 1316 | asgsacauUfgGfUfGfaggaaaaaucL96 | 2412 | sense | 21 |
| GAUUUUUCCUCACCAAUGUCUUG | 1317 | gsAfsuuuUfuCfCfucacCfaAfugucususg | 2413 | antisense | 23 |
| CGACAAGACAUUGGUGAGGAA | 1318 | csgsacaaGfaCfAfUfuggugaggaaL96 | 2414 | sense | 21 |
| UUCCUCACCAAUGUCUUGUCGAU | 1319 | usUfsccuCfaCfCfaaugUfcUfugucgsasu | 2415 | antisense | 23 |
| UCGACAAGACAUUGGUGAGGA | 1320 | uscsgacaAfgAfCfAfuuggugaggaL96 | 2416 | sense | 21 |
| UCCUCACCAAUGUCUUGUCGAUG | 1321 | usCfscucAfcCfAfauguCfuUfgucgasusg | 2417 | antisense | 23 |
| AAGAUGUCCUCGAGAUACUAA | 1322 | asasgaugUfcCfUfCfgagauacuaaL96 | 2418 | sense | 21 |
| UUAGUAUCUCGAGGACAUCUUGA | 1323 | usUfsaguAfuCfUfcgagGfaCfaucuusgsa | 2419 | antisense | 23 |
| AGAUGUCCUCGAGAUACUAAA | 1324 | asgsauguCfcUfCfGfagauacuaaaL96 | 2420 | sense | 21 |
| UUUAGUAUCUCGAGGACAUCUUG | 1325 | usUfsuagUfaUfCfucgaGfgAfcaucususg | 2421 | antisense | 23 |
| GUUCAAGAUGUCCUCGAGAUA | 1326 | gsusucaaGfaUfGfUfccucgagauaL96 | 2422 | sense | 21 |
| UAUCUCGAGGACAUCUUGAACAC | 1327 | usAfsucuCfgAfGfgacaUfcUfugaacsasc | 2423 | antisense | 23 |
| UGUUCAAGAUGUCCUCGAGAU | 1328 | usgsuucaAfgAfUfGfuccucgagauL96 | 2424 | sense | 21 |
| AUCUCGAGGACAUCUUGAACACC | 1329 | asUfscucGfaGfGfacauCfuUfgaacascsc | 2425 | antisense | 23 |
| GAGAAAGGUGUUCAAGAUGUC | 1330 | gsasgaaaGfgUfGfUfucaagaugucL96 | 2426 | sense | 21 |
| GACAUCUUGAACACCUUUCUCCC | 1331 | gsAfscauCfuUfGfaacaCfcUfuucucscsc | 2427 | antisense | 23 |
| AGAAAGGUGUUCAAGAUGUCC | 1332 | asgsaaagGfuGfUfUfcaagauguccL96 | 2428 | sense | 21 |
| GGACAUCUUGAACACCUUUCUCC | 1333 | gsGfsacaUfcUfUfgaacAfcCfuuucuscsc | 2429 | antisense | 23 |
| GGGGGAGAAAGGUGUUCAAGA | 1334 | gsgsgggaGfaAfAfGfguguucaagaL96 | 2430 | sense | 21 |
| UCUUGAACACCUUUCUCCCCCUG | 1335 | usCfsuugAfaCfAfccuuUfcUfcccccsusg | 2431 | antisense | 23 |
| AGGGGGAGAAAGGUGUUCAAG | 1336 | asgsggggAfgAfAfAfgguguucaagL96 | 2432 | sense | 21 |
| CUUGAACACCUUUCUCCCCCUGG | 1337 | csUfsugaAfcAfCfcuuuCfuCfccccusgsg | 2433 | antisense | 23 |
| GCUGGGAAGAUAUCAAAUGGC | 1338 | gscsugggAfaGfAfUfaucaaauggcL96 | 2434 | sense | 21 |
| GCCAUUUGAUAUCUUCCCAGCUG | 1339 | gsCfscauUfuGfAfuaucUfuCfccagcsusg | 2435 | antisense | 23 |
| CUGGGAAGAUAUCAAAUGGCU | 1340 | csusgggaAfgAfUfAfucaaauggcuL96 | 2436 | sense | 21 |
| AGCCAUUUGAUAUCUUCCCAGCU | 1341 | asGfsccaUfuUfGfauauCfuUfcccagscsu | 2437 | antisense | 23 |
| AUCAGCUGGGAAGAUAUCAAA | 1342 | asuscagcUfgGfGfAfagauaucaaaL96 | 2438 | sense | 21 |
| UUUGAUAUCUUCCCAGCUGAUAG | 1343 | usUfsugaUfaUfCfuuccCfaGfcugausasg | 2439 | antisense | 23 |
| UAUCAGCUGGGAAGAUAUCAA | 1344 | usasucagCfuGfGfGfaagauaucaaL96 | 2440 | sense | 21 |
| UUGAUAUCUUCCCAGCUGAUAGA | 1345 | usUfsgauAfuCfUfucccAfgCfugauasgsa | 2441 | antisense | 23 |
| UCUGUCGACUUCUGUUUUAGG | 1346 | uscsugucGfaCfUfUfcuguuuuaggL96 | 2442 | sense | 21 |
| CCUAAAACAGAAGUCGACAGAUC | 1347 | csCfsuaaAfaCfAfgaagUfcGfacagasusc | 2443 | antisense | 23 |
| CUGUCGACUUCUGUUUUAGGA | 1348 | csusgucgAfcUfUfCfuguuuuaggaL96 | 2444 | sense | 21 |
| UCCUAAAACAGAAGUCGACAGAU | 1349 | usCfscuaAfaAfCfagaaGfuCfgacagsasu | 2445 | antisense | 23 |
| CAGAUCUGUCGACUUCUGUUU | 1350 | csasgaucUfgUfCfGfacuucuguuuL96 | 2446 | sense | 21 |
| AAACAGAAGUCGACAGAUCUGUU | 1351 | asAfsacaGfaAfGfucgaCfaGfaucugsusu | 2447 | antisense | 23 |
| ACAGAUCUGUCGACUUCUGUU | 1352 | ascsagauCfuGfUfCfgacuucuguuL96 | 2448 | sense | 21 |
| AACAGAAGUCGACAGAUCUGUUU | 1353 | asAfscagAfaGfUfcgacAfgAfucugususu | 2449 | antisense | 23 |
| UACUUCUUUGAAUGUAGAUUU | 1354 | usascuucUfuUfGfAfauguagauuuL96 | 2450 | sense | 21 |
| AAAUCUACAUUCAAAGAAGUAUC | 1355 | asAfsaucUfaCfAfuucaAfaGfaaguasusc | 2451 | antisense | 23 |
| ACUUCUUUGAAUGUAGAUUUC | 1356 | ascsuucuUfuGfAfAfuguagauuucL96 | 2452 | sense | 21 |
| GAAAUCUACAUUCAAAGAAGUAU | 1357 | gsAfsaauCfuAfCfauucAfaAfgaagusasu | 2453 | antisense | 23 |
| GUGAUACUUCUUUGAAUGUAG | 1358 | gsusgauaCfuUfCfUfuugaauguagL96 | 2454 | sense | 21 |
| CUACAUUCAAAGAAGUAUCACCA | 1359 | csUfsacaUfuCfAfaagaAfgUfaucacscsa | 2455 | antisense | 23 |
| GGUGAUACUUCUUUGAAUGUA | 1360 | gsgsugauAfcUfUfCfuuugaauguaL96 | 2456 | sense | 21 |
| UACAUUCAAAGAAGUAUCACCAA | 1361 | usAfscauUfcAfAfagaaGfuAfucaccsasa | 2457 | antisense | 23 |
| UGGGAAGAUAUCAAAUGGCUG | 1362 | usgsggaaGfaUfAfUfcaaauggcugL96 | 2458 | sense | 21 |
| CAGCCAUUUGAUAUCUUCCCAGC | 1363 | csAfsgccAfuUfUfgauaUfcUfucccasgsc | 2459 | antisense | 23 |
| GGGAAGAUAUCAAAUGGCUGA | 1364 | gsgsgaagAfuAfUfCfaaauggcugaL96 | 2460 | sense | 21 |
| UCAGCCAUUUGAUAUCUUCCCAG | 1365 | usCfsagcCfaUfUfugauAfuCfuucccsasg | 2461 | antisense | 23 |
| CAGCUGGGAAGAUAUCAAAUG | 1366 | csasgcugGfgAfAfGfauaucaaaugL96 | 2462 | sense | 21 |
| CAUUUGAUAUCUUCCCAGCUGAU | 1367 | csAfsuuuGfaUfAfucuuCfcCfagcugsasu | 2463 | antisense | 23 |
| UCAGCUGGGAAGAUAUCAAAU | 1368 | uscsagcuGfgGfAfAfgauaucaaauL96 | 2464 | sense | 21 |
| AUUUGAUAUCUUCCCAGCUGAUA | 1369 | asUfsuugAfuAfUfcuucCfcAfgcugasusa | 2465 | antisense | 23 |
| UCCAAAGUCUAUAUAUGACUA | 1370 | uscscaaaGfuCfUfAfuauaugacuaL96 | 2466 | sense | 21 |
| UAGUCAUAUAUAGACUUUGGAAG | 1371 | usAfsgucAfuAfUfauagAfcUfuuggasasg | 2467 | antisense | 23 |
| CCAAAGUCUAUAUAUGACUAU | 1372 | cscsaaagUfcUfAfUfauaugacuauL96 | 2468 | sense | 21 |
| AUAGUCAUAUAUAGACUUUGGAA | 1373 | asUfsaguCfaUfAfuauaGfaCfuuuggsasa | 2469 | antisense | 23 |
| UACUUCCAAAGUCUAUAUAUG | 1374 | usascuucCfaAfAfGfucuauauaugL96 | 2470 | sense | 21 |
| CAUAUAUAGACUUUGGAAGUACU | 1375 | csAfsuauAfuAfGfacuuUfgGfaaguascsu | 2471 | antisense | 23 |
| GUACUUCCAAAGUCUAUAUAU | 1376 | gsusacuuCfcAfAfAfgucuauauauL96 | 2472 | sense | 21 |
| AUAUAUAGACUUUGGAAGUACUG | 1377 | asUfsauaUfaGfAfcuuuGfgAfaguacsusg | 2473 | antisense | 23 |
| UUAUGAACAACAUGCUAAAUC | 1378 | ususaugaAfcAfAfCfaugcuaaaucL96 | 2474 | sense | 21 |
| GAUUUAGCAUGUUGUUCAUAAUC | 1379 | gsAfsuuuAfgCfAfuguuGfuUfcauaasusc | 2475 | antisense | 23 |
| UAUGAACAACAUGCUAAAUCA | 1380 | usasugaaCfaAfCfAfugcuaaaucaL96 | 2476 | sense | 21 |
| UGAUUUAGCAUGUUGUUCAUAAU | 1381 | usGfsauuUfaGfCfauguUfgUfucauasasu | 2477 | antisense | 23 |
| AUGAUUAUGAACAACAUGCUA | 1382 | asusgauuAfuGfAfAfcaacaugcuaL96 | 2478 | sense | 21 |
| UAGCAUGUUGUUCAUAAUCAUUG | 1383 | usAfsgcaUfgUfUfguucAfuAfaucaususg | 2479 | antisense | 23 |
| AAUGAUUAUGAACAACAUGCU | 1384 | asasugauUfaUfGfAfacaacaugcuL96 | 2480 | sense | 21 |
| AGCAUGUUGUUCAUAAUCAUUGA | 1385 | asGfscauGfuUfGfuucaUfaAfucauusgsa | 2481 | antisense | 23 |
| AAUUCCCCACUUCAAUACAAA | 1386 | asasuuccCfcAfCfUfucaauacaaaL96 | 2482 | sense | 21 |
| UUUGUAUUGAAGUGGGGAAUUAC | 1387 | usUfsuguAfuUfGfaaguGfgGfgaauusasc | 2483 | antisense | 23 |
| AUUCCCCACUUCAAUACAAAG | 1388 | asusucccCfaCfUfUfcaauacaaagL96 | 2484 | sense | 21 |
| CUUUGUAUUGAAGUGGGGAAUUA | 1389 | csUfsuugUfaUfUfgaagUfgGfggaaususa | 2485 | antisense | 23 |
| CUGUAAUUCCCCACUUCAAUA | 1390 | csusguaaUfuCfCfCfcacuucaauaL96 | 2486 | sense | 21 |
| UAUUGAAGUGGGGAAUUACAGAC | 1391 | usAfsuugAfaGfUfggggAfaUfuacagsasc | 2487 | antisense | 23 |
| UCUGUAAUUCCCCACUUCAAU | 1392 | uscsuguaAfuUfCfCfccacuucaauL96 | 2488 | sense | 21 |
| AUUGAAGUGGGGAAUUACAGACU | 1393 | asUfsugaAfgUfGfgggaAfuUfacagascsu | 2489 | antisense | 23 |
| UGAUGUGCGUAACAGAUUCAA | 1394 | usgsauguGfcGfUfAfacagauucaaL96 | 2490 | sense | 21 |
| UUGAAUCUGUUACGCACAUCAUC | 1395 | usUfsgaaUfcUfGfuuacGfcAfcaucasusc | 2491 | antisense | 23 |
| GAUGUGCGUAACAGAUUCAAA | 1396 | gsasugugCfgUfAfAfcagauucaaaL96 | 2492 | sense | 21 |
| UUUGAAUCUGUUACGCACAUCAU | 1397 | usUfsugaAfuCfUfguuaCfgCfacaucsasu | 2493 | antisense | 23 |
| UGGAUGAUGUGCGUAACAGAU | 1398 | usgsgaugAfuGfUfGfcguaacagauL96 | 2494 | sense | 21 |
| AUCUGUUACGCACAUCAUCCAGA | 1399 | asUfscugUfuAfCfgcacAfuCfauccasgsa | 2495 | antisense | 23 |
| CUGGAUGAUGUGCGUAACAGA | 1400 | csusggauGfaUfGfUfgcguaacagaL96 | 2496 | sense | 21 |
| UCUGUUACGCACAUCAUCCAGAC | 1401 | usCfsuguUfaCfGfcacaUfcAfuccagsasc | 2497 | antisense | 23 |
| GAAUGGGUGGCGGUAAUUGGU | 1402 | gsasauggGfuGfGfCfgguaauugguL96 | 2498 | sense | 21 |
| ACCAAUUACCGCCACCCAUUCCA | 1403 | asCfscaaUfuAfCfcgccAfcCfcauucscsa | 2499 | antisense | 23 |
| AAUGGGUGGCGGUAAUUGGUG | 1404 | asasugggUfgGfCfGfguaauuggugL96 | 2500 | sense | 21 |
| CACCAAUUACCGCCACCCAUUCC | 1405 | csAfsccaAfuUfAfccgcCfaCfccauuscsc | 2501 | antisense | 23 |
| AUUGGAAUGGGUGGCGGUAAU | 1406 | asusuggaAfuGfGfGfuggcgguaauL96 | 2502 | sense | 21 |
| AUUACCGCCACCCAUUCCAAUUC | 1407 | asUfsuacCfgCfCfacccAfuUfccaaususc | 2503 | antisense | 23 |
| AAUUGGAAUGGGUGGCGGUAA | 1408 | asasuuggAfaUfGfGfguggcgguaaL96 | 2504 | sense | 21 |
| UUACCGCCACCCAUUCCAAUUCU | 1409 | usUfsaccGfcCfAfcccaUfuCfcaauuscsu | 2505 | antisense | 23 |
| UCCGGAAUGUUGCUGAAACAG | 1410 | uscscggaAfuGfUfUfgcugaaacagL96 | 2506 | sense | 21 |
| CUGUUUCAGCAACAUUCCGGAGC | 1411 | csUfsguuUfcAfGfcaacAfuUfccggasgsc | 2507 | antisense | 23 |
| CCGGAAUGUUGCUGAAACAGA | 1412 | cscsggaaUfgUfUfGfcugaaacagaL96 | 2508 | sense | 21 |
| UCUGUUUCAGCAACAUUCCGGAG | 1413 | usCfsuguUfuCfAfgcaaCfaUfuccggsasg | 2509 | antisense | 23 |
| AUGCUCCGGAAUGUUGCUGAA | 1414 | asusgcucCfgGfAfAfuguugcugaaL96 | 2510 | sense | 21 |
| UUCAGCAACAUUCCGGAGCAUCC | 1415 | usUfscagCfaAfCfauucCfgGfagcauscsc | 2511 | antisense | 23 |
| GAUGCUCCGGAAUGUUGCUGA | 1416 | gsasugcuCfcGfGfAfauguugcugaL96 | 2512 | sense | 21 |
| UCAGCAACAUUCCGGAGCAUCCU | 1417 | usCfsagcAfaCfAfuuccGfgAfgcaucscsu | 2513 | antisense | 23 |
| UGUCCUCGAGAUACUAAAGGA | 1418 | usgsuccuCfgAfGfAfuacuaaaggaL96 | 2514 | sense | 21 |
| UCCUUUAGUAUCUCGAGGACAUC | 1419 | usCfscuuUfaGfUfaucuCfgAfggacasusc | 2515 | antisense | 23 |
| GUCCUCGAGAUACUAAAGGAA | 1420 | gsusccucGfaGfAfUfacuaaaggaaL96 | 2516 | sense | 21 |
| UUCCUUUAGUAUCUCGAGGACAU | 1421 | usUfsccuUfuAfGfuaucUfcGfaggacsasu | 2517 | antisense | 23 |
| AAGAUGUCCUCGAGAUACUAA | 1422 | asasgaugUfcCfUfCfgagauacuaaL96 | 2518 | sense | 21 |
| UUAGUAUCUCGAGGACAUCUUGA | 1423 | usUfsaguAfuCfUfcgagGfaCfaucuusgsa | 2519 | antisense | 23 |
| CAAGAUGUCCUCGAGAUACUA | 1424 | csasagauGfuCfCfUfcgagauacuaL96 | 2520 | sense | 21 |
| UAGUAUCUCGAGGACAUCUUGAA | 1425 | usAfsguaUfcUfCfgaggAfcAfucuugsasa | 2521 | antisense | 23 |
| ACAACAUGCUAAAUCAGUACU | 1426 | ascsaacaUfgCfUfAfaaucaguacuL96 | 2522 | sense | 21 |
| AGUACUGAUUUAGCAUGUUGUUC | 1427 | asGfsuacUfgAfUfuuagCfaUfguugususc | 2523 | antisense | 23 |
| CAACAUGCUAAAUCAGUACUU | 1428 | csasacauGfcUfAfAfaucaguacuuL96 | 2524 | sense | 21 |
| AAGUACUGAUUUAGCAUGUUGUU | 1429 | asAfsguaCfuGfAfuuuaGfcAfuguugsusu | 2525 | antisense | 23 |
| AUGAACAACAUGCUAAAUCAG | 1430 | asusgaacAfaCfAfUfgcuaaaucagL96 | 2526 | sense | 21 |
| CUGAUUUAGCAUGUUGUUCAUAA | 1431 | csUfsgauUfuAfGfcaugUfuGfuucausasa | 2527 | antisense | 23 |
| UAUGAACAACAUGCUAAAUCA | 1432 | usasugaaCfaAfCfAfugcuaaaucaL96 | 2528 | sense | 21 |
| UGAUUUAGCAUGUUGUUCAUAAU | 1433 | usGfsauuUfaGfCfauguUfgUfucauasasu | 2529 | antisense | 23 |
| GCCAAGGCUGUGUUUGUGGGG | 1434 | gscscaagGfcUfGfUfguuuguggggL96 | 2530 | sense | 21 |
| CCCCACAAACACAGCCUUGGCGC | 1435 | csCfsccaCfaAfAfcacaGfcCfuuggcsgsc | 2531 | antisense | 23 |
| CCAAGGCUGUGUUUGUGGGGA | 1436 | cscsaaggCfuGfUfGfuuuguggggaL96 | 2532 | sense | 21 |
| UCCCCACAAACACAGCCUUGGCG | 1437 | usCfscccAfcAfAfacacAfgCfcuuggscsg | 2533 | antisense | 23 |
| UGGCGCCAAGGCUGUGUUUGU | 1438 | usgsgcgcCfaAfGfGfcuguguuuguL96 | 2534 | sense | 21 |
| ACAAACACAGCCUUGGCGCCAAG | 1439 | asCfsaaaCfaCfAfgccuUfgGfcgccasasg | 2535 | antisense | 23 |
| UUGGCGCCAAGGCUGUGUUUG | 1440 | ususggcgCfcAfAfGfgcuguguuugL96 | 2536 | sense | 21 |
| CAAACACAGCCUUGGCGCCAAGA | 1441 | csAfsaacAfcAfGfccuuGfgCfgccaasgsa | 2537 | antisense | 23 |
| UGAAAGCUCUGGCUCUUGGCG | 1442 | usgsaaagCfuCfUfGfgcucuuggcgL96 | 2538 | sense | 21 |
| CGCCAAGAGCCAGAGCUUUCAGA | 1443 | csGfsccaAfgAfGfccagAfgCfuuucasgsa | 2539 | antisense | 23 |
| GAAAGCUCUGGCUCUUGGCGC | 1444 | gsasaagcUfcUfGfGfcucuuggcgcL96 | 2540 | sense | 21 |
| GCGCCAAGAGCCAGAGCUUUCAG | 1445 | gsCfsgccAfaGfAfgccaGfaGfcuuucsasg | 2541 | antisense | 23 |
| GUUCUGAAAGCUCUGGCUCUU | 1446 | gsusucugAfaAfGfCfucuggcucuuL96 | 2542 | sense | 21 |
| AAGAGCCAGAGCUUUCAGAACAU | 1447 | asAfsgagCfcAfGfagcuUfuCfagaacsasu | 2543 | antisense | 23 |
| UGUUCUGAAAGCUCUGGCUCU | 1448 | usgsuucuGfaAfAfGfcucuggcucuL96 | 2544 | sense | 21 |
| AGAGCCAGAGCUUUCAGAACAUC | 1449 | asGfsagcCfaGfAfgcuuUfcAfgaacasusc | 2545 | antisense | 23 |
| CAGCCACUAUUGAUGUUCUGC | 1450 | csasgccaCfuAfUfUfgauguucugcL96 | 2546 | sense | 21 |
| GCAGAACAUCAAUAGUGGCUGGC | 1451 | gsCfsagaAfcAfUfcaauAfgUfggcugsgsc | 2547 | antisense | 23 |
| AGCCACUAUUGAUGUUCUGCC | 1452 | asgsccacUfaUfUfGfauguucugccL96 | 2548 | sense | 21 |
| GGCAGAACAUCAAUAGUGGCUGG | 1453 | gsGfscagAfaCfAfucaaUfaGfuggcusgsg | 2549 | antisense | 23 |
| GUGCCAGCCACUAUUGAUGUU | 1454 | gsusgccaGfcCfAfCfuauugauguuL96 | 2550 | sense | 21 |
| AACAUCAAUAGUGGCUGGCACCC | 1455 | asAfscauCfaAfUfagugGfcUfggcacscsc | 2551 | antisense | 23 |
| GGUGCCAGCCACUAUUGAUGU | 1456 | gsgsugccAfgCfCfAfcuauugauguL96 | 2552 | sense | 21 |
| ACAUCAAUAGUGGCUGGCACCCC | 1457 | asCfsaucAfaUfAfguggCfuGfgcaccscsc | 2553 | antisense | 23 |
| ACAAGGACCGAGAAGUCACCA | 1458 | ascsaaggAfcCfGfAfgaagucaccaL96 | 2554 | sense | 21 |
| UGGUGACUUCUCGGUCCUUGUAG | 1459 | usGfsgugAfcUfUfcucgGfuCfcuugusasg | 2555 | antisense | 23 |
| CAAGGACCGAGAAGUCACCAA | 1460 | csasaggaCfcGfAfGfaagucaccaaL96 | 2556 | sense | 21 |
| UUGGUGACUUCUCGGUCCUUGUA | 1461 | usUfsgguGfaCfUfucucGfgUfccuugsusa | 2557 | antisense | 23 |
| AUCUACAAGGACCGAGAAGUC | 1462 | asuscuacAfaGfGfAfccgagaagucL96 | 2558 | sense | 21 |
| GACUUCUCGGUCCUUGUAGAUAU | 1463 | gsAfscuuCfuCfGfguccUfuGfuagausasu | 2559 | antisense | 23 |
| UAUCUACAAGGACCGAGAAGU | 1464 | usasucuaCfaAfGfGfaccgagaaguL96 | 2560 | sense | 21 |
| ACUUCUCGGUCCUUGUAGAUAUA | 1465 | asCfsuucUfcGfGfuccuUfgUfagauasusa | 2561 | antisense | 23 |
| CAGAAUGUGAAAGUCAUCGAC | 1466 | csasgaauGfuGfAfAfagucaucgacL96 | 2562 | sense | 21 |
| GUCGAUGACUUUCACAUUCUGGC | 1467 | gsUfscgaUfgAfCfuuucAfcAfuucugsgsc | 2563 | antisense | 23 |
| AGAAUGUGAAAGUCAUCGACA | 1468 | asgsaaugUfgAfAfAfgucaucgacaL96 | 2564 | sense | 21 |
| UGUCGAUGACUUUCACAUUCUGG | 1469 | usGfsucgAfuGfAfcuuuCfaCfauucusgsg | 2565 | antisense | 23 |
| GUGCCAGAAUGUGAAAGUCAU | 1470 | gsusgccaGfaAfUfGfugaaagucauL96 | 2566 | sense | 21 |
| AUGACUUUCACAUUCUGGCACCC | 1471 | asUfsgacUfuUfCfacauUfcUfggcacscsc | 2567 | antisense | 23 |
| GGUGCCAGAAUGUGAAAGUCA | 1472 | gsgsugccAfgAfAfUfgugaaagucaL96 | 2568 | sense | 21 |
| UGACUUUCACAUUCUGGCACCCA | 1473 | usGfsacuUfuCfAfcauuCfuGfgcaccscsa | 2569 | antisense | 23 |
| AGAUGUCCUCGAGAUACUAAA | 1474 | asgsauguCfcUfCfGfagauacuaaaL96 | 2570 | sense | 21 |
| UUUAGUAUCUCGAGGACAUCUUG | 1475 | usUfsuagUfaUfCfucgaGfgAfcaucususg | 2571 | antisense | 23 |
| GAUGUCCUCGAGAUACUAAAG | 1476 | gsasugucCfuCfGfAfgauacuaaagL96 | 2572 | sense | 21 |
| CUUUAGUAUCUCGAGGACAUCUU | 1477 | csUfsuuaGfuAfUfcucgAfgGfacaucsusu | 2573 | antisense | 23 |
| UUCAAGAUGUCCUCGAGAUAC | 1478 | ususcaagAfuGfUfCfcucgagauacL96 | 2574 | sense | 21 |
| GUAUCUCGAGGACAUCUUGAACA | 1479 | gsUfsaucUfcGfAfggacAfuCfuugaascsa | 2575 | antisense | 23 |
| GUUCAAGAUGUCCUCGAGAUA | 1480 | gsusucaaGfaUfGfUfccucgagauaL96 | 2576 | sense | 21 |
| UAUCUCGAGGACAUCUUGAACAC | 1481 | usAfsucuCfgAfGfgacaUfcUfugaacsasc | 2577 | antisense | 23 |
| GUGGACUUGCUGCAUAUGUGG | 1482 | gsusggacUfuGfCfUfgcauauguggL96 | 2578 | sense | 21 |
| CCACAUAUGCAGCAAGUCCACUG | 1483 | csCfsacaUfaUfGfcagcAfaGfuccacsusg | 2579 | antisense | 23 |
| UGGACUUGCUGCAUAUGUGGC | 1484 | usgsgacuUfgCfUfGfcauauguggcL96 | 2580 | sense | 21 |
| GCCACAUAUGCAGCAAGUCCACU | 1485 | gsCfscacAfuAfUfgcagCfaAfguccascsu | 2581 | antisense | 23 |
| GACAGUGGACUUGCUGCAUAU | 1486 | gsascaguGfgAfCfUfugcugcauauL96 | 2582 | sense | 21 |
| AUAUGCAGCAAGUCCACUGUCGU | 1487 | asUfsaugCfaGfCfaaguCfcAfcugucsgsu | 2583 | antisense | 23 |
| CGACAGUGGACUUGCUGCAUA | 1488 | csgsacagUfgGfAfCfuugcugcauaL96 | 2584 | sense | 21 |
| UAUGCAGCAAGUCCACUGUCGUC | 1489 | usAfsugcAfgCfAfagucCfaCfugucgsusc | 2585 | antisense | 23 |
| AACCAGUACUUUAUCAUUUUC | 1490 | asasccagUfaCfUfUfuaucauuuucL96 | 2586 | sense | 21 |
| GAAAAUGAUAAAGUACUGGUUUC | 1491 | gsAfsaaaUfgAfUfaaagUfaCfugguususc | 2587 | antisense | 23 |
| ACCAGUACUUUAUCAUUUUCU | 1492 | ascscaguAfcUfUfUfaucauuuucuL96 | 2588 | sense | 21 |
| AGAAAAUGAUAAAGUACUGGUUU | 1493 | asGfsaaaAfuGfAfuaaaGfuAfcuggususu | 2589 | antisense | 23 |
| UUGAAACCAGUACUUUAUCAU | 1494 | ususgaaaCfcAfGfUfacuuuaucauL96 | 2590 | sense | 21 |
| AUGAUAAAGUACUGGUUUCAAAA | 1495 | asUfsgauAfaAfGfuacuGfgUfuucaasasa | 2591 | antisense | 23 |
| UUUGAAACCAGUACUUUAUCA | 1496 | ususugaaAfcCfAfGfuacuuuaucaL96 | 2592 | sense | 21 |
| UGAUAAAGUACUGGUUUCAAAAU | 1497 | usGfsauaAfaGfUfacugGfuUfucaaasasu | 2593 | antisense | 23 |
| CGAGAAGUCACCAAGAAGCUA | 1498 | csgsagaaGfuCfAfCfcaagaagcuaL96 | 2594 | sense | 21 |
| UAGCUUCUUGGUGACUUCUCGGU | 1499 | usAfsgcuUfcUfUfggugAfcUfucucgsgsu | 2595 | antisense | 23 |
| GAGAAGUCACCAAGAAGCUAG | 1500 | gsasgaagUfcAfCfCfaagaagcuagL96 | 2596 | sense | 21 |
| CUAGCUUCUUGGUGACUUCUCGG | 1501 | csUfsagcUfuCfUfugguGfaCfuucucsgsg | 2597 | antisense | 23 |
| GGACCGAGAAGUCACCAAGAA | 1502 | gsgsaccgAfgAfAfGfucaccaagaaL96 | 2598 | sense | 21 |
| UUCUUGGUGACUUCUCGGUCCUU | 1503 | usUfscuuGfgUfGfacuuCfuCfgguccsusu | 2599 | antisense | 23 |
| AGGACCGAGAAGUCACCAAGA | 1504 | asgsgaccGfaGfAfAfgucaccaagaL96 | 2600 | sense | 21 |
| UCUUGGUGACUUCUCGGUCCUUG | 1505 | usCfsuugGfuGfAfcuucUfcGfguccususg | 2601 | antisense | 23 |
| UCAAAGUGUUGGUAAUGCCUG | 1506 | uscsaaagUfgUfUfGfguaaugccugL96 | 2602 | sense | 21 |
| CAGGCAUUACCAACACUUUGAAC | 1507 | csAfsggcAfuUfAfccaaCfaCfuuugasasc | 2603 | antisense | 23 |
| CAAAGUGUUGGUAAUGCCUGA | 1508 | csasaaguGfuUfGfGfuaaugccugaL96 | 2604 | sense | 21 |
| UCAGGCAUUACCAACACUUUGAA | 1509 | usCfsaggCfaUfUfaccaAfcAfcuuugsasa | 2605 | antisense | 23 |
| AGGUUCAAAGUGUUGGUAAUG | 1510 | asgsguucAfaAfGfUfguugguaaugL96 | 2606 | sense | 21 |
| CAUUACCAACACUUUGAACCUGA | 1511 | csAfsuuaCfcAfAfcacuUfuGfaaccusgsa | 2607 | antisense | 23 |
| CAGGUUCAAAGUGUUGGUAAU | 1512 | csasgguuCfaAfAfGfuguugguaauL96 | 2608 | sense | 21 |
| AUUACCAACACUUUGAACCUGAG | 1513 | asUfsuacCfaAfCfacuuUfgAfaccugsasg | 2609 | antisense | 23 |
| UAUUACUUGACAAAGAGACAC | 1514 | usasuuacUfuGfAfCfaaagagacacL96 | 2610 | sense | 21 |
| GUGUCUCUUUGUCAAGUAAUACA | 1515 | gsUfsgucUfcUfUfugucAfaGfuaauascsa | 2611 | antisense | 23 |
| AUUACUUGACAAAGAGACACU | 1516 | asusuacuUfgAfCfAfaagagacacuL96 | 2612 | sense | 21 |
| AGUGUCUCUUUGUCAAGUAAUAC | 1517 | asGfsuguCfuCfUfuuguCfaAfguaausasc | 2613 | antisense | 23 |
| CAUGUAUUACUUGACAAAGAG | 1518 | csasuguaUfuAfCfUfugacaaagagL96 | 2614 | sense | 21 |
| CUCUUUGUCAAGUAAUACAUGCU | 1519 | csUfscuuUfgUfCfaaguAfaUfacaugscsu | 2615 | antisense | 23 |
| GCAUGUAUUACUUGACAAAGA | 1520 | gscsauguAfuUfAfCfuugacaaagaL96 | 2616 | sense | 21 |
| UCUUUGUCAAGUAAUACAUGCUG | 1521 | usCfsuuuGfuCfAfaguaAfuAfcaugcsusg | 2617 | antisense | 23 |
| AAAGUCAUCGACAAGACAUUG | 1522 | asasagucAfuCfGfAfcaagacauugL96 | 2618 | sense | 21 |
| CAAUGUCUUGUCGAUGACUUUCA | 1523 | csAfsaugUfcUfUfgucgAfuGfacuuuscsa | 2619 | antisense | 23 |
| AAGUCAUCGACAAGACAUUGG | 1524 | asasgucaUfcGfAfCfaagacauuggL96 | 2620 | sense | 21 |
| CCAAUGUCUUGUCGAUGACUUUC | 1525 | csCfsaauGfuCfUfugucGfaUfgacuususc | 2621 | antisense | 23 |
| UGUGAAAGUCAUCGACAAGAC | 1526 | usgsugaaAfgUfCfAfucgacaagacL96 | 2622 | sense | 21 |
| GUCUUGUCGAUGACUUUCACAUU | 1527 | gsUfscuuGfuCfGfaugaCfuUfucacasusu | 2623 | antisense | 23 |
| AUGUGAAAGUCAUCGACAAGA | 1528 | asusgugaAfaGfUfCfaucgacaagaL96 | 2624 | sense | 21 |
| UCUUGUCGAUGACUUUCACAUUC | 1529 | usCfsuugUfcGfAfugacUfuUfcacaususc | 2625 | antisense | 23 |
| AUAUGUGGCUAAAGCAAUAGA | 1530 | asusauguGfgCfUfAfaagcaauagaL96 | 2626 | sense | 21 |
| UCUAUUGCUUUAGCCACAUAUGC | 1531 | usCfsuauUfgCfUfuuagCfcAfcauausgsc | 2627 | antisense | 23 |
| UAUGUGGCUAAAGCAAUAGAC | 1532 | usasugugGfcUfAfAfagcaauagacL96 | 2628 | sense | 21 |
| GUCUAUUGCUUUAGCCACAUAUG | 1533 | gsUfscuaUfuGfCfuuuaGfcCfacauasusg | 2629 | antisense | 23 |
| CUGCAUAUGUGGCUAAAGCAA | 1534 | csusgcauAfuGfUfGfgcuaaagcaaL96 | 2630 | sense | 21 |
| UUGCUUUAGCCACAUAUGCAGCA | 1535 | usUfsgcuUfuAfGfccacAfuAfugcagscsa | 2631 | antisense | 23 |
| GCUGCAUAUGUGGCUAAAGCA | 1536 | gscsugcaUfaUfGfUfggcuaaagcaL96 | 2632 | sense | 21 |
| UGCUUUAGCCACAUAUGCAGCAA | 1537 | usGfscuuUfaGfCfcacaUfaUfgcagcsasa | 2633 | antisense | 23 |
| AGACGACAGUGGACUUGCUGC | 1538 | asgsacgaCfaGfUfGfgacuugcugcL96 | 2634 | sense | 21 |
| GCAGCAAGUCCACUGUCGUCUCC | 1539 | gsCfsagcAfaGfUfccacUfgUfcgucuscsc | 2635 | antisense | 23 |
| GACGACAGUGGACUUGCUGCA | 1540 | gsascgacAfgUfGfGfacuugcugcaL96 | 2636 | sense | 21 |
| UGCAGCAAGUCCACUGUCGUCUC | 1541 | usGfscagCfaAfGfuccaCfuGfucgucsusc | 2637 | antisense | 23 |
| UUGGAGACGACAGUGGACUUG | 1542 | ususggagAfcGfAfCfaguggacuugL96 | 2638 | sense | 21 |
| CAAGUCCACUGUCGUCUCCAAAA | 1543 | csAfsaguCfcAfCfugucGfuCfuccaasasa | 2639 | antisense | 23 |
| UUUGGAGACGACAGUGGACUU | 1544 | ususuggaGfaCfGfAfcaguggacuuL96 | 2640 | sense | 21 |
| AAGUCCACUGUCGUCUCCAAAAU | 1545 | asAfsgucCfaCfUfgucgUfcUfccaaasasu | 2641 | antisense | 23 |
| GGCCACCUCCUCAAUUGAAGA | 1546 | gsgsccacCfuCfCfUfcaauugaagaL96 | 2642 | sense | 21 |
| UCUUCAAUUGAGGAGGUGGCCCA | 1547 | usCfsuucAfaUfUfgaggAfgGfuggccscsa | 2643 | antisense | 23 |
| GCCACCUCCUCAAUUGAAGAA | 1548 | gscscaccUfcCfUfCfaauugaagaaL96 | 2644 | sense | 21 |
| UUCUUCAAUUGAGGAGGUGGCCC | 1549 | usUfscuuCfaAfUfugagGfaGfguggcscsc | 2645 | antisense | 23 |
| CCUGGGCCACCUCCUCAAUUG | 1550 | cscsugggCfcAfCfCfuccucaauugL96 | 2646 | sense | 21 |
| CAAUUGAGGAGGUGGCCCAGGAA | 1551 | csAfsauuGfaGfGfagguGfgCfccaggsasa | 2647 | antisense | 23 |
| UCCUGGGCCACCUCCUCAAUU | 1552 | uscscuggGfcCfAfCfcuccucaauuL96 | 2648 | sense | 21 |
| AAUUGAGGAGGUGGCCCAGGAAC | 1553 | asAfsuugAfgGfAfggugGfcCfcaggasasc | 2649 | antisense | 23 |
| UGUAUGUUACUUCUUAGAGAG | 1554 | usgsuaugUfuAfCfUfucuuagagagL96 | 2650 | sense | 21 |
| CUCUCUAAGAAGUAACAUACAUC | 1555 | csUfscucUfaAfGfaaguAfaCfauacasusc | 2651 | antisense | 23 |
| GUAUGUUACUUCUUAGAGAGA | 1556 | gsusauguUfaCfUfUfcuuagagagaL96 | 2652 | sense | 21 |
| UCUCUCUAAGAAGUAACAUACAU | 1557 | usCfsucuCfuAfAfgaagUfaAfcauacsasu | 2653 | antisense | 23 |
| AGGAUGUAUGUUACUUCUUAG | 1558 | asgsgaugUfaUfGfUfuacuucuuagL96 | 2654 | sense | 21 |
| CUAAGAAGUAACAUACAUCCUAA | 1559 | csUfsaagAfaGfUfaacaUfaCfauccusasa | 2655 | antisense | 23 |
| UAGGAUGUAUGUUACUUCUUA | 1560 | usasggauGfuAfUfGfuuacuucuuaL96 | 2656 | sense | 21 |
| UAAGAAGUAACAUACAUCCUAAA | 1561 | usAfsagaAfgUfAfacauAfcAfuccuasasa | 2657 | antisense | 23 |
| AAAUGUUUUAGGAUGUAUGUU | 1562 | asasauguUfuUfAfGfgauguauguuL96 | 2658 | sense | 21 |
| AACAUACAUCCUAAAACAUUUGG | 1563 | asAfscauAfcAfUfccuaAfaAfcauuusgsg | 2659 | antisense | 23 |
| AAUGUUUUAGGAUGUAUGUUA | 1564 | asasuguuUfuAfGfGfauguauguuaL96 | 2660 | sense | 21 |
| UAACAUACAUCCUAAAACAUUUG | 1565 | usAfsacaUfaCfAfuccuAfaAfacauususg | 2661 | antisense | 23 |
| AUCCAAAUGUUUUAGGAUGUA | 1566 | asusccaaAfuGfUfUfuuaggauguaL96 | 2662 | sense | 21 |
| UACAUCCUAAAACAUUUGGAUAU | 1567 | usAfscauCfcUfAfaaacAfuUfuggausasu | 2663 | antisense | 23 |
| UAUCCAAAUGUUUUAGGAUGU | 1568 | usasuccaAfaUfGfUfuuuaggauguL96 | 2664 | sense | 21 |
| ACAUCCUAAAACAUUUGGAUAUA | 1569 | asCfsaucCfuAfAfaacaUfuUfggauasusa | 2665 | antisense | 23 |
| AUGGGUGGCGGUAAUUGGUGA | 1570 | asusggguGfgCfGfGfuaauuggugaL96 | 2666 | sense | 21 |
| UCACCAAUUACCGCCACCCAUUC | 1571 | usCfsaccAfaUfUfaccgCfcAfcccaususc | 2667 | antisense | 23 |
| UGGGUGGCGGUAAUUGGUGAU | 1572 | usgsggugGfcGfGfUfaauuggugauL96 | 2668 | sense | 21 |
| AUCACCAAUUACCGCCACCCAUU | 1573 | asUfscacCfaAfUfuaccGfcCfacccasusu | 2669 | antisense | 23 |
| UGGAAUGGGUGGCGGUAAUUG | 1574 | usgsgaauGfgGfUfGfgcgguaauugL96 | 2670 | sense | 21 |
| CAAUUACCGCCACCCAUUCCAAU | 1575 | csAfsauuAfcCfGfccacCfcAfuuccasasu | 2671 | antisense | 23 |
| UUGGAAUGGGUGGCGGUAAUU | 1576 | ususggaaUfgGfGfUfggcgguaauuL96 | 2672 | sense | 21 |
| AAUUACCGCCACCCAUUCCAAUU | 1577 | asAfsuuaCfcGfCfcaccCfaUfuccaasusu | 2673 | antisense | 23 |
| UUCAAAGUGUUGGUAAUGCCU | 1578 | ususcaaaGfuGfUfUfgguaaugccuL96 | 2674 | sense | 21 |
| AGGCAUUACCAACACUUUGAACC | 1579 | asGfsgcaUfuAfCfcaacAfcUfuugaascsc | 2675 | antisense | 23 |
| UCAAAGUGUUGGUAAUGCCUG | 1580 | uscsaaagUfgUfUfGfguaaugccugL96 | 2676 | sense | 21 |
| CAGGCAUUACCAACACUUUGAAC | 1581 | csAfsggcAfuUfAfccaaCfaCfuuugasasc | 2677 | antisense | 23 |
| CAGGUUCAAAGUGUUGGUAAU | 1582 | csasgguuCfaAfAfGfuguugguaauL96 | 2678 | sense | 21 |
| AUUACCAACACUUUGAACCUGAG | 1583 | asUfsuacCfaAfCfacuuUfgAfaccugsasg | 2679 | antisense | 23 |
| UCAGGUUCAAAGUGUUGGUAA | 1584 | uscsagguUfcAfAfAfguguugguaaL96 | 2680 | sense | 21 |
| UUACCAACACUUUGAACCUGAGC | 1585 | usUfsaccAfaCfAfcuuuGfaAfccugasgsc | 2681 | antisense | 23 |
| CCACCUCCUCAAUUGAAGAAG | 1586 | cscsaccuCfcUfCfAfauugaagaagL96 | 2682 | sense | 21 |
| CUUCUUCAAUUGAGGAGGUGGCC | 1587 | csUfsucuUfcAfAfuugaGfgAfgguggscsc | 2683 | antisense | 23 |
| CACCUCCUCAAUUGAAGAAGU | 1588 | csasccucCfuCfAfAfuugaagaaguL96 | 2684 | sense | 21 |
| ACUUCUUCAAUUGAGGAGGUGGC | 1589 | asCfsuucUfuCfAfauugAfgGfaggugsgsc | 2685 | antisense | 23 |
| UGGGCCACCUCCUCAAUUGAA | 1590 | usgsggccAfcCfUfCfcucaauugaaL96 | 2686 | sense | 21 |
| UUCAAUUGAGGAGGUGGCCCAGG | 1591 | usUfscaaUfuGfAfggagGfuGfgcccasgsg | 2687 | antisense | 23 |
| CUGGGCCACCUCCUCAAUUGA | 1592 | csusgggcCfaCfCfUfccucaauugaL96 | 2688 | sense | 21 |
| UCAAUUGAGGAGGUGGCCCAGGA | 1593 | usCfsaauUfgAfGfgaggUfgGfcccagsgsa | 2689 | antisense | 23 |
| GAGUGGGUGCCAGAAUGUGAA | 1594 | gsasguggGfuGfCfCfagaaugugaaL96 | 2690 | sense | 21 |
| UUCACAUUCUGGCACCCACUCAG | 1595 | usUfscacAfuUfCfuggcAfcCfcacucsasg | 2691 | antisense | 23 |
| AGUGGGUGCCAGAAUGUGAAA | 1596 | asgsugggUfgCfCfAfgaaugugaaaL96 | 2692 | sense | 21 |
| UUUCACAUUCUGGCACCCACUCA | 1597 | usUfsucaCfaUfUfcuggCfaCfccacuscsa | 2693 | antisense | 23 |
| CUCUGAGUGGGUGCCAGAAUG | 1598 | csuscugaGfuGfGfGfugccagaaugL96 | 2694 | sense | 21 |
| CAUUCUGGCACCCACUCAGAGCC | 1599 | csAfsuucUfgGfCfacccAfcUfcagagscsc | 2695 | antisense | 23 |
| GCUCUGAGUGGGUGCCAGAAU | 1600 | gscsucugAfgUfGfGfgugccagaauL96 | 2696 | sense | 21 |
| AUUCUGGCACCCACUCAGAGCCA | 1601 | asUfsucuGfgCfAfcccaCfuCfagagescsa | 2697 | antisense | 23 |
| GCACUGAUGUUCUGAAAGCUC | 1602 | gscsacugAfuGfUfUfcugaaagcucL96 | 2698 | sense | 21 |
| GAGCUUUCAGAACAUCAGUGCCU | 1603 | gsAfsgcuUfuCfAfgaacAfuCfagugcscsu | 2699 | antisense | 23 |
| CACUGAUGUUCUGAAAGCUCU | 1604 | csascugaUfgUfUfCfugaaagcucuL96 | 2700 | sense | 21 |
| AGAGCUUUCAGAACAUCAGUGCC | 1605 | asGfsagcUfuUfCfagaaCfaUfcagugscsc | 2701 | antisense | 23 |
| AAAGGCACUGAUGUUCUGAAA | 1606 | asasaggcAfcUfGfAfuguucugaaaL96 | 2702 | sense | 21 |
| UUUCAGAACAUCAGUGCCUUUCC | 1607 | usUfsucaGfaAfCfaucaGfuGfccuuuscsc | 2703 | antisense | 23 |
| GAAAGGCACUGAUGUUCUGAA | 1608 | gsasaaggCfaCfUfGfauguucugaaL96 | 2704 | sense | 21 |
| UUCAGAACAUCAGUGCCUUUCCG | 1609 | usUfscagAfaCfAfucagUfgCfcuuucscsg | 2705 | antisense | 23 |
| GGGAAGGUGGAAGUCUUCCUG | 1610 | gsgsgaagGfuGfGfAfagucuuccugL96 | 2706 | sense | 21 |
| CAGGAAGACUUCCACCUUCCCUU | 1611 | csAfsggaAfgAfCfuuccAfcCfuucccsusu | 2707 | antisense | 23 |
| GGAAGGUGGAAGUCUUCCUGG | 1612 | gsgsaaggUfgGfAfAfgucuuccuggL96 | 2708 | sense | 21 |
| CCAGGAAGACUUCCACCUUCCCU | 1613 | csCfsaggAfaGfAfcuucCfaCfcuuccscsu | 2709 | antisense | 23 |
| GGAAGGGAAGGUGGAAGUCUU | 1614 | gsgsaaggGfaAfGfGfuggaagucuuL96 | 2710 | sense | 21 |
| AAGACUUCCACCUUCCCUUCCAC | 1615 | asAfsgacUfuCfCfaccuUfcCfcuuccsasc | 2711 | antisense | 23 |
| UGGAAGGGAAGGUGGAAGUCU | 1616 | usgsgaagGfgAfAfGfguggaagucuL96 | 2712 | sense | 21 |
| AGACUUCCACCUUCCCUUCCACA | 1617 | asGfsacuUfcCfAfccuuCfcCfuuccascsa | 2713 | antisense | 23 |
| UGCUAAAUCAGUACUUCCAAA | 1618 | usgscuaaAfuCfAfGfuacuuccaaaL96 | 2714 | sense | 21 |
| UUUGGAAGUACUGAUUUAGCAUG | 1619 | usUfsuggAfaGfUfacugAfuUfuagcasusg | 2715 | antisense | 23 |
| GCUAAAUCAGUACUUCCAAAG | 1620 | gscsuaaaUfcAfGfUfacuuccaaagL96 | 2716 | sense | 21 |
| CUUUGGAAGUACUGAUUUAGCAU | 1621 | csUfsuugGfaAfGfuacuGfaUfuuagcsasu | 2717 | antisense | 23 |
| AACAUGCUAAAUCAGUACUUC | 1622 | asascaugCfuAfAfAfucaguacuucL96 | 2718 | sense | 21 |
| GAAGUACUGAUUUAGCAUGUUGU | 1623 | gsAfsaguAfcUfGfauuuAfgCfauguusgsu | 2719 | antisense | 23 |
| CAACAUGCUAAAUCAGUACUU | 1624 | csasacauGfcUfAfAfaucaguacuuL96 | 2720 | sense | 21 |
| AAGUACUGAUUUAGCAUGUUGUU | 1625 | asAfsguaCfuGfAfuuuaGfcAfuguugsusu | 2721 | antisense | 23 |
| CCACAACUCAGGAUGAAAAAU | 1626 | cscsacaaCfuCfAfGfgaugaaaaauL96 | 2722 | sense | 21 |
| AUUUUUCAUCCUGAGUUGUGGCG | 1627 | asUfsuuuUfcAfUfccugAfgUfuguggscsg | 2723 | antisense | 23 |
| CACAACUCAGGAUGAAAAAUU | 1628 | csascaacUfcAfGfGfaugaaaaauuL96 | 2724 | sense | 21 |
| AAUUUUUCAUCCUGAGUUGUGGC | 1629 | asAfsuuuUfuCfAfuccuGfaGfuugugsgsc | 2725 | antisense | 23 |
| GCCGCCACAACUCAGGAUGAA | 1630 | gscscgccAfcAfAfCfucaggaugaaL96 | 2726 | sense | 21 |
| UUCAUCCUGAGUUGUGGCGGCAG | 1631 | usUfscauCfcUfGfaguuGfuGfgcggcsasg | 2727 | antisense | 23 |
| UGCCGCCACAACUCAGGAUGA | 1632 | usgsccgcCfaCfAfAfcucaggaugaL96 | 2728 | sense | 21 |
| UCAUCCUGAGUUGUGGCGGCAGU | 1633 | usCfsaucCfuGfAfguugUfgGfcggcasgsu | 2729 | antisense | 23 |
| GCAACCGUCUGGAUGAUGUGC | 1634 | gscsaaccGfuCfUfGfgaugaugugcL96 | 2730 | sense | 21 |
| GCACAUCAUCCAGACGGUUGCCC | 1635 | gsCfsacaUfcAfUfccagAfcGfguugcscsc | 2731 | antisense | 23 |
| CAACCGUCUGGAUGAUGUGCG | 1636 | csasaccgUfcUfGfGfaugaugugcgL96 | 2732 | sense | 21 |
| CGCACAUCAUCCAGACGGUUGCC | 1637 | csGfscacAfuCfAfuccaGfaCfgguugscsc | 2733 | antisense | 23 |
| CUGGGCAACCGUCUGGAUGAU | 1638 | csusgggcAfaCfCfGfucuggaugauL96 | 2734 | sense | 21 |
| AUCAUCCAGACGGUUGCCCAGGU | 1639 | asUfscauCfcAfGfacggUfuGfcccagsgsu | 2735 | antisense | 23 |
| CCUGGGCAACCGUCUGGAUGA | 1640 | cscsugggCfaAfCfCfgucuggaugaL96 | 2736 | sense | 21 |
| UCAUCCAGACGGUUGCCCAGGUA | 1641 | usCfsaucCfaGfAfcgguUfgCfccaggsusa | 2737 | antisense | 23 |
| GCAAAUGAUGAAGAAACUUUG | 1642 | gscsaaauGfaUfGfAfagaaacuuugL96 | 2738 | sense | 21 |
| CAAAGUUUCUUCAUCAUUUGCCC | 1643 | csAfsaagUfuUfCfuucaUfcAfuuugcscsc | 2739 | antisense | 23 |
| CAAAUGAUGAAGAAACUUUGG | 1644 | csasaaugAfuGfAfAfgaaacuuuggL96 | 2740 | sense | 21 |
| CCAAAGUUUCUUCAUCAUUUGCC | 1645 | csCfsaaaGfuUfUfcuucAfuCfauuugscsc | 2741 | antisense | 23 |
| UGGGGCAAAUGAUGAAGAAAC | 1646 | usgsgggcAfaAfUfGfaugaagaaacL96 | 2742 | sense | 21 |
| GUUUCUUCAUCAUUUGCCCCAGA | 1647 | gsUfsuucUfuCfAfucauUfuGfccccasgsa | 2743 | antisense | 23 |
| CUGGGGCAAAUGAUGAAGAAA | 1648 | csusggggCfaAfAfUfgaugaagaaaL96 | 2744 | sense | 21 |
| UUUCUUCAUCAUUUGCCCCAGAC | 1649 | usUfsucuUfcAfUfcauuUfgCfcccagsasc | 2745 | antisense | 23 |
| CCAAGGCUGUGUUUGUGGGGA | 1650 | cscsaaggCfuGfUfGfuuuguggggaL96 | 2746 | sense | 21 |
| UCCCCACAAACACAGCCUUGGCG | 1651 | usCfscccAfcAfAfacacAfgCfcuuggscsg | 2747 | antisense | 23 |
| CAAGGCUGUGUUUGUGGGGAG | 1652 | csasaggcUfgUfGfUfuuguggggagL96 | 2748 | sense | 21 |
| CUCCCCACAAACACAGCCUUGGC | 1653 | csUfscccCfaCfAfaacaCfaGfccuugsgsc | 2749 | antisense | 23 |
| GGCGCCAAGGCUGUGUUUGUG | 1654 | gsgscgccAfaGfGfCfuguguuugugL96 | 2750 | sense | 21 |
| CACAAACACAGCCUUGGCGCCAA | 1655 | csAfscaaAfcAfCfagccUfuGfgcgccsasa | 2751 | antisense | 23 |
| UGGCGCCAAGGCUGUGUUUGU | 1656 | usgsgcgcCfaAfGfGfcuguguuuguL96 | 2752 | sense | 21 |
| ACAAACACAGCCUUGGCGCCAAG | 1657 | asCfsaaaCfaCfAfgccuUfgGfcgccasasg | 2753 | antisense | 23 |
| ACUGCCGCCACAACUCAGGAU | 1658 | ascsugccGfcCfAfCfaacucaggauL96 | 2754 | sense | 21 |
| AUCCUGAGUUGUGGCGGCAGUUU | 1659 | asUfsccuGfaGfUfugugGfcGfgcagususu | 2755 | antisense | 23 |
| CUGCCGCCACAACUCAGGAUG | 1660 | csusgccgCfcAfCfAfacucaggaugL96 | 2756 | sense | 21 |
| CAUCCUGAGUUGUGGCGGCAGUU | 1661 | csAfsuccUfgAfGfuuguGfgCfggcagsusu | 2757 | antisense | 23 |
| UCAAACUGCCGCCACAACUCA | 1662 | uscsaaacUfgCfCfGfccacaacucaL96 | 2758 | sense | 21 |
| UGAGUUGUGGCGGCAGUUUGAAU | 1663 | usGfsaguUfgUfGfgcggCfaGfuuugasasu | 2759 | antisense | 23 |
| UUCAAACUGCCGCCACAACUC | 1664 | ususcaaaCfuGfCfCfgccacaacucL96 | 2760 | sense | 21 |
| GAGUUGUGGCGGCAGUUUGAAUC | 1665 | gsAfsguuGfuGfGfcggcAfgUfuugaasusc | 2761 | antisense | 23 |
| GGGAAGAUAUCAAAUGGCUGA | 1666 | gsgsgaagAfuAfUfCfaaauggcugaL96 | 2762 | sense | 21 |
| UCAGCCAUUUGAUAUCUUCCCAG | 1667 | usCfsagcCfaUfUfugauAfuCfuucccsasg | 2763 | antisense | 23 |
| GGAAGAUAUCAAAUGGCUGAG | 1668 | gsgsaagaUfaUfCfAfaauggcugagL96 | 2764 | sense | 21 |
| CUCAGCCAUUUGAUAUCUUCCCA | 1669 | csUfscagCfcAfUfuugaUfaUfcuuccscsa | 2765 | antisense | 23 |
| AGCUGGGAAGAUAUCAAAUGG | 1670 | asgscuggGfaAfGfAfuaucaaauggL96 | 2766 | sense | 21 |
| CCAUUUGAUAUCUUCCCAGCUGA | 1671 | csCfsauuUfgAfUfaucuUfcCfcagcusgsa | 2767 | antisense | 23 |
| CAGCUGGGAAGAUAUCAAAUG | 1672 | csasgcugGfgAfAfGfauaucaaaugL96 | 2768 | sense | 21 |
| CAUUUGAUAUCUUCCCAGCUGAU | 1673 | csAfsuuuGfaUfAfucuuCfcCfagcugsasu | 2769 | antisense | 23 |
| AAUCAGUACUUCCAAAGUCUA | 1674 | asasucagUfaCfUfUfccaaagucuaL96 | 2770 | sense | 21 |
| UAGACUUUGGAAGUACUGAUUUA | 1675 | usAfsgacUfuUfGfgaagUfaCfugauususa | 2771 | antisense | 23 |
| AUCAGUACUUCCAAAGUCUAU | 1676 | asuscaguAfcUfUfCfcaaagucuauL96 | 2772 | sense | 21 |
| AUAGACUUUGGAAGUACUGAUUU | 1677 | asUfsagaCfuUfUfggaaGfuAfcugaususu | 2773 | antisense | 23 |
| GCUAAAUCAGUACUUCCAAAG | 1678 | gscsuaaaUfcAfGfUfacuuccaaagL96 | 2774 | sense | 21 |
| CUUUGGAAGUACUGAUUUAGCAU | 1679 | csUfsuugGfaAfGfuacuGfaUfuuagcsasu | 2775 | antisense | 23 |
| UGCUAAAUCAGUACUUCCAAA | 1680 | usgscuaaAfuCfAfGfuacuuccaaaL96 | 2776 | sense | 21 |
| UUUGGAAGUACUGAUUUAGCAUG | 1681 | usUfsuggAfaGfUfacugAfuUfuagcasusg | 2777 | antisense | 23 |
| UCAGCAUGCCAAUAUGUGUGG | 1682 | uscsagcaUfgCfCfAfauauguguggL96 | 2778 | sense | 21 |
| CCACACAUAUUGGCAUGCUGACC | 1683 | csCfsacaCfaUfAfuuggCfaUfgcugascsc | 2779 | antisense | 23 |
| CAGCAUGCCAAUAUGUGUGGG | 1684 | csasgcauGfcCfAfAfuaugugugggL96 | 2780 | sense | 21 |
| CCCACACAUAUUGGCAUGCUGAC | 1685 | csCfscacAfcAfUfauugGfcAfugcugsasc | 2781 | antisense | 23 |
| AGGGUCAGCAUGCCAAUAUGU | 1686 | asgsggucAfgCfAfUfgccaauauguL96 | 2782 | sense | 21 |
| ACAUAUUGGCAUGCUGACCCUCU | 1687 | asCfsauaUfuGfGfcaugCfuGfacccuscsu | 2783 | antisense | 23 |
| GAGGGUCAGCAUGCCAAUAUG | 1688 | gsasggguCfaGfCfAfugccaauaugL96 | 2784 | sense | 21 |
| CAUAUUGGCAUGCUGACCCUCUG | 1689 | csAfsuauUfgGfCfaugcUfgAfcccucsusg | 2785 | antisense | 23 |
| GCAUAUGUGGCUAAAGCAAUA | 1690 | gscsauauGfuGfGfCfuaaagcaauaL96 | 2786 | sense | 21 |
| UAUUGCUUUAGCCACAUAUGCAG | 1691 | usAfsuugCfuUfUfagccAfcAfuaugcsasg | 2787 | antisense | 23 |
| CAUAUGUGGCUAAAGCAAUAG | 1692 | csasuaugUfgGfCfUfaaagcaauagL96 | 2788 | sense | 21 |
| CUAUUGCUUUAGCCACAUAUGCA | 1693 | csUfsauuGfcUfUfuagcCfaCfauaugscsa | 2789 | antisense | 23 |
| UGCUGCAUAUGUGGCUAAAGC | 1694 | usgscugcAfuAfUfGfuggcuaaagcL96 | 2790 | sense | 21 |
| GCUUUAGCCACAUAUGCAGCAAG | 1695 | gsCfsuuuAfgCfCfacauAfuGfcagcasasg | 2791 | antisense | 23 |
| UUGCUGCAUAUGUGGCUAAAG | 1696 | ususgcugCfaUfAfUfguggcuaaagL96 | 2792 | sense | 21 |
| CUUUAGCCACAUAUGCAGCAAGU | 1697 | csUfsuuaGfcCfAfcauaUfgCfagcaasgsu | 2793 | antisense | 23 |
| AAAUGAUGAAGAAACUUUGGC | 1698 | asasaugaUfgAfAfGfaaacuuuggcL96 | 2794 | sense | 21 |
| GCCAAAGUUUCUUCAUCAUUUGC | 1699 | gsCfscaaAfgUfUfucuuCfaUfcauuusgsc | 2795 | antisense | 23 |
| AAUGAUGAAGAAACUUUGGCU | 1700 | asasugauGfaAfGfAfaacuuuggcuL96 | 2796 | sense | 21 |
| AGCCAAAGUUUCUUCAUCAUUUG | 1701 | asGfsccaAfaGfUfuucuUfcAfucauususg | 2797 | antisense | 23 |
| GGGCAAAUGAUGAAGAAACUU | 1702 | gsgsgcaaAfuGfAfUfgaagaaacuuL96 | 2798 | sense | 21 |
| AAGUUUCUUCAUCAUUUGCCCCA | 1703 | asAfsguuUfcUfUfcaucAfuUfugcccscsa | 2799 | antisense | 23 |
| GGGGCAAAUGAUGAAGAAACU | 1704 | gsgsggcaAfaUfGfAfugaagaaacuL96 | 2800 | sense | 21 |
| AGUUUCUUCAUCAUUUGCCCCAG | 1705 | asGfsuuuCfuUfCfaucaUfuUfgccccsasg | 2801 | antisense | 23 |
| GAGAUACUAAAGGAAGAAUUC | 1706 | gsasgauaCfuAfAfAfggaagaauucL96 | 2802 | sense | 21 |
| GAAUUCUUCCUUUAGUAUCUCGA | 1707 | gsAfsauuCfuUfCfcuuuAfgUfaucucsgsa | 2803 | antisense | 23 |
| AGAUACUAAAGGAAGAAUUCC | 1708 | asgsauacUfaAfAfGfgaagaauuccL96 | 2804 | sense | 21 |
| GGAAUUCUUCCUUUAGUAUCUCG | 1709 | gsGfsaauUfcUfUfccuuUfaGfuaucuscsg | 2805 | antisense | 23 |
| CCUCGAGAUACUAAAGGAAGA | 1710 | cscsucgaGfaUfAfCfuaaaggaagaL96 | 2806 | sense | 21 |
| UCUUCCUUUAGUAUCUCGAGGAC | 1711 | usCfsuucCfuUfUfaguaUfcUfcgaggsasc | 2807 | antisense | 23 |
| UCCUCGAGAUACUAAAGGAAG | 1712 | uscscucgAfgAfUfAfcuaaaggaagL96 | 2808 | sense | 21 |
| CUUCCUUUAGUAUCUCGAGGACA | 1713 | csUfsuccUfuUfAfguauCfuCfgaggascsa | 2809 | antisense | 23 |
| ACAACUCAGGAUGAAAAAUUU | 1714 | ascsaacuCfaGfGfAfugaaaaauuuL96 | 2810 | sense | 21 |
| AAAUUUUUCAUCCUGAGUUGUGG | 1715 | asAfsauuUfuUfCfauccUfgAfguugusgsg | 2811 | antisense | 23 |
| CAACUCAGGAUGAAAAAUUUU | 1716 | csasacucAfgGfAfUfgaaaaauuuuL96 | 2812 | sense | 21 |
| AAAAUUUUUCAUCCUGAGUUGUG | 1717 | asAfsaauUfuUfUfcaucCfuGfaguugsusg | 2813 | antisense | 23 |
| CGCCACAACUCAGGAUGAAAA | 1718 | csgsccacAfaCfUfCfaggaugaaaaL96 | 2814 | sense | 21 |
| UUUUCAUCCUGAGUUGUGGCGGC | 1719 | usUfsuucAfuCfCfugagUfuGfuggcgsgsc | 2815 | antisense | 23 |
| CCGCCACAACUCAGGAUGAAA | 1720 | cscsgccaCfaAfCfUfcaggaugaaaL96 | 2816 | sense | 21 |
| UUUCAUCCUGAGUUGUGGCGGCA | 1721 | usUfsucaUfcCfUfgaguUfgUfggcggscsa | 2817 | antisense | 23 |
| AGGGAAGGUGGAAGUCUUCCU | 1722 | asgsggaaGfgUfGfGfaagucuuccuL96 | 2818 | sense | 21 |
| AGGAAGACUUCCACCUUCCCUUC | 1723 | asGfsgaaGfaCfUfuccaCfcUfucccususc | 2819 | antisense | 23 |
| GGGAAGGUGGAAGUCUUCCUG | 1724 | gsgsgaagGfuGfGfAfagucuuccugL96 | 2820 | sense | 21 |
| CAGGAAGACUUCCACCUUCCCUU | 1725 | csAfsggaAfgAfCfuuccAfcCfuucccsusu | 2821 | antisense | 23 |
| UGGAAGGGAAGGUGGAAGUCU | 1726 | usgsgaagGfgAfAfGfguggaagucuL96 | 2822 | sense | 21 |
| AGACUUCCACCUUCCCUUCCACA | 1727 | asGfsacuUfcCfAfccuuCfcCfuuccascsa | 2823 | antisense | 23 |
| GUGGAAGGGAAGGUGGAAGUC | 1728 | gsusggaaGfgGfAfAfgguggaagucL96 | 2824 | sense | 21 |
| GACUUCCACCUUCCCUUCCACAG | 1729 | gsAfscuuCfcAfCfcuucCfcUfuccacsasg | 2825 | antisense | 23 |
| GGCGAGCUUGCCACUGUGAGA | 1730 | gsgscgagCfuUfGfCfcacugugagaL96 | 2826 | sense | 21 |
| UCUCACAGUGGCAAGCUCGCCGU | 1731 | usCfsucaCfaGfUfggcaAfgCfucgccsgsu | 2827 | antisense | 23 |
| GCGAGCUUGCCACUGUGAGAG | 1732 | gscsgagcUfuGfCfCfacugugagagL96 | 2828 | sense | 21 |
| CUCUCACAGUGGCAAGCUCGCCG | 1733 | csUfscucAfcAfGfuggcAfaGfcucgcscsg | 2829 | antisense | 23 |
| GGACGGCGAGCUUGCCACUGU | 1734 | gsgsacggCfgAfGfCfuugccacuguL96 | 2830 | sense | 21 |
| ACAGUGGCAAGCUCGCCGUCCAC | 1735 | asCfsaguGfgCfAfagcuCfgCfcguccsasc | 2831 | antisense | 23 |
| UGGACGGCGAGCUUGCCACUG | 1736 | usgsgacgGfcGfAfGfcuugccacugL96 | 2832 | sense | 21 |
| CAGUGGCAAGCUCGCCGUCCACA | 1737 | csAfsgugGfcAfAfgcucGfcCfguccascsa | 2833 | antisense | 23 |
| AUGUGCGUAACAGAUUCAAAC | 1738 | asusgugcGfuAfAfCfagauucaaacL96 | 2834 | sense | 21 |
| GUUUGAAUCUGUUACGCACAUCA | 1739 | gsUfsuugAfaUfCfuguuAfcGfcacauscsa | 2835 | antisense | 23 |
| UGUGCGUAACAGAUUCAAACU | 1740 | usgsugcgUfaAfCfAfgauucaaacuL96 | 2836 | sense | 21 |
| AGUUUGAAUCUGUUACGCACAUC | 1741 | asGfsuuuGfaAfUfcuguUfaCfgcacasusc | 2837 | antisense | 23 |
| GAUGAUGUGCGUAACAGAUUC | 1742 | gsasugauGfuGfCfGfuaacagauucL96 | 2838 | sense | 21 |
| GAAUCUGUUACGCACAUCAUCCA | 1743 | gsAfsaucUfgUfUfacgcAfcAfucaucscsa | 2839 | antisense | 23 |
| GGAUGAUGUGCGUAACAGAUU | 1744 | gsgsaugaUfgUfGfCfguaacagauuL96 | 2840 | sense | 21 |
| AAUCUGUUACGCACAUCAUCCAG | 1745 | asAfsucuGfuUfAfcgcaCfaUfcauccsasg | 2841 | antisense | 23 |
| GGGUCAGCAUGCCAAUAUGUG | 1746 | gsgsgucaGfcAfUfGfccaauaugugL96 | 2842 | sense | 21 |
| CACAUAUUGGCAUGCUGACCCUC | 1747 | csAfscauAfuUfGfgcauGfcUfgacccsusc | 2843 | antisense | 23 |
| GGUCAGCAUGCCAAUAUGUGU | 1748 | gsgsucagCfaUfGfCfcaauauguguL96 | 2844 | sense | 21 |
| ACACAUAUUGGCAUGCUGACCCU | 1749 | asCfsacaUfaUfUfggcaUfgCfugaccscsu | 2845 | antisense | 23 |
| CAGAGGGUCAGCAUGCCAAUA | 1750 | csasgaggGfuCfAfGfcaugccaauaL96 | 2846 | sense | 21 |
| UAUUGGCAUGCUGACCCUCUGUC | 1751 | usAfsuugGfcAfUfgcugAfcCfcucugsusc | 2847 | antisense | 23 |
| ACAGAGGGUCAGCAUGCCAAU | 1752 | ascsagagGfgUfCfAfgcaugccaauL96 | 2848 | sense | 21 |
| AUUGGCAUGCUGACCCUCUGUCC | 1753 | asUfsuggCfaUfGfcugaCfcCfucuguscsc | 2849 | antisense | 23 |
| GCUUGAAUGGGAUCUUGGUGU | 1754 | gscsuugaAfuGfGfGfaucuugguguL96 | 2850 | sense | 21 |
| ACACCAAGAUCCCAUUCAAGCCA | 1755 | asCfsaccAfaGfAfucccAfuUfcaagcscsa | 2851 | antisense | 23 |
| CUUGAAUGGGAUCUUGGUGUC | 1756 | csusugaaUfgGfGfAfucuuggugucL96 | 2852 | sense | 21 |
| GACACCAAGAUCCCAUUCAAGCC | 1757 | gsAfscacCfaAfGfauccCfaUfucaagscsc | 2853 | antisense | 23 |
| CAUGGCUUGAAUGGGAUCUUG | 1758 | csasuggcUfuGfAfAfugggaucuugL96 | 2854 | sense | 21 |
| CAAGAUCCCAUUCAAGCCAUGUU | 1759 | csAfsagaUfcCfCfauucAfaGfccaugsusu | 2855 | antisense | 23 |
| ACAUGGCUUGAAUGGGAUCUU | 1760 | ascsauggCfuUfGfAfaugggaucuuL96 | 2856 | sense | 21 |
| AAGAUCCCAUUCAAGCCAUGUUU | 1761 | asAfsgauCfcCfAfuucaAfgCfcaugususu | 2857 | antisense | 23 |
| UCAAAUGGCUGAGAAGACUGA | 1762 | uscsaaauGfgCfUfGfagaagacugaL96 | 2858 | sense | 21 |
| UCAGUCUUCUCAGCCAUUUGAUA | 1763 | usCfsaguCfuUfCfucagCfcAfuuugasusa | 2859 | antisense | 23 |
| CAAAUGGCUGAGAAGACUGAC | 1764 | csasaaugGfcUfGfAfgaagacugacL96 | 2860 | sense | 21 |
| GUCAGUCUUCUCAGCCAUUUGAU | 1765 | gsUfscagUfcUfUfcucaGfcCfauuugsasu | 2861 | antisense | 23 |
| GAUAUCAAAUGGCUGAGAAGA | 1766 | gsasuaucAfaAfUfGfgcugagaagaL96 | 2862 | sense | 21 |
| UCUUCUCAGCCAUUUGAUAUCUU | 1767 | usCfsuucUfcAfGfccauUfuGfauaucsusu | 2863 | antisense | 23 |
| AGAUAUCAAAUGGCUGAGAAG | 1768 | asgsauauCfaAfAfUfggcugagaagL96 | 2864 | sense | 21 |
| CUUCUCAGCCAUUUGAUAUCUUC | 1769 | csUfsucuCfaGfCfcauuUfgAfuaucususc | 2865 | antisense | 23 |
| GAAAGUCAUCGACAAGACAUU | 1770 | gsasaaguCfaUfCfGfacaagacauuL96 | 2866 | sense | 21 |
| AAUGUCUUGUCGAUGACUUUCAC | 1771 | asAfsuguCfuUfGfucgaUfgAfcuuucsasc | 2867 | antisense | 23 |
| AAAGUCAUCGACAAGACAUUG | 1772 | asasagucAfuCfGfAfcaagacauugL96 | 2868 | sense | 21 |
| CAAUGUCUUGUCGAUGACUUUCA | 1773 | csAfsaugUfcUfUfgucgAfuGfacuuuscsa | 2869 | antisense | 23 |
| AUGUGAAAGUCAUCGACAAGA | 1774 | asusgugaAfaGfUfCfaucgacaagaL96 | 2870 | sense | 21 |
| UCUUGUCGAUGACUUUCACAUUC | 1775 | usCfsuugUfcGfAfugacUfuUfcacaususc | 2871 | antisense | 23 |
| AAUGUGAAAGUCAUCGACAAG | 1776 | asasugugAfaAfGfUfcaucgacaagL96 | 2872 | sense | 21 |
| CUUGUCGAUGACUUUCACAUUCU | 1777 | csUfsuguCfgAfUfgacuUfuCfacauuscsu | 2873 | antisense | 23 |
| GGCUAAUUUGUAUCAAUGAUU | 1778 | gsgscuaaUfuUfGfUfaucaaugauuL96 | 2874 | sense | 21 |
| AAUCAUUGAUACAAAUUAGCCGG | 1779 | asAfsucaUfuGfAfuacaAfaUfuagccsgsg | 2875 | antisense | 23 |
| GCUAAUUUGUAUCAAUGAUUA | 1780 | gscsuaauUfuGfUfAfucaaugauuaL96 | 2876 | sense | 21 |
| UAAUCAUUGAUACAAAUUAGCCG | 1781 | usAfsaucAfuUfGfauacAfaAfuuagcscsg | 2877 | antisense | 23 |
| CCCCGGCUAAUUUGUAUCAAU | 1782 | cscsccggCfuAfAfUfuuguaucaauL96 | 2878 | sense | 21 |
| AUUGAUACAAAUUAGCCGGGGGA | 1783 | asUfsugaUfaCfAfaauuAfgCfcggggsgsa | 2879 | antisense | 23 |
| CCCCCGGCUAAUUUGUAUCAA | 1784 | cscscccgGfcUfAfAfuuuguaucaaL96 | 2880 | sense | 21 |
| UUGAUACAAAUUAGCCGGGGGAG | 1785 | usUfsgauAfcAfAfauuaGfcCfgggggsasg | 2881 | antisense | 23 |
| UGUCGACUUCUGUUUUAGGAC | 1786 | usgsucgaCfuUfCfUfguuuuaggacL96 | 2882 | sense | 21 |
| GUCCUAAAACAGAAGUCGACAGA | 1787 | gsUfsccuAfaAfAfcagaAfgUfcgacasgsa | 2883 | antisense | 23 |
| GUCGACUUCUGUUUUAGGACA | 1788 | gsuscgacUfuCfUfGfuuuuaggacaL96 | 2884 | sense | 21 |
| UGUCCUAAAACAGAAGUCGACAG | 1789 | usGfsuccUfaAfAfacagAfaGfucgacsasg | 2885 | antisense | 23 |
| GAUCUGUCGACUUCUGUUUUA | 1790 | gsasucugUfcGfAfCfuucuguuuuaL96 | 2886 | sense | 21 |
| UAAAACAGAAGUCGACAGAUCUG | 1791 | usAfsaaaCfaGfAfagucGfaCfagaucsusg | 2887 | antisense | 23 |
| AGAUCUGUCGACUUCUGUUUU | 1792 | asgsaucuGfuCfGfAfcuucuguuuuL96 | 2888 | sense | 21 |
| AAAACAGAAGUCGACAGAUCUGU | 1793 | asAfsaacAfgAfAfgucgAfcAfgaucusgsu | 2889 | antisense | 23 |
| CCGAGAAGUCACCAAGAAGCU | 1794 | cscsgagaAfgUfCfAfccaagaagcuL96 | 2890 | sense | 21 |
| AGCUUCUUGGUGACUUCUCGGUC | 1795 | asGfscuuCfuUfGfgugaCfuUfcucggsusc | 2891 | antisense | 23 |
| CGAGAAGUCACCAAGAAGCUA | 1796 | csgsagaaGfuCfAfCfcaagaagcuaL96 | 2892 | sense | 21 |
| UAGCUUCUUGGUGACUUCUCGGU | 1797 | usAfsgcuUfcUfUfggugAfcUfucucgsgsu | 2893 | antisense | 23 |
| AGGACCGAGAAGUCACCAAGA | 1798 | asgsgaccGfaGfAfAfgucaccaagaL96 | 2894 | sense | 21 |
| UCUUGGUGACUUCUCGGUCCUUG | 1799 | usCfsuugGfuGfAfcuucUfcGfguccususg | 2895 | antisense | 23 |
| AAGGACCGAGAAGUCACCAAG | 1800 | asasggacCfgAfGfAfagucaccaagL96 | 2896 | sense | 21 |
| CUUGGUGACUUCUCGGUCCUUGU | 1801 | csUfsuggUfgAfCfuucuCfgGfuccuusgsu | 2897 | antisense | 23 |
| AAACAUGGCUUGAAUGGGAUC | 1802 | asasacauGfgCfUfUfgaaugggaucL96 | 2898 | sense | 21 |
| GAUCCCAUUCAAGCCAUGUUUAA | 1803 | gsAfsuccCfaUfUfcaagCfcAfuguuusasa | 2899 | antisense | 23 |
| AACAUGGCUUGAAUGGGAUCU | 1804 | asascaugGfcUfUfGfaaugggaucuL96 | 2900 | sense | 21 |
| AGAUCCCAUUCAAGCCAUGUUUA | 1805 | asGfsaucCfcAfUfucaaGfcCfauguususa | 2901 | antisense | 23 |
| UGUUAAACAUGGCUUGAAUGG | 1806 | usgsuuaaAfcAfUfGfgcuugaauggL96 | 2902 | sense | 21 |
| CCAUUCAAGCCAUGUUUAACAGC | 1807 | csCfsauuCfaAfGfccauGfuUfuaacasgsc | 2903 | antisense | 23 |
| CUGUUAAACAUGGCUUGAAUG | 1808 | csusguuaAfaCfAfUfggcuugaaugL96 | 2904 | sense | 21 |
| CAUUCAAGCCAUGUUUAACAGCC | 1809 | csAfsuucAfaGfCfcaugUfuUfaacagscsc | 2905 | antisense | 23 |
| GACUUGCUGCAUAUGUGGCUA | 1810 | gsascuugCfuGfCfAfuauguggcuaL96 | 2906 | sense | 21 |
| UAGCCACAUAUGCAGCAAGUCCA | 1811 | usAfsgccAfcAfUfaugcAfgCfaagucscsa | 2907 | antisense | 23 |
| ACUUGCUGCAUAUGUGGCUAA | 1812 | ascsuugcUfgCfAfUfauguggcuaaL96 | 2908 | sense | 21 |
| UUAGCCACAUAUGCAGCAAGUCC | 1813 | usUfsagcCfaCfAfuaugCfaGfcaaguscsc | 2909 | antisense | 23 |
| AGUGGACUUGCUGCAUAUGUG | 1814 | asgsuggaCfuUfGfCfugcauaugugL96 | 2910 | sense | 21 |
| CACAUAUGCAGCAAGUCCACUGU | 1815 | csAfscauAfuGfCfagcaAfgUfccacusgsu | 2911 | antisense | 23 |
| CAGUGGACUUGCUGCAUAUGU | 1816 | csasguggAfcUfUfGfcugcauauguL96 | 2912 | sense | 21 |
| ACAUAUGCAGCAAGUCCACUGUC | 1817 | asCfsauaUfgCfAfgcaaGfuCfcacugsusc | 2913 | antisense | 23 |
| UAAAUCAGUACUUCCAAAGUC | 1818 | usasaaucAfgUfAfCfuuccaaagucL96 | 2914 | sense | 21 |
| GACUUUGGAAGUACUGAUUUAGC | 1819 | gsAfscuuUfgGfAfaguaCfuGfauuuasgsc | 2915 | antisense | 23 |
| AAAUCAGUACUUCCAAAGUCU | 1820 | asasaucaGfuAfCfUfuccaaagucuL96 | 2916 | sense | 21 |
| AGACUUUGGAAGUACUGAUUUAG | 1821 | asGfsacuUfuGfGfaaguAfcUfgauuusasg | 2917 | antisense | 23 |
| AUGCUAAAUCAGUACUUCCAA | 1822 | asusgcuaAfaUfCfAfguacuuccaaL96 | 2918 | sense | 21 |
| UUGGAAGUACUGAUUUAGCAUGU | 1823 | usUfsggaAfgUfAfcugaUfuUfagcausgsu | 2919 | antisense | 23 |
| CAUGCUAAAUCAGUACUUCCA | 1824 | csasugcuAfaAfUfCfaguacuuccaL96 | 2920 | sense | 21 |
| UGGAAGUACUGAUUUAGCAUGUU | 1825 | usGfsgaaGfuAfCfugauUfuAfgcaugsusu | 2921 | antisense | 23 |
| UCCUCAAUUGAAGAAGUGGCG | 1826 | uscscucaAfuUfGfAfagaaguggcgL96 | 2922 | sense | 21 |
| CGCCACUUCUUCAAUUGAGGAGG | 1827 | csGfsccaCfuUfCfuucaAfuUfgaggasgsg | 2923 | antisense | 23 |
| CCUCAAUUGAAGAAGUGGCGG | 1828 | cscsucaaUfuGfAfAfgaaguggcggL96 | 2924 | sense | 21 |
| CCGCCACUUCUUCAAUUGAGGAG | 1829 | csCfsgccAfcUfUfcuucAfaUfugaggsasg | 2925 | antisense | 23 |
| CACCUCCUCAAUUGAAGAAGU | 1830 | csasccucCfuCfAfAfuugaagaaguL96 | 2926 | sense | 21 |
| ACUUCUUCAAUUGAGGAGGUGGC | 1831 | asCfsuucUfuCfAfauugAfgGfaggugsgsc | 2927 | antisense | 23 |
| CCACCUCCUCAAUUGAAGAAG | 1832 | cscsaccuCfcUfCfAfauugaagaagL96 | 2928 | sense | 21 |
| CUUCUUCAAUUGAGGAGGUGGCC | 1833 | csUfsucuUfcAfAfuugaGfgAfgguggscsc | 2929 | antisense | 23 |
| CAAGAUGUCCUCGAGAUACUA | 1834 | csasagauGfuCfCfUfcgagauacuaL96 | 2930 | sense | 21 |
| UAGUAUCUCGAGGACAUCUUGAA | 1835 | usAfsguaUfcUfCfgaggAfcAfucuugsasa | 2931 | antisense | 23 |
| AAGAUGUCCUCGAGAUACUAA | 1836 | asasgaugUfcCfUfCfgagauacuaaL96 | 2932 | sense | 21 |
| UUAGUAUCUCGAGGACAUCUUGA | 1837 | usUfsaguAfuCfUfcgagGfaCfaucuusgsa | 2933 | antisense | 23 |
| UGUUCAAGAUGUCCUCGAGAU | 1838 | usgsuucaAfgAfUfGfuccucgagauL96 | 2934 | sense | 21 |
| AUCUCGAGGACAUCUUGAACACC | 1839 | asUfscucGfaGfGfacauCfuUfgaacascsc | 2935 | antisense | 23 |
| GUGUUCAAGAUGUCCUCGAGA | 1840 | gsusguucAfaGfAfUfguccucgagaL96 | 2936 | sense | 21 |
| UCUCGAGGACAUCUUGAACACCU | 1841 | usCfsucgAfgGfAfcaucUfuGfaacacscsu | 2937 | antisense | 23 |
| ACAUGCUAAAUCAGUACUUCC | 1842 | ascsaugcUfaAfAfUfcaguacuuccL96 | 2938 | sense | 21 |
| GGAAGUACUGAUUUAGCAUGUUG | 1843 | gsGfsaagUfaCfUfgauuUfaGfcaugususg | 2939 | antisense | 23 |
| CAUGCUAAAUCAGUACUUCCA | 1844 | csasugcuAfaAfUfCfaguacuuccaL96 | 2940 | sense | 21 |
| UGGAAGUACUGAUUUAGCAUGUU | 1845 | usGfsgaaGfuAfCfugauUfuAfgcaugsusu | 2941 | antisense | 23 |
| AACAACAUGCUAAAUCAGUAC | 1846 | asascaacAfuGfCfUfaaaucaguacL96 | 2942 | sense | 21 |
| GUACUGAUUUAGCAUGUUGUUCA | 1847 | gsUfsacuGfaUfUfuagcAfuGfuuguuscsa | 2943 | antisense | 23 |
| GAACAACAUGCUAAAUCAGUA | 1848 | gsasacaaCfaUfGfCfuaaaucaguaL96 | 2944 | sense | 21 |
| UACUGAUUUAGCAUGUUGUUCAU | 1849 | usAfscugAfuUfUfagcaUfgUfuguucsasu | 2945 | antisense | 23 |
| GAAAGGCACUGAUGUUCUGAA | 1850 | gsasaaggCfaCfUfGfauguucugaaL96 | 2946 | sense | 21 |
| UUCAGAACAUCAGUGCCUUUCCG | 1851 | usUfscagAfaCfAfucagUfgCfcuuucscsg | 2947 | antisense | 23 |
| AAAGGCACUGAUGUUCUGAAA | 1852 | asasaggcAfcUfGfAfuguucugaaaL96 | 2948 | sense | 21 |
| UUUCAGAACAUCAGUGCCUUUCC | 1853 | usUfsucaGfaAfCfaucaGfuGfccuuuscsc | 2949 | antisense | 23 |
| UGCGGAAAGGCACUGAUGUUC | 1854 | usgscggaAfaGfGfCfacugauguucL96 | 2950 | sense | 21 |
| GAACAUCAGUGCCUUUCCGCACA | 1855 | gsAfsacaUfcAfGfugccUfuUfccgcascsa | 2951 | antisense | 23 |
| GUGCGGAAAGGCACUGAUGUU | 1856 | gsusgcggAfaAfGfGfcacugauguuL96 | 2952 | sense | 21 |
| AACAUCAGUGCCUUUCCGCACAC | 1857 | asAfscauCfaGfUfgccuUfuCfcgcacsasc | 2953 | antisense | 23 |
| GUCAGCAUGCCAAUAUGUGUG | 1858 | gsuscagcAfuGfCfCfaauaugugugL96 | 2954 | sense | 21 |
| CACACAUAUUGGCAUGCUGACCC | 1859 | csAfscacAfuAfUfuggcAfuGfcugacscsc | 2955 | antisense | 23 |
| UCAGCAUGCCAAUAUGUGUGG | 1860 | uscsagcaUfgCfCfAfauauguguggL96 | 2956 | sense | 21 |
| CCACACAUAUUGGCAUGCUGACC | 1861 | csCfsacaCfaUfAfuuggCfaUfgcugascsc | 2957 | antisense | 23 |
| GAGGGUCAGCAUGCCAAUAUG | 1862 | gsasggguCfaGfCfAfugccaauaugL96 | 2958 | sense | 21 |
| CAUAUUGGCAUGCUGACCCUCUG | 1863 | csAfsuauUfgGfCfaugcUfgAfcccucsusg | 2959 | antisense | 23 |
| AGAGGGUCAGCAUGCCAAUAU | 1864 | asgsagggUfcAfGfCfaugccaauauL96 | 2960 | sense | 21 |
| AUAUUGGCAUGCUGACCCUCUGU | 1865 | asUfsauuGfgCfAfugcuGfaCfccucusgsu | 2961 | antisense | 23 |
| GAUGCUCCGGAAUGUUGCUGA | 1866 | gsasugcuCfcGfGfAfauguugcugaL96 | 2962 | sense | 21 |
| UCAGCAACAUUCCGGAGCAUCCU | 1867 | usCfsagcAfaCfAfuuccGfgAfgcaucscsu | 2963 | antisense | 23 |
| AUGCUCCGGAAUGUUGCUGAA | 1868 | asusgcucCfgGfAfAfuguugcugaaL96 | 2964 | sense | 21 |
| UUCAGCAACAUUCCGGAGCAUCC | 1869 | usUfscagCfaAfCfauucCfgGfagcauscsc | 2965 | antisense | 23 |
| CAAGGAUGCUCCGGAAUGUUG | 1870 | csasaggaUfgCfUfCfcggaauguugL96 | 2966 | sense | 21 |
| CAACAUUCCGGAGCAUCCUUGGA | 1871 | csAfsacaUfuCfCfggagCfaUfccuugsgsa | 2967 | antisense | 23 |
| CCAAGGAUGCUCCGGAAUGUU | 1872 | cscsaaggAfuGfCfUfccggaauguuL96 | 2968 | sense | 21 |
| AACAUUCCGGAGCAUCCUUGGAU | 1873 | asAfscauUfcCfGfgagcAfuCfcuuggsasu | 2969 | antisense | 23 |
| GCGUAACAGAUUCAAACUGCC | 1874 | gscsguaaCfaGfAfUfucaaacugccL96 | 2970 | sense | 21 |
| GGCAGUUUGAAUCUGUUACGCAC | 1875 | gsGfscagUfuUfGfaaucUfgUfuacgcsasc | 2971 | antisense | 23 |
| CGUAACAGAUUCAAACUGCCG | 1876 | csgsuaacAfgAfUfUfcaaacugccgL96 | 2972 | sense | 21 |
| CGGCAGUUUGAAUCUGUUACGCA | 1877 | csGfsgcaGfuUfUfgaauCfuGfuuacgscsa | 2973 | antisense | 23 |
| AUGUGCGUAACAGAUUCAAAC | 1878 | asusgugcGfuAfAfCfagauucaaacL96 | 2974 | sense | 21 |
| GUUUGAAUCUGUUACGCACAUCA | 1879 | gsUfsuugAfaUfCfuguuAfcGfcacauscsa | 2975 | antisense | 23 |
| GAUGUGCGUAACAGAUUCAAA | 1880 | gsasugugCfgUfAfAfcagauucaaaL96 | 2976 | sense | 21 |
| UUUGAAUCUGUUACGCACAUCAU | 1881 | usUfsugaAfuCfUfguuaCfgCfacaucsasu | 2977 | antisense | 23 |
| AGAGAAGAUGGGCUACAAGGC | 1882 | asgsagaaGfaUfGfGfgcuacaaggcL96 | 2978 | sense | 21 |
| GCCUUGUAGCCCAUCUUCUCUGC | 1883 | gsCfscuuGfuAfGfcccaUfcUfucucusgsc | 2979 | antisense | 23 |
| GAGAAGAUGGGCUACAAGGCC | 1884 | gsasgaagAfuGfGfGfcuacaaggccL96 | 2980 | sense | 21 |
| GGCCUUGUAGCCCAUCUUCUCUG | 1885 | gsGfsccuUfgUfAfgcccAfuCfuucucsusg | 2981 | antisense | 23 |
| AGGCAGAGAAGAUGGGCUACA | 1886 | asgsgcagAfgAfAfGfaugggcuacaL96 | 2982 | sense | 21 |
| UGUAGCCCAUCUUCUCUGCCUGC | 1887 | usGfsuagCfcCfAfucuuCfuCfugccusgsc | 2983 | antisense | 23 |
| CAGGCAGAGAAGAUGGGCUAC | 1888 | csasggcaGfaGfAfAfgaugggcuacL96 | 2984 | sense | 21 |
| GUAGCCCAUCUUCUCUGCCUGCC | 1889 | gsUfsagcCfcAfUfcuucUfcUfgccugscsc | 2985 | antisense | 23 |

TABLE 13
Modified antisense polynucleotides targeting HAO1.

| | | | SEQ |
|---|---|---|---|
| | Oligo | | ID |
| Target | Name | Sequence 5′-3′ | NO: |
| HAO1 | A-133284.1 | gsgsgsasgs(5MdC)sdAsdTsdTsdTsdTs(5MdC)sdAs(5MdC)sdAsgsgsususa | 4155 |
| HAO1 | A-133285.1 | asasususasdGs(5MdC)s(5MdC)sdGsdGsdGsdGsdGsdAsdGscsasususu | 4156 |
| HAO1 | A-133286.1 | asuscsasusdTsdGsdAsdTsdAs(5MdC)sdAsdAsdAsdTsusasgscsc | 4157 |
| HAO1 | A-133287.1 | gsususgsusdTs(5MdC)sdAsdTsdAsdAsdTs(5MdC)sdAsdTsusgsasusa | 4158 |
| HAO1 | A-133288.1 | gsasusususdAsdGs(5MdC)sdAsdTsdGsdTsdTsdGsdTsuscsasusa | 4159 |
| HAO1 | A-133289.1 | ususgsgsasdAsdGsdTsdAs(5MdC)sdTsdGsdAsdTsdTsusasgscsa | 4160 |
| HAO1 | A-133290.1 | csasusasusdAsdTsdAsdGsdAs(5MdC)sdTsdTsdTsdGsgsasasgsu | 4161 |
| HAO1 | A-133291.1 | csusgsusasdAsdTsdAsdGsdTs(5MdC)sdAsdTsdAsdTsasusasgsa | 4162 |
| HAO1 | A-133292.1 | ususgscscs(5MdC)s(5MdC)sdAsdGsdAs(5MdC)s(5MdC)sdTsdGsdTsasasusasg | 4163 |
| HAO1 | A-133293.1 | ususcsusus(5MdC)sdAsdTs(5MdC)sdAsdTsdTsdTsdGs(5MdC)scscscsasg | 4164 |
| HAO1 | A-133294.1 | usasuscsasdGs(5MdC)s(5MdC)sdAsdAsdAsdGsdTsdTsdTscsususcsa | 4165 |
| HAO1 | A-133295.1 | gscsusgscsdAsdAsdTsdAsdTsdTsdAsdTs(5MdC)sdAsgscscsasa | 4166 |
| HAO1 | A-133296.1 | asuscsusgsdGsdAsdAsdAsdAsdTsdGs(5MdC)sdTsdGscsasasusa | 4167 |
| HAO1 | A-133297.1 | gsasusascsdAsdGs(5MdC)sdTsdTs(5MdC)s(5MdC)sdAsdTs(5MdC)susgsgsasa | 4168 |
| HAO1 | A-133298.1 | gsasgscsasdTs(5MdC)s(5MdC)sdTsdTsdGsdGsdAsdTsdAscsasgscsu | 4169 |
| HAO1 | A-133299.1 | csasascsasdTsdTs(5MdC)s(5MdC)sdGsdGsdAsdGs(5MdC)sdAsuscscsusu | 4170 |
| HAO1 | A-133300.1 | gsasuscsusdGsdTsdTsdTs(5MdC)sdAsdGs(5MdC)sdAsdAscsasususc | 4171 |
| HAO1 | A-133301.1 | asgsasasgsdTs(5MdC)sdGsdAs(5MdC)sdAsdGsdAsdTs(5MdC)susgsususu | 4172 |
| HAO1 | A-133302.1 | usgsuscscsdTsdAsdAsdAsdAs(5MdC)sdAsdGsdAsdAsgsuscsgsa | 4173 |
| HAO1 | A-133303.1 | usgscsusgsdAs(5MdC)s(5MdC)s(5MdC)sdTs(5MdC)sdTsdGsdTs(5MdC)scsusasasa | 4174 |
| HAO1 | A-133304.1 | csasusasusdTsdGsdGs(5MdC)sdAsdTsdGs(5MdC)sdTsdGsascscscsu | 4175 |
| HAO1 | A-133305.1 | asgscscscs(5MdC)s(5MdC)sdAs(5MdC)sdAs(5MdC)sdAsdTsdAsdTsusgsgscsa | 4176 |
| HAO1 | A-133306.1 | csusgscsasdTsdGsdGs(5MdC)s(5MdC)sdGsdTsdAsdGs(5MdC)scscscscsa | 4177 |
| HAO1 | A-133307.1 | gsasgscscsdAsdTsdGs(5MdC)sdGs(5MdC)sdTsdGs(5MdC)sdAsusgsgscsc | 4178 |
| HAO1 | A-133308.1 | gscscsgsus(5MdC)s(5MdC)sdAs(5MdC)sdAsdTsdGsdAsdGs(5MdC)scsasusgsc | 4179 |
| HAO1 | A-133309.1 | asgsusgsgs(5MdC)sdAsdAsdGs(5MdC)sdTs(5MdC)sdGs(5MdC)s(5MdC)sgsuscscsa | 4180 |
| HAO1 | A-133310.1 | ascsasgsgs(5MdC)sdTs(5MdC)sdTs(5MdC)sdAs(5MdC)sdAsdGsdTsgsgscsasa | 4181 |
| HAO1 | A-133311.1 | csasgsgsgsdAs(5MdC)sdTsdGsdAs(5MdC)sdAsdGsdGs(5MdC)suscsuscsa | 4182 |
| HAO1 | A-133312.1 | asusgscscs(5MdC)sdGsdTsdTs(5MdC)s(5MdC)s(5MdC)sdAsdGsdGsgsascsusg | 4183 |
| HAO1 | A-133313.1 | gsasascsus(5MdC)sdAsdAs(5MdC)sdAsdTs(5MdC)sdAsdTsdGscscscsgsu | 4184 |
| HAO1 | A-133314.1 | gsasgsgsusdGsdGs(5MdC)s(5MdC)s(5MdC)sdAsdGsdGsdAsdAscsuscsasa | 4185 |
| HAO1 | A-133315.1 | uscsasasusdTsdGsdAsdGsdGsdAsdGsdGsdTsdGsgscscscsa | 4186 |
| HAO1 | A-133316.1 | cscsgscscsdAs(5MdC)sdTsdTs(5MdC)sdTsdTs(5MdC)sdAsdAsususgsasg | 4187 |
| HAO1 | A-133317.1 | csasgsgsas(5MdC)s(5MdC)sdAsdGs(5MdC)sdTsdTs(5MdC)s(5MdC)sdGscscsascsu | 4188 |
| HAO1 | A-133318.1 | ascsgsasasdGsdTsdGs(5MdC)s(5MdC)sdTs(5MdC)sdAsdGsdGsascscsasg | 4189 |
| HAO1 | A-133319.1 | csasgsususdGs(5MdC)sdAsdGs(5MdC)s(5MdC)sdAsdAs(5MdC)sdGsasasgsusg | 4190 |
| HAO1 | A-133320.1 | usgsusasgsdAsdTsdAsdTsdAs(5MdC)sdAsdGsdTsdTsgscsasgsc | 4191 |
| HAO1 | A-133321.1 | uscsuscsgsdGsdTs(5MdC)s(5MdC)sdTsdTsdGsdTsdAsdGsasusasusa | 4192 |
| HAO1 | A-133322.1 | ususcsususdGsdGsdTsdGsdAs(5MdC)sdTsdTs(5MdC)sdTscsgsgsusc | 4193 |
| HAO1 | A-133323.1 | cscsgscsas(5MdC)sdTsdAsdGs(5MdC)sdTsdTs(5MdC)sdTsdTsgsgsusgsa | 4194 |
| HAO1 | A-133324.1 | csususcsus(5MdC)sdTsdGs(5MdC)s(5MdC)sdTsdGs(5MdC)s(5MdC)sdGscsascsusa | 4195 |
| HAO1 | A-133325.1 | csususgsusdAsdGs(5MdC)s(5MdC)s(5MdC)sdAsdTs(5MdC)sdTsdTscsuscsusg | 4196 |
| HAO1 | A-133326.1 | asasasusasdTsdGsdGs(5MdC)s(5MdC)sdTsdTsdGsdTsdAsgscscscsa | 4197 |
| HAO1 | A-133327.1 | usgsuscscsdAs(5MdC)sdTsdGsdTs(5MdC)sdAs(5MdC)sdAsdAsasusasusg | 4198 |
| HAO1 | A-133328.1 | csasgsgsusdAsdAsdGsdGsdTsdGsdTsdGsdTs(5MdC)scsascsusg | 4199 |
| HAO1 | A-133329.1 | gsascsgsgsdTsdTsdGs(5MdC)s(5MdC)s(5MdC)sdAsdGsdGsdTsasasgsgsu | 4200 |
| HAO1 | A-133330.1 | csascsasus(5MdC)sdAsdTs(5MdC)s(5MdC)sdAsdGsdAs(5MdC)sdGsgsususgsc | 4201 |
| HAO1 | A-133331.1 | asasuscsusdGsdTsdTsdAs(5MdC)sdGs(5MdC)sdAs(5MdC)sdAsuscsasusc | 4202 |
| HAO1 | A-133332.1 | gscsgsgscsdAsdGsdTsdTsdTsdGsdAsdAsdTs(5MdC)susgsususa | 4203 |
| HAO1 | A-133333.1 | csusgsasgsdTsdTsdGsdTsdGsdGs(5MdC)sdGsdGs(5MdC)sasgsususu | 4204 |
| HAO1 | A-133334.1 | asasasasusdTsdTsdTsdTs(5MdC)sdAsdTs(5MdC)s(5MdC)sdTsgsasgsusu | 4205 |
| HAO1 | A-133335.1 | usascsusgsdGsdTsdTsdTs(5MdC)sdAsdAsdAsdAsdTsususususc | 4206 |
| HAO1 | A-133336.1 | asasasusgsdAsdTsdAsdAsdAsdGsdTsdAs(5MdC)sdTsgsgsususu | 4207 |
| HAO1 | A-133337.1 | cscsuscsasdGsdGsdAsdGsdAsdAsdAsdAsdTsdGsasusasasa | 4208 |
| HAO1 | A-133338.1 | uscscsasasdAsdAsdTsdTsdTsdTs(5MdC)s(5MdC)sdTs(5MdC)sasgsgsasg | 4209 |
| HAO1 | A-133339.1 | gsuscscsas(5MdC)sdTsdGsdTs(5MdC)sdGsdTs(5MdC)sdTs(5MdC)scsasasasa | 4210 |
| HAO1 | A-133340.1 | asusasusgs(5MdC)sdAsdGs(5MdC)sdAsdAsdGsdTs(5MdC)s(5MdC)sascsusgsu | 4211 |
| HAO1 | A-133341.1 | usususasgs(5MdC)s(5MdC)sdAs(5MdC)sdAsdTsdAsdTsdGs(5MdC)sasgscsasa | 4212 |
| HAO1 | A-133342.1 | usgsgsgsus(5MdC)sdTsdAsdTsdTsdGs(5MdC)sdTsdTsdTsasgscscsa | 4213 |
| HAO1 | A-133343.1 | asgscsusgsdAsdTsdAsdGsdAsdTsdGsdGsdGsdTscsusasusu | 4214 |
| HAO1 | A-133344.1 | gsasusasus(5MdC)sdTsdTs(5MdC)s(5MdC)s(5MdC)sdAsdGs(5MdC)sdTsgsasusasg | 4215 |
| HAO1 | A-133345.1 | csuscsasgs(5MdC)s(5MdC)sdAsdTsdTsdTsdGsdAsdTsdAsuscsususc | 4216 |
| HAO1 | A-133346.1 | gsasusgsus(5MdC)sdAsdGsdTs(5MdC)sdTsdTs(5MdC)sdTs(5MdC)sasgscscsa | 4217 |
| HAO1 | A-133347.1 | csasasususdGsdGs(5MdC)sdAsdAsdTsdGsdAsdTsdGsuscsasgsu | 4218 |
| HAO1 | A-133348.1 | cscscsususdTsdGs(5MdC)sdAsdAs(5MdC)sdAsdAsdTsdTsgsgscsasa | 4219 |
| HAO1 | A-133349.1 | csuscsuscsdAsdAsdAsdAsdTsdGs(5MdC)s(5MdC)s(5MdC)sdTsususgscsa | 4220 |
| HAO1 | A-133350.1 | gsgscsasus(5MdC)sdAsdTs(5MdC)sdAs(5MdC)s(5MdC)sdTs(5MdC)sdTscsasasasa | 4221 |
| HAO1 | A-133351.1 | asascsasgs(5MdC)s(5MdC)sdTs(5MdC)s(5MdC)s(5MdC)sdTsdGsdGs(5MdC)sasuscsasu | 4222 |
| HAO1 | A-133352.1 | asasgscscsdAsdTsdGsdTsdTsdTsdAsdAs(5MdC)sdAsgscscsusc | 4223 |
| HAO1 | A-133353.1 | asasgsasus(5MdC)s(5MdC)s(5MdC)sdAsdTsdTs(5MdC)sdAsdAsdGscscsasusg | 4224 |
| HAO1 | A-133354.1 | ususcsgsas(5MdC)sdAs(5MdC)s(5MdC)sdAsdAsdGsdAsdTs(5MdC)scscsasusu | 4225 |
| HAO1 | A-133355.1 | uscsgsasgs(5MdC)s(5MdC)s(5MdC)s(5MdC)sdAsdTsdGsdAsdTsdTscsgsascsa | 4226 |
| HAO1 | A-133356.1 | asuscsgsasdGsdTsdTsdGsdTs(5MdC)sdGsdAsdGs(5MdC)scscscsasu | 4227 |
| HAO1 | A-133357.1 | gsgscsusgsdGs(5MdC)sdAs(5MdC)s(5MdC)s(5MdC)s(5MdC)sdAsdTs(5MdC)sgsasgsusu | 4228 |
| HAO1 | A-133358.1 | asascsasus(5MdC)sdAsdAsdTsdAsdGsdTsdGsdGs(5MdC)susgsgscsa | 4229 |
| HAO1 | A-133359.1 | asusususcsdTsdGsdGs(5MdC)sdAsdGsdAsdAs(5MdC)sdAsuscsasasu | 4230 |
| HAO1 | A-133360.1 | asgscscsus(5MdC)s(5MdC)sdAs(5MdC)sdAsdAsdTsdTsdTs(5MdC)susgsgscsa | 4231 |
| HAO1 | A-133361.1 | csususcscs(5MdC)sdTsdTs(5MdC)s(5MdC)sdAs(5MdC)sdAsdGs(5MdC)scsuscscsa | 4232 |
| HAO1 | A-133362.1 | asasgsascsdTsdTs(5MdC)s(5MdC)sdAs(5MdC)s(5MdC)sdTsdTs(5MdC)scscsususc | 4233 |
| HAO1 | A-133363.1 | cscsgsuscs(5MdC)sdAsdGsdGsdAsdAsdGsdAs(5MdC)sdTsuscscsasc | 4234 |
| HAO1 | A-133364.1 | uscscsgscsdAs(5MdC)sdAs(5MdC)s(5MdC)s(5MdC)s(5MdC)s(5MdC)sdGsdTscscsasgsg | 4235 |
| HAO1 | A-133365.1 | csasuscsasdGsdTsdGs(5MdC)s(5MdC)sdTsdTsdTs(5MdC)s(5MdC)sgscsascsa | 4236 |
| HAO1 | A-133366.1 | asgscsususdTs(5MdC)sdAsdGsdAsdAs(5MdC)sdAsdTs(5MdC)sasgsusgsc | 4237 |
| HAO1 | A-133367.1 | csasasgsasdGs(5MdC)s(5MdC)sdAsdGsdAsdGs(5MdC)sdTsdTsuscsasgsa | 4238 |
| HAO1 | A-133368.1 | ascsasgscs(5MdC)sdTsdTsdGsdGs(5MdC)sdGs(5MdC)s(5MdC)sdAsasgsasgsc | 4239 |
| HAO1 | A-133369.1 | uscscscscsdAs(5MdC)sdAsdAsdAs(5MdC)sdAs(5MdC)sdAsdGscscsususg | 4240 |
| HAO1 | A-133370.1 | ascsgsasusdTsdGsdGsdTs(5MdC)sdTs(5MdC)s(5MdC)s(5MdC)s(5MdC)sascsasasa | 4241 |
| HAO1 | A-133371.1 | usasasgscs(5MdC)s(5MdC)s(5MdC)sdAsdAsdAs(5MdC)sdGsdAsdTsusgsgsusc | 4242 |
| HAO1 | A-133372.1 | cscscsusgsdGsdAsdAsdAsdGs(5MdC)sdTsdAsdAsdGscscscscsa | 4243 |
| HAO1 | A-133373.1 | csascscsusdTsdTs(5MdC)sdTs(5MdC)s(5MdC)s(5MdC)s(5MdC)s(5MdC)sdTsgsgsasasa | 4244 |
| HAO1 | A-133374.1 | gsascsasus(5MdC)sdTsdTsdGsdAsdAs(5MdC)sdAs(5MdC)s(5MdC)susususcsu | 4245 |
| HAO1 | A-133375.1 | usasgsusasdTs(5MdC)sdTs(5MdC)sdGsdAsdGsdGsdAs(5MdC)sasuscsusu | 4246 |
| HAO1 | A-133376.1 | gsasasusus(5MdC)sdTsdTs(5MdC)s(5MdC)sdTsdTsdTsdAsdGsusasuscsu | 4247 |
| HAO1 | A-133377.1 | gsgscscsasdAs(5MdC)s(5MdC)sdGsdGsdAsdAsdTsdTs(5MdC)sususcscsu | 4248 |
| HAO1 | A-133378.1 | csuscsasgsdAsdGs(5MdC)s(5MdC)sdAsdTsdGsdGs(5MdC)s(5MdC)sasascscsg | 4249 |
| HAO1 | A-133379.1 | asususcsusdGsdGs(5MdC)sdAs(5MdC)s(5MdC)s(5MdC)sdAs(5MdC)sdTscsasgsasg | 4250 |
| HAO1 | A-133380.1 | asusgsascsdTsdTsdTs(5MdC)sdAs(5MdC)sdAsdTsdTs(5MdC)susgsgscsa | 4251 |
| HAO1 | A-133381.1 | gsuscsususdGsdTs(5MdC)sdGsdAsdTsdGsdAs(5MdC)sdTsususcsasc | 4252 |
| HAO1 | A-133382.1 | usususcscsdTs(5MdC)sdAs(5MdC)s(5MdC)sdAsdAsdTsdGsdTscsususgsu | 4253 |
| HAO1 | A-133383.1 | csasasasgsdGsdAsdTsdTsdTsdTsdTs(5MdC)s(5MdC)sdTscsascscsa | 4254 |
| HAO1 | A-133384.1 | ususgsgsasdAsdAs(5MdC)sdGsdGs(5MdC)s(5MdC)sdAsdAsdAsgsgsasusu | 4255 |
| HAO1 | A-133385.1 | gscsascsusdGsdTs(5MdC)sdAsdGsdAsdTs(5MdC)sdTsdTsgsgsasasa | 4256 |
| HAO1 | A-133386.1 | asasasusasdTsdTsdGsdTsdGs(5MdC)sdAs(5MdC)sdTsdGsuscsasgsa | 4257 |
| HAO1 | A-133387.1 | usascsasgsdAsdTsdGsdGsdGsdAsdAsdAsdAsdTsasususgsu | 4258 |
| HAO1 | A-133388.1 | usgsasasasdAsdAsdAsdAsdAsdTsdAsdAsdTsdAscsasgsasu | 4259 |
| HAO1 | A-133389.1 | usasasusas(5MdC)sdAsdTsdGs(5MdC)sdTsdGsdAsdAsdAsasasasasa | 4260 |
| HAO1 | A-133390.1 | csuscsususdTsdGsdTs(5MdC)sdAsdAsdGsdTsdAsdAsusascsasu | 4261 |
| HAO1 | A-133391.1 | gscsascsasdGsdTsdGsdTs(5MdC)sdTs(5MdC)sdTsdTsdTsgsuscsasa | 4262 |
| HAO1 | A-133392.1 | usgsgsuscsdAs(5MdC)s(5MdC)s(5MdC)sdTs(5MdC)sdTsdGs(5MdC)sdAscsasgsusg | 4263 |
| HAO1 | A-133393.1 | ususascsasdGsdAs(5MdC)sdTsdGsdTsdGsdGsdTs(5MdC)sascscscsu | 4264 |
| HAO1 | A-133394.1 | ususgsasasdGsdTsdGsdGsdGsdGsdAsdAsdTsdTsascsasgsa | 4265 |
| HAO1 | A-133395.1 | cscscsususdTsdGsdTsdAsdTsdTsdGsdAsdAsdGsusgsgsgsg | 4266 |
| HAO1 | A-133396.1 | asasasgsasdAs(5MdC)sdGsdAs(5MdC)sdAs(5MdC)s(5MdC)s(5MdC)sdTsususgsusa | 4267 |
| HAO1 | A-133397.1 | usasusususdTsdGsdTsdTsdGsdGsdAsdAsdAsdAsgsasascsg | 4268 |
| HAO1 | A-133398.1 | asasgsgsgsdAsdTsdTsdGs(5MdC)sdTsdAsdTsdTsdTsusgsususg | 4269 |
| HAO1 | A-133399.1 | gscsasasusdGsdAsdAsdAsdTsdAsdAsdAsdAsdGsgsgsasusu | 4270 |
| HAO1 | A-133400.1 | asasasasgsdTs(5MdC)sdAsdAsdAsdAsdGs(5MdC)sdAsdAsusgsasasa | 4271 |
| HAO1 | A-133401.1 | gsascsascs(5MdC)s(5MdC)sdAsdTsdTsdGsdAsdAsdAsdAsgsuscsasa | 4272 |
| HAO1 | A-133402.1 | asasasgsgsdTsdTs(5MdC)s(5MdC)sdTsdAsdGsdGsdAs(5MdC)sascscscsa | 4273 |
| HAO1 | A-133403.1 | usususcsusdTsdTs(5MdC)sdTsdAsdAsdAsdAsdGsdGsususcscsu | 4274 |
| HAO1 | A-133404.1 | usgsasasasdGsdTs(5MdC)s(5MdC)sdAsdTsdTsdTs(5MdC)sdTsususcsusa | 4275 |
| HAO1 | A-133405.1 | usasusasusdTsdTs(5MdC)s(5MdC)sdAsdGsdGsdAsdTsdGsasasasgsu | 4276 |
| HAO1 | A-133406.1 | usasascsasdGsdTsdTsdAsdAsdTsdAsdTsdAsdTsususcscsa | 4277 |
| HAO1 | A-133407.1 | gsusususus(5MdC)sdTsdTsdTsdTsdTsdAsdAs(5MdC)sdAsgsususasa | 4278 |
| HAO1 | A-133408.1 | csascsasusdTsdTsdTs(5MdC)sdAsdAsdTsdGsdTsdTsususcsusu | 4279 |
| HAO1 | A-133409.1 | ascsgsususdGsdTs(5MdC)sdTsdAsdAsdAs(5MdC)sdAs(5MdC)sasusususu | 4280 |
| HAO1 | A-133410.1 | csasgsgsgsdGsdAsdTsdGsdAs(5MdC)sdGsdTsdTsdGsuscsusasa | 4281 |
| HAO1 | A-133411.1 | csascsususdTsdAsdGs(5MdC)s(5MdC)sdTsdGs(5MdC)s(5MdC)sdAsgsgsgsgsa | 4282 |
| HAO1 | A-133412.1 | asasasgsgsdAsdTsdAs(5MdC)sdAsdGs(5MdC)sdAs(5MdC)sdTsususasgsc | 4283 |
| HAO1 | A-133413.1 | csasasususdTsdTsdAs(5MdC)sdTsdAsdAsdAsdGsdGsasusascsa | 4284 |
| HAO1 | A-133414.1 | ususgscsusdAs(5MdC)s(5MdC)sdTs(5MdC)s(5MdC)sdAsdAsdTsdTsususascsu | 4285 |
| HAO1 | A-133415.1 | csascscsusdTsdAsdGsdTsdGsdTsdTsdTsdGs(5MdC)susascscsu | 4286 |
| HAO1 | A-133416.1 | uscsasususdAsdTs(5MdC)sdTsdTsdTsdTs(5MdC)sdAs(5MdC)scsususasg | 4287 |
| HAO1 | A-133417.1 | asascsasasdTsdGsdAsdGsdAsdTs(5MdC)sdAsdTsdTsasuscsusu | 4288 |
| HAO1 | A-133418.1 | usascsasgsdGsdTsdTsdAsdAsdTsdAsdAsdAs(5MdC)sasasusgsa | 4289 |
| HAO1 | A-133419.1 | gsusasasas(5MdC)sdAsdGsdAsdAsdTsdAs(5MdC)sdAsdGsgsususasa | 4290 |
| HAO1 | A-133420.1 | usususasasdAsdGsdAs(5MdC)sdAsdTsdGsdTsdAsdAsascsasgsa | 4291 |
| HAO1 | A-133421.1 | asasgsasas(5MdC)s(5MdC)sdAs(5MdC)sdTsdGsdTsdTsdTsdTsasasasgsa | 4292 |
| HAO1 | A-133422.1 | csususascsdAsdAsdTsdTsdTsdAsdAsdGsdAsdAscscsascsu | 4293 |
| HAO1 | A-133423.1 | csusususgsdAsdAs(5MdC)s(5MdC)sdTsdGsdAsdGs(5MdC)sdTsusascsasa | 4294 |
| HAO1 | A-133424.1 | asususascs(5MdC)sdAsdAs(5MdC)sdAs(5MdC)sdTsdTsdTsdGsasascscsu | 4295 |
| HAO1 | A-133425.1 | usgsusgsasdAsdTs(5MdC)sdAsdGsdGs(5MdC)sdAsdTsdTsascscsasa | 4296 |
| HAO1 | A-133426.1 | uscsuscsasdAsdAsdGsdTsdTsdGsdTsdGsdAsdAsuscsasgsg | 4297 |
| HAO1 | A-133427.1 | csasgsusgs(5MdC)sdTsdAs(5MdC)s(5MdC)sdTsdTs(5MdC)sdTs(5MdC)sasasasgsu | 4298 |
| HAO1 | A-133428.1 | ususcscsasdAsdTsdTs(5MdC)sdTs(5MdC)sdTs(5MdC)s(5MdC)sdAsgsusgscsu | 4299 |
| HAO1 | A-133429.1 | cscsgscscsdAs(5MdC)s(5MdC)s(5MdC)sdAsdTsdTs(5MdC)s(5MdC)sdAsasususcsu | 4300 |
| HAO1 | A-133430.1 | uscsascscsdAsdAsdTsdTsdAs(5MdC)s(5MdC)sdGs(5MdC)s(5MdC)sascscscsa | 4301 |
| HAO1 | A-133431.1 | asususcsasdAsdAsdGsdAsdAsdGsdTsdAsdTs(5MdC)sascscsasa | 4302 |
| HAO1 | A-133432.1 | usgsgsasasdAsdTs(5MdC)sdTsdAs(5MdC)sdAsdTsdTs(5MdC)sasasasgsa | 4303 |
| HAO1 | A-133433.1 | asasgsasusdGsdTsdGsdAsdTsdTsdGsdGsdAsdAsasuscsusa | 4304 |
| HAO1 | A-133434.1 | ususcsasgsdAs(5MdC)sdAs(5MdC)sdTsdAsdAsdAsdGsdAsusgsusgsa | 4305 |
| HAO1 | A-133435.1 | csasusususdGsdGsdAsdTsdAsdTsdAsdTsdTs(5MdC)sasgsascsa | 4306 |
| HAO1 | A-133436.1 | csasuscscsdTsdAsdAsdAsdAs(5MdC)sdAsdTsdTsdTsgsgsasusa | 4307 |
| HAO1 | A-133437.1 | asasgsusasdAs(5MdC)sdAsdTsdAs(5MdC)sdAsdTs(5MdC)s(5MdC)susasasasa | 4308 |
| HAO1 | A-133438.1 | usususcsus(5MdC)sdTs(5MdC)sdTsdAsdAsdGsdAsdAsdGsusasascsa | 4309 |
| HAO1 | A-133439.1 | asasasusgs(5MdC)sdTsdTsdTsdAsdTsdTsdTs(5MdC)sdTscsuscsusa | 4310 |

TABLE 14
Unmodified antisense polynucleotides targeting HAO1.

| | Oligo | Oligo | SEQ ID | mRNA Target | SEQ ID | |
|---|---|---|---|---|---|---|
| Target | Name | transSeq | NO: | sequence | NO: | Position |
| HAO1 | A-133284.1 | GGGAGCAUUUUCACAGGUUA | 4319 | UAACCUGUGAAAAUGCUCCC | 4475 | 13 |
| HAO1 | A-133285.1 | AAUUAGCCGGGGGAGCAUUU | 4320 | AAAUGCUCCCCCGGCUAAUU | 4476 | 23 |
| HAO1 | A-133286.1 | AUCAUUGAUACAAAUUAGCC | 4321 | GGCUAAUUUGUAUCAAUGAU | 4477 | 35 |
| HAO1 | A-133287.1 | GUUGUUCAUAAUCAUUGAUA | 4322 | UAUCAAUGAUUAUGAACAAC | 4478 | 45 |
| HAO1 | A-133288.1 | GAUUUAGCAUGUUGUUCAUA | 4323 | UAUGAACAACAUGCUAAAUC | 4479 | 55 |
| HAO1 | A-133289.1 | UUGGAAGUACUGAUUUAGCA | 4324 | UGCUAAAUCAGUACUUCCAA | 4480 | 66 |
| HAO1 | A-133290.1 | CAUAUAUAGACUUUGGAAGU | 4325 | ACUUCCAAAGUCUAUAUAUG | 4481 | 78 |
| HAO1 | A-133291.1 | CUGUAAUAGUCAUAUAUAGA | 4326 | UCUAUAUAUGACUAUUACAG | 4482 | 88 |
| HAO1 | A-133292.1 | UUGCCCCAGACCUGUAAUAG | 4327 | CUAUUACAGGUCUGGGGCAA | 4483 | 99 |
| HAO1 | A-133293.1 | UUCUUCAUCAUUUGCCCCAG | 4328 | CUGGGGCAAAUGAUGAAGAA | 4484 | 110 |
| HAO1 | A-133294.1 | UAUCAGCCAAAGUUUCUUCA | 4329 | UGAAGAAACUUUGGCUGAUA | 4485 | 123 |
| HAO1 | A-133295.1 | GCUGCAAUAUUAUCAGCCAA | 4330 | UUGGCUGAUAAUAUUGCAGC | 4486 | 133 |
| HAO1 | A-133296.1 | AUCUGGAAAAUGCUGCAAUA | 4331 | UAUUGCAGCAUUUUCCAGAU | 4487 | 144 |
| HAO1 | A-133297.1 | GAUACAGCUUCCAUCUGGAA | 4332 | UUCCAGAUGGAAGCUGUAUC | 4488 | 156 |
| HAO1 | A-133298.1 | GAGCAUCCUUGGAUACAGCU | 4333 | AGCUGUAUCCAAGGAUGCUC | 4489 | 167 |
| HAO1 | A-133299.1 | CAACAUUCCGGAGCAUCCUU | 4334 | AAGGAUGCUCCGGAAUGUUG | 4490 | 177 |
| HAO1 | A-133300.1 | GAUCUGUUUCAGCAACAUUC | 4335 | GAAUGUUGCUGAAACAGAUC | 4491 | 189 |
| HAO1 | A-133301.1 | AGAAGUCGACAGAUCUGUUU | 4336 | AAACAGAUCUGUCGACUUCU | 4492 | 200 |
| HAO1 | A-133302.1 | UGUCCUAAAACAGAAGUCGA | 4337 | UCGACUUCUGUUUUAGGACA | 4493 | 211 |
| HAO1 | A-133303.1 | UGCUGACCCUCUGUCCUAAA | 4338 | UUUAGGACAGAGGGUCAGCA | 4494 | 222 |
| HAO1 | A-133304.1 | CAUAUUGGCAUGCUGACCCU | 4339 | AGGGUCAGCAUGCCAAUAUG | 4495 | 232 |
| HAO1 | A-133305.1 | AGCCCCCACACAUAUUGGCA | 4340 | UGCCAAUAUGUGUGGGGGCU | 4496 | 242 |
| HAO1 | A-133306.1 | CUGCAUGGCCGUAGCCCCCA | 4341 | UGGGGGCUACGGCCAUGCAG | 4497 | 254 |
| HAO1 | A-133307.1 | GAGCCAUGCGCUGCAUGGCC | 4342 | GGCCAUGCAGCGCAUGGCUC | 4498 | 264 |
| HAO1 | A-133308.1 | GCCGUCCACAUGAGCCAUGC | 4343 | GCAUGGCUCAUGUGGACGGC | 4499 | 275 |
| HAO1 | A-133309.1 | AGUGGCAAGCUCGCCGUCCA | 4344 | UGGACGGCGAGCUUGCCACU | 4500 | 287 |
| HAO1 | A-133310.1 | ACAGGCUCUCACAGUGGCAA | 4345 | UUGCCACUGUGAGAGCCUGU | 4501 | 299 |
| HAO1 | A-133311.1 | CAGGGACUGACAGGCUCUCA | 4346 | UGAGAGCCUGUCAGUCCCUG | 4502 | 308 |
| HAO1 | A-133312.1 | AUGCCCGUUCCCAGGGACUG | 4347 | CAGUCCCUGGGAACGGGCAU | 4503 | 319 |
| HAO1 | A-133313.1 | GAACUCAACAUCAUGCCCGU | 4348 | ACGGGCAUGAUGUUGAGUUC | 4504 | 331 |
| HAO1 | A-133314.1 | GAGGUGGCCCAGGAACUCAA | 4349 | UUGAGUUCCUGGGCCACCUC | 4505 | 343 |
| HAO1 | A-133315.1 | UCAAUUGAGGAGGUGGCCCA | 4350 | UGGGCCACCUCCUCAAUUGA | 4506 | 352 |
| HAO1 | A-133316.1 | CCGCCACUUCUUCAAUUGAG | 4351 | CUCAAUUGAAGAAGUGGCGG | 4507 | 363 |
| HAO1 | A-133317.1 | CAGGACCAGCUUCCGCCACU | 4352 | AGUGGCGGAAGCUGGUCCUG | 4508 | 375 |
| HAO1 | A-133318.1 | ACGAAGUGCCUCAGGACCAG | 4353 | CUGGUCCUGAGGCACUUCGU | 4509 | 386 |
| HAO1 | A-133319.1 | CAGUUGCAGCCAACGAAGUG | 4354 | CACUUCGUUGGCUGCAACUG | 4510 | 398 |
| HAO1 | A-133320.1 | UGUAGAUAUACAGUUGCAGC | 4355 | GCUGCAACUGUAUAUCUACA | 4511 | 408 |
| HAO1 | A-133321.1 | UCUCGGUCCUUGUAGAUAUA | 4356 | UAUAUCUACAAGGACCGAGA | 4512 | 418 |
| HAO1 | A-133322.1 | UUCUUGGUGACUUCUCGGUC | 4357 | GACCGAGAAGUCACCAAGAA | 4513 | 430 |
| HAO1 | A-133323.1 | CCGCACUAGCUUCUUGGUGA | 4358 | UCACCAAGAAGCUAGUGCGG | 4514 | 440 |
| HAO1 | A-133324.1 | CUUCUCUGCCUGCCGCACUA | 4359 | UAGUGCGGCAGGCAGAGAAG | 4515 | 452 |
| HAO1 | A-133325.1 | CUUGUAGCCCAUCUUCUCUG | 4360 | CAGAGAAGAUGGGCUACAAG | 4516 | 464 |
| HAO1 | A-133326.1 | AAAUAUGGCCUUGUAGCCCA | 4361 | UGGGCUACAAGGCCAUAUUU | 4517 | 473 |
| HAO1 | A-133327.1 | UGUCCACUGUCACAAAUAUG | 4362 | CAUAUUUGUGACAGUGGACA | 4518 | 486 |
| HAO1 | A-133328.1 | CAGGUAAGGUGUGUCCACUG | 4363 | CAGUGGACACACCUUACCUG | 4519 | 497 |
| HAO1 | A-133329.1 | GACGGUUGCCCAGGUAAGGU | 4364 | ACCUUACCUGGGCAACCGUC | 4520 | 507 |
| HAO1 | A-133330.1 | CACAUCAUCCAGACGGUUGC | 4365 | GCAACCGUCUGGAUGAUGUG | 4521 | 518 |
| HAO1 | A-133331.1 | AAUCUGUUACGCACAUCAUC | 4366 | GAUGAUGUGCGUAACAGAUU | 4522 | 529 |
| HAO1 | A-133332.1 | GCGGCAGUUUGAAUCUGUUA | 4367 | UAACAGAUUCAAACUGCCGC | 4523 | 540 |
| HAO1 | A-133333.1 | CUGAGUUGUGGCGGCAGUUU | 4368 | AAACUGCCGCCACAACUCAG | 4524 | 550 |
| HAO1 | A-133334.1 | AAAAUUUUUCAUCCUGAGUU | 4369 | AACUCAGGAUGAAAAAUUUU | 4525 | 563 |
| HAO1 | A-133335.1 | UACUGGUUUCAAAAUUUUUC | 4370 | GAAAAAUUUUGAAACCAGUA | 4526 | 573 |
| HAO1 | A-133336.1 | AAAUGAUAAAGUACUGGUUU | 4371 | AAACCAGUACUUUAUCAUUU | 4527 | 584 |
| HAO1 | A-133337.1 | CCUCAGGAGAAAAUGAUAAA | 4372 | UUUAUCAUUUUCUCCUGAGG | 4528 | 594 |
| HAO1 | A-133338.1 | UCCAAAAUUUUCCUCAGGAG | 4373 | CUCCUGAGGAAAAUUUUGGA | 4529 | 605 |
| HAO1 | A-133339.1 | GUCCACUGUCGUCUCCAAAA | 4374 | UUUUGGAGACGACAGUGGAC | 4530 | 618 |
| HAO1 | A-133340.1 | AUAUGCAGCAAGUCCACUGU | 4375 | ACAGUGGACUUGCUGCAUAU | 4531 | 629 |
| HAO1 | A-133341.1 | UUUAGCCACAUAUGCAGCAA | 4376 | UUGCUGCAUAUGUGGCUAAA | 4532 | 638 |
| HAO1 | A-133342.1 | UGGGUCUAUUGCUUUAGCCA | 4377 | UGGCUAAAGCAAUAGACCCA | 4533 | 650 |
| HAO1 | A-133343.1 | AGCUGAUAGAUGGGUCUAUU | 4378 | AAUAGACCCAUCUAUCAGCU | 4534 | 660 |
| HAO1 | A-133344.1 | GAUAUCUUCCCAGCUGAUAG | 4379 | CUAUCAGCUGGGAAGAUAUC | 4535 | 671 |
| HAO1 | A-133345.1 | CUCAGCCAUUUGAUAUCUUC | 4380 | GAAGAUAUCAAAUGGCUGAG | 4536 | 682 |
| HAO1 | A-133346.1 | GAUGUCAGUCUUCUCAGCCA | 4381 | UGGCUGAGAAGACUGACAUC | 4537 | 694 |
| HAO1 | A-133347.1 | CAAUUGGCAAUGAUGUCAGU | 4382 | ACUGACAUCAUUGCCAAUUG | 4538 | 705 |
| HAO1 | A-133348.1 | CCCUUUGCAACAAUUGGCAA | 4383 | UUGCCAAUUGUUGCAAAGGG | 4539 | 715 |
| HAO1 | A-133349.1 | CUCUCAAAAUGCCCUUUGCA | 4384 | UGCAAAGGGCAUUUUGAGAG | 4540 | 726 |
| HAO1 | A-133350.1 | GGCAUCAUCACCUCUCAAAA | 4385 | UUUUGAGAGGUGAUGAUGCC | 4541 | 737 |
| HAO1 | A-133351.1 | AACAGCCUCCCUGGCAUCAU | 4386 | AUGAUGCCAGGGAGGCUGUU | 4542 | 749 |
| HAO1 | A-133352.1 | AAGCCAUGUUUAACAGCCUC | 4387 | GAGGCUGUUAAACAUGGCUU | 4543 | 760 |
| HAO1 | A-133353.1 | AAGAUCCCAUUCAAGCCAUG | 4388 | CAUGGCUUGAAUGGGAUCUU | 4544 | 772 |
| HAO1 | A-133354.1 | UUCGACACCAAGAUCCCAUU | 4389 | AAUGGGAUCUUGGUGUCGAA | 4545 | 781 |
| HAO1 | A-133355.1 | UCGAGCCCCAUGAUUCGACA | 4390 | UGUCGAAUCAUGGGGCUCGA | 4547 | 794 |
| HAO1 | A-133356.1 | AUCGAGUUGUCGAGCCCCAU | 4391 | AUGGGGCUCGACAACUCGAU | 4546 | 803 |
| HAO1 | A-133357.1 | GGCUGGCACCCCAUCGAGUU | 4392 | AACUCGAUGGGGUGCCAGCC | 4548 | 815 |
| HAO1 | A-133358.1 | AACAUCAAUAGUGGCUGGCA | 4393 | UGCCAGCCACUAUUGAUGUU | 4549 | 827 |
| HAO1 | A-133359.1 | AUUUCUGGCAGAACAUCAAU | 4394 | AUUGAUGUUCUGCCAGAAAU | 4550 | 838 |
| HAO1 | A-133360.1 | AGCCUCCACAAUUUCUGGCA | 4395 | UGCCAGAAAUUGUGGAGGCU | 4551 | 848 |
| HAO1 | A-133361.1 | CUUCCCUUCCACAGCCUCCA | 4396 | UGGAGGCUGUGGAAGGGAAG | 4552 | 860 |
| HAO1 | A-133362.1 | AAGACUUCCACCUUCCCUUC | 4397 | GAAGGGAAGGUGGAAGUCUU | 4553 | 871 |
| HAO1 | A-133363.1 | CCGUCCAGGAAGACUUCCAC | 4398 | GUGGAAGUCUUCCUGGACGG | 4554 | 880 |
| HAO1 | A-133364.1 | UCCGCACACCCCCGUCCAGG | 4399 | CCUGGACGGGGGUGUGCGGA | 4555 | 891 |
| HAO1 | A-133365.1 | CAUCAGUGCCUUUCCGCACA | 4400 | UGUGCGGAAAGGCACUGAUG | 4556 | 903 |
| HAO1 | A-133366.1 | AGCUUUCAGAACAUCAGUGC | 4401 | GCACUGAUGUUCUGAAAGCU | 4557 | 914 |
| HAO1 | A-133367.1 | CAAGAGCCAGAGCUUUCAGA | 4402 | UCUGAAAGCUCUGGCUCUUG | 4558 | 924 |
| HAO1 | A-133368.1 | ACAGCCUUGGCGCCAAGAGC | 4403 | GCUCUUGGCGCCAAGGCUGU | 4559 | 937 |
| HAO1 | A-133369.1 | UCCCCACAAACACAGCCUUG | 4404 | CAAGGCUGUGUUUGUGGGGA | 4560 | 948 |
| HAO1 | A-133370.1 | ACGAUUGGUCUCCCCACAAA | 4405 | UUUGUGGGGAGACCAAUCGU | 4561 | 958 |
| HAO1 | A-133371.1 | UAAGCCCCAAACGAUUGGUC | 4406 | GACCAAUCGUUUGGGGCUUA | 4562 | 968 |
| HAO1 | A-133372.1 | CCCUGGAAAGCUAAGCCCCA | 4407 | UGGGGCUUAGCUUUCCAGGG | 4563 | 979 |
| HAO1 | A-133373.1 | CACCUUUCUCCCCCUGGAAA | 4408 | UUUCCAGGGGGAGAAAGGUG | 4564 | 990 |
| HAO1 | A-133374.1 | GACAUCUUGAACACCUUUCU | 4409 | AGAAAGGUGUUCAAGAUGUC | 4565 | 1001 |
| HAO1 | A-133375.1 | UAGUAUCUCGAGGACAUCUU | 4410 | AAGAUGUCCUCGAGAUACUA | 4566 | 1013 |
| HAO1 | A-133376.1 | GAAUUCUUCCUUUAGUAUCU | 4411 | AGAUACUAAAGGAAGAAUUC | 4567 | 1025 |
| HAO1 | A-133377.1 | GGCCAACCGGAAUUCUUCCU | 4412 | AGGAAGAAUUCCGGUUGGCC | 4568 | 1034 |
| HAO1 | A-133378.1 | CUCAGAGCCAUGGCCAACCG | 4413 | CGGUUGGCCAUGGCUCUGAG | 4569 | 1045 |
| HAO1 | A-133379.1 | AUUCUGGCACCCACUCAGAG | 4414 | CUCUGAGUGGGUGCCAGAAU | 4570 | 1058 |
| HAO1 | A-133380.1 | AUGACUUUCACAUUCUGGCA | 4415 | UGCCAGAAUGUGAAAGUCAU | 4571 | 1069 |
| HAO1 | A-133381.1 | GUCUUGUCGAUGACUUUCAC | 4416 | GUGAAAGUCAUCGACAAGAC | 4572 | 1078 |
| HAO1 | A-133382.1 | UUUCCUCACCAAUGUCUUGU | 4417 | ACAAGACAUUGGUGAGGAAA | 4573 | 1091 |
| HAO1 | A-133383.1 | CAAAGGAUUUUUCCUCACCA | 4418 | UGGUGAGGAAAAAUCCUUUG | 4574 | 1100 |
| HAO1 | A-133384.1 | UUGGAAACGGCCAAAGGAUU | 4419 | AAUCCUUUGGCCGUUUCCAA | 4575 | 1111 |
| HAO1 | A-133385.1 | GCACUGUCAGAUCUUGGAAA | 4420 | UUUCCAAGAUCUGACAGUGC | 4576 | 1124 |
| HAO1 | A-133386.1 | AAAUAUUGUGCACUGUCAGA | 4421 | UCUGACAGUGCACAAUAUUU | 4577 | 1133 |
| HAO1 | A-133387.1 | UACAGAUGGGAAAAUAUUGU | 4422 | ACAAUAUUUUCCCAUCUGUA | 4578 | 1144 |
| HAO1 | A-133388.1 | UGAAAAAAAAUAAUACAGAU | 4423 | AUCUGUAUUAUUUUUUUUCA | 4579 | 1157 |
| HAO1 | A-133389.1 | UAAUACAUGCUGAAAAAAAA | 4424 | UUUUUUUUCAGCAUGUAUUA | 4580 | 1167 |
| HAO1 | A-133390.1 | CUCUUUGUCAAGUAAUACAU | 4425 | AUGUAUUACUUGACAAAGAG | 4581 | 1179 |
| HAO1 | A-133391.1 | GCACAGUGUCUCUUUGUCAA | 4426 | UUGACAAAGAGACACUGUGC | 4582 | 1188 |
| HAO1 | A-133392.1 | UGGUCACCCUCUGCACAGUG | 4427 | CACUGUGCAGAGGGUGACCA | 4583 | 1200 |
| HAO1 | A-133393.1 | UUACAGACUGUGGUCACCCU | 4428 | AGGGUGACCACAGUCUGUAA | 4584 | 1210 |
| HAO1 | A-133394.1 | UUGAAGUGGGGAAUUACAGA | 4429 | UCUGUAAUUCCCCACUUCAA | 4585 | 1223 |
| HAO1 | A-133395.1 | CCCUUUGUAUUGAAGUGGGG | 4430 | CCCCACUUCAAUACAAAGGG | 4586 | 1232 |
| HAO1 | A-133396.1 | AAAGAACGACACCCUUUGUA | 4431 | UACAAAGGGUGUCGUUCUUU | 4587 | 1243 |
| HAO1 | A-133397.1 | UAUUUUGUUGGAAAAGAACG | 4432 | CGUUCUUUUCCAACAAAAUA | 4588 | 1255 |
| HAO1 | A-133398.1 | AAGGGAUUGCUAUUUUGUUG | 4433 | CAACAAAAUAGCAAUCCCUU | 4589 | 1265 |
| HAO1 | A-133399.1 | GCAAUGAAAUAAAAGGGAUU | 4434 | AAUCCCUUUUAUUUCAUUGC | 4590 | 1277 |
| HAO1 | A-133400.1 | AAAAGUCAAAAGCAAUGAAA | 4435 | UUUCAUUGCUUUUGACUUUU | 4591 | 1288 |
| HAO1 | A-133401.1 | GACACCCAUUGAAAAGUCAA | 4436 | UUGACUUUUCAAUGGGUGUC | 4592 | 1299 |
| HAO1 | A-133402.1 | AAAGGUUCCUAGGACACCCA | 4437 | UGGGUGUCCUAGGAACCUUU | 4593 | 1311 |
| HAO1 | A-133403.1 | UUUCUUUCUAAAAGGUUCCU | 4438 | AGGAACCUUUUAGAAAGAAA | 4594 | 1321 |
| HAO1 | A-133404.1 | UGAAAGUCCAUUUCUUUCUA | 4439 | UAGAAAGAAAUGGACUUUCA | 4595 | 1331 |
| HAO1 | A-133405.1 | UAUAUUUCCAGGAUGAAAGU | 4440 | ACUUUCAUCCUGGAAAUAUA | 4596 | 1344 |
| HAO1 | A-133406.1 | UAACAGUUAAUAUAUUUCCA | 4441 | UGGAAAUAUAUUAACUGUUA | 4597 | 1354 |
| HAO1 | A-133407.1 | GUUUUCUUUUUAACAGUUAA | 4442 | UUAACUGUUAAAAAGAAAAC | 4598 | 1364 |
| HAO1 | A-133408.1 | CACAUUUUCAAUGUUUUCUU | 4443 | AAGAAAACAUUGAAAAUGUG | 4599 | 1376 |
| HAO1 | A-133409.1 | ACGUUGUCUAAACACAUUUU | 4444 | AAAAUGUGUUUAGACAACGU | 4600 | 1388 |
| HAO1 | A-133410.1 | CAGGGGAUGACGUUGUCUAA | 4445 | UUAGACAACGUCAUCCCCUG | 4601 | 1397 |
| HAO1 | A-133411.1 | CACUUUAGCCUGCCAGGGGA | 4446 | UCCCCUGGCAGGCUAAAGUG | 4602 | 1410 |
| HAO1 | A-133412.1 | AAAGGAUACAGCACUUUAGC | 4447 | GCUAAAGUGCUGUAUCCUUU | 4603 | 1421 |
| HAO1 | A-133413.1 | CAAUUUUACUAAAGGAUACA | 4448 | UGUAUCCUUUAGUAAAAUUG | 4604 | 1431 |
| HAO1 | A-133414.1 | UUGCUACCUCCAAUUUUACU | 4449 | AGUAAAAUUGGAGGUAGCAA | 4605 | 1441 |
| HAO1 | A-133415.1 | CACCUUAGUGUUUGCUACCU | 4450 | AGGUAGCAAACACUAAGGUG | 4606 | 1452 |
| HAO1 | A-133416.1 | UCAUUAUCUUUUCACCUUAG | 4451 | CUAAGGUGAAAAGAUAAUGA | 4607 | 1464 |
| HAO1 | A-133417.1 | AACAAUGAGAUCAUUAUCUU | 4452 | AAGAUAAUGAUCUCAUUGUU | 4608 | 1474 |
| HAO1 | A-133418.1 | UACAGGUUAAUAAACAAUGA | 4453 | UCAUUGUUUAUUAACCUGUA | 4609 | 1486 |
| HAO1 | A-133419.1 | GUAAACAGAAUACAGGUUAA | 4454 | UUAACCUGUAUUCUGUUUAC | 4610 | 1496 |
| HAO1 | A-133420.1 | UUUAAAGACAUGUAAACAGA | 4455 | UCUGUUUACAUGUCUUUAAA | 4611 | 1507 |
| HAO1 | A-133421.1 | AAGAACCACUGUUUUAAAGA | 4456 | UCUUUAAAACAGUGGUUCUU | 4612 | 1519 |
| HAO1 | A-133422.1 | CUUACAAUUUAAGAACCACU | 4457 | AGUGGUUCUUAAAUUGUAAG | 4613 | 1529 |
| HAO1 | A-133423.1 | CUUUGAACCUGAGCUUACAA | 4458 | UUGUAAGCUCAGGUUCAAAG | 4614 | 1542 |
| HAO1 | A-133424.1 | AUUACCAACACUUUGAACCU | 4459 | AGGUUCAAAGUGUUGGUAAU | 4615 | 1552 |
| HAO1 | A-133425.1 | UGUGAAUCAGGCAUUACCAA | 4460 | UUGGUAAUGCCUGAUUCACA | 4616 | 1564 |
| HAO1 | A-133426.1 | UCUCAAAGUUGUGAAUCAGG | 4461 | CCUGAUUCACAACUUUGAGA | 4617 | 1573 |
| HAO1 | A-133427.1 | CAGUGCUACCUUCUCAAAGU | 4462 | ACUUUGAGAAGGUAGCACUG | 4618 | 1584 |
| HAO1 | A-133428.1 | UUCCAAUUCUCUCCAGUGCU | 4463 | AGCACUGGAGAGAAUUGGAA | 4619 | 1597 |
| HAO1 | A-133429.1 | CCGCCACCCAUUCCAAUUCU | 4464 | AGAAUUGGAAUGGGUGGCGG | 4620 | 1607 |
| HAO1 | A-133430.1 | UCACCAAUUACCGCCACCCA | 4465 | UGGGUGGCGGUAAUUGGUGA | 4621 | 1617 |
| HAO1 | A-133431.1 | AUUCAAAGAAGUAUCACCAA | 4466 | UUGGUGAUACUUCUUUGAAU | 4622 | 1630 |
| HAO1 | A-133432.1 | UGGAAAUCUACAUUCAAAGA | 4467 | UCUUUGAAUGUAGAUUUCCA | 4623 | 1641 |
| HAO1 | A-133433.1 | AAGAUGUGAUUGGAAAUCUA | 4468 | UAGAUUUCCAAUCACAUCUU | 4624 | 1651 |
| HAO1 | A-133434.1 | UUCAGACACUAAAGAUGUGA | 4469 | UCACAUCUUUAGUGUCUGAA | 4625 | 1662 |
| HAO1 | A-133435.1 | CAUUUGGAUAUAUUCAGACA | 4470 | UGUCUGAAUAUAUCCAAAUG | 4626 | 1674 |
| HAO1 | A-133436.1 | CAUCCUAAAACAUUUGGAUA | 4471 | UAUCCAAAUGUUUUAGGAUG | 4627 | 1684 |
| HAO1 | A-133437.1 | AAGUAACAUACAUCCUAAAA | 4472 | UUUUAGGAUGUAUGUUACUU | 4628 | 1694 |
| HAO1 | A-133438.1 | UUUCUCUCUAAGAAGUAACA | 4473 | UGUUACUUCUUAGAGAGAAA | 4629 | 1706 |
| HAO1 | A-133439.1 | AAAUGCUUUAUUUCUCUCUA | 4474 | UAGAGAGAAAUAAAGCAUUU | 4630 | 1716 |

TABLE 15
Unmodified Sense and Antisense Strand Sequences of PRODH2 dsRNA Agents

| Duplex | Sense Sequence | SEQ ID | Range in | Antisense Sequence | SEQ ID | Range in |
|---|---|---|---|---|---|---|
| Name | 5′ to 3′ | NO: | NM_021232.2 | 5′ to 3′ | NO: | NM_021232.2 |
| AD-1553630 | AGAACCUUCCCUGGUGUGGAU | 4651 | 3-23 | AUCCACACCAGGGAAGGUUCUCU | 4786 | 1-23 |
| AD-1553635 | CUUCCCUGGUGUGGAGGCAGU | 4652 | 8-28 | ACUGCCUCCACACCAGGGAAGGU | 4787 | 86-28 |
| AD-1553662 | CAGGAUGCUCCGGACCUGUUU | 4653 | 37-57 | AAACAGGUCCGGAGCAUCCUGGG | 4788 | 35-57 |
| AD-1553667 | UGCUCCGGACCUGUUACGUGU | 4654 | 42-62 | ACACGUAACAGGUCCGGAGCAUC | 4789 | 40-62 |
| AD-1553674 | GACCUGUUACGUGCUCUGUUU | 4655 | 49-69 | AAACAGAGCACGUAACAGGUCCG | 4790 | 47-69 |
| AD-1553681 | UACGUGCUCUGUUCCCAAGCU | 4656 | 56-76 | AGCUUGGGAACAGAGCACGUAAC | 4791 | 54-76 |
| AD-1553686 | GCUCUGUUCCCAAGCUGGUCU | 4657 | 61-81 | AGACCAGCUUGGGAACAGAGCAC | 4792 | 59-81 |
| AD-1553691 | CUGGCAGUCCCUGAGCUUUGU | 4658 | 94-114 | ACAAAGCUCAGGGACUGCCAGCC | 4793 | 92-114 |
| AD-1553697 | GUCCCUGAGCUUUGAUGGCGU | 4659 | 100-120 | ACGCCAUCAAAGCUCAGGGACUG | 4794 | 98-120 |
| AD-1553701 | GCCUUCCACCUUAAGGGCACU | 4660 | 122-142 | AGUGCCCUUAAGGUGGAAGGCCC | 4795 | 120-142 |
| AD-1553707 | CACCUUAAGGGCACAGGAGAU | 4661 | 128-148 | AUCUCCUGUGCCCUUAAGGUGGA | 4796 | 126-148 |
| AD-1553715 | GGGCACAGGAGAGCUGACACU | 4662 | 136-156 | AGUGUCAGCUCUCCUGUGCCCUU | 4797 | 134-156 |
| AD-1553722 | GGAGAGCUGACACGGGCCUUU | 4663 | 143-163 | AAAGGCCCGUGUCAGCUCUCCUG | 4798 | 141-163 |
| AD-1553730 | GACACGGGCCUUGCUGGUUCU | 4664 | 151-171 | AGAACCAGCAAGGCCCGUGUCAG | 4799 | 149-171 |
| AD-1553739 | CUUGCUGGUUCUCCGGCUGUU | 4665 | 160-180 | AACAGCCGGAGAACCAGCAAGGC | 4800 | 158-180 |
| AD-1553745 | GGUUCUCCGGCUGUGUGCCUU | 4666 | 166-186 | AAGGCACACAGCCGGAGAACCAG | 4801 | 164-186 |
| AD-1553751 | CUCGUCACUCACGGGCUGUUU | 4667 | 194-214 | AAACAGCCCGUGAGUGACGAGUG | 4802 | 192-214 |
| AD-1553758 | CUCACGGGCUGUUGCUCCAGU | 4668 | 201-221 | ACUGGAGCAACAGCCCGUGAGUG | 4803 | 199-221 |
| AD-1553769 | UUGCUCCAGGCCUGGUCUCGU | 4669 | 212-232 | ACGAGACCAGGCCUGGAGCAACA | 4804 | 210-232 |
| AD-1553794 | GGCUCUCAGGCGCAUUUCUCU | 4670 | 249-269 | AGAGAAAUGCGCCUGAGAGCCGG | 4805 | 247-269 |
| AD-1553799 | UCAGGCGCAUUUCUCCGAGCU | 4671 | 254-274 | AGCUCGGAGAAAUGCGCCUGAGA | 4806 | 252-274 |
| AD-1553804 | CGCAUUUCUCCGAGCAUCCGU | 4672 | 259-279 | ACGGAUGCUCGGAGAAAUGCGCC | 4807 | 257-279 |
| AD-1553809 | UUCUCCGAGCAUCCGUCUAUU | 4673 | 264-284 | AAUAGACGGAUGCUCGGAGAAAU | 4808 | 262-284 |
| AD-1553815 | GAGCAUCCGUCUAUGGGCAGU | 4674 | 270-290 | ACUGCCCAUAGACGGAUGCUCGG | 4809 | 268-290 |
| AD-1553820 | UCCGUCUAUGGGCAGUUUGUU | 4675 | 275-295 | AACAAACUGCCCAUAGACGGAUG | 4810 | 273-295 |
| AD-1553826 | UAUGGGCAGUUUGUGGCUGGU | 4676 | 281-301 | ACCAGCCACAAACUGCCCAUAGA | 4811 | 279-301 |
| AD-1553832 | CAGUUUGUGGCUGGUGAGACU | 4677 | 287-307 | AGUCUCACCAGCCACAAACUGCC | 4812 | 285-307 |
| AD-1553839 | UGGCUGGUGAGACAGCAGAGU | 4678 | 294-314 | ACUCUGCUGUCUCACCAGCCACA | 4813 | 292-314 |
| AD-1553845 | GUGAGACAGCAGAGGAGGUGU | 4679 | 300-320 | ACACCUCCUCUGCUGUCUCACCA | 4814 | 298-320 |
| AD-1553852 | AGCAGAGGAGGUGAAGGGCUU | 4680 | 307-327 | AAGCCCUUCACCUCCUCUGCUGU | 4815 | 305-327 |
| AD-1553859 | GAGGUGAAGGGCUGCGUGCAU | 4681 | 314-334 | AUGCACGCAGCCCUUCACCUCCU | 4816 | 312-334 |
| AD-1553865 | AAGGGCUGCGUGCAGCAGCUU | 4682 | 320-340 | AAGCUGCUGCACGCAGCCCUUCA | 4817 | 318-340 |
| AD-1553907 | UGCUGGCAGUGCCCACUGAGU | 4683 | 363-383 | ACUCAGUGGGCACUGCCAGCAGU | 4818 | 361-383 |
| AD-1553912 | GCAGUGCCCACUGAGGAGGAU | 4684 | 368-388 | AUCCUCCUCAGUGGGCACUGCCA | 4819 | 366-388 |
| AD-1553922 | CUGAGGAGGAGCCGGACUCUU | 4685 | 378-398 | AAGAGUCCGGCUCCUCCUCAGUG | 4820 | 376-398 |
| AD-1553930 | GAGCCGGACUCUGCUGCCAAU | 4686 | 386-406 | AUUGGCAGCAGAGUCCGGCUCCU | 4821 | 384-406 |
| AD-1553937 | ACUCUGCUGCCAAGAGUGGUU | 4687 | 393-413 | AACCACUCUUGGCAGCAGAGUCC | 4822 | 391-413 |
| AD-1553942 | GCUGCCAAGAGUGGUGAGGCU | 4688 | 398-418 | AGCCUCACCACUCUUGGCAGCAG | 4823 | 396-418 |
| AD-1553951 | AGUGGUGAGGCGUGGUAUGAU | 4689 | 407-427 | AUCAUACCACGCCUCACCACUCU | 4824 | 405-427 |
| AD-1553957 | AACCUCGGUGCUAUGCUGCGU | 4690 | 431-451 | ACGCAGCAUAGCACCGAGGUUCC | 4825 | 429-451 |
| AD-1553962 | CGGUGCUAUGCUGCGGUGUGU | 4691 | 436-456 | ACACACCGCAGCAUAGCACCGAG | 4826 | 434-456 |
| AD-1553967 | CUAUGCUGCGGUGUGUGGACU | 4692 | 441-461 | AGUCCACACACCGCAGCAUAGCA | 4827 | 439-461 |
| AD-1553975 | CGGUGUGUGGACCUGUCACGU | 4693 | 449-469 | ACGUGACAGGUCCACACACCGCA | 4828 | 447-469 |
| AD-1553988 | GGCCAGCCUCAUGCAGCUGAU | 4694 | 499-519 | AUCAGCUGCAUGAGGCUGGCCUC | 4829 | 497-519 |
| AD-1553993 | GCCUCAUGCAGCUGAAGGUGU | 4695 | 504-524 | ACACCUUCAGCUGCAUGAGGCUG | 4830 | 502-524 |
| AD-1553998 | AUGCAGCUGAAGGUGACGGCU | 4696 | 509-529 | AGCCGUCACCUUCAGCUGCAUGA | 4831 | 507-529 |
| AD-1554003 | GCUGAAGGUGACGGCGCUGAU | 4697 | 514-534 | AUCAGCGCCGUCACCUUCAGCUG | 4832 | 512-534 |
| AD-1554009 | GGUGACGGCGCUGACCAGUAU | 4698 | 520-540 | AUACUGGUCAGCGCCGUCACCUU | 4833 | 518-540 |
| AD-1554018 | GCUGACCAGUACUCGGCUCUU | 4699 | 529-549 | AAGAGCCGAGUACUGGUCAGCGC | 4834 | 527-549 |
| AD-1554025 | AGUACUCGGCUCUGUAAGGAU | 4700 | 536-556 | AUCCUUACAGAGCCGAGUACUGG | 4835 | 534-556 |
| AD-1554030 | UCGGCUCUGUAAGGAGCUAGU | 4701 | 541-561 | ACUAGCUCCUUACAGAGCCGAGU | 4836 | 539-561 |
| AD-1554036 | CUGUAAGGAGCUAGCCUCGUU | 4702 | 547-567 | AACGAGGCUAGCUCCUUACAGAG | 4837 | 545-567 |
| AD-1554041 | AGGAGCUAGCCUCGUGGGUCU | 4703 | 552-572 | AGACCCACGAGGCUAGCUCCUUA | 4838 | 550-572 |
| AD-1554048 | AGCCUCGUGGGUCAGAAGGCU | 4704 | 559-579 | AGCCUUCUGACCCACGAGGCUAG | 4839 | 557-579 |
| AD-1554054 | GUGGGUCAGAAGGCCAGGAGU | 4705 | 565-585 | ACUCCUGGCCUUCUGACCCACGA | 4840 | 563-585 |
| AD-1554065 | GGCCAGGAGCCUCCUUGGAGU | 4706 | 576-596 | ACUCCAAGGAGGCUCCUGGCCUU | 4841 | 574-596 |
| AD-1554070 | GGAGCCUCCUUGGAGCUGAGU | 4707 | 581-601 | ACUCAGCUCCAAGGAGGCUCCUG | 4842 | 579-601 |
| AD-1554074 | GAGAGGCUGGCUGAAGCUAUU | 4708 | 605-625 | AAUAGCUUCAGCCAGCCUCUCGG | 4843 | 603-625 |
| AD-1554082 | GGCUGAAGCUAUGGACUCUGU | 4709 | 613-633 | ACAGAGUCCAUAGCUUCAGCCAG | 4844 | 611-633 |
| AD-1554089 | GCUAUGGACUCUGGGCAGAAU | 4710 | 620-640 | AUUCUGCCCAGAGUCCAUAGCUU | 4845 | 618-640 |
| AD-1554097 | CUCUGGGCAGAACCUCCAGGU | 4711 | 628-648 | ACCUGGAGGUUCUGCCCAGAGUC | 4846 | 626-648 |
| AD-1554106 | GAACCUCCAGGUCUCCUGCCU | 4712 | 637-657 | AGGCAGGAGACCUGGAGGUUCUG | 4847 | 635-657 |
| AD-1554111 | UCCAGGUCUCCUGCCUCAAUU | 4713 | 642-662 | AAUUGAGGCAGGAGACCUGGAGG | 4848 | 640-662 |
| AD-1554119 | UCCUGCCUCAAUGCUGAGCAU | 4714 | 650-670 | AUGCUCAGCAUUGAGGCAGGAGA | 4849 | 648-670 |
| AD-1554126 | UCAAUGCUGAGCAGAACCAGU | 4715 | 657-677 | ACUGGUUCUGCUCAGCAUUGAGG | 4850 | 655-677 |
| AD-1554131 | GCUGAGCAGAACCAGCACCUU | 4716 | 662-682 | AAGGUGCUGGUUCUGCUCAGCAU | 4851 | 660-682 |
| AD-1554156 | GCAUCGGGUGGCACAGUAUGU | 4717 | 703-723 | ACAUACUGUGCCACCCGAUGCAG | 4852 | 701-723 |
| AD-1554186 | CUCCUGGUGGAUGCGGAGUAU | 4718 | 743-763 | AUACUCCGCAUCCACCAGGAGCC | 4853 | 741-763 |
| AD-1554193 | UGGAUGCGGAGUACACCUCAU | 4719 | 750-770 | AUGAGGUGUACUCCGCAUCCACC | 4854 | 748-770 |
| AD-1554198 | GCGGAGUACACCUCACUGAAU | 4720 | 755-775 | AUUCAGUGAGGUGUACUCCGCAU | 4855 | 753-775 |
| AD-1554203 | GUACACCUCACUGAACCCUGU | 4721 | 760-780 | ACAGGGUUCAGUGAGGUGUACUC | 4856 | 758-780 |
| AD-1554210 | UCACUGAACCCUGCGCUCUCU | 4722 | 767-787 | AGAGAGCGCAGGGUUCAGUGAGG | 4857 | 765-787 |
| AD-1554216 | AACCCUGCGCUCUCGCUGCUU | 4723 | 773-793 | AAGCAGCGAGAGCGCAGGGUUCA | 4858 | 771-793 |
| AD-1554263 | CCCUGGGUGUGGAACACCUAU | 4724 | 839-859 | AUAGGUGUUCCACACCCAGGGCC | 4859 | 837-859 |
| AD-1554268 | GGUGUGGAACACCUACCAGGU | 4725 | 844-864 | ACCUGGUAGGUGUUCCACACCCA | 4860 | 842-864 |
| AD-1554278 | ACCUACCAGGCCUGUCUAAAU | 4726 | 854-874 | AUUUAGACAGGCCUGGUAGGUGU | 4861 | 852-874 |
| AD-1554287 | GCCUGUCUAAAGGACACAUUU | 4727 | 863-883 | AAAUGUGUCCUUUAGACAGGCCU | 4862 | 861-883 |
| AD-1554292 | UCUAAAGGACACAUUCGAGCU | 4728 | 868-888 | AGCUCGAAUGUGUCCUUUAGACA | 4863 | 866-888 |
| AD-1554298 | GGACACAUUCGAGCGGCUGGU | 4729 | 874-894 | ACCAGCCGCUCGAAUGUGUCCUU | 4864 | 872-894 |
| AD-1554317 | GGCCUUCGGAGUGAAGCUGGU | 4730 | 928-948 | ACCAGCUUCACUCCGAAGGCCAG | 4865 | 926-948 |
| AD-1554323 | CGGAGUGAAGCUGGUACGAGU | 4731 | 934-954 | ACUCGUACCAGCUUCACUCCGAA | 4866 | 932-954 |
| AD-1554328 | UGAAGCUGGUACGAGGUGCAU | 4732 | 939-959 | AUGCACCUCGUACCAGCUUCACU | 4867 | 937-959 |
| AD-1554333 | CUGGUACGAGGUGCAUAUCUU | 4733 | 944-964 | AAGAUAUGCACCUCGUACCAGCU | 4868 | 942-964 |
| AD-1554340 | GAGGUGCAUAUCUGGACAAGU | 4734 | 951-971 | ACUUGUCCAGAUAUGCACCUCGU | 4869 | 949-971 |
| AD-1554346 | CAUAUCUGGACAAGGAGAGAU | 4735 | 957-977 | AUCUCUCCUUGUCCAGAUAUGCA | 4870 | 955-977 |
| AD-1554351 | CUGGACAAGGAGAGAGCGGUU | 4736 | 962-982 | AACCGCUCUCUCCUUGUCCAGAU | 4871 | 960-982 |
| AD-1554371 | GCCCAGCUCCAUGGGAUGGAU | 4737 | 983-1003 | AUCCAUCCCAUGGAGCUGGGCCA | 4872 | 981-1003 |
| AD-1554376 | GCUCCAUGGGAUGGAAGACCU | 4738 | 988-1008 | AGGUCUUCCAUCCCAUGGAGCUG | 4873 | 986-1008 |
| AD-1554379 | CUCAGCCUGACUAUGAGGCCU | 4739 | 1011-1031 | AGGCCUCAUAGUCAGGCUGAGUG | 4874 | 1009-1031 |
| AD-1554387 | GACUAUGAGGCCACCAGUCAU | 4740 | 1019-1039 | AUGACUGGUGGCCUCAUAGUCAG | 4875 | 1017-1039 |
| AD-1554393 | GAGGCCACCAGUCAGAGUUAU | 4741 | 1025-1045 | AUAACUCUGACUGGUGGCCUCAU | 4876 | 1023-1045 |
| AD-1554399 | ACCAGUCAGAGUUACAGCCGU | 4742 | 1031-1051 | ACGGCUGUAACUCUGACUGGUGG | 4877 | 1029-1051 |
| AD-1554404 | UCAGAGUUACAGCCGCUGCCU | 4743 | 1036-1056 | AGGCAGCGGCUGUAACUCUGACU | 4878 | 1034-1056 |
| AD-1554413 | CAGCCGCUGCCUGGAACUGAU | 4744 | 1045-1065 | AUCAGUUCCAGGCAGCGGCUGUA | 4879 | 1043-1065 |
| AD-1554418 | GCUGCCUGGAACUGAUGCUGU | 4745 | 1050-1070 | ACAGCAUCAGUUCCAGGCAGCGG | 4880 | 1048-1070 |
| AD-1554425 | GGAACUGAUGCUGACGCACGU | 4746 | 1057-1077 | ACGUGCGUCAGCAUCAGUUCCAG | 4881 | 1055-1077 |
| AD-1554430 | UGAUGCUGACGCACGUGGCCU | 4747 | 1062-1082 | AGGCCACGUGCGUCAGCAUCAGU | 4882 | 1060-1082 |
| AD-1554433 | CAUGUGCCACCUCAUGGUGGU | 4748 | 1093-1113 | ACCACCAUGAGGUGGCACAUGGG | 4883 | 1091-1113 |
| AD-1554443 | CUCAUGGUGGCUUCCCACAAU | 4749 | 1103-1123 | AUUGUGGGAAGCCACCAUGAGGU | 4884 | 1101-1123 |
| AD-1554451 | GGCUUCCCACAAUGAGGAAUU | 4750 | 1111-1131 | AAUUCCUCAUUGUGGGAAGCCAC | 4885 | 1109-1131 |
| AD-1554456 | CCCACAAUGAGGAAUCUGUUU | 4751 | 1116-1136 | AAACAGAUUCCUCAUUGUGGGAA | 4886 | 1114-1136 |
| AD-1554461 | AAUGAGGAAUCUGUUCGCCAU | 4752 | 1121-1141 | AUGGCGAACAGAUUCCUCAUUGU | 4887 | 1119-1141 |
| AD-1554470 | UCUGUUCGCCAGGCAACCAAU | 4753 | 1130-1150 | AUUGGUUGCCUGGCGAACAGAUU | 4888 | 1128-1150 |
| AD-1554475 | UCGCCAGGCAACCAAGCGCAU | 4754 | 1135-1155 | AUGCGCUUGGUUGCCUGGCGAAC | 4889 | 1133-1155 |
| AD-1554482 | GCAACCAAGCGCAUGUGGGAU | 4755 | 1142-1162 | AUCCCACAUGCGCUUGGUUGCCU | 4890 | 1140-1162 |
| AD-1554487 | CAAGCGCAUGUGGGAGCUGGU | 4756 | 1147-1167 | ACCAGCUCCCACAUGCGCUUGGU | 4891 | 1145-1167 |
| AD-1554492 | GCAUGUGGGAGCUGGGCAUUU | 4757 | 1152-1172 | AAAUGCCCAGCUCCCACAUGCGC | 4892 | 1150-1172 |
| AD-1554497 | UGGGAGCUGGGCAUUCCUCUU | 4758 | 1157-1177 | AAGAGGAAUGCCCAGCUCCCACA | 4893 | 1155-1177 |
| AD-1554505 | GGGCAUUCCUCUGGAUGGGAU | 4759 | 1165-1185 | AUCCCAUCCAGAGGAAUGCCCAG | 4894 | 1163-1185 |
| AD-1554510 | UUCCUCUGGAUGGGACUGUCU | 4760 | 1170-1190 | AGACAGUCCCAUCCAGAGGAAUG | 4895 | 1168-1190 |
| AD-1554515 | CUGGAUGGGACUGUCUGUUUU | 4761 | 1175-1195 | AAAACAGACAGUCCCAUCCAGAG | 4896 | 1173-1195 |
| AD-1554520 | UGGGACUGUCUGUUUCGGACU | 4762 | 1180-1200 | AGUCCGAAACAGACAGUCCCAUC | 4897 | 1178-1200 |
| AD-1554525 | CUGUCUGUUUCGGACAACUUU | 4763 | 1185-1205 | AAAGUUGUCCGAAACAGACAGUC | 4898 | 1183-1205 |
| AD-1554533 | UUCGGACAACUUCUGGGCAUU | 4764 | 1193-1213 | AAUGCCCAGAAGUUGUCCGAAAC | 4899 | 1191-1213 |
| AD-1554542 | CUUCUGGGCAUGUGUGACCAU | 4765 | 1202-1222 | AUGGUCACACAUGCCCAGAAGUU | 4900 | 1200-1222 |
| AD-1554551 | AUGUGUGACCACGUCUCUCUU | 4766 | 1211-1231 | AAGAGAGACGUGGUCACACAUGC | 4901 | 1209-1231 |
| AD-1554557 | GACCACGUCUCUCUAGCACUU | 4767 | 1217-1237 | AAGUGCUAGAGAGACGUGGUCAC | 4902 | 1215-1237 |
| AD-1554562 | GCAGGCCGGCUAUGUAGUGUU | 4768 | 1240-1260 | AACACUACAUAGCCGGCCUGCCC | 4903 | 1238-1260 |
| AD-1554567 | CCGGCUAUGUAGUGUAUAAGU | 4769 | 1245-1265 | ACUUAUACACUACAUAGCCGGCC | 4904 | 1243-1265 |
| AD-1554573 | AUGUAGUGUAUAAGUCCAUUU | 4770 | 1251-1271 | AAAUGGACUUAUACACUACAUAG | 4905 | 1249-1271 |
| AD-1554578 | GUGUAUAAGUCCAUUCCCUAU | 4771 | 1256-1276 | AUAGGGAAUGGACUUAUACACUA | 4906 | 1254-1276 |
| AD-1554584 | AAGUCCAUUCCCUAUGGCUCU | 4772 | 1262-1282 | AGAGCCAUAGGGAAUGGACUUAU | 4907 | 1260-1282 |
| AD-1554591 | UUCCCUAUGGCUCCUUGGAGU | 4773 | 1269-1289 | ACUCCAAGGAGCCAUAGGGAAUG | 4908 | 1267-1289 |
| AD-1554599 | GGCUCCUUGGAGGAGGUAAUU | 4774 | 1277-1297 | AAUUACCUCCUCCAAGGAGCCAU | 4909 | 1275-1297 |
| AD-1554609 | AUCCGGAGGGCCCAGGAGAAU | 4775 | 1307-1327 | AUUCUCCUGGGCCCUCCGGAUCA | 4910 | 1305-1327 |
| AD-1554626 | GAACCGGAGCGUGCUUCAGGU | 4776 | 1324-1344 | ACCUGAAGCACGCUCCGGUUCUC | 4911 | 1322-1344 |
| AD-1554642 | CAGGGUGCCCGCAGGGAACAU | 4777 | 1340-1360 | AUGUUCCCUGCGGGCACCCUGAA | 4912 | 1338-1360 |
| AD-1554653 | CAGGGAACAGGAGCUGCUCAU | 4778 | 1351-1371 | AUGAGCAGCUCCUGUUCCCUGCG | 4913 | 1349-1371 |
| AD-1554658 | AACAGGAGCUGCUCAGCCAAU | 4779 | 1356-1376 | AUUGGCUGAGCAGCUCCUGUUCC | 4914 | 1354-1376 |
| AD-1554663 | GAGCUGCUCAGCCAAGAACUU | 4780 | 1361-1381 | AAGUUCUUGGCUGAGCAGCUCCU | 4915 | 1359-1381 |
| AD-1554668 | GCUCAGCCAAGAACUGUGGCU | 4781 | 1366-1386 | AGCCACAGUUCUUGGCUGAGCAG | 4916 | 1364-1386 |
| AD-1554690 | UGCCAGGAUGCCGAAGGAUAU | 4782 | 1395-1415 | AUAUCCUUCGGCAUCCUGGCAGC | 4917 | 1393-1415 |
| AD-1554696 | UCAUGUGGUCAAUAAAAGUCU | 4783 | 1438-1458 | AGACUUUUAUUGACCACAUGACC | 4918 | 1436-1458 |
| AD-1554704 | UCAAUAAAAGUCCUUAGGUGU | 4784 | 1446-1466 | ACACCUAAGGACUUUUAUUGACC | 4919 | 1444-1466 |
| AD-1554709 | AAAAGUCCUUAGGUGCUGCCU | 4785 | 1451-1471 | AGGCAGCACCUAAGGACUUUUAU | 4920 | 1449-1471 |

TABLE 16
Modified Sense and Antisense Strand Sequences of PRODH2 dsRNA Agents

| | | SEQ | | SEQ | | SEQ |
|---|---|---|---|---|---|---|
| Duplex | | ID | | ID | | ID |
| Name | Sense Sequence 5′ to 3′ | NO: | Anti sense Sequence 5′ to 3′ | NO: | mRNA target sequence | NO: |
| AD-1553630 | asgsaaccUfuCfCfCfugguguggauL96 | 4921 | asUfsccaCfaCfCfagggAfaGfguucuscsu | 5056 | AGAGAACCUUCCCUGGUGUGGAG | 5191 |
| AD-1553635 | csusucccUfgGfUfGfuggaggcaguL96 | 4922 | asCfsugcCfuCfCfacacCfaGfggaagsgsu | 5057 | ACCUUCCCUGGUGUGGAGGCAGC | 5192 |
| AD-1553662 | csasggauGfcUfCfCfggaccuguuuL96 | 4923 | asAfsacaGfgUfCfcggaGfcAfuccugsgsg | 5058 | CCCAGGAUGCUCCGGACCUGUUA | 5193 |
| AD-1553667 | usgscuccGfgAfCfCfuguuacguguL96 | 4924 | asCfsacgUfaAfCfagguCfcGfgagcasusc | 5059 | GAUGCUCCGGACCUGUUACGUGC | 5194 |
| AD-1553674 | gsasccugUfuAfCfGfugcucuguuuL96 | 4925 | asAfsacaGfaGfCfacguAfaCfaggucscsg | 5060 | CGGACCUGUUACGUGCUCUGUUC | 5195 |
| AD-1553681 | usascgugCfuCfUfGfuucccaagcuL96 | 4926 | asGfscuuGfgGfAfacagAfgCfacguasasc | 5061 | GUUACGUGCUCUGUUCCCAAGCU | 5196 |
| AD-1553686 | gscsucugUfuCfCfCfaagcuggucuL96 | 4927 | asGfsaccAfgCfUfugggAfaCfagagcsasc | 5062 | GUGCUCUGUUCCCAAGCUGGUCC | 5197 |
| AD-1553691 | csusggcaGfuCfCfCfugagcuuuguL96 | 4928 | asCfsaaaGfcUfCfagggAfcUfgccagscsc | 5063 | GGCUGGCAGUCCCUGAGCUUUGA | 5198 |
| AD-1553697 | gsuscccuGfaGfCfUfuugauggcguL96 | 4929 | asCfsgccAfuCfAfaagcUfcAfgggacsusg | 5064 | CAGUCCCUGAGCUUUGAUGGCGG | 5199 |
| AD-1553701 | gscscuucCfaCfCfUfuaagggcacuL96 | 4930 | asGfsugcCfcUfUfaaggUfgGfaaggcscsc | 5065 | GGGCCUUCCACCUUAAGGGCACA | 5200 |
| AD-1553707 | csasccuuAfaGfGfGfcacaggagauL96 | 4931 | asUfscucCfuGfUfgcccUfuAfaggugsgsa | 5066 | UCCACCUUAAGGGCACAGGAGAG | 5201 |
| AD-1553715 | gsgsgcacAfgGfAfGfagcugacacuL96 | 4932 | asGfsuguCfaGfCfucucCfuGfugcccsusu | 5067 | AAGGGCACAGGAGAGCUGACACG | 5202 |
| AD-1553722 | gsgsagagCfuGfAfCfacgggccuuuL96 | 4933 | asAfsaggCfcCfGfugucAfgCfucuccsusg | 5068 | CAGGAGAGCUGACACGGGCCUUG | 5203 |
| AD-1553730 | gsascacgGfgCfCfUfugcugguucuL96 | 4934 | asGfsaacCfaGfCfaaggCfcCfgugucsasg | 5069 | CUGACACGGGCCUUGCUGGUUCU | 5204 |
| AD-1553739 | csusugcuGfgUfUfCfuccggcuguuL96 | 4935 | asAfscagCfcGfGfagaaCfcAfgcaagsgsc | 5070 | GCCUUGCUGGUUCUCCGGCUGUG | 5205 |
| AD-1553745 | gsgsuucuCfcGfGfCfugugugccuuL96 | 4936 | asAfsggcAfcAfCfagccGfgAfgaaccsasg | 5071 | CUGGUUCUCCGGCUGUGUGCCUG | 5206 |
| AD-1553751 | csuscgucAfcUfCfAfcgggcuguuuL96 | 4937 | asAfsacaGfcCfCfgugaGfuGfacgagsusg | 5072 | CACUCGUCACUCACGGGCUGUUG | 5207 |
| AD-1553758 | csuscacgGfgCfUfGfuugcuccaguL96 | 4938 | asCfsuggAfgCfAfacagCfcCfgugagsusg | 5073 | CACUCACGGGCUGUUGCUCCAGG | 5208 |
| AD-1553769 | ususgcucCfaGfGfCfcuggucucguL96 | 4939 | asCfsgagAfcCfAfggccUfgGfagcaascsa | 5074 | UGUUGCUCCAGGCCUGGUCUCGG | 5209 |
| AD-1553794 | gsgscucuCfaGfGfCfgcauuucucuL96 | 4940 | asGfsagaAfaUfGfcgccUfgAfgagccsgsg | 5075 | CCGGCUCUCAGGCGCAUUUCUCC | 5210 |
| AD-1553799 | uscsaggcGfcAfUfUfucuccgagcuL96 | 4941 | asGfscucGfgAfGfaaauGfcGfccugasgsa | 5076 | UCUCAGGCGCAUUUCUCCGAGCA | 5211 |
| AD-1553804 | csgscauuUfcUfCfCfgagcauccguL96 | 4942 | asCfsggaUfgCfUfcggaGfaAfaugcgscsc | 5077 | GGCGCAUUUCUCCGAGCAUCCGU | 5212 |
| AD-1553809 | ususcuccGfaGfCfAfuccgucuauuL96 | 4943 | asAfsuagAfcGfGfaugcUfcGfgagaasasu | 5078 | AUUUCUCCGAGCAUCCGUCUAUG | 5213 |
| AD-1553815 | gsasgcauCfcGfUfCfuaugggcaguL96 | 4944 | asCfsugcCfcAfUfagacGfgAfugcucsgsg | 5079 | CCGAGCAUCCGUCUAUGGGCAGU | 5214 |
| AD-1553820 | uscscgucUfaUfGfGfgcaguuuguuL96 | 4945 | asAfscaaAfcUfGfcccaUfaGfacggasusg | 5080 | CAUCCGUCUAUGGGCAGUUUGUG | 5215 |
| AD-1553826 | usasugggCfaGfUfUfuguggcugguL96 | 4946 | asCfscagCfcAfCfaaacUfgCfccauasgsa | 5081 | UCUAUGGGCAGUUUGUGGCUGGU | 5216 |
| AD-1553832 | csasguuuGfuGfGfCfuggugagacuL96 | 4947 | asGfsucuCfaCfCfagccAfcAfaacugscsc | 5082 | GGCAGUUUGUGGCUGGUGAGACA | 5217 |
| AD-1553839 | usgsgcugGfuGfAfGfacagcagaguL96 | 4948 | asCfsucuGfcUfGfucucAfcCfagccascsa | 5083 | UGUGGCUGGUGAGACAGCAGAGG | 5218 |
| AD-1553845 | gsusgagaCfaGfCfAfgaggagguguL96 | 4949 | asCfsaccUfcCfUfcugcUfgUfcucacscsa | 5084 | UGGUGAGACAGCAGAGGAGGUGA | 5219 |
| AD-1553852 | asgscagaGfgAfGfGfugaagggcuuL96 | 4950 | asAfsgccCfuUfCfaccuCfcUfcugcusgsu | 5085 | ACAGCAGAGGAGGUGAAGGGCUG | 5220 |
| AD-1553859 | gsasggugAfaGfGfGfcugcgugcauL96 | 4951 | asUfsgcaCfgCfAfgcccUfuCfaccucscsu | 5086 | AGGAGGUGAAGGGCUGCGUGCAG | 5221 |
| AD-1553865 | asasgggcUfgCfGfUfgcagcagcuuL96 | 4952 | asAfsgcuGfcUfGfcacgCfaGfcccuuscsa | 5087 | UGAAGGGCUGCGUGCAGCAGCUG | 5222 |
| AD-1553907 | usgscuggCfaGfUfGfcccacugaguL96 | 4953 | asCfsucaGfuGfGfgcacUfgCfcagcasgsu | 5088 | ACUGCUGGCAGUGCCCACUGAGG | 5223 |
| AD-1553912 | gscsagugCfcCfAfCfugaggaggauL96 | 4954 | asUfsccuCfcUfCfagugGfgCfacugcscsa | 5089 | UGGCAGUGCCCACUGAGGAGGAG | 5224 |
| AD-1553922 | csusgaggAfgGfAfGfccggacucuuL96 | 4955 | asAfsgagUfcCfGfgcucCfuCfcucagsusg | 5090 | CACUGAGGAGGAGCCGGACUCUG | 5225 |
| AD-1553930 | gsasgccgGfaCfUfCfugcugccaauL96 | 4956 | asUfsuggCfaGfCfagagUfcCfggcucscsu | 5091 | AGGAGCCGGACUCUGCUGCCAAG | 5226 |
| AD-1553937 | ascsucugCfuGfCfCfaagagugguuL96 | 4957 | asAfsccaCfuCfUfuggcAfgCfagaguscsc | 5092 | GGACUCUGCUGCCAAGAGUGGUG | 5227 |
| AD-1553942 | gscsugccAfaGfAfGfuggugaggcuL96 | 4958 | asGfsccuCfaCfCfacucUfuGfgcagcsasg | 5093 | CUGCUGCCAAGAGUGGUGAGGCG | 5228 |
| AD-1553951 | asgsugguGfaGfGfCfgugguaugauL96 | 4959 | asUfscauAfcCfAfcgccUfcAfccacuscsu | 5094 | AGAGUGGUGAGGCGUGGUAUGAG | 5229 |
| AD-1553957 | asasccucGfgUfGfCfuaugcugcguL96 | 4960 | asCfsgcaGfcAfUfagcaCfcGfagguuscsc | 5095 | GGAACCUCGGUGCUAUGCUGCGG | 5230 |
| AD-1553962 | csgsgugcUfaUfGfCfugcgguguguL96 | 4961 | asCfsacaCfcGfCfagcaUfaGfcaccgsasg | 5096 | CUCGGUGCUAUGCUGCGGUGUGU | 5231 |
| AD-1553967 | csusaugcUfgCfGfGfuguguggacuL96 | 4962 | asGfsuccAfcAfCfaccgCfaGfcauagscsa | 5097 | UGCUAUGCUGCGGUGUGUGGACC | 5232 |
| AD-1553975 | csgsguguGfuGfGfAfccugucacguL96 | 4963 | asCfsgugAfcAfGfguccAfcAfcaccgscsa | 5098 | UGCGGUGUGUGGACCUGUCACGG | 5233 |
| AD-1553988 | gsgsccagCfcUfCfAfugcagcugauL96 | 4964 | asUfscagCfuGfCfaugaGfgCfuggccsusc | 5099 | GAGGCCAGCCUCAUGCAGCUGAA | 5234 |
| AD-1553993 | gscscucaUfgCfAfGfcugaagguguL96 | 4965 | asCfsaccUfuCfAfgcugCfaUfgaggcsusg | 5100 | CAGCCUCAUGCAGCUGAAGGUGA | 5235 |
| AD-1553998 | asusgcagCfuGfAfAfggugacggcuL96 | 4966 | asGfsccgUfcAfCfcuucAfgCfugcausgsa | 5101 | UCAUGCAGCUGAAGGUGACGGCG | 5236 |
| AD-1554003 | gscsugaaGfgUfGfAfcggcgcugauL96 | 4967 | asUfscagCfgCfCfgucaCfcUfucagcsusg | 5102 | CAGCUGAAGGUGACGGCGCUGAC | 5237 |
| AD-1554009 | gsgsugacGfgCfGfCfugaccaguauL96 | 4968 | asUfsacuGfgUfCfagcgCfcGfucaccsusu | 5103 | AAGGUGACGGCGCUGACCAGUAC | 5238 |
| AD-1554018 | gscsugacCfaGfUfAfcucggcucuuL96 | 4969 | asAfsgagCfcGfAfguacUfgGfucagcsgsc | 5104 | GCGCUGACCAGUACUCGGCUCUG | 5239 |
| AD-1554025 | asgsuacuCfgGfCfUfcuguaaggauL96 | 4970 | asUfsccuUfaCfAfgagcCfgAfguacusgsg | 5105 | CCAGUACUCGGCUCUGUAAGGAG | 5240 |
| AD-1554030 | uscsggcuCfuGfUfAfaggagcuaguL96 | 4971 | asCfsuagCfuCfCfuuacAfgAfgccgasgsu | 5106 | ACUCGGCUCUGUAAGGAGCUAGC | 5241 |
| AD-1554036 | csusguaaGfgAfGfCfuagccucguuL96 | 4972 | asAfscgaGfgCfUfagcuCfcUfuacagsasg | 5107 | CUCUGUAAGGAGCUAGCCUCGUG | 5242 |
| AD-1554041 | asgsgagcUfaGfCfCfucgugggucuL96 | 4973 | asGfsaccCfaCfGfaggcUfaGfcuccususa | 5108 | UAAGGAGCUAGCCUCGUGGGUCA | 5243 |
| AD-1554048 | asgsccucGfuGfGfGfucagaaggcuL96 | 4974 | asGfsccuUfcUfGfacccAfcGfaggcusasg | 5109 | CUAGCCUCGUGGGUCAGAAGGCC | 5244 |
| AD-1554054 | gsusggguCfaGfAfAfggccaggaguL96 | 4975 | asCfsuccUfgGfCfcuucUfgAfcccacsgsa | 5110 | UCGUGGGUCAGAAGGCCAGGAGC | 5245 |
| AD-1554065 | gsgsccagGfaGfCfCfuccuuggaguL96 | 4976 | asCfsuccAfaGfGfaggcUfcCfuggccsusu | 5111 | AAGGCCAGGAGCCUCCUUGGAGC | 5246 |
| AD-1554070 | gsgsagccUfcCfUfUfggagcugaguL96 | 4977 | asCfsucaGfcUfCfcaagGfaGfgcuccsusg | 5112 | CAGGAGCCUCCUUGGAGCUGAGC | 5247 |
| AD-1554074 | gsasgaggCfuGfGfCfugaagcuauuL96 | 4978 | asAfsuagCfuUfCfagccAfgCfcucucsgsg | 5113 | CCGAGAGGCUGGCUGAAGCUAUG | 5248 |
| AD-1554082 | gsgscugaAfgCfUfAfuggacucuguL96 | 4979 | asCfsagaGfuCfCfauagCfuUfcagccsasg | 5114 | CUGGCUGAAGCUAUGGACUCUGG | 5249 |
| AD-1554089 | gscsuaugGfaCfUfCfugggcagaauL96 | 4980 | asUfsucuGfcCfCfagagUfcCfauagcsusu | 5115 | AAGCUAUGGACUCUGGGCAGAAC | 5250 |
| AD-1554097 | csuscuggGfcAfGfAfaccuccagguL96 | 4981 | asCfscugGfaGfGfuucuGfcCfcagagsusc | 5116 | GACUCUGGGCAGAACCUCCAGGU | 5251 |
| AD-1554106 | gsasaccuCfcAfGfGfucuccugccuL96 | 4982 | asGfsgcaGfgAfGfaccuGfgAfgguucsusg | 5117 | CAGAACCUCCAGGUCUCCUGCCU | 5252 |
| AD-1554111 | uscscaggUfcUfCfCfugccucaauuL96 | 4983 | asAfsuugAfgGfCfaggaGfaCfcuggasgsg | 5118 | CCUCCAGGUCUCCUGCCUCAAUG | 5253 |
| AD-1554119 | uscscugcCfuCfAfAfugcugagcauL96 | 4984 | asUfsgcuCfaGfCfauugAfgGfcaggasgsa | 5119 | UCUCCUGCCUCAAUGCUGAGCAG | 5254 |
| AD-1554126 | uscsaaugCfuGfAfGfcagaaccaguL96 | 4985 | asCfsuggUfuCfUfgcucAfgCfauugasgsg | 5120 | CCUCAAUGCUGAGCAGAACCAGC | 5255 |
| AD-1554131 | gscsugagCfaGfAfAfccagcaccuuL96 | 4986 | asAfsgguGfcUfGfguucUfgCfucagcsasu | 5121 | AUGCUGAGCAGAACCAGCACCUC | 5256 |
| AD-1554156 | gscsaucgGfgUfGfGfcacaguauguL96 | 4987 | asCfsauaCfuGfUfgccaCfcCfgaugcsasg | 5122 | CUGCAUCGGGUGGCACAGUAUGC | 5257 |
| AD-1554186 | csusccugGfuGfGfAfugcggaguauL96 | 4988 | asUfsacuCfcGfCfauccAfcCfaggagscsc | 5123 | GGCUCCUGGUGGAUGCGGAGUAC | 5258 |
| AD-1554193 | usgsgaugCfgGfAfGfuacaccucauL96 | 4989 | asUfsgagGfuGfUfacucCfgCfauccascsc | 5124 | GGUGGAUGCGGAGUACACCUCAC | 5259 |
| AD-1554198 | gscsggagUfaCfAfCfcucacugaauL96 | 4990 | asUfsucaGfuGfAfggugUfaCfuccgcsasu | 5125 | AUGCGGAGUACACCUCACUGAAC | 5260 |
| AD-1554203 | gsusacacCfuCfAfCfugaacccuguL96 | 4991 | asCfsaggGfuUfCfagugAfgGfuguacsusc | 5126 | GAGUACACCUCACUGAACCCUGC | 5261 |
| AD-1554210 | uscsacugAfaCfCfCfugcgcucucuL96 | 4992 | asGfsagaGfcGfCfagggUfuCfagugasgsg | 5127 | CCUCACUGAACCCUGCGCUCUCG | 5262 |
| AD-1554216 | asascccuGfcGfCfUfcucgcugcuuL96 | 4993 | asAfsgcaGfcGfAfgagcGfcAfggguuscsa | 5128 | UGAACCCUGCGCUCUCGCUGCUG | 5263 |
| AD-1554263 | cscscuggGfuGfUfGfgaacaccuauL96 | 4994 | asUfsaggUfgUfUfccacAfcCfcagggscsc | 5129 | GGCCCUGGGUGUGGAACACCUAC | 5264 |
| AD-1554268 | gsgsugugGfaAfCfAfccuaccagguL96 | 4995 | asCfscugGfuAfGfguguUfcCfacaccscsa | 5130 | UGGGUGUGGAACACCUACCAGGC | 5265 |
| AD-1554278 | ascscuacCfaGfGfCfcugucuaaauL96 | 4996 | asUfsuuaGfaCfAfggccUfgGfuaggusgsu | 5131 | ACACCUACCAGGCCUGUCUAAAG | 5266 |
| AD-1554287 | gscscuguCfuAfAfAfggacacauuuL96 | 4997 | asAfsaugUfgUfCfcuuuAfgAfcaggcscsu | 5132 | AGGCCUGUCUAAAGGACACAUUC | 5267 |
| AD-1554292 | uscsuaaaGfgAfCfAfcauucgagcuL96 | 4998 | asGfscucGfaAfUfguguCfcUfuuagascsa | 5133 | UGUCUAAAGGACACAUUCGAGCG | 5268 |
| AD-1554298 | gsgsacacAfuUfCfGfagcggcugguL96 | 4999 | asCfscagCfcGfCfucgaAfuGfuguccsusu | 5134 | AAGGACACAUUCGAGCGGCUGGG | 5269 |
| AD-1554317 | gsgsccuuCfgGfAfGfugaagcugguL96 | 5000 | asCfscagCfuUfCfacucCfgAfaggccsasg | 5135 | CUGGCCUUCGGAGUGAAGCUGGU | 5270 |
| AD-1554323 | csgsgaguGfaAfGfCfugguacgaguL96 | 5001 | asCfsucgUfaCfCfagcuUfcAfcuccgsasa | 5136 | UUCGGAGUGAAGCUGGUACGAGG | 5271 |
| AD-1554328 | usgsaagcUfgGfUfAfcgaggugcauL96 | 5002 | asUfsgcaCfcUfCfguacCfaGfcuucascsu | 5137 | AGUGAAGCUGGUACGAGGUGCAU | 5272 |
| AD-1554333 | csusgguaCfgAfGfGfugcauaucuuL96 | 5003 | asAfsgauAfuGfCfaccuCfgUfaccagscsu | 5138 | AGCUGGUACGAGGUGCAUAUCUG | 5273 |
| AD-1554340 | gsasggugCfaUfAfUfcuggacaaguL96 | 5004 | asCfsuugUfcCfAfgauaUfgCfaccucsgsu | 5139 | ACGAGGUGCAUAUCUGGACAAGG | 5274 |
| AD-1554346 | csasuaucUfgGfAfCfaaggagagauL96 | 5005 | asUfscucUfcCfUfugucCfaGfauaugscsa | 5140 | UGCAUAUCUGGACAAGGAGAGAG | 5275 |
| AD-1554351 | csusggacAfaGfGfAfgagagcgguuL96 | 5006 | asAfsccgCfuCfUfcuccUfuGfuccagsasu | 5141 | AUCUGGACAAGGAGAGAGCGGUG | 5276 |
| AD-1554371 | gscsccagCfuCfCfAfugggauggauL96 | 5007 | asUfsccaUfcCfCfauggAfgCfugggcscsa | 5142 | UGGCCCAGCUCCAUGGGAUGGAA | 5277 |
| AD-1554376 | gscsuccaUfgGfGfAfuggaagaccuL96 | 5008 | asGfsgucUfuCfCfauccCfaUfggagcsusg | 5143 | CAGCUCCAUGGGAUGGAAGACCC | 5278 |
| AD-1554379 | csuscagcCfuGfAfCfuaugaggccuL96 | 5009 | asGfsgccUfcAfUfagucAfgGfcugagsusg | 5144 | CACUCAGCCUGACUAUGAGGCCA | 5279 |
| AD-1554387 | gsascuauGfaGfGfCfcaccagucauL96 | 5010 | asUfsgacUfgGfUfggccUfcAfuagucsasg | 5145 | CUGACUAUGAGGCCACCAGUCAG | 5280 |
| AD-1554393 | gsasggccAfcCfAfGfucagaguuauL96 | 5011 | asUfsaacUfcUfGfacugGfuGfgccucsasu | 5146 | AUGAGGCCACCAGUCAGAGUUAC | 5281 |
| AD-1554399 | ascscaguCfaGfAfGfuuacagccguL96 | 5012 | asCfsggcUfgUfAfacucUfgAfcuggusgsg | 5147 | CCACCAGUCAGAGUUACAGCCGC | 5282 |
| AD-1554404 | uscsagagUfuAfCfAfgccgcugccuL96 | 5013 | asGfsgcaGfcGfGfcuguAfaCfucugascsu | 5148 | AGUCAGAGUUACAGCCGCUGCCU | 5283 |
| AD-1554413 | csasgccgCfuGfCfCfuggaacugauL96 | 5014 | asUfscagUfuCfCfaggcAfgCfggcugsusa | 5149 | UACAGCCGCUGCCUGGAACUGAU | 5284 |
| AD-1554418 | gscsugccUfgGfAfAfcugaugcuguL96 | 5015 | asCfsagcAfuCfAfguucCfaGfgcagcsgsg | 5150 | CCGCUGCCUGGAACUGAUGCUGA | 5285 |
| AD-1554425 | gsgsaacuGfaUfGfCfugacgcacguL96 | 5016 | asCfsgugCfgUfCfagcaUfcAfguuccsasg | 5151 | CUGGAACUGAUGCUGACGCACGU | 5286 |
| AD-1554430 | usgsaugcUfgAfCfGfcacguggccuL96 | 5017 | asGfsgccAfcGfUfgcguCfaGfcaucasgsu | 5152 | ACUGAUGCUGACGCACGUGGCCC | 5287 |
| AD-1554433 | csasugugCfcAfCfCfucauggugguL96 | 5018 | asCfscacCfaUfGfagguGfgCfacaugsgsg | 5153 | CCCAUGUGCCACCUCAUGGUGGC | 5288 |
| AD-1554443 | csuscaugGfuGfGfCfuucccacaauL96 | 5019 | asUfsuguGfgGfAfagccAfcCfaugagsgsu | 5154 | ACCUCAUGGUGGCUUCCCACAAU | 5289 |
| AD-1554451 | gsgscuucCfcAfCfAfaugaggaauuL96 | 5020 | asAfsuucCfuCfAfuuguGfgGfaagccsasc | 5155 | GUGGCUUCCCACAAUGAGGAAUC | 5290 |
| AD-1554456 | cscscacaAfuGfAfGfgaaucuguuuL96 | 5021 | asAfsacaGfaUfUfccucAfuUfgugggsasa | 5156 | UUCCCACAAUGAGGAAUCUGUUC | 5291 |
| AD-1554461 | asasugagGfaAfUfCfuguucgccauL96 | 5022 | asUfsggcGfaAfCfagauUfcCfucauusgsu | 5157 | ACAAUGAGGAAUCUGUUCGCCAG | 5292 |
| AD-1554470 | uscsuguuCfgCfCfAfggcaaccaauL96 | 5023 | asUfsuggUfuGfCfcuggCfgAfacagasusu | 5158 | AAUCUGUUCGCCAGGCAACCAAG | 5293 |
| AD-1554475 | uscsgccaGfgCfAfAfccaagcgcauL96 | 5024 | asUfsgcgCfuUfGfguugCfcUfggcgasasc | 5159 | GUUCGCCAGGCAACCAAGCGCAU | 5294 |
| AD-1554482 | gscsaaccAfaGfCfGfcaugugggauL96 | 5025 | asUfscccAfcAfUfgcgcUfuGfguugcscsu | 5160 | AGGCAACCAAGCGCAUGUGGGAG | 5295 |
| AD-1554487 | csasagcgCfaUfGfUfgggagcugguL96 | 5026 | asCfscagCfuCfCfcacaUfgCfgcuugsgsu | 5161 | ACCAAGCGCAUGUGGGAGCUGGG | 5296 |
| AD-1554492 | gscsauguGfgGfAfGfcugggcauuuL96 | 5027 | asAfsaugCfcCfAfgcucCfcAfcaugcsgsc | 5162 | GCGCAUGUGGGAGCUGGGCAUUC | 5297 |
| AD-1554497 | usgsggagCfuGfGfGfcauuccucuuL96 | 5028 | asAfsgagGfaAfUfgcccAfgCfucccascsa | 5163 | UGUGGGAGCUGGGCAUUCCUCUG | 5298 |
| AD-1554505 | gsgsgcauUfcCfUfCfuggaugggauL96 | 5029 | asUfscccAfuCfCfagagGfaAfugcccsasg | 5164 | CUGGGCAUUCCUCUGGAUGGGAC | 5299 |
| AD-1554510 | ususccucUfgGfAfUfgggacugucuL96 | 5030 | asGfsacaGfuCfCfcaucCfaGfaggaasusg | 5165 | CAUUCCUCUGGAUGGGACUGUCU | 5300 |
| AD-1554515 | csusggauGfgGfAfCfugucuguuuuL96 | 5031 | asAfsaacAfgAfCfagucCfcAfuccagsasg | 5166 | CUCUGGAUGGGACUGUCUGUUUC | 5301 |
| AD-1554520 | usgsggacUfgUfCfUfguuucggacuL96 | 5032 | asGfsuccGfaAfAfcagaCfaGfucccasusc | 5167 | GAUGGGACUGUCUGUUUCGGACA | 5302 |
| AD-1554525 | csusgucuGfuUfUfCfggacaacuuuL96 | 5033 | asAfsaguUfgUfCfcgaaAfcAfgacagsusc | 5168 | GACUGUCUGUUUCGGACAACUUC | 5303 |
| AD-1554533 | ususcggaCfaAfCfUfucugggcauuL96 | 5034 | asAfsugcCfcAfGfaaguUfgUfccgaasasc | 5169 | GUUUCGGACAACUUCUGGGCAUG | 5304 |
| AD-1554542 | csusucugGfgCfAfUfgugugaccauL96 | 5035 | asUfsgguCfaCfAfcaugCfcCfagaagsusu | 5170 | AACUUCUGGGCAUGUGUGACCAC | 5305 |
| AD-1554551 | asusguguGfaCfCfAfcgucucucuuL96 | 5036 | asAfsgagAfgAfCfguggUfcAfcacausgsc | 5171 | GCAUGUGUGACCACGUCUCUCUA | 5306 |
| AD-1554557 | gsasccacGfuCfUfCfucuagcacuuL96 | 5037 | asAfsgugCfuAfGfagagAfcGfuggucsasc | 5172 | GUGACCACGUCUCUCUAGCACUG | 5307 |
| AD-1554562 | gscsaggcCfgGfCfUfauguaguguuL96 | 5038 | asAfscacUfaCfAfuagcCfgGfccugcscsc | 5173 | GGGCAGGCCGGCUAUGUAGUGUA | 5308 |
| AD-1554567 | cscsggcuAfuGfUfAfguguauaaguL96 | 5039 | asCfsuuaUfaCfAfcuacAfuAfgccggscsc | 5174 | GGCCGGCUAUGUAGUGUAUAAGU | 5309 |
| AD-1554573 | asusguagUfgUfAfUfaaguccauuuL96 | 5040 | asAfsaugGfaCfUfuauaCfaCfuacausasg | 5175 | CUAUGUAGUGUAUAAGUCCAUUC | 5310 |
| AD-1554578 | gsusguauAfaGfUfCfcauucccuauL96 | 5041 | asUfsaggGfaAfUfggacUfuAfuacacsusa | 5176 | UAGUGUAUAAGUCCAUUCCCUAU | 5311 |
| AD-1554584 | asasguccAfuUfCfCfcuauggcucuL96 | 5042 | asGfsagcCfaUfAfgggaAfuGfgacuusasu | 5177 | AUAAGUCCAUUCCCUAUGGCUCC | 5312 |
| AD-1554591 | ususcccuAfuGfGfCfuccuuggaguL96 | 5043 | asCfsuccAfaGfGfagccAfuAfgggaasusg | 5178 | CAUUCCCUAUGGCUCCUUGGAGG | 5313 |
| AD-1554599 | gsgscuccUfuGfGfAfggagguaauuL96 | 5044 | asAfsuuaCfcUfCfcuccAfaGfgagccsasu | 5179 | AUGGCUCCUUGGAGGAGGUAAUC | 5314 |
| AD-1554609 | asusccggAfgGfGfCfccaggagaauL96 | 5045 | asUfsucuCfcUfGfggccCfuCfcggauscsa | 5180 | UGAUCCGGAGGGCCCAGGAGAAC | 5315 |
| AD-1554626 | gsasaccgGfaGfCfGfugcuucagguL96 | 5046 | asCfscugAfaGfCfacgcUfcCfgguucsusc | 5181 | GAGAACCGGAGCGUGCUUCAGGG | 5316 |
| AD-1554642 | csasggguGfcCfCfGfcagggaacauL96 | 5047 | asUfsguuCfcCfUfgcggGfcAfcccugsasa | 5182 | UUCAGGGUGCCCGCAGGGAACAG | 5317 |
| AD-1554653 | csasgggaAfcAfGfGfagcugcucauL96 | 5048 | asUfsgagCfaGfCfuccuGfuUfcccugscsg | 5183 | CGCAGGGAACAGGAGCUGCUCAG | 5318 |
| AD-1554658 | asascaggAfgCfUfGfcucagccaauL96 | 5049 | asUfsuggCfuGfAfgcagCfuCfcuguuscsc | 5184 | GGAACAGGAGCUGCUCAGCCAAG | 5319 |
| AD-1554663 | gsasgcugCfuCfAfGfccaagaacuuL96 | 5050 | asAfsguuCfuUfGfgcugAfgCfagcucscsu | 5185 | AGGAGCUGCUCAGCCAAGAACUG | 5320 |
| AD-1554668 | gscsucagCfcAfAfGfaacuguggcuL96 | 5051 | asGfsccaCfaGfUfucuuGfgCfugagcsasg | 5186 | CUGCUCAGCCAAGAACUGUGGCG | 5321 |
| AD-1554690 | usgsccagGfaUfGfCfcgaaggauauL96 | 5052 | asUfsaucCfuUfCfggcaUfcCfuggcasgsc | 5187 | GCUGCCAGGAUGCCGAAGGAUAC | 5322 |
| AD-1554696 | uscsauguGfgUfCfAfauaaaagucuL96 | 5053 | asGfsacuUfuUfAfuugaCfcAfcaugascsc | 5188 | GGUCAUGUGGUCAAUAAAAGUCC | 5323 |
| AD-1554704 | uscsaauaAfaAfGfUfccuuagguguL96 | 5054 | asCfsaccUfaAfGfgacuUfuUfauugascsc | 5189 | GGUCAAUAAAAGUCCUUAGGUGC | 5324 |
| AD-1554709 | asasaaguCfcUfUfAfggugcugccuL96 | 5055 | asGfsgcaGfcAfCfcuaaGfgAfcuuuusasu | 5190 | AUAAAAGUCCUUAGGUGCUGCCU | 5325 |

[0937] Example 2. A Randomized, Double-Blind, Placebo-Controlled Study to Evaluate the Efficacy, Safety, Pharmacodynamics, and Pharmacokinetics of Lumasiran in Patients with Recurrent Calcium Oxalate Kidney Stone Disease and Elevated Urinary Oxalate Levels

[0938] Kidney stones are common, affecting approximately 1 in 11 people in the United States, and the prevalence of kidney stone disease has been increasing worldwide over time (Scales, et al. Eur Urol. 2012 July; 62(1):160-5). Approximately 80% of kidney stones in adults are formed from calcium oxalate crystals, with the remainder being predominantly calcium phosphate, uric acid, cystine, or struvite (Worcester E M and Coe F L. Nephrolithiasis. Prim Care. 2008 June; 35(2):369-91; Worcester E M, Coe F L. N Engl J Med. 2010 Sep. 2; 363(10):954-63). Stone formation occurs when a supersaturating level of calcium oxalate is present in the urine, with increasing risk of stone formation as urine oxalate levels increase (Curhan and Taylor Kidney Int. 2008 February; 73(4):489-96). High levels of urinary oxalate may be derived from both endogenous synthesis and diet. More than half of oxalate is endogenous in origin and presumed to come largely from the liver (Mitchell, et al. Circ Res. 2018 Feb. 16; 122(4):555-9). Studies have shown that reduced calcium oxalate supersaturation and urinary oxalate levels are associated with reduced stone formation (Borgh, et al. N Engl J Med. 2002 Jan. 10; 346(2):77-84; Ferrar, et al. J Urol. 2018 November; 200(5):1082-7; Prochaska, et al. J Urol. 2018 May; 199(5):1262-6].

[0939] Kidney stones can develop in patients of all ages; however, the highest incidence rates occur in individuals aged 40 to 66 years (Shin, et al. World J Nephrol. 2018 Nov. 24; 7(7):129-42). There is significant clinical burden associated with the development of kidney stones for patients with recurrent calcium oxalate kidney stone disease, including pain, infection/sepsis, diagnostic and therapeutic procedures, hospitalizations, and a greater risk for developing chronic kidney disease (CKD) and end stage kidney disease (ESKD). For patients with recurrent calcium oxalate stone formation, multiple stone removal procedures may be required. These procedures are invasive and place the patient at risk of complications including bleeding and infection. Patients experiencing obstructive kidney stones can also experience acute kidney injury with permanent loss of renal function. As a result, patients with recurrent kidney stone formation have a higher risk of progression to CKD and ESKD (Dhondup, et al. Am J Kidney Dis. 2018 December; 72(6):790-72018; Rul, et al. Clin J Am Soc Nephrol. 2009 April; 4(4):804-11).

[0940] The typical clinical presentation of kidney stones includes sudden onset of lumbar flank pain and hematuria, and may include nausea and vomiting. Evaluation to assess etiology includes assessment of the patient's medical history, medication use, and dietary and lifestyle risk factors. Confirmation of diagnosis may involve renal ultrasound, abdominal x-ray, and/or computed tomography (CT) Heilberg, et al. Endocrinol Metabol. 2006 August; 50(4):823-31). Twenty-four-hour urine collections analyzed for total volume, calcium, oxalate, uric acid, citrate, and other analytes may help to determine the underlying etiology (Pearle, et al. J Urol. 2014 August; 192(2):316-24). Stone composition is generally determined in at least one instance.

[0941] There are limited effective treatment options for patients with recurrent calcium oxalate kidney stone disease. Preventive measures in American and European guidelines recommend adequate fluid intake to ensure a urine volume of at least 2 to 2.5 liters daily and provide dietary advice to limit the consumption of oxalate-rich foods, sodium chloride, and animal protein content, while maintaining a normal calcium intake. In some situations, thiazide diuretics, potassium citrate, and/or allopurinol may be considered (Pearle, supra; Turk, et al. EAU Guidelines on Urolithiasis. EAU Annual Congress; 2021; Milan, Italy: EAU Guidelines Office).

[0942] Treatment of pain associated with kidney stone events may involve non-steroidal anti-inflammatory agents and/or opiate pain medications. Depending on the clinical context, medical expulsive therapy, extracorporeal shock-wave lithotripsy, ureteroscopy, stenting, and percutaneous nephrolithotomy are some of the treatment options that may be pursued (Turk, supra).

[0943] Lumasiran is a ribonucleic acid interference (RNAi) therapeutic that target glycolate oxidase (GO, or HAO1) which reduces hepatic oxalate production. Oxalate produced by the liver is largely excreted in the urine, and lumasiran has been shown to reduce urinary oxalate in patients with PH1. High levels of urinary oxalate increase the risk of stone formation; therefore, lumasiran may have efficacy in patients with recurrent calcium oxalate kidney stone disease who do not have PH1 but who produce high amounts of oxalate endogenously.

[0944] The sense strand of lumasiran comprises the nucleotide sequence nucleotide sequence 5′-gsascuuuCfaUfCfCfuggaaauaua-3′ (SEQ ID NO:35) and the antisense strand comprises the nucleotide sequence 5′-usAfsuauUfuCfCfaggaUfgAfaagucscsa-3′ (SEQ ID NO:36). The sense strand of lumasiran is conjugated to a ligand as shown in the following schematic

[chemical structure]

[0945] and, wherein X is O.

### Summary of Study Design

[0946] The study is a randomized, placebo-controlled, double-blind, multicenter, multinational, Phase 2 study to evaluate the efficacy, safety, pharmacodynamics (PD), and pharmacokinetics (PK) of lumasiran administered subcutaneously (SC) in patients with recurrent calcium oxalate kidney stone disease and elevated urinary oxalate levels.

[0947] The study consists of up to 2 months of screening and 15 months of double-blind treatment (a 6-month Primary Analysis Period followed by a 9-month Treatment Extension Period). Patients were screened from Day −60 to Day −1 to determine eligibility. During screening, patients provided at least two 24-hour urine collections to establish baseline urinary oxalate levels. Consented patients meeting all eligibility criteria were randomized 1:1:1 to receive study drug: lumasiran 567 mg, lumasiran 284 mg, or placebo. Stratification was performed at randomization according to mean baseline urinary oxalate level and the number of kidney stone events in the 12 months prior to screening.

[0948] Patients were administered SC injections of lumasiran (284 mg or 567 mg) and/or placebo at the same volume (1.5. mL), on Day 1, Month 3, and Month 9.

| Lumasiran 567 mg | Lumasiran 284 mg | Placebo |
|---|---|---|
| 1.5 mL lumasiran | 1.5 mL lumasiran | 1.5 mL placebo |
| 1.5 mL lumasiran | 1.5 mL placebo | 1.5 mL placebo |

[0949] During the 6-month Primary Analysis Period, patients were dosed on Day 1 (baseline) and at Month 3. During the Treatment Extension Period, one additional dose will be administered at Month 9; an end of study (EOS) visit will take place at Month 15. Study drug was administered SC. Patients will be assessed for efficacy, safety, PD, and PK. Efficacy assessments will include evaluation of urinary oxalate excretion, urinary calcium oxalate supersaturation, and kidney stone events (including clinical events and low-dose kidney-protocol CT). Safety assessments will include collection of adverse events (AEs), clinical laboratory tests, vital sign assessments, physical examinations, and concomitant medications.

### Rationale for Study Design

[0950] The primary endpoint for this Phase 2 study is the percent change in 24-hour urinary oxalate excretion. To confirm the optimal dosing regimen, and to facilitate the collection of kidney stone event data (an exploratory endpoint), the study will continue through Month 15. A placebo comparator is included because there is no approved standard of care therapy to decrease urinary oxalate.

[0951] A blood DNA sample will be collected as part of standard screening assessments (if testing has not already been performed) to ensure the exclusion of patients with primary hyperoxaluria type 1 (PH1), type 2 (PH2), and type 3 (PH3). Lumasiran is approved in some countries for the treatment of PH1, and patients with PH2 and PH3 are not expected to respond to lumasiran.

[0952] Because the primary endpoint will rely on measurements of urinary oxalate, and because some urinary oxalate is diet-derived, diet is an important variable in this study. In a 5-year study of recurrent stone formers published by Borghi et al. (supra), patients randomized to a normal calcium, low protein/salt diet had lower urinary oxalate levels and a lower cumulative incidence of recurrent kidney stones when compared to a low calcium diet. During the current study, and as of the time of informed consent, patients will be asked to adhere to a diet appropriate for stone formers, including adequate calcium intake and avoidance of spinach and other foods that are high in oxalate.

[0953] The secondary endpoint to assess meaningful reduction in 24-hour urinary oxalate from baseline to Month 6 (Months 4 through 6) defines a clinically meaningful reduction as ≥20% in the non-PH1 stone former population, supported by available literature based on stone former populations.

### Treatment Groups

[0954] Patients were randomized 1:1:1 to receive lumasiran 284 mg, lumasiran 567 mg, or placebo, administered at the same volume, for the duration of the study. Stratification was performed at randomization according to mean baseline urinary oxalate level (>1.25×ULN vs ≤1.25×ULN) and the number of historical kidney stone events in the 12 months prior to screening (>1 vs ≤1).

[0955] For stratification, a historical kidney stone event is defined as:
[0956] the visible passage of a kidney stone
[0957] a procedural intervention for removal of an asymptomatic or symptomatic stone
   [0958] if more than 1 stone was removed in a given procedure, this counts as 1 event unless bilateral ureteral stones were removed, in which case this counts as 2 events
   [0959] if more than 1 procedure was required to remove a single stone, this counts as 1 event
[0960] a new (≥1 mm) or enlarged (by ≥2 mm) kidney stone on CT imaging
   [0961] it must be evident from the CT scans that the new or enlarged kidney stone event occurred during the 12 months prior to screening
   [0962] if a procedure was performed to remove the stone(s) identified by CT, then only the procedure will be counted to avoid double-counting the same stone.

### Inclusion Criteria

[0963] Patients are eligible to be included in the study if all the following criteria apply:

### Age

1. Age 18 years or older (or age of legal consent, whichever is older).

### Patient and Disease Characteristics

2. Recurrent kidney stone disease, defined as ≥2 stone events within the 5 years prior to screening. For inclusion, a historical kidney stone event is defined as:
[0964] the visible passage of a kidney stone
[0965] a procedural intervention for removal of an asymptomatic or symptomatic stone
   [0966] if more than 1 stone was removed in a given procedure, this counts as 1 event unless bilateral ureteral stones were removed, in which case this counts as 2 events
   [0967] if more than 1 procedure was required to remove a single stone, this counts as 1 event
[0968] a new (≥1 mm) or enlarged (by ≥2 mm) kidney stone on CT imaging
   [0969] it must be evident from the CT scans that the new or enlarged kidney stone event occurred during 5 years prior to screening
   [0970] if a procedure was performed to remove the stone(s) identified by CT, then only the procedure will be counted to avoid double-counting the same stone.
      3. The 2 most recently analyzed kidney stones prior to randomization contained 50% or more of calcium oxalate; if only one stone analysis is available, then it must have contained 50% or more of calcium oxalate.
      4. 24-hour urinary oxalate levels from 2 valid 24-hour urine collections obtained during screening are >ULN.
      5. Willing to adhere to dietary recommendations appropriate for stone formers including limiting vitamin C supplementation to <200 mg daily.
      6. If taking medications and/or hydrating for kidney stone prophylaxis, or taking medications that alter urinary oxalate excretion and/or kidney stone formation, must have been on a stable regimen for at least 60 days before randomization, and willing to remain on this stable regimen for the duration of the study.
      7. Body mass index (the weight in kilograms divided by the square of the height in meters) of 20 to <40 kg/m².

### Exclusion Criteria

[0971] Patients are excluded from the study if any of the following criteria apply:

### Laboratory Assessments

1. Has any of the following laboratory parameter assessments at screening:
[0972] a. Alanine aminotransferase (ALT) or aspartate aminotransferase (AST)>2×ULN
[0973] b. Total bilirubin >1.5×ULN. Patients with elevated total bilirubin that is secondary to documented Gilbert's syndrome are eligible if the total bilirubin is <2×ULN
[0974] c. International normalized ratio (INR) ≥2.0 (patients on oral anticoagulant [eg, warfarin] with an INR <3.5 will be allowed)
   2. Has an eGFR of <30 mL/min/1.73 m² at screening (calculation will be based on the Chronic Kidney Disease Epidemiology Collaboration [CKD-EPI] creatinine formula).

### Prior/Concomitant Therapy

3. Received an investigational agent within the last 30 days or 5 half-lives, whichever is longer, prior to the first dose of study drug, or are in follow-up of another clinical study prior to study enrollment. Any agent that has received health agency authorization (including for emergency use) by local or regional regulatory authorities is not considered investigational.

### Medical Conditions

4. Patients with a known history of secondary causes of elevated urinary oxalate and/or recurrent kidney stones including:
[0975] a. Primary hyperoxaluria
[0976] b. Severe eating disorders (anorexia or bulimia)
[0977] c. Chronic inflammatory bowel disease
[0978] d. Intestinal surgery with malabsorption or chronic diarrhea
[0979] e. Sarcoidosis
[0980] f. Primary hyperparathyroidism
[0981] g. Complete distal renal tubular acidosis
   5. Has other medical conditions or comorbidities which, in the opinion of the Investigator, would interfere with study compliance or data interpretation.
   6. History of multiple drug allergies or history of allergic reaction to an oligonucleotide or GalNAc.
   7. History of intolerance to SC injection(s).

### Contraception, Pregnancy, and Breastfeeding

8. Is not willing to comply with the contraceptive requirements during the study period.
9. Female patient is pregnant, planning a pregnancy, or breast-feeding.

### Alcohol Use

10. Unwilling or unable to limit alcohol consumption throughout the course of the study. Alcohol intake of >2 units/day is excluded during the study (unit: 1 glass of wine [approximately 125 mL]=1 measure of spirits [approximately 1 fluid ounce]=½ pint of beer [approximately 284 mL]).
11. History of alcohol abuse, within the last 12 months before screening, in the opinion of the Investigator.

### Efficacy Assessments

### 24-Hour Urine Collections

[0982] Urinary oxalate excretion and calcium oxalate supersaturation (calculated from multiple parameters) will be determined from 24-hour urine sample collections to be completed at the time points specified. The start and stop dates/times of collection, the volume of urine in the collection, whether there were any missed voids, and whether the patient complied with dietary recommendations will be recorded. An aliquot of the 24-hour urine collection will also be used to determine urinary creatinine content and to determine if the 24-hour urine collections need to be repeated.

### Validity Criteria for 24-Hour Urine Collections

[0983] Throughout the study, a urine collection will be considered valid if each of the following criteria are met:
[0984] The collection is between 22 to 26 hours in duration between the initial discarded void and the last void or attempt to void.
[0985] No voids are missed between the start and end time of the collection as indicated by the patient's urine collection diary.
[0986] The 24-hour creatinine content is at least 10 mg/kg as assessed by the central laboratory.
[0987] Patient complied with dietary recommendations appropriate for oxalate stone formers (detailed in the Dietary Reference Sheet) for the 4 days prior to the start of the urine collection and during the collection.
[0988] 24-hour urine collections that are known to be invalid should still be submitted for analysis.

### Variability Criterion for 24-Hour Urine Collections at Screening

[0989] If the 2 valid 24-hour urine collections from screening meet eligibility requirements (both 24-hour urinary oxalate levels >ULN), the variability between the oxalate levels (in mg/day) should be assessed as follows:

$$Variability = \vert \frac{( Oxalate value \#1 - Oxalate value \#2 )}{( Average of oxalate values \#1 \& \#2 )} \vert \times 100 \%$$

[0990] If the variability is >20%, then a third valid 24-hour urine collection should be obtained. The result of the third sample will not impact the patient's eligibility for the study.

### Kidney Stone Events

[0991] Since kidney stone events are recorded as an efficacy assessment, these events will not be captured as AEs or serious adverse events (SAEs). However, if a patient experiences other AEs or SAEs during a kidney stone event, they should be reported as an AE.

[0992] Kidney stone events will be graded by the Investigator as mild, moderate, or severe:

| | |
|---|---|
| Mild: | Mild; asymptomatic or mild symptoms; clinical or diagnostic |
| | observations only; intervention not indicated. |
| Mod- | Moderate; minimal, local or noninvasive intervention indicated; |
| erate: | limiting age appropriate instrumental activities of daily living |
| | (eg, preparing meals, shopping for groceries or clothes, using the |
| | telephone, managing money). |
| Severe: | Severe or medically significant but not immediately life- |
| | threatening; hospitalization or prolongation of hospitalization |
| | indicated; disabling; limiting self-care activities of daily living |
| | (ie, bathing, dressing and undressing, feeding self, using the |
| | toilet, taking medications, and not bedridden); OR life- |
| | threatening consequences; urgent intervention indicated; OR |
| | death related to an AE. |

[0993] If there are changes in grade during an event, only the highest grade should be reported.

### Clinical

[0994] All relevant clinical information pertaining to a kidney stone events should be obtained, including laboratory values, medical records, discharge summaries, and medical test results (including stone composition, if available, and radiology reports). A clinical kidney stone event is defined as one of the following:
[0995] Visible passage of a kidney stone
[0996] A procedural intervention for removal of an asymptomatic or symptomatic stone (information on the location, number, and size of stones removed will be collected)
[0997] Or, in the case of potential stone passages without visible stones, it will be up to the Investigator to evaluate patients' symptoms and determine whether a stone passage occurred or the symptoms were due to a different cause.

### Radiographic

[0998] A non-contrast low-dose kidney-protocol CT scan will be performed for all patients on Day 1 (may be performed up to 3 days prior to Day 1), and at Month 15.

[0999] For patients who terminate the study early, a CT scan should be performed at the ET visit only if this visit occurs after Month 6 and at the discretion of the Investigator, and where permitted, following consultation with the Medical Monitor. CT scans will be analyzed centrally.

### Spot Urinary Oxalate:Creatinine Ratios

[1000] Urine oxalate:creatinine ratios will be calculated from the oxalate and creatinine levels measured in single-void urine collections. Single-void urine collections should be collected as a first morning void when possible; if this is not possible then the reason should be documented.

### Estimated Glomerular Filtration Rate

[1001] Blood samples for the assessment of eGFR (mL/min/1.73 m²) will be obtained at the time points specified.

[1002] eGFR will be calculated based on the CKD-EPI formula:

CKD-EPI (Chronic Kidney Disease Epidemiology Collaboration). A new equation to estimate glomerular filtration rate. Ann Intern Med. 2009 May 5; 150(9):604-12.
[1003] Conventional units

$$eGFR ( mL / min / 1.73 {m}^{2} ) = 175 \times {( S C r [ mg / dL ] )}^{- 1.154} \times {( age )}^{- 0.203} \times ( 0.742 , if female ) ,$$

$$or \times ( 1.212 , if African American )$$

[1004] SI units

$$eGFR ( mL / min / 1.73 {m}^{2} ) = 175 \times {( SCr [ μmg / L ] / 88.4 )}^{- 1.154} \times {( age )}^{- 0.203} \times ( 0.742 , if female ) ,$$

$$or \times ( 1.212 , if African American )$$

[1005] Abbreviations: eGFR=Estimated glomerular filtration rate; SCr=serum creatinine; SI=International System of Units

### Pharmacodynamic Assessments

[1006] Urine and blood samples will be collected for assessment of PD parameters (plasma oxalate, plasma glycolate, and urinary glycolate) at the time points specified. Urine samples for exploratory analysis will be aliquoted from the samples provided for PD analysis. On dosing days, all blood and urine samples will be collected prior to study drug administration.

[1007] All PD assessments will be analyzed centrally. Postdose PD results will not be distributed to the sites until after the last patient completes assessments at the Month 15 visit. Site personnel should refrain from obtaining or viewing local oxalate, calcium oxalate supersaturation, or glycolate assessments, except as medically indicated, due to risk of unblinding.

[1008] Where local regulations allow and infrastructure is in place, a healthcare professional may collect urine or blood samples offsite.

### Pharmacokinetic Assessments

[1009] Blood samples will be collected for the assessment of lumasiran PK parameters at the time points indicated.

[1010] The concentration of lumasiran in blood samples will be determined using a validated assay.

### Safety Assessments

[1011] The assessment of safety during the study will consist of the surveillance and recording of AEs including SAEs, recording of concomitant medication and measurements of vital signs, weight and height, and laboratory tests. Clinically significant abnormalities observed during the physical examination are recorded as either medical history or AEs, as appropriate.

[1012] Safety assessments are to be performed as specified. On dosing days and as applicable, assessments of vital signs, weight/height, physical examination, and clinical laboratory assessments are to be completed before study drug administration.

### Quality of Life Outcomes

[1013] For pain assessments, patients will be asked to assess their “worst daily pain” (0=no pain at all; 10=pain as bad as you can imagine) from Question 3 of the Brief Pain Inventory—Short Form. This will be administered at screening, on Day 1, and daily while experiencing stone-related pain until the conclusion of the associated stone event.

[1014] The Wisconsin Stone Quality of Life Questionnaire (WISQOL) will be administered on Day 1 and upon conclusion of each clinical kidney stone event and will assess the degree of kidney stone impacts in terms of:
[1015] Fatigue
[1016] Sleep
[1017] Social function
[1018] Daily activities
[1019] Physical/psychosocial symptoms

### EQUIVALENTS

[1020] Those skilled in the art will recognize, or be able to ascertain using no more than routine experimentation, many equivalents to the specific embodiments and methods described herein. Such equivalents are intended to be encompassed by the scope of the following claims.

1. A method for inhibiting the expression of hydroxyacid oxidase (HAO1) in a human subject having a non-primary hyperoxaluria disease or disorder that would benefit from reduction in urinary oxalate, comprising
administering to the subject a fixed dose of about 200 mg to about 600 mg of a double stranded ribonucleic acid (dsRNA) agent, or salt thereof, which inhibits the expression of of HAO1,
thereby inhibiting the expression of HAO1 in the subject.

2. A method for reducing urinary oxalate levels in a human subject having a non-primary hyperoxaluria disease or disorder that would benefit from reduction in urinary oxalate, comprising
administering to the subject a fixed dose of about 200 mg to about 600 mg of a double stranded ribonucleic acid (dsRNA) agent, or salt thereof, which inhibits the expression of of HAO1,
thereby reducing urinary oxalate levels in the subject.

3. The method of claim 2, wherein the urinary oxalate is urinary calcium oxalate.

4. The method of claim 3, wherein the reduction in urinary calcium oxalate is reduction in urinary calcium oxalate supersaturation.

5. (canceled)

6. The method of claim 1, wherein the non-primary hyperoxaluria disease or disorder is selected from the group consisting of secondary hyperoxaluria, a kidney stone disease, chronic kidney disease (CKD), end-stage renal disease (ESRD), coronary artery disease, cutaneous oxalate deposition, ethylene glycol poisoning, planned kidney transplantation, and previous kidney transplantation.

7. The method of claim 6, wherein the non-primary hyperoxaluria disease or disorder is a kidney stone disease.

8. The method of claim 7, wherein the kidney stone disease is calcium oxalate kidney stone disease.

9. The method of claim 8, wherein the calcium oxalate kidney stone disease is recurrent calcium oxalate kidney stone disease.

10.-18. (canceled)

19. The method of claim 1, wherein the dsRNA agent, or salt thereof, is administered to the subject subcutaneously.

20. (canceled)

21. The method of claim 1, wherein the dsRNA agent, or salt thereof, comprises a sense strand and an antisense strand forming a double stranded region, wherein the sense strand comprises a nucleotide sequence comprising at least 15 contiguous nucleotides differing by no more than 3 nucleotides from a portion of the nucleotide sequence of SEQ ID NO: 21 and the antisense strand comprises a nucleotide sequence comprising at least 15 contiguous nucleotides differing by no more than 3 nucleotides from the corresponding portion of nucleotide sequence of SEQ ID NO: 22 such that the sense strand is complementary to the at least 15 contiguous nucleotides in the antisense strand.

22. (canceled)

23. The method of claim 1, wherein the dsRNA agent, or salt thereof, comprises a sense strand and an antisense strand forming a double-stranded region, wherein the sense strand comprises a nucleotide sequence differing by no more than 3 nucleotides from the nucleotide sequence 5′-GACUUUCAUCCUGGAAAUAUA-3′ (SEQ ID NO:33) and the antisense strand comprises a nucleotide sequence differing by no more than 3 nucleotides from the nucleotide sequence 5′-UAUAUUUCCAGGAUGAAAGUCCA-3′ (SEQ ID NO:34).

24.-26. (canceled)

27. The method of claim 1, wherein all of the nucleotides of the sense strand and all of the nucleotides of the antisense strand comprise a nucleotide modification.

28. The method of claim 27, wherein at least one of the nucleotide modifications is selected from the group a deoxy-nucleotide modification, a 3′-terminal deoxy-thymine (dT) nucleotide modification, a 2′-O-methyl nucleotide modification, a 2′-fluoro nucleotide modification, a 2′-deoxy-nucleotide modification, a locked nucleotide modification, an unlocked nucleotide modification, a conformationally restricted nucleotide modification, a constrained ethyl nucleotide modification, an abasic nucleotide modification, a 2′-amino-nucleotide modification, a 2′-O-allyl-nucleotide modification, 2′-C-alkyl-nucleotide modification, 2′-hydroxyl-nucleotide modification, a 2′-methoxyethyl nucleotide modification, a 2′-O-alkyl-nucleotide modification, a morpholino nucleotide modification, a phosphoramidate, a non-natural base comprising nucleotide modification, a tetrahydropyran nucleotide modification, a 1,5-anhydrohexitol modified nucleotide modification, a cyclohexenyl nucleotide modification, a nucleotide comprising a 5′-phosphorothioate group modification, a nucleotide comprising a 5′-methylphosphonate group modification, a nucleotide comprising a 5′ phosphate or 5′ phosphate mimic modification, a nucleotide comprising vinyl phosphonate modification, a nucleotide comprising adenosine-glycol nucleic acid (GNA) modification, a nucleotide comprising thymidine-glycol nucleic acid (GNA) S-Isomer modification, a nucleotide comprising 2-hydroxymethyl-tetrahydrofurane-5-phosphate modification, a nucleotide comprising 2′-deoxythymidine-3′phosphate modification, a nucleotide comprising 2′-deoxyguanosine-3′-phosphate modification, and a terminal nucleotide linked to a cholesteryl derivative modification and a dodecanoic acid bisdecylamide group modification; and combinations thereof.

29. The method of claim 27, wherein the dsRNA agent, or salt thereof, further comprises at least one phosphorothioate internucleotide linkage.

30.-33. (canceled)

34. The method of claim 1, wherein at least one strand of the dsRNA agent, or salt thereof, further comprises a ligand.

35. The method of claim 34, wherein the ligand is attached to the 3′ end of the sense strand.

36. The method of claim 34, wherein the ligand is one or more N-acetylgalactosamine (GalNAc) derivatives.

37.-79. (canceled)

80. A method for treating a subject having a non-primary hyperoxaluria disease or disorder that would benefit from reduction in oxalate, the method comprising
administering to the subject a therapeutically effective amount of a nucleic acid inhibitor of hydroxyacid oxidase (HAO1) and/or a nucleic acid inhibitor of Proline Dehydrogenase 2 (PRODH2),
thereby treating the subject having the non-primary hyperoxaluria disease or disorder that would benefit from reduction in oxalate.

81. The method of claim 80, wherein the non-primary hyperoxaluria disease or disorder is selected from the group consisting of secondary hyperoxaluria, a kidney stone disease, chronic kidney disease (CKD), end-stage renal disease (ESRD), coronary artery disease, cutaneous oxalate deposition, ethylene glycol poisoning, planned kidney transplantation, and previous kidney transplantation.

82. A method for treating a subject at risk of developing a non-primary hyperoxaluria disease or disorder that would benefit from reduction in oxalate, the method comprising
administering to the subject a therapeutically effective amount of a nucleic acid inhibitor of lactate dehydrogenase A (LDHA), a nucleic acid inhibitor of hydroxyacid oxidase (HAO1), and/or a nucleic acid inhibitor of Proline Dehydrogenase 2 (PRODH2),
thereby treating the subject at risk of developing the non-primary hyperoxaluria disease or disorder that would benefit from reduction in oxalate.

83-157. (canceled)

The application's sequence listing, which the Patent Office published only in electronic form, follows.

SEQUENCE LISTING (5325 sequences)

SEQ ID NO: 1 - DNA, 2052 bp, Homo sapiens
  source 1..2052: mol_type = genomic DNA
gtctgccggtcggttgtctggctgcgcgcgccacccgggcctctccagtgccccgcctggctcggcatccacccccagcccgactcacacgtgggttcccgcacgtccgccggccccccccgctgacgtcagcatagctgttccacttaaggcccctcccgcgcccagctcagagtgctgcagccgctgccgccgattccggatctcattgccacgcgcccccgacgaccgcccgacgtgcattcccgattccttttggttccaagtccaatatggcaactctaaaggatcagctgatttataatcttctaaaggaagaacagaccccccagaataagattacagttgttggggttggtgctgttggcatggcctgtgccatcagtatcttaatgaaggacttggcagatgaacttgctcttgttgatgtcatcgaagacaaattgaagggagagatgatggatctccaacatggcagccttttccttagaacaccaaagattgtctctggcaaagtggatatcttgacctacgtggcttggaagataagtggttttcccaaaaaccgtgttattggaagcggttgcaatctggattcagcccgattccgttacctaatgggggaaaggctgggagttcacccattaagctgtcatgggtgggtccttggggaacatggagattccagtgtgcctgtatggagtggaatgaatgttgctggtgtctctctgaagactctgcacccagatttagggactgataaagataaggaacagtggaaagaggttcacaagcaggtggttgagagtgcttatgaggtgatcaaactcaaaggctacacatcctgggctattggactctctgtagcagatttggcagagagtataatgaagaatcttaggcgggtgcacccagtttccaccatgattaagggtctttacggaataaaggatgatgtcttccttagtgttccttgcattttgggacagaatggaatctcagaccttgtgaaggtgactctgacttctgaggaagaggcccgtttgaagaagagtgcagatacactttgggggatccaaaaggagctgcaattttaaagtcttctgatgtcatatcatttcactgtctaggctacaacaggattctaggtggaggttgtgcatgttgtcctttttatctgatctgtgattaaagcagtaatattttaagatggactgggaaaaacatcaactcctgaagttagaaataagaatggtttgtaaaatccacagctatatcctgatgctggatggtattaatcttgtgtagtcttcaactggttagtgtgaaatagttctgccacctctgacgcaccactgccaatgctgtacgtactgcatttgccccttgagccaggtggatgtttaccgtgtgttatataacttcctggctccttcactgaacatgcctagtccaacattttttcccagtgagtcacatcctgggatccagtgtataaatccaatatcatgtcttgtgcataattcttccaaaggatcttattttgtgaactatatcagtagtgtacattaccatataatgtaaaaagatctacatacaaacaatgcaaccaactatccaagtgttataccaactaaaacccccaataaaccttgaacagtgactactttggttaattcattatattaagatataaagtcataaagctgctagttattatattaatttggaaatattaggctattcttgggcaaccctgcaacgattttttctaacagggatattattgactaatagcagaggatgtaatagtcaactgagttgtattggtaccacttccattgtaagtcccaaagtattatatatttgataataatgctaatcataattggaaagtaacattctatatgtaaatgtaaaatttatttgccaactgaatataggcaatgatagtgtgtcactatagggaacacagatttttgagatcttgtcctctggaagctggtaacaattaaaaacaatcttaaggcagggaaaaaaaaaaaaaaaaaa

SEQ ID NO: 2 - DNA, 2052 bp, Homo sapiens
  source 1..2052: mol_type = genomic DNA
ttttttttttttttttttccctgccttaagattgtttttaattgttaccagcttccagaggacaagatctcaaaaatctgtgttccctatagtgacacactatcattgcctatattcagttggcaaataaattttacatttacatatagaatgttactttccaattatgattagcattattatcaaatatataatactttgggacttacaatggaagtggtaccaatacaactcagttgactattacatcctctgctattagtcaataatatccctgttagaaaaaatcgttgcagggttgcccaagaatagcctaatatttccaaattaatataataactagcagctttatgactttatatcttaatataatgaattaaccaaagtagtcactgttcaaggtttattgggggttttagttggtataacacttggatagttggttgcattgtttgtatgtagatctttttacattatatggtaatgtacactactgatatagttcacaaaataagatcctttggaagaattatgcacaagacatgatattggatttatacactggatcccaggatgtgactcactgggaaaaaatgttggactaggcatgttcagtgaaggagccaggaagttatataacacacggtaaacatccacctggctcaaggggcaaatgcagtacgtacagcattggcagtggtgcgtcagaggtggcagaactatttcacactaaccagttgaagactacacaagattaataccatccagcatcaggatatagctgtggattttacaaaccattcttatttctaacttcaggagttgatgtttttcccagtccatcttaaaatattactgctttaatcacagatcagataaaaaggacaacatgcacaacctccacctagaatcctgttgtagcctagacagtgaaatgatatgacatcagaagactttaaaattgcagctccttttggatcccccaaagtgtatctgcactcttcttcaaacgggcctcttcctcagaagtcagagtcaccttcacaaggtctgagattccattctgtcccaaaatgcaaggaacactaaggaagacatcatcctttattccgtaaagacccttaatcatggtggaaactgggtgcacccgcctaagattcttcattatactctctgccaaatctgctacagagagtccaatagcccaggatgtgtagcctttgagtttgatcacctcataagcactctcaaccacctgcttgtgaacctctttccactgttccttatctttatcagtccctaaatctgggtgcagagtcttcagagagacaccagcaacattcattccactccatacaggcacactggaatctccatgttccccaaggacccacccatgacagcttaatgggtgaactcccagcctttcccccattaggtaacggaatcgggctgaatccagattgcaaccgcttccaataacacggtttttgggaaaaccacttatcttccaagccacgtaggtcaagatatccactttgccagagacaatctttggtgttctaaggaaaaggctgccatgttggagatccatcatctctcccttcaatttgtcttcgatgacatcaacaagagcaagttcatctgccaagtccttcattaagatactgatggcacaggccatgccaacagcaccaaccccaacaactgtaatcttattctggggggtctgttcttcctttagaagattataaatcagctgatcctttagagttgccatattggacttggaaccaaaaggaatcgggaatgcacgtcgggcggtcgtcgggggcgcgtggcaatgagatccggaatcggcggcagcggctgcagcactctgagctgggcgcgggaggggccttaagtggaacagctatgctgacgtcagcggggggggccggcggacgtgcgggaacccacgtgtgagtcgggctgggggtggatgccgagccaggcggggcactggagaggcccgggtggcgcgcgcagccagacaaccgaccggcagac

SEQ ID NO: 3 - DNA, 2323 bp, Homo sapiens
  source 1..2323: mol_type = genomic DNA
ttgggcggggcgtaaaagccgggcgttcggaggacccagcaattagtctgatttccgcccacctttccgagcgggaaggagagccacaaagcgcgcatgcgcgcggatcaccgcaggctcctgtgccttgggcttgagctttgtggcagttaatggcttttctgcacgtatctctggtgtttacttgagaagcctggctgtgtccttgctgtaggagccggagtagctcagagtgatcttgtctgaggaaaggccagccccacttggggttaataaaccgcgatgggtgaaccctcaggaggctatacttacacccaaacgtcgatattccttttccacgctaagattccttttggttccaagtccaatatggcaactctaaaggatcagctgatttataatcttctaaaggaagaacagaccccccagaataagattacagttgttggggttggtgctgttggcatggcctgtgccatcagtatcttaatgaaggacttggcagatgaacttgctcttgttgatgtcatcgaagacaaattgaagggagagatgatggatctccaacatggcagccttttccttagaacaccaaagattgtctctggcaaagactataatgtaactgcaaactccaagctggtcattatcacggctggggcacgtcagcaagagggagaaagccgtcttaatttggtccagcgtaacgtgaacatctttaaattcatcattcctaatgttgtaaaatacagcccgaactgcaagttgcttattgtttcaaatccagtggatatcttgacctacgtggcttggaagataagtggttttcccaaaaaccgtgttattggaagcggttgcaatctggattcagcccgattccgttacctaatgggggaaaggctgggagttcacccattaagctgtcatgggtgggtccttggggaacatggagattccagtgtgcctgtatggagtggaatgaatgttgctggtgtctctctgaagactctgcacccagatttagggactgataaagataaggaacagtggaaagaggttcacaagcaggtggttgagagtgcttatgaggtgatcaaactcaaaggctacacatcctgggctattggactctctgtagcagatttggcagagagtataatgaagaatcttaggcgggtgcacccagtttccaccatgattaagggtctttacggaataaaggatgatgtcttccttagtgttccttgcattttgggacagaatggaatctcagaccttgtgaaggtgactctgacttctgaggaagaggcccgtttgaagaagagtgcagatacactttgggggatccaaaaggagctgcaattttaaagtcttctgatgtcatatcatttcactgtctaggctacaacaggattctaggtggaggttgtgcatgttgtcctttttatctgatctgtgattaaagcagtaatattttaagatggactgggaaaaacatcaactcctgaagttagaaataagaatggtttgtaaaatccacagctatatcctgatgctggatggtattaatcttgtgtagtcttcaactggttagtgtgaaatagttctgccacctctgacgcaccactgccaatgctgtacgtactgcatttgccccttgagccaggtggatgtttaccgtgtgttatataacttcctggctccttcactgaacatgcctagtccaacattttttcccagtgagtcacatcctgggatccagtgtataaatccaatatcatgtcttgtgcataattcttccaaaggatcttattttgtgaactatatcagtagtgtacattaccatataatgtaaaaagatctacatacaaacaatgcaaccaactatccaagtgttataccaactaaaacccccaataaaccttgaacagtgactactttggttaattcattatattaagatataaagtcataaagctgctagttattatattaatttggaaatattaggctattcttgggcaaccctgcaacgattttttctaacagggatattattgactaatagcagaggatgtaatagtcaactgagttgtattggtaccacttccattgtaagtcccaaagtattatatatttgataataatgctaatcataattggaaagtaacattctatatgtaaatgtaaaatttatttgccaactgaatataggcaatgatagtgtgtcactatagggaacacagatttttgagatcttgtcctctggaagctggtaacaattaaaaacaatcttaaggcagggaaaaaaaaaaaaaaaaaa

SEQ ID NO: 4 - DNA, 2323 bp, Homo sapiens
  source 1..2323: mol_type = genomic DNA
ttttttttttttttttttccctgccttaagattgtttttaattgttaccagcttccagaggacaagatctcaaaaatctgtgttccctatagtgacacactatcattgcctatattcagttggcaaataaattttacatttacatatagaatgttactttccaattatgattagcattattatcaaatatataatactttgggacttacaatggaagtggtaccaatacaactcagttgactattacatcctctgctattagtcaataatatccctgttagaaaaaatcgttgcagggttgcccaagaatagcctaatatttccaaattaatataataactagcagctttatgactttatatcttaatataatgaattaaccaaagtagtcactgttcaaggtttattgggggttttagttggtataacacttggatagttggttgcattgtttgtatgtagatctttttacattatatggtaatgtacactactgatatagttcacaaaataagatcctttggaagaattatgcacaagacatgatattggatttatacactggatcccaggatgtgactcactgggaaaaaatgttggactaggcatgttcagtgaaggagccaggaagttatataacacacggtaaacatccacctggctcaaggggcaaatgcagtacgtacagcattggcagtggtgcgtcagaggtggcagaactatttcacactaaccagttgaagactacacaagattaataccatccagcatcaggatatagctgtggattttacaaaccattcttatttctaacttcaggagttgatgtttttcccagtccatcttaaaatattactgctttaatcacagatcagataaaaaggacaacatgcacaacctccacctagaatcctgttgtagcctagacagtgaaatgatatgacatcagaagactttaaaattgcagctccttttggatcccccaaagtgtatctgcactcttcttcaaacgggcctcttcctcagaagtcagagtcaccttcacaaggtctgagattccattctgtcccaaaatgcaaggaacactaaggaagacatcatcctttattccgtaaagacccttaatcatggtggaaactgggtgcacccgcctaagattcttcattatactctctgccaaatctgctacagagagtccaatagcccaggatgtgtagcctttgagtttgatcacctcataagcactctcaaccacctgcttgtgaacctctttccactgttccttatctttatcagtccctaaatctgggtgcagagtcttcagagagacaccagcaacattcattccactccatacaggcacactggaatctccatgttccccaaggacccacccatgacagcttaatgggtgaactcccagcctttcccccattaggtaacggaatcgggctgaatccagattgcaaccgcttccaataacacggtttttgggaaaaccacttatcttccaagccacgtaggtcaagatatccactggatttgaaacaataagcaacttgcagttcgggctgtattttacaacattaggaatgatgaatttaaagatgttcacgttacgctggaccaaattaagacggctttctccctcttgctgacgtgccccagccgtgataatgaccagcttggagtttgcagttacattatagtctttgccagagacaatctttggtgttctaaggaaaaggctgccatgttggagatccatcatctctcccttcaatttgtcttcgatgacatcaacaagagcaagttcatctgccaagtccttcattaagatactgatggcacaggccatgccaacagcaccaaccccaacaactgtaatcttattctggggggtctgttcttcctttagaagattataaatcagctgatcctttagagttgccatattggacttggaaccaaaaggaatcttagcgtggaaaaggaatatcgacgtttgggtgtaagtatagcctcctgagggttcacccatcgcggtttattaaccccaagtggggctggcctttcctcagacaagatcactctgagctactccggctcctacagcaaggacacagccaggcttctcaagtaaacaccagagatacgtgcagaaaagccattaactgccacaaagctcaagcccaaggcacaggagcctgcggtgatccgcgcgcatgcgcgctttgtggctctccttcccgctcggaaaggtgggcggaaatcagactaattgctgggtcctccgaacgcccggcttttacgccccgcccaa

SEQ ID NO: 5 - DNA, 1957 bp, Homo sapiens
  source 1..1957: mol_type = genomic DNA
gtctgccggtcggttgtctggctgcgcgcgccacccgggcctctccagtgccccgcctggctcggcatccacccccagcccgactcacacgtgggttcccgcacgtccgccggccccccccgctgacgtcagcatagctgttccacttaaggcccctcccgcgcccagctcagagtgctgcagccgctgccgccgattccggatctcattgccacgcgcccccgacgaccgcccgacgtgcattcccgattccttttggttccaagtccaatatggcaactctaaaggatcagctgatttataatcttctaaaggaagaacagaccccccagaataagattacagttgttggggttggtgctgttggcatggcctgtgccatcagtatcttaatgaaggacttggcagatgaacttgctcttgttgatgtcatcgaagacaaattgaagggagagatgatggatctccaacatggcagccttttccttagaacaccaaagattgtctctggcaaagactataatgtaactgcaaactccaagctggtcattatcacggctggggcacgtcagcaagagggagaaagccgtcttaatttggtccagcgtaacgtgaacatctttaaattcatcattcctaatgttgtaaaatacagcccgaactgcaagttgcttattgtttcaaatccagtggatatcttgacctacgtggcttggaagataagtggttttcccaaaaaccgtgttattggaagcggttgcaatctggattcagcccgattccgttacctaatgggggaaaggctgggagttcacccattaagctgtcatgggtgggtccttggggaacatggagattccagtgtgcctgtatggagtggaatgaatgttgctggtgtctctctgaagactctgcacccagatttagggactgataaagataaggaacagtggaaagagtgcagatacactttgggggatccaaaaggagctgcaattttaaagtcttctgatgtcatatcatttcactgtctaggctacaacaggattctaggtggaggttgtgcatgttgtcctttttatctgatctgtgattaaagcagtaatattttaagatggactgggaaaaacatcaactcctgaagttagaaataagaatggtttgtaaaatccacagctatatcctgatgctggatggtattaatcttgtgtagtcttcaactggttagtgtgaaatagttctgccacctctgacgcaccactgccaatgctgtacgtactgcatttgccccttgagccaggtggatgtttaccgtgtgttatataacttcctggctccttcactgaacatgcctagtccaacattttttcccagtgagtcacatcctgggatccagtgtataaatccaatatcatgtcttgtgcataattcttccaaaggatcttattttgtgaactatatcagtagtgtacattaccatataatgtaaaaagatctacatacaaacaatgcaaccaactatccaagtgttataccaactaaaacccccaataaaccttgaacagtgactactttggttaattcattatattaagatataaagtcataaagctgctagttattatattaatttggaaatattaggctattcttgggcaaccctgcaacgattttttctaacagggatattattgactaatagcagaggatgtaatagtcaactgagttgtattggtaccacttccattgtaagtcccaaagtattatatatttgataataatgctaatcataattggaaagtaacattctatatgtaaatgtaaaatttatttgccaactgaatataggcaatgatagtgtgtcactatagggaacacagatttttgagatcttgtcctctggaagctggtaacaattaaaaacaatcttaaggcagggaaaaaaaaaaaaaaaaaa

SEQ ID NO: 6 - DNA, 1957 bp, Homo sapiens
  source 1..1957: mol_type = genomic DNA
ttttttttttttttttttccctgccttaagattgtttttaattgttaccagcttccagaggacaagatctcaaaaatctgtgttccctatagtgacacactatcattgcctatattcagttggcaaataaattttacatttacatatagaatgttactttccaattatgattagcattattatcaaatatataatactttgggacttacaatggaagtggtaccaatacaactcagttgactattacatcctctgctattagtcaataatatccctgttagaaaaaatcgttgcagggttgcccaagaatagcctaatatttccaaattaatataataactagcagctttatgactttatatcttaatataatgaattaaccaaagtagtcactgttcaaggtttattgggggttttagttggtataacacttggatagttggttgcattgtttgtatgtagatctttttacattatatggtaatgtacactactgatatagttcacaaaataagatcctttggaagaattatgcacaagacatgatattggatttatacactggatcccaggatgtgactcactgggaaaaaatgttggactaggcatgttcagtgaaggagccaggaagttatataacacacggtaaacatccacctggctcaaggggcaaatgcagtacgtacagcattggcagtggtgcgtcagaggtggcagaactatttcacactaaccagttgaagactacacaagattaataccatccagcatcaggatatagctgtggattttacaaaccattcttatttctaacttcaggagttgatgtttttcccagtccatcttaaaatattactgctttaatcacagatcagataaaaaggacaacatgcacaacctccacctagaatcctgttgtagcctagacagtgaaatgatatgacatcagaagactttaaaattgcagctccttttggatcccccaaagtgtatctgcactctttccactgttccttatctttatcagtccctaaatctgggtgcagagtcttcagagagacaccagcaacattcattccactccatacaggcacactggaatctccatgttccccaaggacccacccatgacagcttaatgggtgaactcccagcctttcccccattaggtaacggaatcgggctgaatccagattgcaaccgcttccaataacacggtttttgggaaaaccacttatcttccaagccacgtaggtcaagatatccactggatttgaaacaataagcaacttgcagttcgggctgtattttacaacattaggaatgatgaatttaaagatgttcacgttacgctggaccaaattaagacggctttctccctcttgctgacgtgccccagccgtgataatgaccagcttggagtttgcagttacattatagtctttgccagagacaatctttggtgttctaaggaaaaggctgccatgttggagatccatcatctctcccttcaatttgtcttcgatgacatcaacaagagcaagttcatctgccaagtccttcattaagatactgatggcacaggccatgccaacagcaccaaccccaacaactgtaatcttattctggggggtctgttcttcctttagaagattataaatcagctgatcctttagagttgccatattggacttggaaccaaaaggaatcgggaatgcacgtcgggcggtcgtcgggggcgcgtggcaatgagatccggaatcggcggcagcggctgcagcactctgagctgggcgcgggaggggccttaagtggaacagctatgctgacgtcagcggggggggccggcggacgtgcgggaacccacgtgtgagtcgggctgggggtggatgccgagccaggcggggcactggagaggcccgggtggcgcgcgcagccagacaaccgaccggcagac

SEQ ID NO: 7 - DNA, 2102 bp, Homo sapiens
  source 1..2102: mol_type = genomic DNA
gtctgccggtcggttgtctggctgcgcgcgccacccgggcctctccagtgccccgcctggctcggcatccacccccagcccgactcacacgtgggttcccgcacgtccgccggccccccccgctgacgtcagcatagctgttccacttaaggcccctcccgcgcccagctcagagtgctgcagccgctgccgccgattccggatctcattgccacgcgcccccgacgaccgcccgacgtgcattcccgattccttttggttccaagtccaatatggcaactctaaaggatcagctgatttataatcttctaaaggaagaacagaccccccagaataagattacagttgttggggttggtgctgttggcatggcctgtgccatcagtatcttaatgaaggacttggcagatgaacttgctcttgttgatgtcatcgaagacaaattgaagggagagatgatggatctccaacatggcagccttttccttagaacaccaaagattgtctctggcaaagactataatgtaactgcaaactccaagctggtcattatcacggctggggcacgtcagcaagagggagaaagccgtcttaatttggtccagcgtaacgtgaacatctttaaattcatcattcctaatgttgtaaaatacagcccgaactgcaagttgcttattgtttcaaatccagtggatatcttgacctacgtggcttggaagataagtggttttcccaaaaaccgtgttattggaagcggttgcaatctggattcagcccgattccgttacctaatgggggaaaggctgggagttcacccattaagctgtcatgggtgggtccttggggaacatggagattccagtgtgcctgtatggagtggaatgaatgttgctggtgtctctctgaagactctgcacccagatttagggactgataaagataaggaacagtggaaagaggttcacaagcaggtggttgagagggtctttacggaataaaggatgatgtcttccttagtgttccttgcattttgggacagaatggaatctcagaccttgtgaaggtgactctgacttctgaggaagaggcccgtttgaagaagagtgcagatacactttgggggatccaaaaggagctgcaattttaaagtcttctgatgtcatatcatttcactgtctaggctacaacaggattctaggtggaggttgtgcatgttgtcctttttatctgatctgtgattaaagcagtaatattttaagatggactgggaaaaacatcaactcctgaagttagaaataagaatggtttgtaaaatccacagctatatcctgatgctggatggtattaatcttgtgtagtcttcaactggttagtgtgaaatagttctgccacctctgacgcaccactgccaatgctgtacgtactgcatttgccccttgagccaggtggatgtttaccgtgtgttatataacttcctggctccttcactgaacatgcctagtccaacattttttcccagtgagtcacatcctgggatccagtgtataaatccaatatcatgtcttgtgcataattcttccaaaggatcttattttgtgaactatatcagtagtgtacattaccatataatgtaaaaagatctacatacaaacaatgcaaccaactatccaagtgttataccaactaaaacccccaataaaccttgaacagtgactactttggttaattcattatattaagatataaagtcataaagctgctagttattatattaatttggaaatattaggctattcttgggcaaccctgcaacgattttttctaacagggatattattgactaatagcagaggatgtaatagtcaactgagttgtattggtaccacttccattgtaagtcccaaagtattatatatttgataataatgctaatcataattggaaagtaacattctatatgtaaatgtaaaatttatttgccaactgaatataggcaatgatagtgtgtcactatagggaacacagatttttgagatcttgtcctctggaagctggtaacaattaaaaacaatcttaaggcagggaaaaaaaaaaaaaaaaaa

SEQ ID NO: 8 - DNA, 2102 bp, Homo sapiens
  source 1..2102: mol_type = genomic DNA
ttttttttttttttttttccctgccttaagattgtttttaattgttaccagcttccagaggacaagatctcaaaaatctgtgttccctatagtgacacactatcattgcctatattcagttggcaaataaattttacatttacatatagaatgttactttccaattatgattagcattattatcaaatatataatactttgggacttacaatggaagtggtaccaatacaactcagttgactattacatcctctgctattagtcaataatatccctgttagaaaaaatcgttgcagggttgcccaagaatagcctaatatttccaaattaatataataactagcagctttatgactttatatcttaatataatgaattaaccaaagtagtcactgttcaaggtttattgggggttttagttggtataacacttggatagttggttgcattgtttgtatgtagatctttttacattatatggtaatgtacactactgatatagttcacaaaataagatcctttggaagaattatgcacaagacatgatattggatttatacactggatcccaggatgtgactcactgggaaaaaatgttggactaggcatgttcagtgaaggagccaggaagttatataacacacggtaaacatccacctggctcaaggggcaaatgcagtacgtacagcattggcagtggtgcgtcagaggtggcagaactatttcacactaaccagttgaagactacacaagattaataccatccagcatcaggatatagctgtggattttacaaaccattcttatttctaacttcaggagttgatgtttttcccagtccatcttaaaatattactgctttaatcacagatcagataaaaaggacaacatgcacaacctccacctagaatcctgttgtagcctagacagtgaaatgatatgacatcagaagactttaaaattgcagctccttttggatcccccaaagtgtatctgcactcttcttcaaacgggcctcttcctcagaagtcagagtcaccttcacaaggtctgagattccattctgtcccaaaatgcaaggaacactaaggaagacatcatcctttattccgtaaagaccctctcaaccacctgcttgtgaacctctttccactgttccttatctttatcagtccctaaatctgggtgcagagtcttcagagagacaccagcaacattcattccactccatacaggcacactggaatctccatgttccccaaggacccacccatgacagcttaatgggtgaactcccagcctttcccccattaggtaacggaatcgggctgaatccagattgcaaccgcttccaataacacggtttttgggaaaaccacttatcttccaagccacgtaggtcaagatatccactggatttgaaacaataagcaacttgcagttcgggctgtattttacaacattaggaatgatgaatttaaagatgttcacgttacgctggaccaaattaagacggctttctccctcttgctgacgtgccccagccgtgataatgaccagcttggagtttgcagttacattatagtctttgccagagacaatctttggtgttctaaggaaaaggctgccatgttggagatccatcatctctcccttcaatttgtcttcgatgacatcaacaagagcaagttcatctgccaagtccttcattaagatactgatggcacaggccatgccaacagcaccaaccccaacaactgtaatcttattctggggggtctgttcttcctttagaagattataaatcagctgatcctttagagttgccatattggacttggaaccaaaaggaatcgggaatgcacgtcgggcggtcgtcgggggcgcgtggcaatgagatccggaatcggcggcagcggctgcagcactctgagctgggcgcgggaggggccttaagtggaacagctatgctgacgtcagcggggggggccggcggacgtgcgggaacccacgtgtgagtcgggctgggggtggatgccgagccaggcggggcactggagaggcccgggtggcgcgcgcagccagacaaccgaccggcagac

SEQ ID NO: 9 - DNA, 2226 bp, Homo sapiens
  source 1..2226: mol_type = genomic DNA
gtctgccggtcggttgtctggctgcgcgcgccacccgggcctctccagtgccccgcctggctcggcatccacccccagcccgactcacacgtgggttcccgcacgtccgccggccccccccgctgacgtcagcatagctgttccacttaaggcccctcccgcgcccagctcagagtgctgcagccgctgccgccgattccggatctcattgccacgcgcccccgacgaccgcccgacgtgcattcccgattccttttggttccaagtccaatatggcaactctaaaggatcagctgatttataatcttctaaaggaagaacagaccccccagaataagattacagttgttggggttggtgctgttggcatggcctgtgccatcagtatcttaatgaaggacttggcagatgaacttgctcttgttgatgtcatcgaagacaaattgaagggagagatgatggatctccaacatggcagccttttccttagaacaccaaagattgtctctggcaaagactataatgtaactgcaaactccaagctggtcattatcacggctggggcacgtcagcaagagggagaaagccgtcttaatttggtccagcgtaacgtgaacatctttaaattcatcattcctaatgttgtaaaatacagcccgaactgcaagttgcttattgtttcaaatccagtggatatcttgacctacgtggcttggaagataagtggttttcccaaaaaccgtgttattggaagcggttgcaatctggattcagcccgattccgttacctaatgggggaaaggctgggagttcacccattaagctgtcatgggtgggtccttggggaacatggagattccagtgtgcctgtatggagtggaatgaatgttgctggtgtctctctgaagactctgcacccagatttagggactgataaagataaggaacagtggaaagaggttcacaagcaggtggttgagagtgcttatgaggtgatcaaactcaaaggctacacatcctgggctattggactctctgtagcagatttggcagagagtataatgaagaatcttaggcgggtgcacccagtttccaccatgattaagggtctttacggaataaaggatgatgtcttccttagtgttccttgcattttgggacagaatggaatctcagaccttgtgaaggtgactctgacttctgaggaagaggcccgtttgaagaagagtgcagatacactttgggggatccaaaaggagctgcaattttaaagtcttctgatgtcatatcatttcactgtctaggctacaacaggattctaggtggaggttgtgcatgttgtcctttttatctgatctgtgattaaagcagtaatattttaagatggactgggaaaaacatcaactcctgaagttagaaataagaatggtttgtaaaatccacagctatatcctgatgctggatggtattaatcttgtgtagtcttcaactggttagtgtgaaatagttctgccacctctgacgcaccactgccaatgctgtacgtactgcatttgccccttgagccaggtggatgtttaccgtgtgttatataacttcctggctccttcactgaacatgcctagtccaacattttttcccagtgagtcacatcctgggatccagtgtataaatccaatatcatgtcttgtgcataattcttccaaaggatcttattttgtgaactatatcagtagtgtacattaccatataatgtaaaaagatctacatacaaacaatgcaaccaactatccaagtgttataccaactaaaacccccaataaaccttgaacagtgactactttggttaattcattatattaagatataaagtcataaagctgctagttattatattaatttggaaatattaggctattcttgggcaaccctgcaacgattttttctaacagggatattattgactaatagcagaggatgtaatagtcaactgagttgtattggtaccacttccattgtaagtcccaaagtattatatatttgataataatgctaatcataattggaaagtaacattctatatgtaaatgtaaaatttatttgccaactgaatataggcaatgatagtgtgtcactatagggaacacagatttttgagatcttgtcctctggaagctggtaacaattaaaaacaatcttaaggcagggaaaaaaaaaaaaaaaaaa

SEQ ID NO: 10 - DNA, 2226 bp, Homo sapiens
  source 1..2226: mol_type = genomic DNA
ttttttttttttttttttccctgccttaagattgtttttaattgttaccagcttccagaggacaagatctcaaaaatctgtgttccctatagtgacacactatcattgcctatattcagttggcaaataaattttacatttacatatagaatgttactttccaattatgattagcattattatcaaatatataatactttgggacttacaatggaagtggtaccaatacaactcagttgactattacatcctctgctattagtcaataatatccctgttagaaaaaatcgttgcagggttgcccaagaatagcctaatatttccaaattaatataataactagcagctttatgactttatatcttaatataatgaattaaccaaagtagtcactgttcaaggtttattgggggttttagttggtataacacttggatagttggttgcattgtttgtatgtagatctttttacattatatggtaatgtacactactgatatagttcacaaaataagatcctttggaagaattatgcacaagacatgatattggatttatacactggatcccaggatgtgactcactgggaaaaaatgttggactaggcatgttcagtgaaggagccaggaagttatataacacacggtaaacatccacctggctcaaggggcaaatgcagtacgtacagcattggcagtggtgcgtcagaggtggcagaactatttcacactaaccagttgaagactacacaagattaataccatccagcatcaggatatagctgtggattttacaaaccattcttatttctaacttcaggagttgatgtttttcccagtccatcttaaaatattactgctttaatcacagatcagataaaaaggacaacatgcacaacctccacctagaatcctgttgtagcctagacagtgaaatgatatgacatcagaagactttaaaattgcagctccttttggatcccccaaagtgtatctgcactcttcttcaaacgggcctcttcctcagaagtcagagtcaccttcacaaggtctgagattccattctgtcccaaaatgcaaggaacactaaggaagacatcatcctttattccgtaaagacccttaatcatggtggaaactgggtgcacccgcctaagattcttcattatactctctgccaaatctgctacagagagtccaatagcccaggatgtgtagcctttgagtttgatcacctcataagcactctcaaccacctgcttgtgaacctctttccactgttccttatctttatcagtccctaaatctgggtgcagagtcttcagagagacaccagcaacattcattccactccatacaggcacactggaatctccatgttccccaaggacccacccatgacagcttaatgggtgaactcccagcctttcccccattaggtaacggaatcgggctgaatccagattgcaaccgcttccaataacacggtttttgggaaaaccacttatcttccaagccacgtaggtcaagatatccactggatttgaaacaataagcaacttgcagttcgggctgtattttacaacattaggaatgatgaatttaaagatgttcacgttacgctggaccaaattaagacggctttctccctcttgctgacgtgccccagccgtgataatgaccagcttggagtttgcagttacattatagtctttgccagagacaatctttggtgttctaaggaaaaggctgccatgttggagatccatcatctctcccttcaatttgtcttcgatgacatcaacaagagcaagttcatctgccaagtccttcattaagatactgatggcacaggccatgccaacagcaccaaccccaacaactgtaatcttattctggggggtctgttcttcctttagaagattataaatcagctgatcctttagagttgccatattggacttggaaccaaaaggaatcgggaatgcacgtcgggcggtcgtcgggggcgcgtggcaatgagatccggaatcggcggcagcggctgcagcactctgagctgggcgcgggaggggccttaagtggaacagctatgctgacgtcagcggggggggccggcggacgtgcgggaacccacgtgtgagtcgggctgggggtggatgccgagccaggcggggcactggagaggcccgggtggcgcgcgcagccagacaaccgaccggcagac

SEQ ID NO: 11 - DNA, 1854 bp, Mus musculus
  source 1..1854: mol_type = genomic DNA
gggttcttgcgggggtgggggggttaggaaggaagcttgcgcgtgcgcaggcttaagcacgttgctatgccttggggtcgcaccttgtggccgttattggcgccctctgctcttgatttttggtacttcctggagcaacttggcgctctacttgctgtagggctctgggtgatgggagaagagcgggagggcagctttctaaccatataagaggagataccatccccttttggggttcatcaagatgagtaagtcctcaggcggctacacgtacacggagacctcggtattatttttccatttcaaggtctcaaaagattcaaagtccaagatggcaaccctcaaggaccagctgattgtgaatcttcttaaggaagagcaggctccccagaacaagattacagttgttggggttggtgctgttggcatggcttgtgccatcagtatcttaatgaaggacttggcggatgagcttgcccttgttgacgtcatggaagacaaactcaagggcgagatgatggatctccagcatggcagcctcttccttaaaacaccaaaaattgtctccagcaaagactactgtgtaactgcgaactccaagctggtcattatcaccgcgggggcccgtcagcaagagggggagagccggctcaacctggtccagcgaaacgtgaacatcttcaagttcatcattcccaacattgtcaagtacagtccacactgcaagctgctgatcgtctccaatccagtggatatcttgacctacgtggcttggaaaatcagtggctttcccaaaaaccgagtaattggaagtggttgcaatctggattcagcgcggttccgttacctgatgggagagaggctgggggttcacgcgctgagctgtcacggctgggtcctgggagaacatggcgactccagtgtgcctgtgtggagtggtgtgaatgttgccggcgtctccctgaagtctcttaacccagaactgggcactgacgcagacaaggagcagtggaaggaggttcacaagcaggtggtggacagtgcctacgaggtgatcaagctgaaaggttacacatcctgggccattggcctctctgtggcagacttggctgagagcataatgaagaaccttaggcgggtgcatcccatttccaccatgattaagggtctctatggaatcaatgaggatgtcttcctcagtgtcccatgtatcctgggacaaaatggaatctcggatgttgtgaaggtgacactgactcctgaggaagaggcccgcctgaagaagagcgcagacaccctctggggaatccagaaggagctgcagttctaaagtcttccccgtgtcctagcacttcactgtccaggctgcagcagggcttctaggcagaccacacccttctcgtctgagctgtggttagtacagtggtgttgagatggtgtggggaaacatctcactccccacagctctgccctgctgccaagtggtacttgtgtagtggtgacctggttagtgtgacagtcccactgtctctgagacacactgccaactgcaggcttcgattacccctgtgagcctgctgcattgctgccctgcaccaaacatgcctaggccgacgagttcccagttaagtcgtataacctggctccagtgtgtacgtccatgatgcatatcttgtgcataaatgttgtacaggatattttatatattatatgtgtctgtagtgtgcattgcaatattatgtgagatgtaagatctgcatatggatgatggaaccaaccacccaagtgtcatgccaaataaaaccttgaacagtgaaaaaaaaaaaaaaaaaaaaaaaaaaaaaaaaaaaaaaa

SEQ ID NO: 12 - DNA, 1854 bp, Mus musculus
  source 1..1854: mol_type = genomic DNA
tttttttttttttttttttttttttttttttttttttttcactgttcaaggttttatttggcatgacacttgggtggttggttccatcatccatatgcagatcttacatctcacataatattgcaatgcacactacagacacatataatatataaaatatcctgtacaacatttatgcacaagatatgcatcatggacgtacacactggagccaggttatacgacttaactgggaactcgtcggcctaggcatgtttggtgcagggcagcaatgcagcaggctcacaggggtaatcgaagcctgcagttggcagtgtgtctcagagacagtgggactgtcacactaaccaggtcaccactacacaagtaccacttggcagcagggcagagctgtggggagtgagatgtttccccacaccatctcaacaccactgtactaaccacagctcagacgagaagggtgtggtctgcctagaagccctgctgcagcctggacagtgaagtgctaggacacggggaagactttagaactgcagctccttctggattccccagagggtgtctgcgctcttcttcaggcgggcctcttcctcaggagtcagtgtcaccttcacaacatccgagattccattttgtcccaggatacatgggacactgaggaagacatcctcattgattccatagagacccttaatcatggtggaaatgggatgcacccgcctaaggttcttcattatgctctcagccaagtctgccacagagaggccaatggcccaggatgtgtaacctttcagcttgatcacctcgtaggcactgtccaccacctgcttgtgaacctccttccactgctccttgtctgcgtcagtgcccagttctgggttaagagacttcagggagacgccggcaacattcacaccactccacacaggcacactggagtcgccatgttctcccaggacccagccgtgacagctcagcgcgtgaacccccagcctctctcccatcaggtaacggaaccgcgctgaatccagattgcaaccacttccaattactcggtttttgggaaagccactgattttccaagccacgtaggtcaagatatccactggattggagacgatcagcagcttgcagtgtggactgtacttgacaatgttgggaatgatgaacttgaagatgttcacgtttcgctggaccaggttgagccggctctccccctcttgctgacgggcccccgcggtgataatgaccagcttggagttcgcagttacacagtagtctttgctggagacaatttttggtgttttaaggaagaggctgccatgctggagatccatcatctcgcccttgagtttgtcttccatgacgtcaacaagggcaagctcatccgccaagtccttcattaagatactgatggcacaagccatgccaacagcaccaaccccaacaactgtaatcttgttctggggagcctgctcttccttaagaagattcacaatcagctggtccttgagggttgccatcttggactttgaatcttttgagaccttgaaatggaaaaataataccgaggtctccgtgtacgtgtagccgcctgaggacttactcatcttgatgaaccccaaaaggggatggtatctcctcttatatggttagaaagctgccctcccgctcttctcccatcacccagagccctacagcaagtagagcgccaagttgctccaggaagtaccaaaaatcaagagcagagggcgccaataacggccacaaggtgcgaccccaaggcatagcaacgtgcttaagcctgcgcacgcgcaagcttccttcctaacccccccacccccgcaagaaccc

SEQ ID NO: 13 - DNA, 1661 bp, Mus musculus
  source 1..1661: mol_type = genomic DNA
ggagcttccatttaaggccccgcccgcgtgctgctctgcgtgctggagccactgtcgccgagctcgggccacgctgcttctcctcgccagtcgcccccccatcgtgcactagcggtctcaaaagattcaaagtccaagatggcaaccctcaaggaccagctgattgtgaatcttcttaaggaagagcaggctccccagaacaagattacagttgttggggttggtgctgttggcatggcttgtgccatcagtatcttaatgaaggacttggcggatgagcttgcccttgttgacgtcatggaagacaaactcaagggcgagatgatggatctccagcatggcagcctcttccttaaaacaccaaaaattgtctccagcaaagactactgtgtaactgcgaactccaagctggtcattatcaccgcgggggcccgtcagcaagagggggagagccggctcaacctggtccagcgaaacgtgaacatcttcaagttcatcattcccaacattgtcaagtacagtccacactgcaagctgctgatcgtctccaatccagtggatatcttgacctacgtggcttggaaaatcagtggctttcccaaaaaccgagtaattggaagtggttgcaatctggattcagcgcggttccgttacctgatgggagagaggctgggggttcacgcgctgagctgtcacggctgggtcctgggagaacatggcgactccagtgtgcctgtgtggagtggtgtgaatgttgccggcgtctccctgaagtctcttaacccagaactgggcactgacgcagacaaggagcagtggaaggaggttcacaagcaggtggtggacagtgcctacgaggtgatcaagctgaaaggttacacatcctgggccattggcctctctgtggcagacttggctgagagcataatgaagaaccttaggcgggtgcatcccatttccaccatgattaagggtctctatggaatcaatgaggatgtcttcctcagtgtcccatgtatcctgggacaaaatggaatctcggatgttgtgaaggtgacactgactcctgaggaagaggcccgcctgaagaagagcgcagacaccctctggggaatccagaaggagctgcagttctaaagtcttccccgtgtcctagcacttcactgtccaggctgcagcagggcttctaggcagaccacacccttctcgtctgagctgtggttagtacagtggtgttgagatggtgtggggaaacatctcactccccacagctctgccctgctgccaagtggtacttgtgtagtggtgacctggttagtgtgacagtcccactgtctctgagacacactgccaactgcaggcttcgattacccctgtgagcctgctgcattgctgccctgcaccaaacatgcctaggccgacgagttcccagttaagtcgtataacctggctccagtgtgtacgtccatgatgcatatcttgtgcataaatgttgtacaggatattttatatattatatgtgtctgtagtgtgcattgcaatattatgtgagatgtaagatctgcatatggatgatggaaccaaccacccaagtgtcatgccaaataaaaccttgaacagtgaaaaaaaaaaaaaaaaaaaaaaaaaaaaaaaaaaaaaaa

SEQ ID NO: 14 - DNA, 1661 bp, Mus musculus
  source 1..1661: mol_type = genomic DNA
tttttttttttttttttttttttttttttttttttttttcactgttcaaggttttatttggcatgacacttgggtggttggttccatcatccatatgcagatcttacatctcacataatattgcaatgcacactacagacacatataatatataaaatatcctgtacaacatttatgcacaagatatgcatcatggacgtacacactggagccaggttatacgacttaactgggaactcgtcggcctaggcatgtttggtgcagggcagcaatgcagcaggctcacaggggtaatcgaagcctgcagttggcagtgtgtctcagagacagtgggactgtcacactaaccaggtcaccactacacaagtaccacttggcagcagggcagagctgtggggagtgagatgtttccccacaccatctcaacaccactgtactaaccacagctcagacgagaagggtgtggtctgcctagaagccctgctgcagcctggacagtgaagtgctaggacacggggaagactttagaactgcagctccttctggattccccagagggtgtctgcgctcttcttcaggcgggcctcttcctcaggagtcagtgtcaccttcacaacatccgagattccattttgtcccaggatacatgggacactgaggaagacatcctcattgattccatagagacccttaatcatggtggaaatgggatgcacccgcctaaggttcttcattatgctctcagccaagtctgccacagagaggccaatggcccaggatgtgtaacctttcagcttgatcacctcgtaggcactgtccaccacctgcttgtgaacctccttccactgctccttgtctgcgtcagtgcccagttctgggttaagagacttcagggagacgccggcaacattcacaccactccacacaggcacactggagtcgccatgttctcccaggacccagccgtgacagctcagcgcgtgaacccccagcctctctcccatcaggtaacggaaccgcgctgaatccagattgcaaccacttccaattactcggtttttgggaaagccactgattttccaagccacgtaggtcaagatatccactggattggagacgatcagcagcttgcagtgtggactgtacttgacaatgttgggaatgatgaacttgaagatgttcacgtttcgctggaccaggttgagccggctctccccctcttgctgacgggcccccgcggtgataatgaccagcttggagttcgcagttacacagtagtctttgctggagacaatttttggtgttttaaggaagaggctgccatgctggagatccatcatctcgcccttgagtttgtcttccatgacgtcaacaagggcaagctcatccgccaagtccttcattaagatactgatggcacaagccatgccaacagcaccaaccccaacaactgtaatcttgttctggggagcctgctcttccttaagaagattcacaatcagctggtccttgagggttgccatcttggactttgaatcttttgagaccgctagtgcacgatgggggggcgactggcgaggagaagcagcgtggcccgagctcggcgacagtggctccagcacgcagagcagcacgcgggcggggccttaaatggaagctcc

SEQ ID NO: 15 - DNA, 1609 bp, Rattus norvegicus
  source 1..1609: mol_type = genomic DNA
gtgtgctggagccactgtcgccgatctcgcgcacgctactgctgctgctcgcccgtcgtcccccatcgtgcactaagcggtcccaaaagattcaaagtccaagatggcagccctcaaggaccagctgattgtgaatcttcttaaggaagaacaggtcccccagaacaagattacagttgttggggttggtgctgttggcatggcttgtgccatcagtatcttaatgaaggacttggctgatgagcttgcccttgttgatgtcatagaagataagctaaagggagagatgatggatcttcagcatggcagccttttccttaagacaccaaaaattgtctccagcaaagattatagtgtgactgcaaactccaagctggtcattatcaccgcgggggcccgtcagcaagagggagagagccggctcaatttggtccagcgaaacgtgaacatcttcaagttcatcattccaaatgttgtgaaatacagtccacagtgcaaactgctcatcgtctcaaacccagtggatatcttgacctacgtggcttggaagatcagcggcttccccaaaaacagagttattggaagtggttgcaatctggattcggctcggttccgttacctgatgggagaaaggctgggagttcatccactgagctgtcacgggtgggtcctgggagagcatggcgactccagtgtgcctgtgtggagtggtgtgaacgtcgccggcgtctccctgaagtctctgaacccgcagctgggcacggatgcagacaaggagcagtggaaggatgtgcacaagcaggtggttgacagtgcatacgaagtgatcaagctgaaaggttacacatcctgggccattggcctctccgtggcagacttggccgagagcataatgaagaaccttaggcgggtgcatcccatttccaccatgattaagggtctctatggaatcaaggaggatgtcttcctcagcgtcccatgtatcctgggacaaaatggaatctcagatgttgtgaaggtgacactgactcctgacgaggaggcccgcctgaagaagagtgcagataccctctggggaatccagaaggagctgcagttctaaagtcttcccagtgtcctagcacttcactgtccaggctgcagcagggtttctatggagaccacgcacttctcatctgagctgtggttagtccagttggtccagttgtgttgaggtggtctgggggaaatctcagttccacagctctaccctgctaagtggtacttgtgtagtggtaacctggttagtgtgacaatcccactgtctccaagacacactgccaactgcatgcaggctttgattaccctgtgagcctgctgcattgctgtgctacgcaccctcaccaaacatgcctaggccatgagttcccagttagttataagctggctccagtgtgtaagtccatcgtgtatatcttgtgcataaatgttctacaggatattttctgtattatatgtgtctgtagtgtacattgcaatattacgtgaaatgtaagatctgcatatggatgatggaaccaaccactcaagtgtcatgccaaggaaaacaccaaataaaccttgaacagtg

SEQ ID NO: 16 - DNA, 1609 bp, Rattus norvegicus
  source 1..1609: mol_type = genomic DNA
cactgttcaaggtttatttggtgttttccttggcatgacacttgagtggttggttccatcatccatatgcagatcttacatttcacgtaatattgcaatgtacactacagacacatataatacagaaaatatcctgtagaacatttatgcacaagatatacacgatggacttacacactggagccagcttataactaactgggaactcatggcctaggcatgtttggtgagggtgcgtagcacagcaatgcagcaggctcacagggtaatcaaagcctgcatgcagttggcagtgtgtcttggagacagtgggattgtcacactaaccaggttaccactacacaagtaccacttagcagggtagagctgtggaactgagatttcccccagaccacctcaacacaactggaccaactggactaaccacagctcagatgagaagtgcgtggtctccatagaaaccctgctgcagcctggacagtgaagtgctaggacactgggaagactttagaactgcagctccttctggattccccagagggtatctgcactcttcttcaggcgggcctcctcgtcaggagtcagtgtcaccttcacaacatctgagattccattttgtcccaggatacatgggacgctgaggaagacatcctccttgattccatagagacccttaatcatggtggaaatgggatgcacccgcctaaggttcttcattatgctctcggccaagtctgccacggagaggccaatggcccaggatgtgtaacctttcagcttgatcacttcgtatgcactgtcaaccacctgcttgtgcacatccttccactgctccttgtctgcatccgtgcccagctgcgggttcagagacttcagggagacgccggcgacgttcacaccactccacacaggcacactggagtcgccatgctctcccaggacccacccgtgacagctcagtggatgaactcccagcctttctcccatcaggtaacggaaccgagccgaatccagattgcaaccacttccaataactctgtttttggggaagccgctgatcttccaagccacgtaggtcaagatatccactgggtttgagacgatgagcagtttgcactgtggactgtatttcacaacatttggaatgatgaacttgaagatgttcacgtttcgctggaccaaattgagccggctctctccctcttgctgacgggcccccgcggtgataatgaccagcttggagtttgcagtcacactataatctttgctggagacaatttttggtgtcttaaggaaaaggctgccatgctgaagatccatcatctctccctttagcttatcttctatgacatcaacaagggcaagctcatcagccaagtccttcattaagatactgatggcacaagccatgccaacagcaccaaccccaacaactgtaatcttgttctgggggacctgttcttccttaagaagattcacaatcagctggtccttgagggctgccatcttggactttgaatcttttgggaccgcttagtgcacgatgggggacgacgggcgagcagcagcagtagcgtgcgcgagatcggcgacagtggctccagcacac

SEQ ID NO: 17 - DNA, 1919 bp, Macaca mulatta
  source 1..1919: mol_type = genomic DNA
gggcgtaaaagcagggcggtctgaagccgcagctattagtctgatttccgcccacctttccgagcgaggagaaccacaaagcgcgcatgcgcgcggatcaccgcccgcttcagtgccttgggctcgagctttgtggcagttagtggcttttctgcacatacctctggtttttacttgaagcctggctgtgtccttgctgtaggagcaggagtggctcaaagtgatcttgtctgaggaaaggccagccccacttggggttaataaaccgcgatgggtgagccctcaggaggctatacttacacccaaacgtcgatattccttttccacgctaagattccttttggttccaagtccaatatggcaactctcaaggatcagctgattcataatcttctaaaggaagaacagactccccagaataagattacagttgttggggttggtgctgttggcatggcctgtgccatcagtatcttaatgaaggacttggcagatgaacttgctcttgttgatgtcatcgaagacaaattgaagggagagatgatggatctccaacatggcagccttttccttagaacaccaaagattgtctctgggaaagactatagtgtaactgcaaactccaagctggtcattatcacggctggggcacgtcaacaagagggagaaagccgtcttaatttggtccagcgtaacgtgaacatctttaaattcatcgttcctaatgttgtaaaatacagcccgaactgcaagttgcttattgtttcaaatccagtggatatcttgacctacgtggcttggaagataagtggttttcccaaaaaccgtgttattggaagtggttgcaatctggattcagccagattccgttacctgatgggggaaagactgggagttcacccattaagctgtcatgggtgggtccttggggaacatggagattccagtgtgcctgtatggagtggaatgaatgttgctggtgtctccctgaagactctgcacccagatttagggactgataaagataaggaacagtggaaagaggttcacaagcaggtggttgagagtgcttatgaggtgatcaaactcaaaggctacacatcctgggccattggactctctgtagcagatttggcagagagtataatgaagaatcttaggcgagtgcacccagtttccaccatgattaagggtctctatggaataaaggatgatgtcttcctcagtgttccttgcattttgggacagaatggaatctcagaccttgtgaaggtgactctgactcctgaggaagaggcccgtttgaagaagagtgcagatacactttgggggatccaaaaagagctgcaattttaaagtcttctgatgtcatagcatttcactgtctaggctacaacaggattctagttggaggttgtacatgttgtcctttttatctgatctgtgattaaaacagtaatattttaagatggactgggaaaagcattaactcctgaagttagaaataggaatggtttgtgaaatccacagctatatcctgatgctagatggtattaatcttgtgtagtcctaaactggttagtgtgaaatagttctgacgcaccactgccaattctgtacatgctgcatttgccccttgagccaggtggatgtttactgtgtgttttataatttcctggctccttcactgaacatgcctagtccaacattttttcccagtcagtcacatcctgggatccagtgtataaatccaatatcgtatgtcttgtgcataattgttccaaaggagcttattttgtgaactatatatatcagtagtgtacattaccacataacataaaaagatctacatataaacaatacaaccaactatccaagtgttataccaactaaaaaccccaataaaccttgaacagtga

SEQ ID NO: 18 - DNA, 1919 bp, Macaca mulatta
  source 1..1919: mol_type = genomic DNA
tcactgttcaaggtttattggggtttttagttggtataacacttggatagttggttgtattgtttatatgtagatctttttatgttatgtggtaatgtacactactgatatatatagttcacaaaataagctcctttggaacaattatgcacaagacatacgatattggatttatacactggatcccaggatgtgactgactgggaaaaaatgttggactaggcatgttcagtgaaggagccaggaaattataaaacacacagtaaacatccacctggctcaaggggcaaatgcagcatgtacagaattggcagtggtgcgtcagaactatttcacactaaccagtttaggactacacaagattaataccatctagcatcaggatatagctgtggatttcacaaaccattcctatttctaacttcaggagttaatgcttttcccagtccatcttaaaatattactgttttaatcacagatcagataaaaaggacaacatgtacaacctccaactagaatcctgttgtagcctagacagtgaaatgctatgacatcagaagactttaaaattgcagctctttttggatcccccaaagtgtatctgcactcttcttcaaacgggcctcttcctcaggagtcagagtcaccttcacaaggtctgagattccattctgtcccaaaatgcaaggaacactgaggaagacatcatcctttattccatagagacccttaatcatggtggaaactgggtgcactcgcctaagattcttcattatactctctgccaaatctgctacagagagtccaatggcccaggatgtgtagcctttgagtttgatcacctcataagcactctcaaccacctgcttgtgaacctctttccactgttccttatctttatcagtccctaaatctgggtgcagagtcttcagggagacaccagcaacattcattccactccatacaggcacactggaatctccatgttccccaaggacccacccatgacagcttaatgggtgaactcccagtctttcccccatcaggtaacggaatctggctgaatccagattgcaaccacttccaataacacggtttttgggaaaaccacttatcttccaagccacgtaggtcaagatatccactggatttgaaacaataagcaacttgcagttcgggctgtattttacaacattaggaacgatgaatttaaagatgttcacgttacgctggaccaaattaagacggctttctccctcttgttgacgtgccccagccgtgataatgaccagcttggagtttgcagttacactatagtctttcccagagacaatctttggtgttctaaggaaaaggctgccatgttggagatccatcatctctcccttcaatttgtcttcgatgacatcaacaagagcaagttcatctgccaagtccttcattaagatactgatggcacaggccatgccaacagcaccaaccccaacaactgtaatcttattctggggagtctgttcttcctttagaagattatgaatcagctgatccttgagagttgccatattggacttggaaccaaaaggaatcttagcgtggaaaaggaatatcgacgtttgggtgtaagtatagcctcctgagggctcacccatcgcggtttattaaccccaagtggggctggcctttcctcagacaagatcactttgagccactcctgctcctacagcaaggacacagccaggcttcaagtaaaaaccagaggtatgtgcagaaaagccactaactgccacaaagctcgagcccaaggcactgaagcgggcggtgatccgcgcgcatgcgcgctttgtggttctcctcgctcggaaaggtgggcggaaatcagactaatagctgcggcttcagaccgccctgcttttacgccc

SEQ ID NO: 19 - DNA, 1918 bp, Macaca fascicularis
  source 1..1918: mol_type = genomic DNA
agtgccttgggctcgagctttgtggcagttagtggcttttctgcacatacctctggtttttacttgaagcctggctgtgtccttgctgtaggagcaggagtggctcaaagtgatcttgtctgaggaaaggccagccccacttggggttaataaaccgcgatgggtgagccctcaggaggctatacttacacccaaacgtcgatattccttttccacgctaagattccttttggttccaagtccaatatggcaactctcaaggatcagctgattcataatcttctaaaggaagaacagactccccagaataagattacagttgttggggttggtgctgttggcatggcctgtgccatcagtatcttaatgaaggacttggcagatgaacttgctcttgttgatgtcatcgaagacaaattgaagggagagatgatggatctccaacatggcagccttttccttagaacaccaaagattgtctctgggaaagactatagtgtaactgcaaactccaagctggtcattatcacggctggggcacgtcaacaagagggagaaagccgtcttaatttggtccagcgtaacgtgaacatctttaaattcatcgttcctaatgttgtaaaatacagcccgaactgcaagttgcttattgtttcaaatccagtggatatcttgacctacgtggcttggaagataagtggttttcccaaaaaccgtgttattggaagtggttgcaatctggattcagccagattccgttacctgatgggggaaagactgggagttcacccattaagctgtcatgggtgggtccttggggaacatggagattccagtgtgcctgtatggagtggaatgaatgttgctggtgtctccctgaagactctgcacccagatttagggactgataaagataaggaacagtggaaagaggttcacaagcaggtggttgagagtgcttatgaggtgatcaaactcaaaggctacacatcctgggccattggactctctgtagcagatttggcagagagtataatgaagaatcttaggcgagtgcacccagtttccaccatgattaagggtctctatggaataaaggatgatgtcttcctcagtgttccttgcattttgggacagaatggaatctcagaccttgtgaaggtgactctgactcctgaggaagaggcccgtttgaagaagagtgcagatacactttgggggatccaaaaagagctgcaattttaaagtcttctgatgtcatagcatttcactgtctaggctacaacaggattctagttggaggttgtgcatgttgtcctttttatctgatctgtgattaaaacagtaatattttaagatggactgggaaaagcattaactcctgaagttagaaataggaatggtttgtgaaatccacagctatatcctgatgctagatggtattaatcttgtgtagtcctaaactggttagtgtgaaatagttctgacgcaccactgccaattctgtacatgctgcatttgccccttgagccaggtggatgtttactgtgtgttttataatttcctggctccttcactgaacatgcctagtccaacattttttcccagtcagtcacatcctgggatccagtgtataaatccaatatcgtatgtcttgtgcataattgttccaaaggagcttattttgtgaactatatatatcagtagtgtacattaccacataacataaaaagatctacatataaacaatacaaccaactatccaagtgttataccaactaaaaaccccaataaaccttgaacagtgaaaaaaaaaaaaaaaaaaaaattaaaaaaaaataaaaaaaaaaaaaaaaaaaaaaaaaaaaaaaaaaaaaaaaaaaaaaaaaaaaaaaaaaaaaaaaaaaaaaaaaaaaaa

SEQ ID NO: 20 - DNA, 1918 bp, Macaca fascicularis
  source 1..1918: mol_type = genomic DNA
ttttttttttttttttttttttttttttttttttttttttttttttttttttttttttttttttttttttttttttttatttttttttaatttttttttttttttttttttcactgttcaaggtttattggggtttttagttggtataacacttggatagttggttgtattgtttatatgtagatctttttatgttatgtggtaatgtacactactgatatatatagttcacaaaataagctcctttggaacaattatgcacaagacatacgatattggatttatacactggatcccaggatgtgactgactgggaaaaaatgttggactaggcatgttcagtgaaggagccaggaaattataaaacacacagtaaacatccacctggctcaaggggcaaatgcagcatgtacagaattggcagtggtgcgtcagaactatttcacactaaccagtttaggactacacaagattaataccatctagcatcaggatatagctgtggatttcacaaaccattcctatttctaacttcaggagttaatgcttttcccagtccatcttaaaatattactgttttaatcacagatcagataaaaaggacaacatgcacaacctccaactagaatcctgttgtagcctagacagtgaaatgctatgacatcagaagactttaaaattgcagctctttttggatcccccaaagtgtatctgcactcttcttcaaacgggcctcttcctcaggagtcagagtcaccttcacaaggtctgagattccattctgtcccaaaatgcaaggaacactgaggaagacatcatcctttattccatagagacccttaatcatggtggaaactgggtgcactcgcctaagattcttcattatactctctgccaaatctgctacagagagtccaatggcccaggatgtgtagcctttgagtttgatcacctcataagcactctcaaccacctgcttgtgaacctctttccactgttccttatctttatcagtccctaaatctgggtgcagagtcttcagggagacaccagcaacattcattccactccatacaggcacactggaatctccatgttccccaaggacccacccatgacagcttaatgggtgaactcccagtctttcccccatcaggtaacggaatctggctgaatccagattgcaaccacttccaataacacggtttttgggaaaaccacttatcttccaagccacgtaggtcaagatatccactggatttgaaacaataagcaacttgcagttcgggctgtattttacaacattaggaacgatgaatttaaagatgttcacgttacgctggaccaaattaagacggctttctccctcttgttgacgtgccccagccgtgataatgaccagcttggagtttgcagttacactatagtctttcccagagacaatctttggtgttctaaggaaaaggctgccatgttggagatccatcatctctcccttcaatttgtcttcgatgacatcaacaagagcaagttcatctgccaagtccttcattaagatactgatggcacaggccatgccaacagcaccaaccccaacaactgtaatcttattctggggagtctgttcttcctttagaagattatgaatcagctgatccttgagagttgccatattggacttggaaccaaaaggaatcttagcgtggaaaaggaatatcgacgtttgggtgtaagtatagcctcctgagggctcacccatcgcggtttattaaccccaagtggggctggcctttcctcagacaagatcactttgagccactcctgctcctacagcaaggacacagccaggcttcaagtaaaaaccagaggtatgtgcagaaaagccactaactgccacaaagctcgagcccaaggcact

SEQ ID NO: 21 - DNA, 1746 bp, Homo sapiens
  source 1..1746: mol_type = genomic DNA
ctgggatagcaataacctgtgaaaatgctcccccggctaatttgtatcaatgattatgaacaacatgctaaatcagtacttccaaagtctatatatgactattacaggtctggggcaaatgatgaagaaactttggctgataatattgcagcattttccagatggaagctgtatccaaggatgctccggaatgttgctgaaacagatctgtcgacttctgttttaggacagagggtcagcatgccaatatgtgtgggggctacggccatgcagcgcatggctcatgtggacggcgagcttgccactgtgagagcctgtcagtccctgggaacgggcatgatgttgagttcctgggccacctcctcaattgaagaagtggcggaagctggtcctgaggcacttcgttggctgcaactgtatatctacaaggaccgagaagtcaccaagaagctagtgcggcaggcagagaagatgggctacaaggccatatttgtgacagtggacacaccttacctgggcaaccgtctggatgatgtgcgtaacagattcaaactgccgccacaactcaggatgaaaaattttgaaaccagtactttatcattttctcctgaggaaaattttggagacgacagtggacttgctgcatatgtggctaaagcaatagacccatctatcagctgggaagatatcaaatggctgagaagactgacatcattgccaattgttgcaaagggcattttgagaggtgatgatgccagggaggctgttaaacatggcttgaatgggatcttggtgtcgaatcatggggctcgacaactcgatggggtgccagccactattgatgttctgccagaaattgtggaggctgtggaagggaaggtggaagtcttcctggacgggggtgtgcggaaaggcactgatgttctgaaagctctggctcttggcgccaaggctgtgtttgtggggagaccaatcgtttggggcttagctttccagggggagaaaggtgttcaagatgtcctcgagatactaaaggaagaattccggttggccatggctctgagtgggtgccagaatgtgaaagtcatcgacaagacattggtgaggaaaaatcctttggccgtttccaagatctgacagtgcacaatattttcccatctgtattattttttttcagcatgtattacttgacaaagagacactgtgcagagggtgaccacagtctgtaattccccacttcaatacaaagggtgtcgttcttttccaacaaaatagcaatcccttttatttcattgcttttgacttttcaatgggtgtcctaggaaccttttagaaagaaatggactttcatcctggaaatatattaactgttaaaaagaaaacattgaaaatgtgtttagacaacgtcatcccctggcaggctaaagtgctgtatcctttagtaaaattggaggtagcaaacactaaggtgaaaagataatgatctcattgtttattaacctgtattctgtttacatgtctttaaaacagtggttcttaaattgtaagctcaggttcaaagtgttggtaatgcctgattcacaactttgagaaggtagcactggagagaattggaatgggtggcggtaattggtgatacttctttgaatgtagatttccaatcacatctttagtgtctgaatatatccaaatgttttaggatgtatgttacttcttagagagaaataaagcatttttgggaagaat

SEQ ID NO: 22 - DNA, 1746 bp, Homo sapiens
  source 1..1746: mol_type = genomic DNA
attcttcccaaaaatgctttatttctctctaagaagtaacatacatcctaaaacatttggatatattcagacactaaagatgtgattggaaatctacattcaaagaagtatcaccaattaccgccacccattccaattctctccagtgctaccttctcaaagttgtgaatcaggcattaccaacactttgaacctgagcttacaatttaagaaccactgttttaaagacatgtaaacagaatacaggttaataaacaatgagatcattatcttttcaccttagtgtttgctacctccaattttactaaaggatacagcactttagcctgccaggggatgacgttgtctaaacacattttcaatgttttctttttaacagttaatatatttccaggatgaaagtccatttctttctaaaaggttcctaggacacccattgaaaagtcaaaagcaatgaaataaaagggattgctattttgttggaaaagaacgacaccctttgtattgaagtggggaattacagactgtggtcaccctctgcacagtgtctctttgtcaagtaatacatgctgaaaaaaaataatacagatgggaaaatattgtgcactgtcagatcttggaaacggccaaaggatttttcctcaccaatgtcttgtcgatgactttcacattctggcacccactcagagccatggccaaccggaattcttcctttagtatctcgaggacatcttgaacacctttctccccctggaaagctaagccccaaacgattggtctccccacaaacacagccttggcgccaagagccagagctttcagaacatcagtgcctttccgcacacccccgtccaggaagacttccaccttcccttccacagcctccacaatttctggcagaacatcaatagtggctggcaccccatcgagttgtcgagccccatgattcgacaccaagatcccattcaagccatgtttaacagcctccctggcatcatcacctctcaaaatgccctttgcaacaattggcaatgatgtcagtcttctcagccatttgatatcttcccagctgatagatgggtctattgctttagccacatatgcagcaagtccactgtcgtctccaaaattttcctcaggagaaaatgataaagtactggtttcaaaatttttcatcctgagttgtggcggcagtttgaatctgttacgcacatcatccagacggttgcccaggtaaggtgtgtccactgtcacaaatatggccttgtagcccatcttctctgcctgccgcactagcttcttggtgacttctcggtccttgtagatatacagttgcagccaacgaagtgcctcaggaccagcttccgccacttcttcaattgaggaggtggcccaggaactcaacatcatgcccgttcccagggactgacaggctctcacagtggcaagctcgccgtccacatgagccatgcgctgcatggccgtagcccccacacatattggcatgctgaccctctgtcctaaaacagaagtcgacagatctgtttcagcaacattccggagcatccttggatacagcttccatctggaaaatgctgcaatattatcagccaaagtttcttcatcatttgccccagacctgtaatagtcatatatagactttggaagtactgatttagcatgttgttcataatcattgatacaaattagccgggggagcattttcacaggttattgctatcccag

SEQ ID NO: 23 - DNA, 1801 bp, Macaca fascicularis
  source 1..1801: mol_type = genomic DNA
gtgaggatgtagaaagcaatacattaaaaaaaacccaaaaaactccatctgggataacaataacctgtgaaaatgctcccccggctaatttgtatcaatgattatgaacaacatgctaaatcagtacttccaaagtctatatatgactattataggtctggagcaaatgatgaagaaactttggccgataatgttgcagcattttccagatggaagctgtatccaaggatgctccggaatgttgctgaaacagatctgtcgacttctgttttaggacagagggtcagcatgccaatatgcgtgggggccacggccatgcagcgcatggctcatgtggatggcgagcttgccactgtgcgagcctgtcagtccctgggaacgggcatgatgttgagttcctgggccacctcctcaattgaagaagtggcagaagctggtcctgaggcacttcgttggttgtaactgtatatctataaggaccgagaagtcaccaagaagctggtgcagcaggcagagaagacgggctacaaggccatatttgtgacagtggacacaccttacctgggcaaccgtcttgatgatgtacgtaacagattcaagctgccaccacaactcaggatgaaaaattttgaaaccagtactttatcattttctcctgaggaaaattttggagatgacagtggacttgctgcatatgtggctaaagcgatagacccatctatcagctgggaagatatcaaatggctgagaagactgacgtcattgccaattgttgcaaagggcattttgagaggtgatgatgccagggaggctgttaaacatggcttgaatgggatcttggtgtcgaatcatggggctcgacaactcgatggggtgccagccactattgatgttctgccagaaattgtggaggccgtggaagggaaggtggaagtcttcctggacgggggtgtgcggaaaggcactgatgttctgaaagctctggctcttggcgccaaggctgtgtttgtggggagaccaatcatttggggcttagctttccagggggagaaaggtgttcaagatgtccttgagatactaaaggaagaattccggttggccatggctttgagtgggtgccagaatgtgaaagtcatcgacaagacattggtgaggaaaaatcctttggccgtttccaagatctgacagtgcacaatattttcccatctgtattatttttttttcagcatgtattacttgacaaagagacactgtgcagagggtgaccacagtctgtaattccccacttcaatacaaaggatgtcgttcttttccaacaaaatagcaatcccttttagttcattgcttttgacttttcaatgggtgtcctaggaaccttttagaaagaaatggactttcatcctggaaatatattaactgttaaaaagaaaacattgaaaatgtgtttagacaacgtcatcctctggcaggctaaagtactgtatcctttagtaaaattggaggtagcaaacactaaggtgaaaagataatgatctcattgtttattaacctgtattctgtttagatgtctttaaaacagtggttcttaaattgtaagctcaggttcaaagcattggaaatgcctgattgacaacattgagaaggtagccctggatagaattggaatggatggcagtaactggtgatacttctttgaatgcagctttccaatcacatctttagtgtctgaatatatccaaatgttttaggatatatgttacttcttaatcagagagaaataaagcattttttgggaaggata

SEQ ID NO: 24 - DNA, 1801 bp, Macaca fascicularis
  source 1..1801: mol_type = genomic DNA
tatccttcccaaaaaatgctttatttctctctgattaagaagtaacatatatcctaaaacatttggatatattcagacactaaagatgtgattggaaagctgcattcaaagaagtatcaccagttactgccatccattccaattctatccagggctaccttctcaatgttgtcaatcaggcatttccaatgctttgaacctgagcttacaatttaagaaccactgttttaaagacatctaaacagaatacaggttaataaacaatgagatcattatcttttcaccttagtgtttgctacctccaattttactaaaggatacagtactttagcctgccagaggatgacgttgtctaaacacattttcaatgttttctttttaacagttaatatatttccaggatgaaagtccatttctttctaaaaggttcctaggacacccattgaaaagtcaaaagcaatgaactaaaagggattgctattttgttggaaaagaacgacatcctttgtattgaagtggggaattacagactgtggtcaccctctgcacagtgtctctttgtcaagtaatacatgctgaaaaaaaaataatacagatgggaaaatattgtgcactgtcagatcttggaaacggccaaaggatttttcctcaccaatgtcttgtcgatgactttcacattctggcacccactcaaagccatggccaaccggaattcttcctttagtatctcaaggacatcttgaacacctttctccccctggaaagctaagccccaaatgattggtctccccacaaacacagccttggcgccaagagccagagctttcagaacatcagtgcctttccgcacacccccgtccaggaagacttccaccttcccttccacggcctccacaatttctggcagaacatcaatagtggctggcaccccatcgagttgtcgagccccatgattcgacaccaagatcccattcaagccatgtttaacagcctccctggcatcatcacctctcaaaatgccctttgcaacaattggcaatgacgtcagtcttctcagccatttgatatcttcccagctgatagatgggtctatcgctttagccacatatgcagcaagtccactgtcatctccaaaattttcctcaggagaaaatgataaagtactggtttcaaaatttttcatcctgagttgtggtggcagcttgaatctgttacgtacatcatcaagacggttgcccaggtaaggtgtgtccactgtcacaaatatggccttgtagcccgtcttctctgcctgctgcaccagcttcttggtgacttctcggtccttatagatatacagttacaaccaacgaagtgcctcaggaccagcttctgccacttcttcaattgaggaggtggcccaggaactcaacatcatgcccgttcccagggactgacaggctcgcacagtggcaagctcgccatccacatgagccatgcgctgcatggccgtggcccccacgcatattggcatgctgaccctctgtcctaaaacagaagtcgacagatctgtttcagcaacattccggagcatccttggatacagcttccatctggaaaatgctgcaacattatcggccaaagtttcttcatcatttgctccagacctataatagtcatatatagactttggaagtactgatttagcatgttgttcataatcattgatacaaattagccgggggagcattttcacaggttattgttatcccagatggagttttttgggttttttttaatgtattgctttctacatcctcac

SEQ ID NO: 25 - DNA, 2029 bp, Mus musculus
  source 1..2029: mol_type = genomic DNA
ggttgccctaccctgccacaatgttgcctcgactggtctgcatcagtgattatgaacagcatgtccgatcagtgcttcagaagtcagtgtatgactattacaggtctggggcaaatgatcaggagacgttagctgataacatccaagcattttctagatggaagctctatccacggatgcttcgcaacgttgctgatatcgatctgtcaacttctgttttaggacagagagtcagcatgccaatatgtgttggggctactgccatgcagtgcatggctcacgtggacggggagctggccactgtgcgagcctgtcagaccatgggaactggcatgatgctgagttcttgggctacctcctcaatagaagaagtggcagaagctggcccagaggcacttcgctggatgcaactgtacatctacaaagaccgtgagatcagcagacagatagtgaagcgagctgagaagcagggttacaaggccatatttgtgactgtggacaccccttacctgggcaaccgcattgatgacgtgcggaacaggttcaagctgccaccacaactcaggatgaaaaactttgaaaccaatgatttggcattttctcctaagggaaattttggagacaacagtggacttgctgaatatgtggcacaagctatagacccatctctcagctgggatgatattacatggctcagacgattgacatcactgcctattgttgtaaagggcattttgagaggtgatgatgccaaggaagctgttaaacatggtgtggatgggatcttggtgtcgaatcatggggcgcgacaactggatggggtgccagctactattgatgtcctgccagagattgttgaggctgtggaagggaaggtagaagtcttcctggatgggggagtaaggaaaggtactgatgttctcaaagctctggccctaggagccaaggccgtttttgtgggaagacccatcatctggggcttggctttccagggggagaaaggtgttcaagatgtcctcgagatattgaaggaagaattccgactggccatggctctgagtgggtgccagaatgtgaaagtcatcgacaagacattggtgaggaaaaatcctttggctgtttccaagatctgacagtgcacaatattttcccatctgtattattttttttccagcgtggattacttgacaaagagacactgtgcagagggtgaccacagactgtaactccccacttctatacaaagggtgtcgttcttttccaacaaaatagccaccccttttccttcattgcttttgacttttcaatgggtgtcctaggaaccttctagaaagaaatggacttgcatcctggaaatatattaactgttaaaaagaaaacattgaaaatgtgtttgggcaacgtcatcccctggcaggctaaagtgctggggaacaaaagatatcctctggtgagattgcaggtagcatgctgaagtgaaagatactgacctcactgttcattaacctgtcttctgtttagatttccttaagacagtggctcttacagtttgcacttggctttgaaatgctggaaatgcccagagaaacatgaggtttggatttgccatgttgagaaaatagcaccaggtagaattgaaatggatggtggtaatttgtgattttttttctagaaacttttcattttttaacaccctatttttttgaaggtagatttttagctatatatcacacgtctgaatatgtctggatgttttgtggcactcattgcatttgaaagggatgtgtctagtccagttgggaccacatggagctatttttacttttgaactttgtctcctcattctcattttaaaataagtgttgacttcctaattcctcttgaatcttttttgattttctcacttttcctcatttatagtcacattcagtgtaaagtacatattttgtggggtccgtgatgaataaagatttgaaattcttgttcagaaggaaggcaaaaaaaaaaaaaagtctttccttttatcaca

SEQ ID NO: 26 - DNA, 2029 bp, Mus musculus
  source 1..2029: mol_type = genomic DNA
tgtgataaaaggaaagacttttttttttttttgccttccttctgaacaagaatttcaaatctttattcatcacggaccccacaaaatatgtactttacactgaatgtgactataaatgaggaaaagtgagaaaatcaaaaaagattcaagaggaattaggaagtcaacacttattttaaaatgagaatgaggagacaaagttcaaaagtaaaaatagctccatgtggtcccaactggactagacacatccctttcaaatgcaatgagtgccacaaaacatccagacatattcagacgtgtgatatatagctaaaaatctaccttcaaaaaaatagggtgttaaaaaatgaaaagtttctagaaaaaaaatcacaaattaccaccatccatttcaattctacctggtgctattttctcaacatggcaaatccaaacctcatgtttctctgggcatttccagcatttcaaagccaagtgcaaactgtaagagccactgtcttaaggaaatctaaacagaagacaggttaatgaacagtgaggtcagtatctttcacttcagcatgctacctgcaatctcaccagaggatatcttttgttccccagcactttagcctgccaggggatgacgttgcccaaacacattttcaatgttttctttttaacagttaatatatttccaggatgcaagtccatttctttctagaaggttcctaggacacccattgaaaagtcaaaagcaatgaaggaaaaggggtggctattttgttggaaaagaacgacaccctttgtatagaagtggggagttacagtctgtggtcaccctctgcacagtgtctctttgtcaagtaatccacgctggaaaaaaaataatacagatgggaaaatattgtgcactgtcagatcttggaaacagccaaaggatttttcctcaccaatgtcttgtcgatgactttcacattctggcacccactcagagccatggccagtcggaattcttccttcaatatctcgaggacatcttgaacacctttctccccctggaaagccaagccccagatgatgggtcttcccacaaaaacggccttggctcctagggccagagctttgagaacatcagtacctttccttactcccccatccaggaagacttctaccttcccttccacagcctcaacaatctctggcaggacatcaatagtagctggcaccccatccagttgtcgcgccccatgattcgacaccaagatcccatccacaccatgtttaacagcttccttggcatcatcacctctcaaaatgccctttacaacaataggcagtgatgtcaatcgtctgagccatgtaatatcatcccagctgagagatgggtctatagcttgtgccacatattcagcaagtccactgttgtctccaaaatttcccttaggagaaaatgccaaatcattggtttcaaagtttttcatcctgagttgtggtggcagcttgaacctgttccgcacgtcatcaatgcggttgcccaggtaaggggtgtccacagtcacaaatatggccttgtaaccctgcttctcagctcgcttcactatctgtctgctgatctcacggtctttgtagatgtacagttgcatccagcgaagtgcctctgggccagcttctgccacttcttctattgaggaggtagcccaagaactcagcatcatgccagttcccatggtctgacaggctcgcacagtggccagctccccgtccacgtgagccatgcactgcatggcagtagccccaacacatattggcatgctgactctctgtcctaaaacagaagttgacagatcgatatcagcaacgttgcgaagcatccgtggatagagcttccatctagaaaatgcttggatgttatcagctaacgtctcctgatcatttgccccagacctgtaatagtcatacactgacttctgaagcactgatcggacatgctgttcataatcactgatgcagaccagtcgaggcaacattgtggcagggtagggcaacc

SEQ ID NO: 27 - DNA, 1527 bp, Rattus norvegicus
  source 1..1527: mol_type = genomic DNA
catcccctgacacaatgttgcctcggctggtctgcatcagtgactatgaacagcatgcccggacagtgcttcagaagtcagtatatgattattacaagtctggggcaaatgaccaggagactttggctgataatatcagagcattttctaggtggaagctctatccacggatgctgcgcaacgttgctgatatcgacctgtcgacttctgttttaggacagagagtgagcatgccaatatgcgttggggctacggctatgcagtgcatggctcatgtggatggggagctggccactgttcgagcctgtcagaccatgggaactggcatgatgttgagttcctgggccacttcctcaatagaagaggtggcagaggctggcccggaggcacttcgctggatgcaactctacatctacaaagatcgtgaggtcagcagtcagctagtgaagagggctgagcagatgggttacaaggccatatttgtgactgtggacaccccttacctgggaaatcgcttcgatgatgtgcggaacaggttcaagctaccaccacagctcaggatgaaaaactttgaaaccaacgatttggcattttctcctaaggggaattttggagacaacagtggccttgctgaatatgtggcacaagccatagacccatctctcagctgggatgatattaaatggctcagacggttgacctcactgcccattgttgtaaagggaattttgagaggtgatgatgcccaggaagctgttaaacatggtgtggatgggatcttagtgtcgaatcatggggcacgacaactggatggggtgccagctactattgatgccctgccagagatcgttgaggctgtggaagggaaggtagaagtcttcctggatgggggagtcaggaaaggcaccgatgttctcaaagctctggccctgggagccagagctgtttttgtggggagacccatcatctggggcttggctttccagggggagaaaggtgttcaagatgtcctcgagatactgaaggaagagttccggctggccatggctctgagtgggtgccagaatgtgaaagtcatcgacaagacattggtgaggaaaaatcctttggctgtttccaagatctgacagtgcacaatattttcccatctgtattatttttttccagcatggattacttgacaaagagacactgtgcagagggtgaccacagactgtaactccccacttcaacacaaagggtgtcgttcttttccaacaaaatagccaccccttctccttcattgcttttgacttttcaatgggtgtcctaggaaccttctagaaagaaatggacttgcatcctggaaatatattaactgttaaaaagaaaacattgaaaatgtgtttgggcaacgtcatcccctggcaggctaaagtgagggggaacaaaagatatcctctggtgagattggaggtagcatgccgaagtaaaagacactgacctcactgtttattaaaaaaaaaaaaaaaaaaaaaaaaaaaaaaa

SEQ ID NO: 28 - DNA, 1527 bp, Rattus norvegicus
  source 1..1527: mol_type = genomic DNA
tttttttttttttttttttttttttttttttaataaacagtgaggtcagtgtcttttacttcggcatgctacctccaatctcaccagaggatatcttttgttccccctcactttagcctgccaggggatgacgttgcccaaacacattttcaatgttttctttttaacagttaatatatttccaggatgcaagtccatttctttctagaaggttcctaggacacccattgaaaagtcaaaagcaatgaaggagaaggggtggctattttgttggaaaagaacgacaccctttgtgttgaagtggggagttacagtctgtggtcaccctctgcacagtgtctctttgtcaagtaatccatgctggaaaaaaataatacagatgggaaaatattgtgcactgtcagatcttggaaacagccaaaggatttttcctcaccaatgtcttgtcgatgactttcacattctggcacccactcagagccatggccagccggaactcttccttcagtatctcgaggacatcttgaacacctttctccccctggaaagccaagccccagatgatgggtctccccacaaaaacagctctggctcccagggccagagctttgagaacatcggtgcctttcctgactcccccatccaggaagacttctaccttcccttccacagcctcaacgatctctggcagggcatcaatagtagctggcaccccatccagttgtcgtgccccatgattcgacactaagatcccatccacaccatgtttaacagcttcctgggcatcatcacctctcaaaattccctttacaacaatgggcagtgaggtcaaccgtctgagccatttaatatcatcccagctgagagatgggtctatggcttgtgccacatattcagcaaggccactgttgtctccaaaattccccttaggagaaaatgccaaatcgttggtttcaaagtttttcatcctgagctgtggtggtagcttgaacctgttccgcacatcatcgaagcgatttcccaggtaaggggtgtccacagtcacaaatatggccttgtaacccatctgctcagccctcttcactagctgactgctgacctcacgatctttgtagatgtagagttgcatccagcgaagtgcctccgggccagcctctgccacctcttctattgaggaagtggcccaggaactcaacatcatgccagttcccatggtctgacaggctcgaacagtggccagctccccatccacatgagccatgcactgcatagccgtagccccaacgcatattggcatgctcactctctgtcctaaaacagaagtcgacaggtcgatatcagcaacgttgcgcagcatccgtggatagagcttccacctagaaaatgctctgatattatcagccaaagtctcctggtcatttgccccagacttgtaataatcatatactgacttctgaagcactgtccgggcatgctgttcatagtcactgatgcagaccagccgaggcaacattgtgtcaggggatg

SEQ ID NO: 29 - DNA, 1611 bp, Homo sapiens
  source 1..1611: mol_type = genomic DNA
cggaagcccatccaccaatcctcacctctcacctctgtgtccgccctgctgggaaatattccaggctttggccaaggccagtgcagccccaggttcccgagcggcaggttgggtgcggaccatggcctctcacaagctgctggtgaccccccccaaggccctgctcaagcccctctccatccccaaccagctcctgctggggcctggtccttccaacctgcctcctcgcatcatggcagccggggggctgcagatgatcgggtccatgagcaaggatatgtaccagatcatggacgagatcaaggaaggcatccagtacgtgttccagaccaggaacccactcacactggtcatctctggctcgggacactgtgccctggaggccgccctggtcaatgtgctggagcctggggactccttcctggttggggccaatggcatttgggggcagcgagccgtggacatcggggagcgcataggagcccgagtgcacccgatgaccaaggaccctggaggccactacacactgcaggaggtggaggagggcctggcccagcacaagccagtgctgctgttcttaacccacggggagtcgtccaccggcgtgctgcagccccttgatggcttcggggaactctgccacaggtacaagtgcctgctcctggtggattcggtggcatccctgggcgggacccccctttacatggaccggcaaggcatcgacatcctgtactcgggctcccagaaggccctgaacgcccctccagggacctcgctcatctccttcagtgacaaggccaaaaagaagatgtactcccgcaagacgaagcccttctccttctacctggacatcaagtggctggccaacttctggggctgtgacgaccagcccaggatgtaccatcacacaatccccgtcatcagcctgtacagcctgagagagagcctggccctcattgcggaacagggcctggagaacagctggcgccagcaccgcgaggccgcggcgtatctgcatgggcgcctgcaggcactggggctgcagctcttcgtgaaggacccggcgctccggcttcccacagtcaccactgtggctgtacccgctggctatgactggagagacatcgtcagctacgtcatagaccacttcgacattgagatcatgggtggccttgggccctccacggggaaggtgctgcggatcggcctgctgggctgcaatgccacccgcgagaatgtggaccgcgtgacggaggccctgagggcggccctgcagcactgccccaagaagaagctgtgacctgcccactggcacacagctggcactggcacacacctgtcccatgcccaccctgagggatcaggagcaaacagaccctgcaaggtcctccaggcctggggacaggaaagccactgacccagcccgggaggcagaaccaggcagcctccctggccccaggcagcccttttccctccagtggcacctcctggaaacagtccacttgggcgcaaaacccagtgccttccaaatgagctgcagtccccaggccatgagcctcccgggaatgtttaataaagggcctggccaactctcctcaaaaaaaaaaaaaa

SEQ ID NO: 30 - protein, 392 aa, Homo sapiens
MASHKLLVTPPKALLKPLSIPNQLLLGPGPSNLPPRIMAAGGLQMIGSMSKDMYQIMDEIKEGIQYVFQTRNPLTLVISGSGHCALEAALVNVLEPGDSFLVGANGIWGQRAVDIGERIGARVHPMTKDPGGHYTLQEVEEGLAQHKPVLLFLTHGESSTGVLQPLDGFGELCHRYKCLLLVDSVASLGGTPLYMDRQGIDILYSGSQKALNAPPGTSLISFSDKAKKKMYSRKTKPFSFYLDIKWLANFWGCDDQPRMYHHTIPVISLYSLRESLALIAEQGLENSWRQHREAAAYLHGRLQALGLQLFVKDPALRLPTVTTVAVPAGYDWRDIVSYVIDHFDIEIMGGLGPSTGKVLRIGLLGCNATRENVDRVTEALRAALQHCPKKKL

SEQ ID NO: 31 - RNA, 36 nt, synthetic construct
  source 1..36: mol_type = other RNA
atgttgtcctttttatctgagcagccgaaaggctgc

SEQ ID NO: 32 - RNA, 22 nt, synthetic construct
  source 1..22: mol_type = other RNA
tcagataaaaaggacaacatgg

SEQ ID NO: 33 - RNA, 21 nt, synthetic construct
  source 1..21: mol_type = other RNA
gactttcatcctggaaatata

SEQ ID NO: 34 - RNA, 23 nt, synthetic construct
  source 1..23: mol_type = other RNA
tatatttccaggatgaaagtcca

SEQ ID NO: 35 - RNA, 21 nt, synthetic construct
  source 1..21: mol_type = other RNA
  modified_base 1: mod_base = OTHER; note = 2'-O-methylguanosine-3'- phosphorothioate
  modified_base 2: mod_base = OTHER; note = 2'-O-methyladenosine-3'- phosphorothioate
  modified_base 3: mod_base = OTHER; note = 2'-O-methylcytidine-3'-phosphate
  modified_base 4: mod_base = OTHER; note = 2'-O-methyluridine-3'-phosphate
  modified_base 5: mod_base = OTHER; note = 2'-O-methyluridine-3'-phosphate
  modified_base 6: mod_base = OTHER; note = 2'-O-methyluridine-3'-phosphate
  modified_base 7: mod_base = OTHER; note = 2'-fluorocytidine-3'-phosphate
  modified_base 8: mod_base = OTHER; note = 2'-O-methyladenosine-3'-phosphate
  modified_base 9: mod_base = OTHER; note = 2'-fluorouridine-3'-phosphate
  modified_base 10: mod_base = OTHER; note = 2'-fluorocytidine-3'-phosphate
  modified_base 11: mod_base = OTHER; note = 2'-fluorocytidine-3'-phosphate
  modified_base 12: mod_base = OTHER; note = 2'-O-methyluridine-3'-phosphate
  modified_base 13: mod_base = OTHER; note = 2'-O-methylguanosine-3'-phosphate
  modified_base 14: mod_base = OTHER; note = 2'-O-methylguanosine-3'-phosphate
  modified_base 15: mod_base = OTHER; note = 2'-O-methyladenosine-3'-phosphate
  modified_base 16: mod_base = OTHER; note = 2'-O-methyladenosine-3'-phosphate
  modified_base 17: mod_base = OTHER; note = 2'-O-methyladenosine-3'-phosphate
  modified_base 18: mod_base = OTHER; note = 2'-O-methyluridine-3'-phosphate
  modified_base 19: mod_base = OTHER; note = 2'-O-methyladenosine-3'-phosphate
  modified_base 20: mod_base = OTHER; note = 2'-O-methyluridine-3'-phosphate
  modified_base 21: mod_base = OTHER; note = 2'-O-methyladenosine-3'-phosphate
gactttcatcctggaaatata

SEQ ID NO: 36 - RNA, 23 nt, synthetic construct
  source 1..23: mol_type = other RNA
  modified_base 1: mod_base = OTHER; note = 2'-O-methyluridine-3'-phosphorothioate
  modified_base 2: mod_base = OTHER; note = 2'-fluoroadenosine-3'-phosphorothioate
  modified_base 3: mod_base = OTHER; note = 2'-O-methyluridine-3'-phosphate
  modified_base 4: mod_base = OTHER; note = 2'-O-methyladenosine-3'-phosphate
  modified_base 5: mod_base = OTHER; note = 2'-O-methyluridine-3'-phosphate
  modified_base 6: mod_base = OTHER; note = 2'-fluorouridine-3'-phosphate
  modified_base 7: mod_base = OTHER; note = 2'-O-methyluridine-3'-phosphate
  modified_base 8: mod_base = OTHER; note = 2'-fluorocytidine-3'-phosphate
  modified_base 9: mod_base = OTHER; note = 2'-fluorocytidine-3'-phosphate
  modified_base 10: mod_base = OTHER; note = 2'-O-methyladenosine-3'-phosphate
  modified_base 11: mod_base = OTHER; note = 2'-O-methylguanosine-3'-phosphate
  modified_base 12: mod_base = OTHER; note = 2'-O-methylguanosine-3'-phosphate
  modified_base 13: mod_base = OTHER; note = 2'-O-methyladenosine-3'-phosphate
  modified_base 14: mod_base = OTHER; note = 2'-fluorouridine-3'-phosphate
  modified_base 15: mod_base = OTHER; note = 2'-O-methylguanosine-3'-phosphate
  modified_base 16: mod_base = OTHER; note = 2'-fluoroadenosine-3'-phosphate
  modified_base 17: mod_base = OTHER; note = 2'-O-methyladenosine-3'-phosphate
  modified_base 18: mod_base = OTHER; note = 2'-O-methyladenosine-3'-phosphate
  modified_base 19: mod_base = OTHER; note = 2'-O-methylguanosine-3'-phosphate
  modified_base 20: mod_base = OTHER; note = 2'-O-methyluridine-3'-phosphate
  modified_base 21: mod_base = OTHER; note = 2'-O-methylcytidine-3'- phosphorothioate
  modified_base 22: mod_base = OTHER; note = 2'-O-methylcytidine-3'- phosphorothioate
  modified_base 23: mod_base = OTHER; note = 2'-O-methyladenosine-3'-phosphate
tatatttccaggatgaaagtcca

SEQ ID NO: 37 - RNA, 21 nt, synthetic construct
  source 1..21: mol_type = other RNA
  modified_base 1: mod_base = OTHER; note = 2'-fluoroadenosine-3'-phosphorothioate
  modified_base 2: mod_base = OTHER; note = 2'-O-methyluridine-3'-phosphorothioate
  modified_base 3: mod_base = OTHER; note = 2'-fluoroguanosine-3'-phosphate
  modified_base 4: mod_base = OTHER; note = 2'-O-methylguanosine-3'-phosphate
  modified_base 5: mod_base = OTHER; note = 2'-fluorouridine-3'-phosphate
  modified_base 6: mod_base = OTHER; note = 2'-O-methylguanosine-3'-phosphate
  modified_base 7: mod_base = OTHER; note = 2'-fluoroguanosine-3'-phosphate
  modified_base 8: mod_base = OTHER; note = 2'-O-methyluridine-3'-phosphate
  modified_base 9: mod_base = OTHER; note = 2'-fluoroadenosine-3'-phosphate
  modified_base 10: mod_base = OTHER; note = 2'-fluoroadenosine-3'-phosphate
  modified_base 11: mod_base = OTHER; note = 2'-fluorouridine-3'-phosphate
  modified_base 12: mod_base = OTHER; note = 2'-O-methyluridine-3'-phosphate
  modified_base 13: mod_base = OTHER; note = 2'-fluorouridine-3'-phosphate
  modified_base 14: mod_base = OTHER; note = 2'-O-methylguanosine-3'-phosphate
  modified_base 15: mod_base = OTHER; note = 2'-fluorouridine-3'-phosphate
  modified_base 16: mod_base = OTHER; note = 2'-O-methylguanosine-3'-phosphate
  modified_base 17: mod_base = OTHER; note = 2'-fluoroadenosine-3'-phosphate
  modified_base 18: mod_base = OTHER; note = 2'-O-methyluridine-3'-phosphate
  modified_base 19: mod_base = OTHER; note = 2'-fluorouridine-3'-phosphate
  modified_base 20: mod_base = OTHER; note = 2'-O-methyluridine-3'-phosphate
  modified_base 21: mod_base = OTHER; note 2'-fluorouridine-3'-phosphate-N-[tris(GalNAc-alkyl)-amidode canoyl)]-4-hydroxyprolinol (Hyp-(GalNAc-alkyl)3)
atggtggtaatttgtgatttt

SEQ ID NO: 38 - RNA, 21 nt, synthetic construct
  source 1..21: mol_type = other RNA
  modified_base 1: mod_base = OTHER; note = 2'-fluoroguanosine-3'-phosphorothioate
  modified_base 2: mod_base = OTHER; note = 2'-O-methyladenosine-3'- phosphorothioate
  modified_base 3: mod_base = OTHER; note = 2'-fluorocytidine-3'-phosphate
  modified_base 4: mod_base = OTHER; note = 2'-O-methyluridine-3'-phosphate
  modified_base 5: mod_base = OTHER; note = 2'-fluorouridine-3'-phosphate
  modified_base 6: mod_base = OTHER; note = 2'-O-methylguanosine-3'-phosphate
  modified_base 7: mod_base = OTHER; note = 2'-fluorocytidine-3'-phosphate
  modified_base 8: mod_base = OTHER; note = 2'-O-methyladenosine-3'-phosphate
  modified_base 9: mod_base = OTHER; note = 2'-fluorouridine-3'-phosphate
  modified_base 10: mod_base = OTHER; note = 2'-fluorocytidine-3'-phosphate
  modified_base 11: mod_base = OTHER; note = 2'-fluorocytidine-3'-phosphate
  modified_base 12: mod_base = OTHER; note = 2'-O-methyluridine-3'-phosphate
  modified_base 13: mod_base = OTHER; note = 2'-fluoroguanosine-3'-phosphate
  modified_base 14: mod_base = OTHER; note = 2'-O-methylguanosine-3'-phosphate
  modified_base 15: mod_base = OTHER; note = 2'-fluoroadenosine-3'-phosphate
  modified_base 16: mod_base = OTHER; note = 2'-O-methyladenosine-3'-phosphate
  modified_base 17: mod_base = OTHER; note = 2'-fluoroadenosine-3'-phosphate
  modified_base 18: mod_base = OTHER; note = 2'-O-methyluridine-3'-phosphate
  modified_base 19: mod_base = OTHER; note = 2'-fluoroadenosine-3'-phosphate
  modified_base 20: mod_base = OTHER; note = 2'-O-methyluridine-3'-phosphate
  modified_base 21: mod_base = OTHER; note 2'-fluoroadenosine-3'-phosphate-N-[tris(GalNAc-alkyl)-amido decanoyl)]-4-hydroxyprolinol (Hyp-(GalNAc-alkyl)3)
gacttgcatcctggaaatata

SEQ ID NO: 39 - RNA, 21 nt, synthetic construct
  source 1..21: mol_type = other RNA
  modified_base 1: mod_base = OTHER; note = 2'-fluoroguanosine-3'-phosphorothioate
  modified_base 2: mod_base = OTHER; note = 2'-O-methylguanosine-3'- phosphorothioate
  modified_base 3: mod_base = OTHER; note = 2'-fluoroadenosine-3'-phosphate
  modified_base 4: mod_base = OTHER; note = 2'-O-methyladenosine-3'-phosphate
  modified_base 5: mod_base = OTHER; note = 2'-fluoroguanosine-3'-phosphate
  modified_base 6: mod_base = OTHER; note = 2'-O-methylguanosine-3'-phosphate
  modified_base 7: mod_base = OTHER; note = 2'-fluoroguanosine-3'-phosphate
  modified_base 8: mod_base = OTHER; note = 2'-O-methyladenosine-3'-phosphate
  modified_base 9: mod_base = OTHER; note = 2'-fluoroadenosine-3'-phosphate
  modified_base 10: mod_base = OTHER; note = 2'-fluoroguanosine-3'-phosphate
  modified_base 11: mod_base = OTHER; note = 2'-fluoroguanosine-3'-phosphate
  modified_base 12: mod_base = OTHER; note = 2'-O-methyluridine-3'-phosphate
  modified_base 13: mod_base = OTHER; note = 2'-fluoroadenosine-3'-phosphate
  modified_base 14: mod_base = OTHER; note = 2'-O-methylguanosine-3'-phosphate
  modified_base 15: mod_base = OTHER; note = 2'-fluoroadenosine-3'-phosphate
  modified_base 16: mod_base = OTHER; note = 2'-O-methyladenosine-3'-phosphate
  modified_base 17: mod_base = OTHER; note = 2'-fluoroguanosine-3'-phosphate
  modified_base 18: mod_base = OTHER; note = 2'-O-methyluridine-3'-phosphate
  modified_base 19: mod_base = OTHER; note = 2'-fluorocytidine-3'-phosphate
  modified_base 20: mod_base = OTHER; note = 2'-O-methyluridine-3'-phosphate
  modified_base 21: mod_base = OTHER; note 2'-fluorouridine-3'-phosphate-N-[tris(GalNAc-alkyl)-amidode canoyl)]-4-hydroxyprolinol (Hyp-(GalNAc-alkyl)3)
ggaagggaaggtagaagtctt

SEQ ID NO: 40 - RNA, 21 nt, synthetic construct
  source 1..21: mol_type = other RNA
  modified_base 1: mod_base = OTHER; note = 2'-fluorouridine -3'-phosphorothioate
  modified_base 2: mod_base = OTHER; note = 2'-O-methylguanosine-3'- phosphorothioate
  modified_base 3: mod_base = OTHER; note = 2'-fluorouridine-3'-phosphate
  modified_base 4: mod_base = OTHER; note = 2'-O-methylcytidine-3'-phosphate
  modified_base 5: mod_base = OTHER; note = 2'-fluorouridine-3'-phosphate
  modified_base 6: mod_base = OTHER; note = 2'-O-methyluridine-3'-phosphate
  modified_base 7: mod_base = OTHER; note = 2'-fluorocytidine-3'-phosphate
  modified_base 8: mod_base = OTHER; note = 2'-O-methyluridine-3'-phosphate
  modified_base 9: mod_base = OTHER; note = 2'-fluoroguanosine-3'-phosphate
  modified_base 10: mod_base = OTHER; note = 2'-fluorouridine-3'-phosphate
  modified_base 11: mod_base = OTHER; note = 2'-fluorouridine-3'-phosphate
  modified_base 12: mod_base = OTHER; note = 2'-O-methyluridine-3'-phosphate
  modified_base 13: mod_base = OTHER; note = 2'-fluoroadenosine-3'-phosphate
  modified_base 14: mod_base = OTHER; note = 2'-O-methylguanosine-3'-phosphate
  modified_base 15: mod_base = OTHER; note = 2'-fluoroadenosine-3'-phosphate
  modified_base 16: mod_base = OTHER; note = 2'-O-methyluridine-3'-phosphate
  modified_base 17: mod_base = OTHER; note = 2'-fluorouridine-3'-phosphate
  modified_base 18: mod_base = OTHER; note = 2'-O-methyluridine-3'-phosphate
  modified_base 19: mod_base = OTHER; note = 2'-fluorocytidine-3'-phosphate
  modified_base 20: mod_base = OTHER; note = 2'-O-methylcytidine-3'-phosphate
  modified_base 21: mod_base = OTHER; note 2'-fluorouridine-3'-phosphate-N-[tris(GalNAc-alkyl)-amidode canoyl)]-4-hydroxyprolinol (Hyp-(GalNAc-alkyl)3)
tgtcttctgtttagatttcct

SEQ ID NO: 41 - RNA, 21 nt, synthetic construct
  source 1..21: mol_type = other RNA
  modified_base 1: mod_base = OTHER; note = 2'-fluorocytidine-3'-phosphorothioate
  modified_base 2: mod_base = OTHER; note = 2'-O-methyluridine-3'-phosphorothioate
  modified_base 3: mod_base = OTHER; note = 2'-fluorouridine-3'-phosphate
  modified_base 4: mod_base = OTHER; note = 2'-O-methyluridine-3'-phosphate
  modified_base 5: mod_base = OTHER; note = 2'-fluoroguanosine-3'-phosphate
  modified_base 6: mod_base = OTHER; note = 2'-O-methylguanosine-3'-phosphate
  modified_base 7: mod_base = OTHER; note = 2'-fluorocytidine-3'-phosphate
  modified_base 8: mod_base = OTHER; note = 2'-O-methyluridine-3'-phosphate
  modified_base 9: mod_base = OTHER; note = 2'-fluoroguanosine-3'-phosphate
  modified_base 10: mod_base = OTHER; note = 2'-fluorouridine-3'-phosphate
  modified_base 11: mod_base = OTHER; note = 2'-fluorouridine-3'-phosphate
  modified_base 12: mod_base = OTHER; note = 2'-O-methyluridine-3'-phosphate
  modified_base 13: mod_base = OTHER; note = 2'-fluorocytidine-3'-phosphate
  modified_base 14: mod_base = OTHER; note = 2'-O-methylcytidine-3'-phosphate
  modified_base 15: mod_base = OTHER; note = 2'-fluoroadenosine-3'-phosphate
  modified_base 16: mod_base = OTHER; note = 2'-O-methyladenosine-3'-phosphate
  modified_base 17: mod_base = OTHER; note = 2'-fluoroguanosine-3'-phosphate
  modified_base 18: mod_base = OTHER; note = 2'-O-methyladenosine-3'-phosphate
  modified_base 19: mod_base = OTHER; note = 2'-fluorouridine-3'-phosphate
  modified_base 20: mod_base = OTHER; note = 2'-O-methylcytidine-3'-phosphate
  modified_base 21: mod_base = OTHER; note 2'-fluorouridine-3'-phosphate-N-[tris(GalNAc-alkyl)-amidode canoyl)]-4-hydroxyprolinol (Hyp-(GalNAc-alkyl)3)
ctttggctgtttccaagatct

SEQ ID NO: 42 - RNA, 21 nt, synthetic construct
  source 1..21: mol_type = other RNA
  modified_base 1: mod_base = OTHER; note = 2'-fluoroadenosine-3'-phosphorothioate
  modified_base 2: mod_base = OTHER; note = 2'-O-methyladenosine-3'- phosphorothioate
  modified_base 3: mod_base = OTHER; note = 2'-fluorouridine-3'-phosphate
  modified_base 4: mod_base = OTHER; note = 2'-O-methylguanosine-3'-phosphate
  modified_base 5: mod_base = OTHER; note = 2'-fluorouridine-3'-phosphate
  modified_base 6: mod_base = OTHER; note = 2'-O-methylguanosine-3'-phosphate
  modified_base 7: mod_base = OTHER; note = 2'-fluorouridine-3'-phosphate
  modified_base 8: mod_base = OTHER; note = 2'-O-methyluridine-3'-phosphate
  modified_base 9: mod_base = OTHER; note = 2'-fluorouridine-3'-phosphate
  modified_base 10: mod_base = OTHER; note = 2'-fluoroguanosine-3'-phosphate
  modified_base 11: mod_base = OTHER; note = 2'-fluoroguanosine-3'-phosphate
  modified_base 12: mod_base = OTHER; note = 2'-O-methylguanosine-3'-phosphate
  modified_base 13: mod_base = OTHER; note = 2'-fluorocytidine-3'-phosphate
  modified_base 14: mod_base = OTHER; note = 2'-O-methyladenosine-3'-phosphate
  modified_base 15: mod_base = OTHER; note = 2'-fluoroadenosine-3'-phosphate
  modified_base 16: mod_base = OTHER; note = 2'-O-methylcytidine-3'-phosphate
  modified_base 17: mod_base = OTHER; note = 2'-fluoroguanosine-3'-phosphate
  modified_base 18: mod_base = OTHER; note = 2'-O-methyluridine-3'-phosphate
  modified_base 19: mod_base = OTHER; note = 2'-fluorocytidine-3'-phosphate
  modified_base 20: mod_base = OTHER; note = 2'-O-methyladenosine-3'-phosphate
  modified_base 21: mod_base = OTHER; note 2'-fluorouridine-3'-phosphate-N-[tris(GalNAc-alkyl)-amidode canoyl)]-4-hydroxyprolinol (Hyp-(GalNAc-alkyl)3)
aatgtgtttgggcaacgtcat

SEQ ID NO: 43 - RNA, 21 nt, synthetic construct
  source 1..21: mol_type = other RNA
  modified_base 1: mod_base = OTHER; note = 2'-fluorouridine -3'-phosphorothioate
  modified_base 2: mod_base = OTHER; note = 2'-O-methylguanosine-3'- phosphorothioate
  modified_base 3: mod_base = OTHER; note = 2'-fluorouridine-3'-phosphate
  modified_base 4: mod_base = OTHER; note = 2'-O-methylguanosine-3'-phosphate
  modified_base 5: mod_base = OTHER; note = 2'-fluoroadenosine-3'-phosphate
  modified_base 6: mod_base = OTHER; note = 2'-O-methylcytidine-3'-phosphate
  modified_base 7: mod_base = OTHER; note = 2'-fluorouridine-3'-phosphate
  modified_base 8: mod_base = OTHER; note = 2'-O-methylguanosine-3'-phosphate
  modified_base 9: mod_base = OTHER; note = 2'-fluorouridine-3'-phosphate
  modified_base 10: mod_base = OTHER; note = 2'-fluoroguanosine-3'-phosphate
  modified_base 11: mod_base = OTHER; note = 2'-fluoroguanosine-3'-phosphate
  modified_base 12: mod_base = OTHER; note = 2'-O-methyladenosine-3'-phosphate
  modified_base 13: mod_base = OTHER; note = 2'-fluorocytidine-3'-phosphate
  modified_base 14: mod_base = OTHER; note = 2'-O-methyladenosine-3'-phosphate
  modified_base 15: mod_base = OTHER; note = 2'-fluorocytidine-3'-phosphate
  modified_base 16: mod_base = OTHER; note = 2'-O-methylcytidine-3'-phosphate
  modified_base 17: mod_base = OTHER; note = 2'-fluorocytidine-3'-phosphate
  modified_base 18: mod_base = OTHER; note = 2'-O-methylcytidine-3'-phosphate
  modified_base 19: mod_base = OTHER; note = 2'-fluorouridine-3'-phosphate
  modified_base 20: mod_base = OTHER; note = 2'-O-methyluridine-3'-phosphate
  modified_base 21: mod_base = OTHER; note 2'-fluoroadenosine-3'-phosphate-N-[tris(GalNAc-alkyl)-amido decanoyl)]-4-hydroxyprolinol (Hyp-(GalNAc-alkyl)3)
tgtgactgtggacacccctta

SEQ ID NO: 44 - RNA, 21 nt, synthetic construct
  source 1..21: mol_type = other RNA
  modified_base 1: mod_base = OTHER; note = 2'-fluoroguanosine-3'-phosphorothioate
  modified_base 2: mod_base = OTHER; note = 2'-O-methyladenosine-3'- phosphorothioate
  modified_base 3: mod_base = OTHER; note = 2'-fluorouridine-3'-phosphate
  modified_base 4: mod_base = OTHER; note = 2'-O-methylguanosine-3'-phosphate
  modified_base 5: mod_base = OTHER; note = 2'-fluoroguanosine-3'-phosphate
  modified_base 6: mod_base = OTHER; note = 2'-O-methylguanosine-3'-phosphate
  modified_base 7: mod_base = OTHER; note = 2'-fluoroguanosine-3'-phosphate
  modified_base 8: mod_base = OTHER; note = 2'-O-methyluridine-3'-phosphate
  modified_base 9: mod_base = OTHER; note = 2'-fluoroguanosine-3'-phosphate
  modified_base 10: mod_base = OTHER; note = 2'-fluorocytidine-3'-phosphate
  modified_base 11: mod_base = OTHER; note = 2'-fluorocytidine-3'-phosphate
  modified_base 12: mod_base = OTHER; note = 2'-O-methyladenosine-3'-phosphate
  modified_base 13: mod_base = OTHER; note = 2'-fluoroguanosine-3'-phosphate
  modified_base 14: mod_base = OTHER; note = 2'-O-methylcytidine-3'-phosphate
  modified_base 15: mod_base = OTHER; note = 2'-fluorouridine-3'-phosphate
  modified_base 16: mod_base = OTHER; note = 2'-O-methyladenosine-3'-phosphate
  modified_base 17: mod_base = OTHER; note = 2'-fluorocytidine-3'-phosphate
  modified_base 18: mod_base = OTHER; note = 2'-O-methyluridine-3'-phosphate
  modified_base 19: mod_base = OTHER; note = 2'-fluoroadenosine-3'-phosphate
  modified_base 20: mod_base = OTHER; note = 2'-O-methyluridine-3'-phosphate
  modified_base 21: mod_base = OTHER; note 2'-fluorouridine-3'-phosphate-N-[tris(GalNAc-alkyl)-amidode canoyl)]-4-hydroxyprolinol (Hyp-(GalNAc-alkyl)3)
gatggggtgccagctactatt

SEQ ID NO: 45 - RNA, 21 nt, synthetic construct
  source 1..21: mol_type = other RNA
  modified_base 1: mod_base = OTHER; note = 2'-fluoroguanosine-3'-phosphorothioate
  modified_base 2: mod_base = OTHER; note = 2'-O-methyladenosine-3'- phosphorothioate
  modified_base 3: mod_base = OTHER; note = 2'-fluoroadenosine-3'-phosphate
  modified_base 4: mod_base = OTHER; note = 2'-O-methyladenosine-3'-phosphate
  modified_base 5: mod_base = OTHER; note = 2'-fluoroadenosine-3'-phosphate
  modified_base 6: mod_base = OTHER; note = 2'-O-methyluridine-3'-phosphate
  modified_base 7: mod_base = OTHER; note = 2'-fluoroguanosine-3'-phosphate
  modified_base 8: mod_base = OTHER; note = 2'-O-methyluridine-3'-phosphate
  modified_base 9: mod_base = OTHER; note = 2'-fluoroguanosine-3'-phosphate
  modified_base 10: mod_base = OTHER; note = 2'-fluorouridine-3'-phosphate
  modified_base 11: mod_base = OTHER; note = 2'-fluorouridine-3'-phosphate
  modified_base 12: mod_base = OTHER; note = 2'-O-methyluridine-3'-phosphate
  modified_base 13: mod_base = OTHER; note = 2'-fluoroguanosine-3'-phosphate
  modified_base 14: mod_base = OTHER; note = 2'-O-methylguanosine-3'-phosphate
  modified_base 15: mod_base = OTHER; note = 2'-fluoroguanosine-3'-phosphate
  modified_base 16: mod_base = OTHER; note = 2'-O-methylcytidine-3'-phosphate
  modified_base 17: mod_base = OTHER; note = 2'-fluoroadenosine-3'-phosphate
  modified_base 18: mod_base = OTHER; note = 2'-O-methyladenosine-3'-phosphate
  modified_base 19: mod_base = OTHER; note = 2'-fluorocytidine-3'-phosphate
  modified_base 20: mod_base = OTHER; note = 2'-O-methylguanosine-3'-phosphate
  modified_base 21: mod_base = OTHER; note 2'-fluorouridine-3'-phosphate-N-[tris(GalNAc-alkyl)-amidode canoyl)]-4-hydroxyprolinol (Hyp-(GalNAc-alkyl)3)
gaaaatgtgtttgggcaacgt

SEQ ID NO: 46 - RNA, 21 nt, synthetic construct
  source 1..21: mol_type = other RNA
  modified_base 1: mod_base = OTHER; note = 2'-fluoroguanosine-3'-phosphorothioate
  modified_base 2: mod_base = OTHER; note = 2'-O-methylguanosine-3'- phosphorothioate
  modified_base 3: mod_base = OTHER; note = 2'-fluorocytidine-3'-phosphate
  modified_base 4: mod_base = OTHER; note = 2'-O-methyluridine-3'-phosphate
  modified_base 5: mod_base = OTHER; note = 2'-fluoroguanosine-3'-phosphate
  modified_base 6: mod_base = OTHER; note = 2'-O-methyluridine-3'-phosphate
  modified_base 7: mod_base = OTHER; note = 2'-fluorouridine-3'-phosphate
  modified_base 8: mod_base = OTHER; note = 2'-O-methyluridine-3'-phosphate
  modified_base 9: mod_base = OTHER; note = 2'-fluorocytidine-3'-phosphate
  modified_base 10: mod_base = OTHER; note = 2'-fluorocytidine-3'-phosphate
  modified_base 11: mod_base = OTHER; note = 2'-fluoroadenosine-3'-phosphate
  modified_base 12: mod_base = OTHER; note = 2'-O-methyladenosine-3'-phosphate
  modified_base 13: mod_base = OTHER; note = 2'-fluoroguanosine-3'-phosphate
  modified_base 14: mod_base = OTHER; note = 2'-O-methyladenosine-3'-phosphate
  modified_base 15: mod_base = OTHER; note = 2'-fluorouridine-3'-phosphate
  modified_base 16: mod_base = OTHER; note = 2'-O-methylcytidine-3'-phosphate
  modified_base 17: mod_base = OTHER; note = 2'-fluorouridine-3'-phosphate
  modified_base 18: mod_base = OTHER; note = 2'-O-methylguanosine-3'-phosphate
  modified_base 19: mod_base = OTHER; note = 2'-fluoroadenosine-3'-phosphate
  modified_base 20: mod_base = OTHER; note = 2'-O-methylcytidine-3'-phosphate
  modified_base 21: mod_base = OTHER; note 2'-fluoroadenosine-3'-phosphate-N-[tris(GalNAc-alkyl)-amido decanoyl)]-4-hydroxyprolinol (Hyp-(GalNAc-alkyl)3)
ggctgtttccaagatctgaca

SEQ ID NO: 47 - RNA, 21 nt, synthetic construct
  source 1..21: mol_type = other RNA
  modified_base 1: mod_base = OTHER; note = 2'-fluorouridine -3'-phosphorothioate
  modified_base 2: mod_base = OTHER; note = 2'-O-methylcytidine-3'- phosphorothioate
  modified_base 3: mod_base = OTHER; note = 2'-fluorocytidine-3'-phosphate
  modified_base 4: mod_base = OTHER; note = 2'-O-methyladenosine-3'-phosphate
  modified_base 5: mod_base = OTHER; note = 2'-fluoroadenosine-3'-phosphate
  modified_base 6: mod_base = OTHER; note = 2'-O-methylcytidine-3'-phosphate
  modified_base 7: mod_base = OTHER; note = 2'-fluoroadenosine-3'-phosphate
  modified_base 8: mod_base = OTHER; note = 2'-O-methyladenosine-3'-phosphate
  modified_base 9: mod_base = OTHER; note = 2'-fluoroadenosine-3'-phosphate
  modified_base 10: mod_base = OTHER; note = 2'-fluoroadenosine-3'-phosphate
  modified_base 11: mod_base = OTHER; note = 2'-fluorouridine-3'-phosphate
  modified_base 12: mod_base = OTHER; note = 2'-O-methyladenosine-3'-phosphate
  modified_base 13: mod_base = OTHER; note = 2'-fluoroguanosine-3'-phosphate
  modified_base 14: mod_base = OTHER; note = 2'-O-methylcytidine-3'-phosphate
  modified_base 15: mod_base = OTHER; note = 2'-fluorocytidine-3'-phosphate
  modified_base 16: mod_base = OTHER; note = 2'-O-methyladenosine-3'-phosphate
  modified_base 17: mod_base = OTHER; note = 2'-fluorocytidine-3'-phosphate
  modified_base 18: mod_base = OTHER; note = 2'-O-methylcytidine-3'-phosphate
  modified_base 19: mod_base = OTHER; note = 2'-fluorocytidine-3'-phosphate
  modified_base 20: mod_base = OTHER; note = 2'-O-methylcytidine-3'-phosphate
  modified_base 21: mod_base = OTHER; note 2'-fluorouridine-3'-phosphate-N-[tris(GalNAc-alkyl)-amidode canoyl)]-4-hydroxyprolinol (Hyp-(GalNAc-alkyl)3)
tccaacaaaatagccacccct

SEQ ID NO: 48 - RNA, 21 nt, synthetic construct
  source 1..21: mol_type = other RNA
  modified_base 1: mod_base = OTHER; note = 2'-fluoroguanosine-3'-phosphorothioate
  modified_base 2: mod_base = OTHER; note = 2'-O-methyluridine-3'-phosphorothioate
  modified_base 3: mod_base = OTHER; note = 2'-fluorocytidine-3'-phosphate
  modified_base 4: mod_base = OTHER; note = 2'-O-methyluridine-3'-phosphate
  modified_base 5: mod_base = OTHER; note = 2'-fluorouridine-3'-phosphate
  modified_base 6: mod_base = OTHER; note = 2'-O-methylcytidine-3'-phosphate
  modified_base 7: mod_base = OTHER; note = 2'-fluorouridine-3'-phosphate
  modified_base 8: mod_base = OTHER; note = 2'-O-methylguanosine-3'-phosphate
  modified_base 9: mod_base = OTHER; note = 2'-fluorouridine-3'-phosphate
  modified_base 10: mod_base = OTHER; note = 2'-fluorouridine-3'-phosphate
  modified_base 11: mod_base = OTHER; note = 2'-fluorouridine-3'-phosphate
  modified_base 12: mod_base = OTHER; note = 2'-O-methyladenosine-3'-phosphate
  modified_base 13: mod_base = OTHER; note = 2'-fluoroguanosine-3'-phosphate
  modified_base 14: mod_base = OTHER; note = 2'-O-methyladenosine-3'-phosphate
  modified_base 15: mod_base = OTHER; note = 2'-fluorouridine-3'-phosphate
  modified_base 16: mod_base = OTHER; note = 2'-O-methyluridine-3'-phosphate
  modified_base 17: mod_base = OTHER; note = 2'-fluorouridine-3'-phosphate
  modified_base 18: mod_base = OTHER; note = 2'-O-methylcytidine-3'-phosphate
  modified_base 19: mod_base = OTHER; note = 2'-fluorocytidine-3'-phosphate
  modified_base 20: mod_base = OTHER; note = 2'-O-methyluridine-3'-phosphate
  modified_base 21: mod_base = OTHER; note 2'-fluorouridine-3'-phosphate-N-[tris(GalNAc-alkyl)-amidode canoyl)]-4-hydroxyprolinol (Hyp-(GalNAc-alkyl)3)
gtcttctgtttagatttcctt

SEQ ID NO: 49 - RNA, 21 nt, synthetic construct
  source 1..21: mol_type = other RNA
  modified_base 1: mod_base = OTHER; note = 2'-fluorouridine -3'-phosphorothioate
  modified_base 2: mod_base = OTHER; note = 2'-O-methylguanosine-3'- phosphorothioate
  modified_base 3: mod_base = OTHER; note = 2'-fluoroguanosine-3'-phosphate
  modified_base 4: mod_base = OTHER; note = 2'-O-methyladenosine-3'-phosphate
  modified_base 5: mod_base = OTHER; note = 2'-fluoroadenosine-3'-phosphate
  modified_base 6: mod_base = OTHER; note = 2'-O-methylguanosine-3'-phosphate
  modified_base 7: mod_base = OTHER; note = 2'-fluoroguanosine-3'-phosphate
  modified_base 8: mod_base = OTHER; note = 2'-O-methylguanosine-3'-phosphate
  modified_base 9: mod_base = OTHER; note = 2'-fluoroadenosine-3'-phosphate
  modified_base 10: mod_base = OTHER; note = 2'-fluoroadenosine-3'-phosphate
  modified_base 11: mod_base = OTHER; note = 2'-fluoroguanosine-3'-phosphate
  modified_base 12: mod_base = OTHER; note = 2'-O-methylguanosine-3'-phosphate
  modified_base 13: mod_base = OTHER; note = 2'-fluorouridine-3'-phosphate
  modified_base 14: mod_base = OTHER; note = 2'-O-methyladenosine-3'-phosphate
  modified_base 15: mod_base = OTHER; note = 2'-fluoroguanosine-3'-phosphate
  modified_base 16: mod_base = OTHER; note = 2'-O-methyladenosine-3'-phosphate
  modified_base 17: mod_base = OTHER; note = 2'-fluoroadenosine-3'-phosphate
  modified_base 18: mod_base = OTHER; note = 2'-O-methylguanosine-3'-phosphate
  modified_base 19: mod_base = OTHER; note = 2'-fluorouridine-3'-phosphate
  modified_base 20: mod_base = OTHER; note = 2'-O-methylcytidine-3'-phosphate
  modified_base 21: mod_base = OTHER; note 2'-fluorouridine-3'-phosphate-N-[tris(GalNAc-alkyl)-amidode canoyl)]-4-hydroxyprolinol (Hyp-(GalNAc-alkyl)3)
tggaagggaaggtagaagtct

SEQ ID NO: 50 - RNA, 21 nt, synthetic construct
  source 1..21: mol_type = other RNA
  modified_base 1: mod_base = OTHER; note = 2'-fluorouridine -3'-phosphorothioate
  modified_base 2: mod_base = OTHER; note = 2'-O-methylcytidine-3'- phosphorothioate
  modified_base 3: mod_base = OTHER; note = 2'-fluorocytidine-3'-phosphate
  modified_base 4: mod_base = OTHER; note = 2'-O-methyluridine-3'-phosphate
  modified_base 5: mod_base = OTHER; note = 2'-fluorouridine-3'-phosphate
  modified_base 6: mod_base = OTHER; note = 2'-O-methyluridine-3'-phosphate
  modified_base 7: mod_base = OTHER; note = 2'-fluoroguanosine-3'-phosphate
  modified_base 8: mod_base = OTHER; note = 2'-O-methylguanosine-3'-phosphate
  modified_base 9: mod_base = OTHER; note = 2'-fluorocytidine-3'-phosphate
  modified_base 10: mod_base = OTHER; note = 2'-fluorouridine-3'-phosphate
  modified_base 11: mod_base = OTHER; note = 2'-fluoroguanosine-3'-phosphate
  modified_base 12: mod_base = OTHER; note = 2'-O-methyluridine-3'-phosphate
  modified_base 13: mod_base = OTHER; note = 2'-fluorouridine-3'-phosphate
  modified_base 14: mod_base = OTHER; note = 2'-O-methyluridine-3'-phosphate
  modified_base 15: mod_base = OTHER; note = 2'-fluorocytidine-3'-phosphate
  modified_base 16: mod_base = OTHER; note = 2'-O-methylcytidine-3'-phosphate
  modified_base 17: mod_base = OTHER; note = 2'-fluoroadenosine-3'-phosphate
  modified_base 18: mod_base = OTHER; note = 2'-O-methyladenosine-3'-phosphate
  modified_base 19: mod_base = OTHER; note = 2'-fluoroguanosine-3'-phosphate
  modified_base 20: mod_base = OTHER; note = 2'-O-methyladenosine-3'-phosphate
  modified_base 21: mod_base = OTHER; note 2'-fluorouridine-3'-phosphate-N-[tris(GalNAc-alkyl)-amidode canoyl)]-4-hydroxyprolinol (Hyp-(GalNAc-alkyl)3)
tcctttggctgtttccaagat

SEQ ID NO: 51 - RNA, 21 nt, synthetic construct
  source 1..21: mol_type = other RNA
  modified_base 1: mod_base = OTHER; note = 2'-fluorocytidine-3'-phosphorothioate
  modified_base 2: mod_base = OTHER; note = 2'-O-methyladenosine-3'- phosphorothioate
  modified_base 3: mod_base = OTHER; note = 2'-fluorouridine-3'-phosphate
  modified_base 4: mod_base = OTHER; note = 2'-O-methylcytidine-3'-phosphate
  modified_base 5: mod_base = OTHER; note = 2'-fluorouridine-3'-phosphate
  modified_base 6: mod_base = OTHER; note = 2'-O-methylcytidine-3'-phosphate
  modified_base 7: mod_base = OTHER; note = 2'-fluorouridine-3'-phosphate
  modified_base 8: mod_base = OTHER; note = 2'-O-methylcytidine-3'-phosphate
  modified_base 9: mod_base = OTHER; note = 2'-fluoroadenosine-3'-phosphate
  modified_base 10: mod_base = OTHER; note = 2'-fluoroguanosine-3'-phosphate
  modified_base 11: mod_base = OTHER; note = 2'-fluorocytidine-3'-phosphate
  modified_base 12: mod_base = OTHER; note = 2'-O-methyluridine-3'-phosphate
  modified_base 13: mod_base = OTHER; note = 2'-fluoroguanosine-3'-phosphate
  modified_base 14: mod_base = OTHER; note = 2'-O-methylguanosine-3'-phosphate
  modified_base 15: mod_base = OTHER; note = 2'-fluoroguanosine-3'-phosphate
  modified_base 16: mod_base = OTHER; note = 2'-O-methyladenosine-3'-phosphate
  modified_base 17: mod_base = OTHER; note = 2'-fluorouridine-3'-phosphate
  modified_base 18: mod_base = OTHER; note = 2'-O-methylguanosine-3'-phosphate
  modified_base 19: mod_base = OTHER; note = 2'-fluoroadenosine-3'-phosphate
  modified_base 20: mod_base = OTHER; note = 2'-O-methyluridine-3'-phosphate
  modified_base 21: mod_base = OTHER; note 2'-fluoroadenosine-3'-phosphate-N-[tris(GalNAc-alkyl)-amido decanoyl)]-4-hydroxyprolinol (Hyp-(GalNAc-alkyl)3)
catctctcagctgggatgata

SEQ ID NO: 52 - RNA, 21 nt, synthetic construct
  source 1..21: mol_type = other RNA
  modified_base 1: mod_base = OTHER; note = 2'-fluoroguanosine-3'-phosphorothioate
  modified_base 2: mod_base = OTHER; note = 2'-O-methylguanosine-3'- phosphorothioate
  modified_base 3: mod_base = OTHER; note = 2'-fluoroguanosine-3'-phosphate
  modified_base 4: mod_base = OTHER; note = 2'-O-methylguanosine-3'-phosphate
  modified_base 5: mod_base = OTHER; note = 2'-fluorouridine-3'-phosphate
  modified_base 6: mod_base = OTHER; note = 2'-O-methylguanosine-3'-phosphate
  modified_base 7: mod_base = OTHER; note = 2'-fluorocytidine-3'-phosphate
  modified_base 8: mod_base = OTHER; note = 2'-O-methylcytidine-3'-phosphate
  modified_base 9: mod_base = OTHER; note = 2'-fluoroadenosine-3'-phosphate
  modified_base 10: mod_base = OTHER; note = 2'-fluoroguanosine-3'-phosphate
  modified_base 11: mod_base = OTHER; note = 2'-fluorocytidine-3'-phosphate
  modified_base 12: mod_base = OTHER; note = 2'-O-methyluridine-3'-phosphate
  modified_base 13: mod_base = OTHER; note = 2'-fluoroadenosine-3'-phosphate
  modified_base 14: mod_base = OTHER; note = 2'-O-methylcytidine-3'-phosphate
  modified_base 15: mod_base = OTHER; note = 2'-fluorouridine-3'-phosphate
  modified_base 16: mod_base = OTHER; note = 2'-O-methyladenosine-3'-phosphate
  modified_base 17: mod_base = OTHER; note = 2'-fluorouridine-3'-phosphate
  modified_base 18: mod_base = OTHER; note = 2'-O-methyluridine-3'-phosphate
  modified_base 19: mod_base = OTHER; note = 2'-fluoroguanosine-3'-phosphate
  modified_base 20: mod_base = OTHER; note = 2'-O-methyladenosine-3'-phosphate
  modified_base 21: mod_base = OTHER; note 2'-fluorouridine-3'-phosphate-N-[tris(GalNAc-alkyl)-amidode canoyl)]-4-hydroxyprolinol (Hyp-(GalNAc-alkyl)3)
ggggtgccagctactattgat

SEQ ID NO: 53 - RNA, 21 nt, synthetic construct
  source 1..21: mol_type = other RNA
  modified_base 1: mod_base = OTHER; note = 2'-fluoroadenosine-3'-phosphorothioate
  modified_base 2: mod_base = OTHER; note = 2'-O-methyluridine-3'-phosphorothioate
  modified_base 3: mod_base = OTHER; note = 2'-fluoroguanosine-3'-phosphate
  modified_base 4: mod_base = OTHER; note = 2'-O-methyluridine-3'-phosphate
  modified_base 5: mod_base = OTHER; note = 2'-fluoroguanosine-3'-phosphate
  modified_base 6: mod_base = OTHER; note = 2'-O-methyluridine-3'-phosphate
  modified_base 7: mod_base = OTHER; note = 2'-fluorouridine-3'-phosphate
  modified_base 8: mod_base = OTHER; note = 2'-O-methyluridine-3'-phosphate
  modified_base 9: mod_base = OTHER; note = 2'-fluoroguanosine-3'-phosphate
  modified_base 10: mod_base = OTHER; note = 2'-fluoroguanosine-3'-phosphate
  modified_base 11: mod_base = OTHER; note = 2'-fluoroguanosine-3'-phosphate
  modified_base 12: mod_base = OTHER; note = 2'-O-methylcytidine-3'-phosphate
  modified_base 13: mod_base = OTHER; note = 2'-fluoroadenosine-3'-phosphate
  modified_base 14: mod_base = OTHER; note = 2'-O-methyladenosine-3'-phosphate
  modified_base 15: mod_base = OTHER; note = 2'-fluorocytidine-3'-phosphate
  modified_base 16: mod_base = OTHER; note = 2'-O-methylguanosine-3'-phosphate
  modified_base 17: mod_base = OTHER; note = 2'-fluorouridine-3'-phosphate
  modified_base 18: mod_base = OTHER; note = 2'-O-methylcytidine-3'-phosphate
  modified_base 19: mod_base = OTHER; note = 2'-fluoroadenosine-3'-phosphate
  modified_base 20: mod_base = OTHER; note = 2'-O-methyluridine-3'-phosphate
  modified_base 21: mod_base = OTHER; note 2'-fluoroadenosine-3'-phosphate-N-[tris(GalNAc-alkyl)-amido decanoyl)]-4-hydroxyprolinol (Hyp-(GalNAc-alkyl)3)
atgtgtttgggcaacgtcata

SEQ ID NO: 54 - RNA, 21 nt, synthetic construct
  source 1..21: mol_type = other RNA
  modified_base 1: mod_base = OTHER; note = 2'-fluorocytidine-3'-phosphorothioate
  modified_base 2: mod_base = OTHER; note = 2'-O-methyluridine-3'-phosphorothioate
  modified_base 3: mod_base = OTHER; note = 2'-fluoroguanosine-3'-phosphate
  modified_base 4: mod_base = OTHER; note = 2'-O-methyluridine-3'-phosphate
  modified_base 5: mod_base = OTHER; note = 2'-fluorouridine-3'-phosphate
  modified_base 6: mod_base = OTHER; note = 2'-O-methyluridine-3'-phosphate
  modified_base 7: mod_base = OTHER; note = 2'-fluoroadenosine-3'-phosphate
  modified_base 8: mod_base = OTHER; note = 2'-O-methylguanosine-3'-phosphate
  modified_base 9: mod_base = OTHER; note = 2'-fluoroadenosine-3'-phosphate
  modified_base 10: mod_base = OTHER; note = 2'-fluorouridine-3'-phosphate
  modified_base 11: mod_base = OTHER; note = 2'-fluorouridine-3'-phosphate
  modified_base 12: mod_base = OTHER; note = 2'-O-methyluridine-3'-phosphate
  modified_base 13: mod_base = OTHER; note = 2'-fluorocytidine-3'-phosphate
  modified_base 14: mod_base = OTHER; note = 2'-O-methylcytidine-3'-phosphate
  modified_base 15: mod_base = OTHER; note = 2'-fluorouridine-3'-phosphate
  modified_base 16: mod_base = OTHER; note = 2'-O-methyluridine-3'-phosphate
  modified_base 17: mod_base = OTHER; note = 2'-fluoroadenosine-3'-phosphate
  modified_base 18: mod_base = OTHER; note = 2'-O-methyladenosine-3'-phosphate
  modified_base 19: mod_base = OTHER; note = 2'-fluoroguanosine-3'-phosphate
  modified_base 20: mod_base = OTHER; note = 2'-O-methyladenosine-3'-phosphate
  modified_base 21: mod_base = OTHER; note 2'-fluoroadenosine-3'-phosphate-N-[tris(GalNAc-alkyl)-amido decanoyl)]-4-hydroxyprolinol (Hyp-(GalNAc-alkyl)3)
ctgtttagatttccttaagaa

SEQ ID NO: 55 - RNA, 21 nt, synthetic construct
  source 1..21: mol_type = other RNA
  modified_base 1: mod_base = OTHER; note = 2'-fluoroadenosine-3'-phosphorothioate
  modified_base 2: mod_base = OTHER; note = 2'-O-methylguanosine-3'- phosphorothioate
  modified_base 3: mod_base = OTHER; note = 2'-fluoroadenosine-3'-phosphate
  modified_base 4: mod_base = OTHER; note = 2'-O-methyladenosine-3'-phosphate
  modified_base 5: mod_base = OTHER; note = 2'-fluoroadenosine-3'-phosphate
  modified_base 6: mod_base = OTHER; note = 2'-O-methylguanosine-3'-phosphate
  modified_base 7: mod_base = OTHER; note = 2'-fluoroadenosine-3'-phosphate
  modified_base 8: mod_base = OTHER; note = 2'-O-methyladenosine-3'-phosphate
  modified_base 9: mod_base = OTHER; note = 2'-fluoroadenosine-3'-phosphate
  modified_base 10: mod_base = OTHER; note = 2'-fluorouridine-3'-phosphate
  modified_base 11: mod_base = OTHER; note = 2'-fluoroguanosine-3'-phosphate
  modified_base 12: mod_base = OTHER; note = 2'-O-methylguanosine-3'-phosphate
  modified_base 13: mod_base = OTHER; note = 2'-fluoroadenosine-3'-phosphate
  modified_base 14: mod_base = OTHER; note = 2'-O-methylcytidine-3'-phosphate
  modified_base 15: mod_base = OTHER; note = 2'-fluorouridine-3'-phosphate
  modified_base 16: mod_base = OTHER; note = 2'-O-methyluridine-3'-phosphate
  modified_base 17: mod_base = OTHER; note = 2'-fluoroguanosine-3'-phosphate
  modified_base 18: mod_base = OTHER; note = 2'-O-methylcytidine-3'-phosphate
  modified_base 19: mod_base = OTHER; note = 2'-fluoroadenosine-3'-phosphate
  modified_base 20: mod_base = OTHER; note = 2'-O-methyluridine-3'-phosphate
  modified_base 21: mod_base = OTHER; note 2'-fluoroadenosine-3'-phosphate-N-[tris(GalNAc-alkyl)-amido decanoyl)]-4-hydroxyprolinol (Hyp-(GalNAc-alkyl)3)
agaaagaaatggacttgcata

SEQ ID NO: 56 - RNA, 21 nt, synthetic construct
  source 1..21: mol_type = other RNA
  modified_base 1: mod_base = OTHER; note = 2'-fluoroguanosine-3'-phosphorothioate
  modified_base 2: mod_base = OTHER; note = 2'-O-methylcytidine-3'- phosphorothioate
  modified_base 3: mod_base = OTHER; note = 2'-fluoroadenosine-3'-phosphate
  modified_base 4: mod_base = OTHER; note = 2'-O-methyluridine-3'-phosphate
  modified_base 5: mod_base = OTHER; note = 2'-fluorocytidine-3'-phosphate
  modified_base 6: mod_base = OTHER; note = 2'-O-methylcytidine-3'-phosphate
  modified_base 7: mod_base = OTHER; note = 2'-fluorouridine-3'-phosphate
  modified_base 8: mod_base = OTHER; note = 2'-O-methylguanosine-3'-phosphate
  modified_base 9: mod_base = OTHER; note = 2'-fluoroguanosine-3'-phosphate
  modified_base 10: mod_base = OTHER; note = 2'-fluoroadenosine-3'-phosphate
  modified_base 11: mod_base = OTHER; note = 2'-fluoroadenosine-3'-phosphate
  modified_base 12: mod_base = OTHER; note = 2'-O-methyladenosine-3'-phosphate
  modified_base 13: mod_base = OTHER; note = 2'-fluorouridine-3'-phosphate
  modified_base 14: mod_base = OTHER; note = 2'-O-methyladenosine-3'-phosphate
  modified_base 15: mod_base = OTHER; note = 2'-fluorouridine-3'-phosphate
  modified_base 16: mod_base = OTHER; note = 2'-O-methyladenosine-3'-phosphate
  modified_base 17: mod_base = OTHER; note = 2'-fluorouridine-3'-phosphate
  modified_base 18: mod_base = OTHER; note = 2'-O-methyluridine-3'-phosphate
  modified_base 19: mod_base = OTHER; note = 2'-fluoroadenosine-3'-phosphate
  modified_base 20: mod_base = OTHER; note = 2'-O-methyladenosine-3'-phosphate
  modified_base 21: mod_base = OTHER; note 2'-fluoroadenosine-3'-phosphate-N-[tris(GalNAc-alkyl)-amido decanoyl)]-4-hydroxyprolinol (Hyp-(GalNAc-alkyl)3)
gcatcctggaaatatattaaa

SEQ ID NO: 57 - RNA, 21 nt, synthetic construct
  source 1..21: mol_type = other RNA
  modified_base 1: mod_base = OTHER; note = 2'-fluorocytidine-3'-phosphorothioate
  modified_base 2: mod_base = OTHER; note = 2'-O-methylcytidine-3'- phosphorothioate
  modified_base 3: mod_base = OTHER; note = 2'-fluorouridine-3'-phosphate
  modified_base 4: mod_base = OTHER; note = 2'-O-methylguanosine-3'-phosphate
  modified_base 5: mod_base = OTHER; note = 2'-fluorouridine-3'-phosphate
  modified_base 6: mod_base = OTHER; note = 2'-O-methylcytidine-3'-phosphate
  modified_base 7: mod_base = OTHER; note = 2'-fluoroadenosine-3'-phosphate
  modified_base 8: mod_base = OTHER; note = 2'-O-methylguanosine-3'-phosphate
  modified_base 9: mod_base = OTHER; note = 2'-fluoroadenosine-3'-phosphate
  modified_base 10: mod_base = OTHER; note = 2'-fluorocytidine-3'-phosphate
  modified_base 11: mod_base = OTHER; note = 2'-fluorocytidine-3'-phosphate
  modified_base 12: mod_base = OTHER; note = 2'-O-methyladenosine-3'-phosphate
  modified_base 13: mod_base = OTHER; note = 2'-fluorouridine-3'-phosphate
  modified_base 14: mod_base = OTHER; note = 2'-O-methylguanosine-3'-phosphate
  modified_base 15: mod_base = OTHER; note = 2'-fluoroguanosine-3'-phosphate
  modified_base 16: mod_base = OTHER; note = 2'-O-methylguanosine-3'-phosphate
  modified_base 17: mod_base = OTHER; note = 2'-fluoroadenosine-3'-phosphate
  modified_base 18: mod_base = OTHER; note = 2'-O-methyladenosine-3'-phosphate
  modified_base 19: mod_base = OTHER; note = 2'-fluorocytidine-3'-phosphate
  modified_base 20: mod_base = OTHER; note = 2'-O-methyluridine-3'-phosphate
  modified_base 21: mod_base = OTHER; note 2'-fluoroadenosine-3'-phosphate-N-[tris(GalNAc-alkyl)-amido decanoyl)]-4-hydroxyprolinol (Hyp-(GalNAc-alkyl)3)
cctgtcagaccatgggaacta

SEQ ID NO: 58 - RNA, 21 nt, synthetic construct
  source 1..21: mol_type = other RNA
  modified_base 1: mod_base = OTHER; note = 2'-fluoroadenosine-3'-phosphorothioate
  modified_base 2: mod_base = OTHER; note = 2'-O-methyladenosine-3'- phosphorothioate
  modified_base 3: mod_base = OTHER; note = 2'-fluoroadenosine-3'-phosphate
  modified_base 4: mod_base = OTHER; note = 2'-O-methylcytidine-3'-phosphate
  modified_base 5: mod_base = OTHER; note = 2'-fluoroadenosine-3'-phosphate
  modified_base 6: mod_base = OTHER; note = 2'-O-methyluridine-3'-phosphate
  modified_base 7: mod_base = OTHER; note = 2'-fluoroguanosine-3'-phosphate
  modified_base 8: mod_base = OTHER; note = 2'-O-methylguanosine-3'-phosphate
  modified_base 9: mod_base = OTHER; note = 2'-fluorouridine-3'-phosphate
  modified_base 10: mod_base = OTHER; note = 2'-fluoroguanosine-3'-phosphate
  modified_base 11: mod_base = OTHER; note = 2'-fluorouridine-3'-phosphate
  modified_base 12: mod_base = OTHER; note = 2'-O-methylguanosine-3'-phosphate
  modified_base 13: mod_base = OTHER; note = 2'-fluoroguanosine-3'-phosphate
  modified_base 14: mod_base = OTHER; note = 2'-O-methyladenosine-3'-phosphate
  modified_base 15: mod_base = OTHER; note = 2'-fluorouridine-3'-phosphate
  modified_base 16: mod_base = OTHER; note = 2'-O-methylguanosine-3'-phosphate
  modified_base 17: mod_base = OTHER; note = 2'-fluoroguanosine-3'-phosphate
  modified_base 18: mod_base = OTHER; note = 2'-O-methylguanosine-3'-phosphate
  modified_base 19: mod_base = OTHER; note = 2'-fluoroadenosine-3'-phosphate
  modified_base 20: mod_base = OTHER; note = 2'-O-methyluridine-3'-phosphate
  modified_base 21: mod_base = OTHER; note 2'-fluoroadenosine-3'-phosphate-N-[tris(GalNAc-alkyl)-amido decanoyl)]-4-hydroxyprolinol (Hyp-(GalNAc-alkyl)3)
aaacatggtgtggatgggata

SEQ ID NO: 59 - RNA, 21 nt, synthetic construct
  source 1..21: mol_type = other RNA
  modified_base 1: mod_base = OTHER; note = 2'-fluorocytidine-3'-phosphorothioate
  modified_base 2: mod_base = OTHER; note = 2'-O-methyluridine-3'-phosphorothioate
  modified_base 3: mod_base = OTHER; note = 2'-fluorocytidine-3'-phosphate
  modified_base 4: mod_base = OTHER; note = 2'-O-methyladenosine-3'-phosphate
  modified_base 5: mod_base = OTHER; note = 2'-fluoroguanosine-3'-phosphate
  modified_base 6: mod_base = OTHER; note = 2'-O-methylguanosine-3'-phosphate
  modified_base 7: mod_base = OTHER; note = 2'-fluoroadenosine-3'-phosphate
  modified_base 8: mod_base = OTHER; note = 2'-O-methyluridine-3'-phosphate
  modified_base 9: mod_base = OTHER; note = 2'-fluoroguanosine-3'-phosphate
  modified_base 10: mod_base = OTHER; note = 2'-fluoroadenosine-3'-phosphate
  modified_base 11: mod_base = OTHER; note = 2'-fluoroadenosine-3'-phosphate
  modified_base 12: mod_base = OTHER; note = 2'-O-methyladenosine-3'-phosphate
  modified_base 13: mod_base = OTHER; note = 2'-fluoroadenosine-3'-phosphate
  modified_base 14: mod_base = OTHER; note = 2'-O-methyladenosine-3'-phosphate
  modified_base 15: mod_base = OTHER; note = 2'-fluorouridine-3'-phosphate
  modified_base 16: mod_base = OTHER; note = 2'-O-methyluridine-3'-phosphate
  modified_base 17: mod_base = OTHER; note = 2'-fluorouridine-3'-phosphate
  modified_base 18: mod_base = OTHER; note = 2'-O-methyluridine-3'-phosphate
  modified_base 19: mod_base = OTHER; note = 2'-fluoroguanosine-3'-phosphate
  modified_base 20: mod_base = OTHER; note = 2'-O-methyladenosine-3'-phosphate
  modified_base 21: mod_base = OTHER; note 2'-fluoroadenosine-3'-phosphate-N-[tris(GalNAc-alkyl)-amido decanoyl)]-4-hydroxyprolinol (Hyp-(GalNAc-alkyl)3)
ctcaggatgaaaaattttgaa

SEQ ID NO: 60 - RNA, 21 nt, synthetic construct
  source 1..21: mol_type = other RNA
  modified_base 1: mod_base = OTHER; note = 2'-fluorocytidine-3'-phosphorothioate
  modified_base 2: mod_base = OTHER; note = 2'-O-methyladenosine-3'- phosphorothioate
  modified_base 3: mod_base = OTHER; note = 2'-fluoroguanosine-3'-phosphate
  modified_base 4: mod_base = OTHER; note = 2'-O-methylcytidine-3'-phosphate
  modified_base 5: mod_base = OTHER; note = 2'-fluoroadenosine-3'-phosphate
  modified_base 6: mod_base = OTHER; note = 2'-O-methyluridine-3'-phosphate
  modified_base 7: mod_base = OTHER; note = 2'-fluoroguanosine-3'-phosphate
  modified_base 8: mod_base = OTHER; note = 2'-O-methyluridine-3'-phosphate
  modified_base 9: mod_base = OTHER; note = 2'-fluoroadenosine-3'-phosphate
  modified_base 10: mod_base = OTHER; note = 2'-fluorouridine-3'-phosphate
  modified_base 11: mod_base = OTHER; note = 2'-fluorouridine-3'-phosphate
  modified_base 12: mod_base = OTHER; note = 2'-O-methyladenosine-3'-phosphate
  modified_base 13: mod_base = OTHER; note = 2'-fluorocytidine-3'-phosphate
  modified_base 14: mod_base = OTHER; note = 2'-O-methyluridine-3'-phosphate
  modified_base 15: mod_base = OTHER; note = 2'-fluorouridine-3'-phosphate
  modified_base 16: mod_base = OTHER; note = 2'-O-methylguanosine-3'-phosphate
  modified_base 17: mod_base = OTHER; note = 2'-fluoroadenosine-3'-phosphate
  modified_base 18: mod_base = OTHER; note = 2'-O-methylcytidine-3'-phosphate
  modified_base 19: mod_base = OTHER; note = 2'-fluoroadenosine-3'-phosphate
  modified_base 20: mod_base = OTHER; note = 2'-O-methyladenosine-3'-phosphate
  modified_base 21: mod_base = OTHER; note 2'-fluoroadenosine-3'-phosphate-N-[tris(GalNAc-alkyl)-amido decanoyl)]-4-hydroxyprolinol (Hyp-(GalNAc-alkyl)3)
cagcatgtattacttgacaaa

SEQ ID NO: 61 - RNA, 21 nt, synthetic construct
  source 1..21: mol_type = other RNA
  modified_base 1: mod_base = OTHER; note = 2'-fluorouridine -3'-phosphorothioate
  modified_base 2: mod_base = OTHER; note = 2'-O-methyladenosine-3'- phosphorothioate
  modified_base 3: mod_base = OTHER; note = 2'-fluorouridine-3'-phosphate
  modified_base 4: mod_base = OTHER; note = 2'-O-methylguanosine-3'-phosphate
  modified_base 5: mod_base = OTHER; note = 2'-fluoroadenosine-3'-phosphate
  modified_base 6: mod_base = OTHER; note = 2'-O-methyladenosine-3'-phosphate
  modified_base 7: mod_base = OTHER; note = 2'-fluorocytidine-3'-phosphate
  modified_base 8: mod_base = OTHER; note = 2'-O-methyladenosine-3'-phosphate
  modified_base 9: mod_base = OTHER; note = 2'-fluoroadenosine-3'-phosphate
  modified_base 10: mod_base = OTHER; note = 2'-fluorocytidine-3'-phosphate
  modified_base 11: mod_base = OTHER; note = 2'-fluoroadenosine-3'-phosphate
  modified_base 12: mod_base = OTHER; note = 2'-O-methyluridine-3'-phosphate
  modified_base 13: mod_base = OTHER; note = 2'-fluoroguanosine-3'-phosphate
  modified_base 14: mod_base = OTHER; note = 2'-O-methylcytidine-3'-phosphate
  modified_base 15: mod_base = OTHER; note = 2'-fluorouridine-3'-phosphate
  modified_base 16: mod_base = OTHER; note = 2'-O-methyladenosine-3'-phosphate
  modified_base 17: mod_base = OTHER; note = 2'-fluoroadenosine-3'-phosphate
  modified_base 18: mod_base = OTHER; note = 2'-O-methyladenosine-3'-phosphate
  modified_base 19: mod_base = OTHER; note = 2'-fluorouridine-3'-phosphate
  modified_base 20: mod_base = OTHER; note = 2'-O-methylcytidine-3'-phosphate
  modified_base 21: mod_base = OTHER; note 2'-fluoroadenosine-3'-phosphate-N-[tris(GalNAc-alkyl)-amido decanoyl)]-4-hydroxyprolinol (Hyp-(GalNAc-alkyl)3)
tatgaacaacatgctaaatca

SEQ ID NO: 62 - RNA, 21 nt, synthetic construct
  source 1..21: mol_type = other RNA
  modified_base 1: mod_base = OTHER; note = 2'-fluoroadenosine-3'-phosphorothioate
  modified_base 2: mod_base = OTHER; note = 2'-O-methyluridine-3'-phosphorothioate
  modified_base 3: mod_base = OTHER; note = 2'-fluoroadenosine-3'-phosphate
  modified_base 4: mod_base = OTHER; note = 2'-O-methyluridine-3'-phosphate
  modified_base 5: mod_base = OTHER; note = 2'-fluoroadenosine-3'-phosphate
  modified_base 6: mod_base = OTHER; note = 2'-O-methyluridine-3'-phosphate
  modified_base 7: mod_base = OTHER; note = 2'-fluorocytidine-3'-phosphate
  modified_base 8: mod_base = OTHER; note = 2'-O-methylcytidine-3'-phosphate
  modified_base 9: mod_base = OTHER; note = 2'-fluoroadenosine-3'-phosphate
  modified_base 10: mod_base = OTHER; note = 2'-fluoroadenosine-3'-phosphate
  modified_base 11: mod_base = OTHER; note = 2'-fluoroadenosine-3'-phosphate
  modified_base 12: mod_base = OTHER; note = 2'-O-methyluridine-3'-phosphate
  modified_base 13: mod_base = OTHER; note = 2'-fluoroguanosine-3'-phosphate
  modified_base 14: mod_base = OTHER; note = 2'-O-methyluridine-3'-phosphate
  modified_base 15: mod_base = OTHER; note = 2'-fluorouridine-3'-phosphate
  modified_base 16: mod_base = OTHER; note = 2'-O-methyluridine-3'-phosphate
  modified_base 17: mod_base = OTHER; note = 2'-fluorouridine-3'-phosphate
  modified_base 18: mod_base = OTHER; note = 2'-O-methyladenosine-3'-phosphate
  modified_base 19: mod_base = OTHER; note = 2'-fluoroguanosine-3'-phosphate
  modified_base 20: mod_base = OTHER; note = 2'-O-methylguanosine-3'-phosphate
  modified_base 21: mod_base = OTHER; note 2'-fluoroadenosine-3'-phosphate-N-[tris(GalNAc-alkyl)-amido decanoyl)]-4-hydroxyprolinol (Hyp-(GalNAc-alkyl)3)
atatatccaaatgttttagga

SEQ ID NO: 63 - RNA, 21 nt, synthetic construct
  source 1..21: mol_type = other RNA
  modified_base 1: mod_base = OTHER; note = 2'-fluorocytidine-3'-phosphorothioate
  modified_base 2: mod_base = OTHER; note = 2'-O-methylcytidine-3'- phosphorothioate
  modified_base 3: mod_base = OTHER; note = 2'-fluoroadenosine-3'-phosphate
  modified_base 4: mod_base = OTHER; note = 2'-O-methylguanosine-3'-phosphate
  modified_base 5: mod_base = OTHER; note = 2'-fluoroadenosine-3'-phosphate
  modified_base 6: mod_base = OTHER; note = 2'-O-methyluridine-3'-phosphate
  modified_base 7: mod_base = OTHER; note = 2'-fluoroguanosine-3'-phosphate
  modified_base 8: mod_base = OTHER; note = 2'-O-methylguanosine-3'-phosphate
  modified_base 9: mod_base = OTHER; note = 2'-fluoroadenosine-3'-phosphate
  modified_base 10: mod_base = OTHER; note = 2'-fluoroadenosine-3'-phosphate
  modified_base 11: mod_base = OTHER; note = 2'-fluoroguanosine-3'-phosphate
  modified_base 12: mod_base = OTHER; note = 2'-O-methylcytidine-3'-phosphate
  modified_base 13: mod_base = OTHER; note = 2'-fluorouridine-3'-phosphate
  modified_base 14: mod_base = OTHER; note = 2'-O-methylguanosine-3'-phosphate
  modified_base 15: mod_base = OTHER; note = 2'-fluorouridine-3'-phosphate
  modified_base 16: mod_base = OTHER; note = 2'-O-methyladenosine-3'-phosphate
  modified_base 17: mod_base = OTHER; note = 2'-fluorouridine-3'-phosphate
  modified_base 18: mod_base = OTHER; note = 2'-O-methylcytidine-3'-phosphate
  modified_base 19: mod_base = OTHER; note = 2'-fluorocytidine-3'-phosphate
  modified_base 20: mod_base = OTHER; note = 2'-O-methyladenosine-3'-phosphate
  modified_base 21: mod_base = OTHER; note 2'-fluoroadenosine-3'-phosphate-N-[tris(GalNAc-alkyl)-amido decanoyl)]-4-hydroxyprolinol (Hyp-(GalNAc-alkyl)3)
ccagatggaagctgtatccaa

SEQ ID NO: 64 - RNA, 21 nt, synthetic construct
  source 1..21: mol_type = other RNA
  modified_base 1: mod_base = OTHER; note = 2'-fluoroguanosine-3'-phosphorothioate
  modified_base 2: mod_base = OTHER; note = 2'-O-methyladenosine-3'- phosphorothioate
  modified_base 3: mod_base = OTHER; note = 2'-fluorocytidine-3'-phosphate
  modified_base 4: mod_base = OTHER; note = 2'-O-methyluridine-3'-phosphate
  modified_base 5: mod_base = OTHER; note = 2'-fluorouridine-3'-phosphate
  modified_base 6: mod_base = OTHER; note = 2'-O-methyluridine-3'-phosphate
  modified_base 7: mod_base = OTHER; note = 2'-fluorocytidine-3'-phosphate
  modified_base 8: mod_base = OTHER; note = 2'-O-methyladenosine-3'-phosphate
  modified_base 9: mod_base = OTHER; note = 2'-fluorouridine-3'-phosphate
  modified_base 10: mod_base = OTHER; note = 2'-fluorocytidine-3'-phosphate
  modified_base 11: mod_base = OTHER; note = 2'-fluorocytidine-3'-phosphate
  modified_base 12: mod_base = OTHER; note = 2'-O-methyluridine-3'-phosphate
  modified_base 13: mod_base = OTHER; note = 2'-fluoroguanosine-3'-phosphate
  modified_base 14: mod_base = OTHER; note = 2'-O-methylguanosine-3'-phosphate
  modified_base 15: mod_base = OTHER; note = 2'-fluoroadenosine-3'-phosphate
  modified_base 16: mod_base = OTHER; note = 2'-O-methyladenosine-3'-phosphate
  modified_base 17: mod_base = OTHER; note = 2'-fluoroadenosine-3'-phosphate
  modified_base 18: mod_base = OTHER; note = 2'-O-methyluridine-3'-phosphate
  modified_base 19: mod_base = OTHER; note = 2'-fluoroadenosine-3'-phosphate
  modified_base 20: mod_base = OTHER; note = 2'-O-methyluridine-3'-phosphate
  modified_base 21: mod_base = OTHER; note 2'-fluoroadenosine-3'-phosphate-N-[tris(GalNAc-alkyl)-amido decanoyl)]-4-hydroxyprolinol (Hyp-(GalNAc-alkyl)3)
gactttcatcctggaaatata

SEQ ID NO: 65 - RNA, 21 nt, synthetic construct
  source 1..21: mol_type = other RNA
  modified_base 1: mod_base = OTHER; note = 2'-fluorocytidine-3'-phosphorothioate
  modified_base 2: mod_base = OTHER; note = 2'-O-methylcytidine-3'- phosphorothioate
  modified_base 3: mod_base = OTHER; note = 2'-fluorocytidine-3'-phosphate
  modified_base 4: mod_base = OTHER; note = 2'-O-methylcytidine-3'-phosphate
  modified_base 5: mod_base = OTHER; note = 2'-fluoroguanosine-3'-phosphate
  modified_base 6: mod_base = OTHER; note = 2'-O-methylguanosine-3'-phosphate
  modified_base 7: mod_base = OTHER; note = 2'-fluorocytidine-3'-phosphate
  modified_base 8: mod_base = OTHER; note = 2'-O-methyluridine-3'-phosphate
  modified_base 9: mod_base = OTHER; note = 2'-fluoroadenosine-3'-phosphate
  modified_base 10: mod_base = OTHER; note = 2'-fluoroadenosine-3'-phosphate
  modified_base 11: mod_base = OTHER; note = 2'-fluorouridine-3'-phosphate
  modified_base 12: mod_base = OTHER; note = 2'-O-methyluridine-3'-phosphate
  modified_base 13: mod_base = OTHER; note = 2'-fluorouridine-3'-phosphate
  modified_base 14: mod_base = OTHER; note = 2'-O-methylguanosine-3'-phosphate
  modified_base 15: mod_base = OTHER; note = 2'-fluorouridine-3'-phosphate
  modified_base 16: mod_base = OTHER; note = 2'-O-methyladenosine-3'-phosphate
  modified_base 17: mod_base = OTHER; note = 2'-fluorouridine-3'-phosphate
  modified_base 18: mod_base = OTHER; note = 2'-O-methylcytidine-3'-phosphate
  modified_base 19: mod_base = OTHER; note = 2'-fluoroadenosine-3'-phosphate
  modified_base 20: mod_base = OTHER; note = 2'-O-methyladenosine-3'-phosphate
  modified_base 21: mod_base = OTHER; note 2'-fluorouridine-3'-phosphate-N-[tris(GalNAc-alkyl)-amidode canoyl)]-4-hydroxyprolinol (Hyp-(GalNAc-alkyl)3)
ccccggctaatttgtatcaat

SEQ ID NO: 66 - RNA, 21 nt, synthetic construct
  source 1..21: mol_type = other RNA
  modified_base 1: mod_base = OTHER; note = 2'-fluorouridine -3'-phosphorothioate
  modified_base 2: mod_base = OTHER; note = 2'-O-methyluridine-3'-phosphorothioate
  modified_base 3: mod_base = OTHER; note = 2'-fluoroadenosine-3'-phosphate
  modified_base 4: mod_base = OTHER; note = 2'-O-methyladenosine-3'-phosphate
  modified_base 5: mod_base = OTHER; note = 2'-fluoroadenosine-3'-phosphate
  modified_base 6: mod_base = OTHER; note = 2'-O-methylcytidine-3'-phosphate
  modified_base 7: mod_base = OTHER; note = 2'-fluoroadenosine-3'-phosphate
  modified_base 8: mod_base = OTHER; note = 2'-O-methyluridine-3'-phosphate
  modified_base 9: mod_base = OTHER; note = 2'-fluoroguanosine-3'-phosphate
  modified_base 10: mod_base = OTHER; note = 2'-fluoroguanosine-3'-phosphate
  modified_base 11: mod_base = OTHER; note = 2'-fluorocytidine-3'-phosphate
  modified_base 12: mod_base = OTHER; note = 2'-O-methyluridine-3'-phosphate
  modified_base 13: mod_base = OTHER; note = 2'-fluorouridine-3'-phosphate
  modified_base 14: mod_base = OTHER; note = 2'-O-methylguanosine-3'-phosphate
  modified_base 15: mod_base = OTHER; note = 2'-fluoroadenosine-3'-phosphate
  modified_base 16: mod_base = OTHER; note = 2'-O-methyladenosine-3'-phosphate
  modified_base 17: mod_base = OTHER; note = 2'-fluorouridine-3'-phosphate
  modified_base 18: mod_base = OTHER; note = 2'-O-methylguanosine-3'-phosphate
  modified_base 19: mod_base = OTHER; note = 2'-fluoroguanosine-3'-phosphate
  modified_base 20: mod_base = OTHER; note = 2'-O-methylguanosine-3'-phosphate
  modified_base 21: mod_base = OTHER; note 2'-fluoroadenosine-3'-phosphate-N-[tris(GalNAc-alkyl)-amido decanoyl)]-4-hydroxyprolinol (Hyp-(GalNAc-alkyl)3)
ttaaacatggcttgaatggga

SEQ ID NO: 67 - RNA, 21 nt, synthetic construct
  source 1..21: mol_type = other RNA
  modified_base 1: mod_base = OTHER; note = 2'-fluoroadenosine-3'-phosphorothioate
  modified_base 2: mod_base = OTHER; note = 2'-O-methyladenosine-3'- phosphorothioate
  modified_base 3: mod_base = OTHER; note = 2'-fluorouridine-3'-phosphate
  modified_base 4: mod_base = OTHER; note = 2'-O-methylguanosine-3'-phosphate
  modified_base 5: mod_base = OTHER; note = 2'-fluorouridine-3'-phosphate
  modified_base 6: mod_base = OTHER; note = 2'-O-methylguanosine-3'-phosphate
  modified_base 7: mod_base = OTHER; note = 2'-fluorouridine-3'-phosphate
  modified_base 8: mod_base = OTHER; note = 2'-O-methyluridine-3'-phosphate
  modified_base 9: mod_base = OTHER; note = 2'-fluorouridine-3'-phosphate
  modified_base 10: mod_base = OTHER; note = 2'-fluoroadenosine-3'-phosphate
  modified_base 11: mod_base = OTHER; note = 2'-fluoroguanosine-3'-phosphate
  modified_base 12: mod_base = OTHER; note = 2'-O-methyladenosine-3'-phosphate
  modified_base 13: mod_base = OTHER; note = 2'-fluorocytidine-3'-phosphate
  modified_base 14: mod_base = OTHER; note = 2'-O-methyladenosine-3'-phosphate
  modified_base 15: mod_base = OTHER; note = 2'-fluoroadenosine-3'-phosphate
  modified_base 16: mod_base = OTHER; note = 2'-O-methylcytidine-3'-phosphate
  modified_base 17: mod_base = OTHER; note = 2'-fluoroguanosine-3'-phosphate
  modified_base 18: mod_base = OTHER; note = 2'-O-methyluridine-3'-phosphate
  modified_base 19: mod_base = OTHER; note = 2'-fluorocytidine-3'-phosphate
  modified_base 20: mod_base = OTHER; note = 2'-O-methyladenosine-3'-phosphate
  modified_base 21: mod_base = OTHER; note 2'-fluorouridine-3'-phosphate-N-[tris(GalNAc-alkyl)-amidode canoyl)]-4-hydroxyprolinol (Hyp-(GalNAc-alkyl)3)
aatgtgtttagacaacgtcat

SEQ ID NO: 68 - RNA, 21 nt, synthetic construct
  source 1..21: mol_type = other RNA
  modified_base 1: mod_base = OTHER; note = 2'-fluoroadenosine-3'-phosphorothioate
  modified_base 2: mod_base = OTHER; note = 2'-O-methylcytidine-3'- phosphorothioate
  modified_base 3: mod_base = OTHER; note = 2'-fluorouridine-3'-phosphate
  modified_base 4: mod_base = OTHER; note = 2'-O-methyladenosine-3'-phosphate
  modified_base 5: mod_base = OTHER; note = 2'-fluoroadenosine-3'-phosphate
  modified_base 6: mod_base = OTHER; note = 2'-O-methyladenosine-3'-phosphate
  modified_base 7: mod_base = OTHER; note = 2'-fluoroguanosine-3'-phosphate
  modified_base 8: mod_base = OTHER; note = 2'-O-methylguanosine-3'-phosphate
  modified_base 9: mod_base = OTHER; note = 2'-fluoroadenosine-3'-phosphate
  modified_base 10: mod_base = OTHER; note = 2'-fluoroadenosine-3'-phosphate
  modified_base 11: mod_base = OTHER; note = 2'-fluoroguanosine-3'-phosphate
  modified_base 12: mod_base = OTHER; note = 2'-O-methyladenosine-3'-phosphate
  modified_base 13: mod_base = OTHER; note = 2'-fluoroadenosine-3'-phosphate
  modified_base 14: mod_base = OTHER; note = 2'-O-methyluridine-3'-phosphate
  modified_base 15: mod_base = OTHER; note = 2'-fluorouridine-3'-phosphate
  modified_base 16: mod_base = OTHER; note = 2'-O-methylcytidine-3'-phosphate
  modified_base 17: mod_base = OTHER; note = 2'-fluorocytidine-3'-phosphate
  modified_base 18: mod_base = OTHER; note = 2'-O-methylguanosine-3'-phosphate
  modified_base 19: mod_base = OTHER; note = 2'-fluoroguanosine-3'-phosphate
  modified_base 20: mod_base = OTHER; note = 2'-O-methyluridine-3'-phosphate
  modified_base 21: mod_base = OTHER; note 2'-fluorouridine-3'-phosphate-N-[tris(GalNAc-alkyl)-amidode canoyl)]-4-hydroxyprolinol (Hyp-(GalNAc-alkyl)3)
actaaaggaagaattccggtt

SEQ ID NO: 69 - RNA, 21 nt, synthetic construct
  source 1..21: mol_type = other RNA
  modified_base 1: mod_base = OTHER; note = 2'-fluorouridine -3'-phosphorothioate
  modified_base 2: mod_base = OTHER; note = 2'-O-methyladenosine-3'- phosphorothioate
  modified_base 3: mod_base = OTHER; note = 2'-fluorouridine-3'-phosphate
  modified_base 4: mod_base = OTHER; note = 2'-O-methyladenosine-3'-phosphate
  modified_base 5: mod_base = OTHER; note = 2'-fluorouridine-3'-phosphate
  modified_base 6: mod_base = OTHER; note = 2'-O-methylcytidine-3'-phosphate
  modified_base 7: mod_base = OTHER; note = 2'-fluorocytidine-3'-phosphate
  modified_base 8: mod_base = OTHER; note = 2'-O-methyladenosine-3'-phosphate
  modified_base 9: mod_base = OTHER; note = 2'-fluoroadenosine-3'-phosphate
  modified_base 10: mod_base = OTHER; note = 2'-fluoroadenosine-3'-phosphate
  modified_base 11: mod_base = OTHER; note = 2'-fluorouridine-3'-phosphate
  modified_base 12: mod_base = OTHER; note = 2'-O-methylguanosine-3'-phosphate
  modified_base 13: mod_base = OTHER; note = 2'-fluorouridine-3'-phosphate
  modified_base 14: mod_base = OTHER; note = 2'-O-methyluridine-3'-phosphate
  modified_base 15: mod_base = OTHER; note = 2'-fluorouridine-3'-phosphate
  modified_base 16: mod_base = OTHER; note = 2'-O-methyluridine-3'-phosphate
  modified_base 17: mod_base = OTHER; note = 2'-fluoroadenosine-3'-phosphate
  modified_base 18: mod_base = OTHER; note = 2'-O-methylguanosine-3'-phosphate
  modified_base 19: mod_base = OTHER; note = 2'-fluoroguanosine-3'-phosphate
  modified_base 20: mod_base = OTHER; note = 2'-O-methyladenosine-3'-phosphate
  modified_base 21: mod_base = OTHER; note 2'-fluorouridine-3'-phosphate-N-[tris(GalNAc-alkyl)-amidode canoyl)]-4-hydroxyprolinol (Hyp-(GalNAc-alkyl)3)
tatatccaaatgttttaggat

SEQ ID NO: 70 - RNA, 21 nt, synthetic construct
  source 1..21: mol_type = other RNA
  modified_base 1: mod_base = OTHER; note = 2'-fluoroguanosine-3'-phosphorothioate
  modified_base 2: mod_base = OTHER; note = 2'-O-methyluridine-3'-phosphorothioate
  modified_base 3: mod_base = OTHER; note = 2'-fluoroguanosine-3'-phosphate
  modified_base 4: mod_base = OTHER; note = 2'-O-methylcytidine-3'-phosphate
  modified_base 5: mod_base = OTHER; note = 2'-fluoroguanosine-3'-phosphate
  modified_base 6: mod_base = OTHER; note = 2'-O-methylguanosine-3'-phosphate
  modified_base 7: mod_base = OTHER; note = 2'-fluoroadenosine-3'-phosphate
  modified_base 8: mod_base = OTHER; note = 2'-O-methyladenosine-3'-phosphate
  modified_base 9: mod_base = OTHER; note = 2'-fluoroadenosine-3'-phosphate
  modified_base 10: mod_base = OTHER; note = 2'-fluoroguanosine-3'-phosphate
  modified_base 11: mod_base = OTHER; note = 2'-fluoroguanosine-3'-phosphate
  modified_base 12: mod_base = OTHER; note = 2'-O-methylcytidine-3'-phosphate
  modified_base 13: mod_base = OTHER; note = 2'-fluoroadenosine-3'-phosphate
  modified_base 14: mod_base = OTHER; note = 2'-O-methylcytidine-3'-phosphate
  modified_base 15: mod_base = OTHER; note = 2'-fluorouridine-3'-phosphate
  modified_base 16: mod_base = OTHER; note = 2'-O-methylguanosine-3'-phosphate
  modified_base 17: mod_base = OTHER; note = 2'-fluoroadenosine-3'-phosphate
  modified_base 18: mod_base = OTHER; note = 2'-O-methyluridine-3'-phosphate
  modified_base 19: mod_base = OTHER; note = 2'-fluoroguanosine-3'-phosphate
  modified_base 20: mod_base = OTHER; note = 2'-O-methyluridine-3'-phosphate
  modified_base 21: mod_base = OTHER; note 2'-fluorouridine-3'-phosphate-N-[tris(GalNAc-alkyl)-amidode canoyl)]-4-hydroxyprolinol (Hyp-(GalNAc-alkyl)3)
gtgcggaaaggcactgatgtt

SEQ ID NO: 71 - RNA, 21 nt, synthetic construct
  source 1..21: mol_type = other RNA
  modified_base 1: mod_base = OTHER; note = 2'-fluorouridine -3'-phosphorothioate
  modified_base 2: mod_base = OTHER; note = 2'-O-methyladenosine-3'- phosphorothioate
  modified_base 3: mod_base = OTHER; note = 2'-fluoroadenosine-3'-phosphate
  modified_base 4: mod_base = OTHER; note = 2'-O-methyladenosine-3'-phosphate
  modified_base 5: mod_base = OTHER; note = 2'-fluoroadenosine-3'-phosphate
  modified_base 6: mod_base = OTHER; note = 2'-O-methylcytidine-3'-phosphate
  modified_base 7: mod_base = OTHER; note = 2'-fluoroadenosine-3'-phosphate
  modified_base 8: mod_base = OTHER; note = 2'-O-methylguanosine-3'-phosphate
  modified_base 9: mod_base = OTHER; note = 2'-fluorouridine-3'-phosphate
  modified_base 10: mod_base = OTHER; note = 2'-fluoroguanosine-3'-phosphate
  modified_base 11: mod_base = OTHER; note = 2'-fluoroguanosine-3'-phosphate
  modified_base 12: mod_base = OTHER; note = 2'-O-methyluridine-3'-phosphate
  modified_base 13: mod_base = OTHER; note = 2'-fluorouridine-3'-phosphate
  modified_base 14: mod_base = OTHER; note = 2'-O-methylcytidine-3'-phosphate
  modified_base 15: mod_base = OTHER; note = 2'-fluorouridine-3'-phosphate
  modified_base 16: mod_base = OTHER; note = 2'-O-methyluridine-3'-phosphate
  modified_base 17: mod_base = OTHER; note = 2'-fluoroadenosine-3'-phosphate
  modified_base 18: mod_base = OTHER; note = 2'-O-methyladenosine-3'-phosphate
  modified_base 19: mod_base = OTHER; note = 2'-fluoroadenosine-3'-phosphate
  modified_base 20: mod_base = OTHER; note = 2'-O-methyluridine-3'-phosphate
  modified_base 21: mod_base = OTHER; note 2'-fluorouridine-3'-phosphate-N-[tris(GalNAc-alkyl)-amidode canoyl)]-4-hydroxyprolinol (Hyp-(GalNAc-alkyl)3)
taaaacagtggttcttaaatt

SEQ ID NO: 72 - RNA, 21 nt, synthetic construct
  source 1..21: mol_type = other RNA
  modified_base 1: mod_base = OTHER; note = 2'-fluoroadenosine-3'-phosphorothioate
  modified_base 2: mod_base = OTHER; note = 2'-O-methyluridine-3'-phosphorothioate
  modified_base 3: mod_base = OTHER; note = 2'-fluoroguanosine-3'-phosphate
  modified_base 4: mod_base = OTHER; note = 2'-O-methyladenosine-3'-phosphate
  modified_base 5: mod_base = OTHER; note = 2'-fluoroadenosine-3'-phosphate
  modified_base 6: mod_base = OTHER; note = 2'-O-methyladenosine-3'-phosphate
  modified_base 7: mod_base = OTHER; note = 2'-fluoroadenosine-3'-phosphate
  modified_base 8: mod_base = OTHER; note = 2'-O-methyladenosine-3'-phosphate
  modified_base 9: mod_base = OTHER; note = 2'-fluorouridine-3'-phosphate
  modified_base 10: mod_base = OTHER; note = 2'-fluorouridine-3'-phosphate
  modified_base 11: mod_base = OTHER; note = 2'-fluorouridine-3'-phosphate
  modified_base 12: mod_base = OTHER; note = 2'-O-methyluridine-3'-phosphate
  modified_base 13: mod_base = OTHER; note = 2'-fluoroguanosine-3'-phosphate
  modified_base 14: mod_base = OTHER; note = 2'-O-methyladenosine-3'-phosphate
  modified_base 15: mod_base = OTHER; note = 2'-fluoroadenosine-3'-phosphate
  modified_base 16: mod_base = OTHER; note = 2'-O-methyladenosine-3'-phosphate
  modified_base 17: mod_base = OTHER; note = 2'-fluorocytidine-3'-phosphate
  modified_base 18: mod_base = OTHER; note = 2'-O-methylcytidine-3'-phosphate
  modified_base 19: mod_base = OTHER; note = 2'-fluoroadenosine-3'-phosphate
  modified_base 20: mod_base = OTHER; note = 2'-O-methylguanosine-3'-phosphate
  modified_base 21: mod_base = OTHER; note 2'-fluorouridine-3'-phosphate-N-[tris(GalNAc-alkyl)-amidode canoyl)]-4-hydroxyprolinol (Hyp-(GalNAc-alkyl)3)
atgaaaaattttgaaaccagt

SEQ ID NO: 73 - RNA, 21 nt, synthetic construct
  source 1..21: mol_type = other RNA
  modified_base 1: mod_base = OTHER; note = 2'-fluoroadenosine-3'-phosphorothioate
  modified_base 2: mod_base = OTHER; note = 2'-O-methyladenosine-3'- phosphorothioate
  modified_base 3: mod_base = OTHER; note = 2'-fluorocytidine-3'-phosphate
  modified_base 4: mod_base = OTHER; note = 2'-O-methyladenosine-3'-phosphate
  modified_base 5: mod_base = OTHER; note = 2'-fluoroadenosine-3'-phosphate
  modified_base 6: mod_base = OTHER; note = 2'-O-methyladenosine-3'-phosphate
  modified_base 7: mod_base = OTHER; note = 2'-fluoroadenosine-3'-phosphate
  modified_base 8: mod_base = OTHER; note = 2'-O-methyluridine-3'-phosphate
  modified_base 9: mod_base = OTHER; note = 2'-fluoroadenosine-3'-phosphate
  modified_base 10: mod_base = OTHER; note = 2'-fluoroguanosine-3'-phosphate
  modified_base 11: mod_base = OTHER; note = 2'-fluorocytidine-3'-phosphate
  modified_base 12: mod_base = OTHER; note = 2'-O-methyladenosine-3'-phosphate
  modified_base 13: mod_base = OTHER; note = 2'-fluoroadenosine-3'-phosphate
  modified_base 14: mod_base = OTHER; note = 2'-O-methyluridine-3'-phosphate
  modified_base 15: mod_base = OTHER; note = 2'-fluorocytidine-3'-phosphate
  modified_base 16: mod_base = OTHER; note = 2'-O-methylcytidine-3'-phosphate
  modified_base 17: mod_base = OTHER; note = 2'-fluorocytidine-3'-phosphate
  modified_base 18: mod_base = OTHER; note = 2'-O-methyluridine-3'-phosphate
  modified_base 19: mod_base = OTHER; note = 2'-fluorouridine-3'-phosphate
  modified_base 20: mod_base = OTHER; note = 2'-O-methyluridine-3'-phosphate
  modified_base 21: mod_base = OTHER; note 2'-fluorouridine-3'-phosphate-N-[tris(GalNAc-alkyl)-amidode canoyl)]-4-hydroxyprolinol (Hyp-(GalNAc-alkyl)3)
aacaaaatagcaatccctttt

SEQ ID NO: 74 - RNA, 21 nt, synthetic construct
  source 1..21: mol_type = other RNA
  modified_base 1: mod_base = OTHER; note = 2'-fluorocytidine-3'-phosphorothioate
  modified_base 2: mod_base = OTHER; note = 2'-O-methyluridine-3'-phosphorothioate
  modified_base 3: mod_base = OTHER; note = 2'-fluoroguanosine-3'-phosphate
  modified_base 4: mod_base = OTHER; note = 2'-O-methyladenosine-3'-phosphate
  modified_base 5: mod_base = OTHER; note = 2'-fluoroadenosine-3'-phosphate
  modified_base 6: mod_base = OTHER; note = 2'-O-methyladenosine-3'-phosphate
  modified_base 7: mod_base = OTHER; note = 2'-fluorocytidine-3'-phosphate
  modified_base 8: mod_base = OTHER; note = 2'-O-methyladenosine-3'-phosphate
  modified_base 9: mod_base = OTHER; note = 2'-fluoroguanosine-3'-phosphate
  modified_base 10: mod_base = OTHER; note = 2'-fluoroadenosine-3'-phosphate
  modified_base 11: mod_base = OTHER; note = 2'-fluorouridine-3'-phosphate
  modified_base 12: mod_base = OTHER; note = 2'-O-methylcytidine-3'-phosphate
  modified_base 13: mod_base = OTHER; note = 2'-fluorouridine-3'-phosphate
  modified_base 14: mod_base = OTHER; note = 2'-O-methylguanosine-3'-phosphate
  modified_base 15: mod_base = OTHER; note = 2'-fluorouridine-3'-phosphate
  modified_base 16: mod_base = OTHER; note = 2'-O-methylcytidine-3'-phosphate
  modified_base 17: mod_base = OTHER; note = 2'-fluoroguanosine-3'-phosphate
  modified_base 18: mod_base = OTHER; note = 2'-O-methyladenosine-3'-phosphate
  modified_base 19: mod_base = OTHER; note = 2'-fluorocytidine-3'-phosphate
  modified_base 20: mod_base = OTHER; note = 2'-O-methyluridine-3'-phosphate
  modified_base 21: mod_base = OTHER; note 2'-fluorouridine-3'-phosphate-N-[tris(GalNAc-alkyl)-amidode canoyl)]-4-hydroxyprolinol (Hyp-(GalNAc-alkyl)3)
ctgaaacagatctgtcgactt

SEQ ID NO: 75 - RNA, 21 nt, synthetic construct
  source 1..21: mol_type = other RNA
  modified_base 1: mod_base = OTHER; note = 2'-fluorouridine -3'-phosphorothioate
  modified_base 2: mod_base = OTHER; note = 2'-O-methyluridine-3'-phosphorothioate
  modified_base 3: mod_base = OTHER; note = 2'-fluoroguanosine-3'-phosphate
  modified_base 4: mod_base = OTHER; note = 2'-O-methyluridine-3'-phosphate
  modified_base 5: mod_base = OTHER; note = 2'-fluorouridine-3'-phosphate
  modified_base 6: mod_base = OTHER; note = 2'-O-methylguanosine-3'-phosphate
  modified_base 7: mod_base = OTHER; note = 2'-fluorocytidine-3'-phosphate
  modified_base 8: mod_base = OTHER; note = 2'-O-methyladenosine-3'-phosphate
  modified_base 9: mod_base = OTHER; note = 2'-fluoroadenosine-3'-phosphate
  modified_base 10: mod_base = OTHER; note = 2'-fluoroadenosine-3'-phosphate
  modified_base 11: mod_base = OTHER; note = 2'-fluoroguanosine-3'-phosphate
  modified_base 12: mod_base = OTHER; note = 2'-O-methylguanosine-3'-phosphate
  modified_base 13: mod_base = OTHER; note = 2'-fluoroguanosine-3'-phosphate
  modified_base 14: mod_base = OTHER; note = 2'-O-methylcytidine-3'-phosphate
  modified_base 15: mod_base = OTHER; note = 2'-fluoroadenosine-3'-phosphate
  modified_base 16: mod_base = OTHER; note = 2'-O-methyluridine-3'-phosphate
  modified_base 17: mod_base = OTHER; note = 2'-fluorouridine-3'-phosphate
  modified_base 18: mod_base = OTHER; note = 2'-O-methyluridine-3'-phosphate
  modified_base 19: mod_base = OTHER; note = 2'-fluorouridine-3'-phosphate
  modified_base 20: mod_base = OTHER; note = 2'-O-methylguanosine-3'-phosphate
  modified_base 21: mod_base = OTHER; note 2'-fluoroadenosine-3'-phosphate-N-[tris(GalNAc-alkyl)-amido decanoyl)]-4-hydroxyprolinol (Hyp-(GalNAc-alkyl)3)
ttgttgcaaagggcattttga

SEQ ID NO: 76 - RNA, 21 nt, synthetic construct
  source 1..21: mol_type = other RNA
  modified_base 1: mod_base = OTHER; note = 2'-fluorocytidine-3'-phosphorothioate
  modified_base 2: mod_base = OTHER; note = 2'-O-methyluridine-3'-phosphorothioate
  modified_base 3: mod_base = OTHER; note = 2'-fluorocytidine-3'-phosphate
  modified_base 4: mod_base = OTHER; note = 2'-O-methyladenosine-3'-phosphate
  modified_base 5: mod_base = OTHER; note = 2'-fluorouridine-3'-phosphate
  modified_base 6: mod_base = OTHER; note = 2'-O-methyluridine-3'-phosphate
  modified_base 7: mod_base = OTHER; note = 2'-fluoroguanosine-3'-phosphate
  modified_base 8: mod_base = OTHER; note = 2'-O-methyluridine-3'-phosphate
  modified_base 9: mod_base = OTHER; note = 2'-fluorouridine-3'-phosphate
  modified_base 10: mod_base = OTHER; note = 2'-fluorouridine-3'-phosphate
  modified_base 11: mod_base = OTHER; note = 2'-fluoroadenosine-3'-phosphate
  modified_base 12: mod_base = OTHER; note = 2'-O-methyluridine-3'-phosphate
  modified_base 13: mod_base = OTHER; note = 2'-fluorouridine-3'-phosphate
  modified_base 14: mod_base = OTHER; note = 2'-O-methyladenosine-3'-phosphate
  modified_base 15: mod_base = OTHER; note = 2'-fluoroadenosine-3'-phosphate
  modified_base 16: mod_base = OTHER; note = 2'-O-methylcytidine-3'-phosphate
  modified_base 17: mod_base = OTHER; note = 2'-fluorocytidine-3'-phosphate
  modified_base 18: mod_base = OTHER; note = 2'-O-methyluridine-3'-phosphate
  modified_base 19: mod_base = OTHER; note = 2'-fluoroguanosine-3'-phosphate
  modified_base 20: mod_base = OTHER; note = 2'-O-methyluridine-3'-phosphate
  modified_base 21: mod_base = OTHER; note 2'-fluoroadenosine-3'-phosphate-N-[tris(GalNAc-alkyl)-amido decanoyl)]-4-hydroxyprolinol (Hyp-(GalNAc-alkyl)3)
ctcattgtttattaacctgta

SEQ ID NO: 77 - RNA, 21 nt, synthetic construct
  source 1..21: mol_type = other RNA
  modified_base 1: mod_base = OTHER; note = 2'-fluorocytidine-3'-phosphorothioate
  modified_base 2: mod_base = OTHER; note = 2'-O-methyladenosine-3'- phosphorothioate
  modified_base 3: mod_base = OTHER; note = 2'-fluoroadenosine-3'-phosphate
  modified_base 4: mod_base = OTHER; note = 2'-O-methylcytidine-3'-phosphate
  modified_base 5: mod_base = OTHER; note = 2'-fluoroadenosine-3'-phosphate
  modified_base 6: mod_base = OTHER; note = 2'-O-methyladenosine-3'-phosphate
  modified_base 7: mod_base = OTHER; note = 2'-fluoroadenosine-3'-phosphate
  modified_base 8: mod_base = OTHER; note = 2'-O-methyladenosine-3'-phosphate
  modified_base 9: mod_base = OTHER; note = 2'-fluorouridine-3'-phosphate
  modified_base 10: mod_base = OTHER; note = 2'-fluoroadenosine-3'-phosphate
  modified_base 11: mod_base = OTHER; note = 2'-fluoroguanosine-3'-phosphate
  modified_base 12: mod_base = OTHER; note = 2'-O-methylcytidine-3'-phosphate
  modified_base 13: mod_base = OTHER; note = 2'-fluoroadenosine-3'-phosphate
  modified_base 14: mod_base = OTHER; note = 2'-O-methyladenosine-3'-phosphate
  modified_base 15: mod_base = OTHER; note = 2'-fluorouridine-3'-phosphate
  modified_base 16: mod_base = OTHER; note = 2'-O-methylcytidine-3'-phosphate
  modified_base 17: mod_base = OTHER; note = 2'-fluorocytidine-3'-phosphate
  modified_base 18: mod_base = OTHER; note = 2'-O-methylcytidine-3'-phosphate
  modified_base 19: mod_base = OTHER; note = 2'-fluorouridine-3'-phosphate
  modified_base 20: mod_base = OTHER; note = 2'-O-methyluridine-3'-phosphate
  modified_base 21: mod_base = OTHER; note 2'-fluorouridine-3'-phosphate-N-[tris(GalNAc-alkyl)-amidode canoyl)]-4-hydroxyprolinol (Hyp-(GalNAc-alkyl)3)
caacaaaatagcaatcccttt

SEQ ID NO: 78 - RNA, 21 nt, synthetic construct
  source 1..21: mol_type = other RNA
  modified_base 1: mod_base = OTHER; note = 2'-fluorocytidine-3'-phosphorothioate
  modified_base 2: mod_base = OTHER; note = 2'-O-methyladenosine-3'- phosphorothioate
  modified_base 3: mod_base = OTHER; note = 2'-fluorouridine-3'-phosphate
  modified_base 4: mod_base = OTHER; note = 2'-O-methyluridine-3'-phosphate
  modified_base 5: mod_base = OTHER; note = 2'-fluoroguanosine-3'-phosphate
  modified_base 6: mod_base = OTHER; note = 2'-O-methyluridine-3'-phosphate
  modified_base 7: mod_base = OTHER; note = 2'-fluorouridine-3'-phosphate
  modified_base 8: mod_base = OTHER; note = 2'-O-methyluridine-3'-phosphate
  modified_base 9: mod_base = OTHER; note = 2'-fluoroadenosine-3'-phosphate
  modified_base 10: mod_base = OTHER; note = 2'-fluorouridine-3'-phosphate
  modified_base 11: mod_base = OTHER; note = 2'-fluorouridine-3'-phosphate
  modified_base 12: mod_base = OTHER; note = 2'-O-methyladenosine-3'-phosphate
  modified_base 13: mod_base = OTHER; note = 2'-fluoroadenosine-3'-phosphate
  modified_base 14: mod_base = OTHER; note = 2'-O-methylcytidine-3'-phosphate
  modified_base 15: mod_base = OTHER; note = 2'-fluorocytidine-3'-phosphate
  modified_base 16: mod_base = OTHER; note = 2'-O-methyluridine-3'-phosphate
  modified_base 17: mod_base = OTHER; note = 2'-fluoroguanosine-3'-phosphate
  modified_base 18: mod_base = OTHER; note = 2'-O-methyluridine-3'-phosphate
  modified_base 19: mod_base = OTHER; note = 2'-fluoroadenosine-3'-phosphate
  modified_base 20: mod_base = OTHER; note = 2'-O-methyluridine-3'-phosphate
  modified_base 21: mod_base = OTHER; note 2'-fluorouridine-3'-phosphate-N-[tris(GalNAc-alkyl)-amidode canoyl)]-4-hydroxyprolinol (Hyp-(GalNAc-alkyl)3)
cattgtttattaacctgtatt

SEQ ID NO: 79 - RNA, 21 nt, synthetic construct
  source 1..21: mol_type = other RNA
  modified_base 1: mod_base = OTHER; note = 2'-fluorouridine -3'-phosphorothioate
  modified_base 2: mod_base = OTHER; note = 2'-O-methyladenosine-3'- phosphorothioate
  modified_base 3: mod_base = OTHER; note = 2'-fluorouridine-3'-phosphate
  modified_base 4: mod_base = OTHER; note = 2'-O-methylcytidine-3'-phosphate
  modified_base 5: mod_base = OTHER; note = 2'-fluoroadenosine-3'-phosphate
  modified_base 6: mod_base = OTHER; note = 2'-O-methylguanosine-3'-phosphate
  modified_base 7: mod_base = OTHER; note = 2'-fluorocytidine-3'-phosphate
  modified_base 8: mod_base = OTHER; note = 2'-O-methyluridine-3'-phosphate
  modified_base 9: mod_base = OTHER; note = 2'-fluoroguanosine-3'-phosphate
  modified_base 10: mod_base = OTHER; note = 2'-fluoroguanosine-3'-phosphate
  modified_base 11: mod_base = OTHER; note = 2'-fluoroguanosine-3'-phosphate
  modified_base 12: mod_base = OTHER; note = 2'-O-methyladenosine-3'-phosphate
  modified_base 13: mod_base = OTHER; note = 2'-fluoroadenosine-3'-phosphate
  modified_base 14: mod_base = OTHER; note = 2'-O-methylguanosine-3'-phosphate
  modified_base 15: mod_base = OTHER; note = 2'-fluoroadenosine-3'-phosphate
  modified_base 16: mod_base = OTHER; note = 2'-O-methyluridine-3'-phosphate
  modified_base 17: mod_base = OTHER; note = 2'-fluoroadenosine-3'-phosphate
  modified_base 18: mod_base = OTHER; note = 2'-O-methyluridine-3'-phosphate
  modified_base 19: mod_base = OTHER; note = 2'-fluorocytidine-3'-phosphate
  modified_base 20: mod_base = OTHER; note = 2'-O-methyladenosine-3'-phosphate
  modified_base 21: mod_base = OTHER; note 2'-fluoroadenosine-3'-phosphate-N-[tris(GalNAc-alkyl)-amido decanoyl)]-4-hydroxyprolinol (Hyp-(GalNAc-alkyl)3)
tatcagctgggaagatatcaa

SEQ ID NO: 80 - RNA, 21 nt, synthetic construct
  source 1..21: mol_type = other RNA
  modified_base 1: mod_base = OTHER; note = 2'-fluorouridine -3'-phosphorothioate
  modified_base 2: mod_base = OTHER; note = 2'-O-methylguanosine-3'- phosphorothioate
  modified_base 3: mod_base = OTHER; note = 2'-fluorouridine-3'-phosphate
  modified_base 4: mod_base = OTHER; note = 2'-O-methylcytidine-3'-phosphate
  modified_base 5: mod_base = OTHER; note = 2'-fluorocytidine-3'-phosphate
  modified_base 6: mod_base = OTHER; note = 2'-O-methyluridine-3'-phosphate
  modified_base 7: mod_base = OTHER; note = 2'-fluoroadenosine-3'-phosphate
  modified_base 8: mod_base = OTHER; note = 2'-O-methylguanosine-3'-phosphate
  modified_base 9: mod_base = OTHER; note = 2'-fluoroguanosine-3'-phosphate
  modified_base 10: mod_base = OTHER; note = 2'-fluoroadenosine-3'-phosphate
  modified_base 11: mod_base = OTHER; note = 2'-fluoroadenosine-3'-phosphate
  modified_base 12: mod_base = OTHER; note = 2'-O-methylcytidine-3'-phosphate
  modified_base 13: mod_base = OTHER; note = 2'-fluorocytidine-3'-phosphate
  modified_base 14: mod_base = OTHER; note = 2'-O-methyluridine-3'-phosphate
  modified_base 15: mod_base = OTHER; note = 2'-fluorouridine-3'-phosphate
  modified_base 16: mod_base = OTHER; note = 2'-O-methyluridine-3'-phosphate
  modified_base 17: mod_base = OTHER; note = 2'-fluorouridine-3'-phosphate
  modified_base 18: mod_base = OTHER; note = 2'-O-methyladenosine-3'-phosphate
  modified_base 19: mod_base = OTHER; note = 2'-fluoroguanosine-3'-phosphate
  modified_base 20: mod_base = OTHER; note = 2'-O-methyladenosine-3'-phosphate
  modified_base 21: mod_base = OTHER; note 2'-fluoroadenosine-3'-phosphate-N-[tris(GalNAc-alkyl)-amido decanoyl)]-4-hydroxyprolinol (Hyp-(GalNAc-alkyl)3)
tgtcctaggaaccttttagaa

SEQ ID NO: 81 - RNA, 21 nt, synthetic construct
  source 1..21: mol_type = other RNA
  modified_base 1: mod_base = OTHER; note = 2'-fluorouridine -3'-phosphorothioate
  modified_base 2: mod_base = OTHER; note = 2'-O-methylcytidine-3'- phosphorothioate
  modified_base 3: mod_base = OTHER; note = 2'-fluorocytidine-3'-phosphate
  modified_base 4: mod_base = OTHER; note = 2'-O-methyladenosine-3'-phosphate
  modified_base 5: mod_base = OTHER; note = 2'-fluoroadenosine-3'-phosphate
  modified_base 6: mod_base = OTHER; note = 2'-O-methylcytidine-3'-phosphate
  modified_base 7: mod_base = OTHER; note = 2'-fluoroadenosine-3'-phosphate
  modified_base 8: mod_base = OTHER; note = 2'-O-methyladenosine-3'-phosphate
  modified_base 9: mod_base = OTHER; note = 2'-fluoroadenosine-3'-phosphate
  modified_base 10: mod_base = OTHER; note = 2'-fluoroadenosine-3'-phosphate
  modified_base 11: mod_base = OTHER; note = 2'-fluorouridine-3'-phosphate
  modified_base 12: mod_base = OTHER; note = 2'-O-methyladenosine-3'-phosphate
  modified_base 13: mod_base = OTHER; note = 2'-fluoroguanosine-3'-phosphate
  modified_base 14: mod_base = OTHER; note = 2'-O-methylcytidine-3'-phosphate
  modified_base 15: mod_base = OTHER; note = 2'-fluoroadenosine-3'-phosphate
  modified_base 16: mod_base = OTHER; note = 2'-O-methyladenosine-3'-phosphate
  modified_base 17: mod_base = OTHER; note = 2'-fluorouridine-3'-phosphate
  modified_base 18: mod_base = OTHER; note = 2'-O-methylcytidine-3'-phosphate
  modified_base 19: mod_base = OTHER; note = 2'-fluorocytidine-3'-phosphate
  modified_base 20: mod_base = OTHER; note = 2'-O-methylcytidine-3'-phosphate
  modified_base 21: mod_base = OTHER; note 2'-fluorouridine-3'-phosphate-N-[tris(GalNAc-alkyl)-amidode canoyl)]-4-hydroxyprolinol (Hyp-(GalNAc-alkyl)3)
tccaacaaaatagcaatccct

SEQ ID NO: 82 - RNA, 21 nt, synthetic construct
  source 1..21: mol_type = other RNA
  modified_base 1: mod_base = OTHER; note = 2'-fluoroguanosine-3'-phosphorothioate
  modified_base 2: mod_base = OTHER; note = 2'-O-methylguanosine-3'- phosphorothioate
  modified_base 3: mod_base = OTHER; note = 2'-fluorouridine-3'-phosphate
  modified_base 4: mod_base = OTHER; note = 2'-O-methylguanosine-3'-phosphate
  modified_base 5: mod_base = OTHER; note = 2'-fluorouridine-3'-phosphate
  modified_base 6: mod_base = OTHER; note = 2'-O-methylguanosine-3'-phosphate
  modified_base 7: mod_base = OTHER; note = 2'-fluorocytidine-3'-phosphate
  modified_base 8: mod_base = OTHER; note = 2'-O-methylguanosine-3'-phosphate
  modified_base 9: mod_base = OTHER; note = 2'-fluoroguanosine-3'-phosphate
  modified_base 10: mod_base = OTHER; note = 2'-fluoroadenosine-3'-phosphate
  modified_base 11: mod_base = OTHER; note = 2'-fluoroadenosine-3'-phosphate
  modified_base 12: mod_base = OTHER; note = 2'-O-methyladenosine-3'-phosphate
  modified_base 13: mod_base = OTHER; note = 2'-fluoroguanosine-3'-phosphate
  modified_base 14: mod_base = OTHER; note = 2'-O-methylguanosine-3'-phosphate
  modified_base 15: mod_base = OTHER; note = 2'-fluorocytidine-3'-phosphate
  modified_base 16: mod_base = OTHER; note = 2'-O-methyladenosine-3'-phosphate
  modified_base 17: mod_base = OTHER; note = 2'-fluorocytidine-3'-phosphate
  modified_base 18: mod_base = OTHER; note = 2'-O-methyluridine-3'-phosphate
  modified_base 19: mod_base = OTHER; note = 2'-fluoroguanosine-3'-phosphate
  modified_base 20: mod_base = OTHER; note = 2'-O-methyladenosine-3'-phosphate
  modified_base 21: mod_base = OTHER; note 2'-fluorouridine-3'-phosphate-N-[tris(GalNAc-alkyl)-amidode canoyl)]-4-hydroxyprolinol (Hyp-(GalNAc-alkyl)3)
ggtgtgcggaaaggcactgat

SEQ ID NO: 83 - RNA, 21 nt, synthetic construct
  source 1..21: mol_type = other RNA
  modified_base 1: mod_base = OTHER; note = 2'-fluorouridine -3'-phosphorothioate
  modified_base 2: mod_base = OTHER; note = 2'-O-methyluridine-3'-phosphorothioate
  modified_base 3: mod_base = OTHER; note = 2'-fluoroguanosine-3'-phosphate
  modified_base 4: mod_base = OTHER; note = 2'-O-methyladenosine-3'-phosphate
  modified_base 5: mod_base = OTHER; note = 2'-fluoroadenosine-3'-phosphate
  modified_base 6: mod_base = OTHER; note = 2'-O-methyladenosine-3'-phosphate
  modified_base 7: mod_base = OTHER; note = 2'-fluorocytidine-3'-phosphate
  modified_base 8: mod_base = OTHER; note = 2'-O-methylcytidine-3'-phosphate
  modified_base 9: mod_base = OTHER; note = 2'-fluoroadenosine-3'-phosphate
  modified_base 10: mod_base = OTHER; note = 2'-fluoroguanosine-3'-phosphate
  modified_base 11: mod_base = OTHER; note = 2'-fluorouridine-3'-phosphate
  modified_base 12: mod_base = OTHER; note = 2'-O-methyladenosine-3'-phosphate
  modified_base 13: mod_base = OTHER; note = 2'-fluorocytidine-3'-phosphate
  modified_base 14: mod_base = OTHER; note = 2'-O-methyluridine-3'-phosphate
  modified_base 15: mod_base = OTHER; note = 2'-fluorouridine-3'-phosphate
  modified_base 16: mod_base = OTHER; note = 2'-O-methyluridine-3'-phosphate
  modified_base 17: mod_base = OTHER; note = 2'-fluoroadenosine-3'-phosphate
  modified_base 18: mod_base = OTHER; note = 2'-O-methyluridine-3'-phosphate
  modified_base 19: mod_base = OTHER; note = 2'-fluorocytidine-3'-phosphate
  modified_base 20: mod_base = OTHER; note = 2'-O-methyladenosine-3'-phosphate
  modified_base 21: mod_base = OTHER; note 2'-fluorouridine-3'-phosphate-N-[tris(GalNAc-alkyl)-amidode canoyl)]-4-hydroxyprolinol (Hyp-(GalNAc-alkyl)3)
ttgaaaccagtactttatcat

SEQ ID NO: 84 - RNA, 21 nt, synthetic construct
  source 1..21: mol_type = other RNA
  modified_base 1: mod_base = OTHER; note = 2'-fluorouridine -3'-phosphorothioate
  modified_base 2: mod_base = OTHER; note = 2'-O-methyladenosine-3'- phosphorothioate
  modified_base 3: mod_base = OTHER; note = 2'-fluorocytidine-3'-phosphate
  modified_base 4: mod_base = OTHER; note = 2'-O-methyluridine-3'-phosphate
  modified_base 5: mod_base = OTHER; note = 2'-fluorouridine-3'-phosphate
  modified_base 6: mod_base = OTHER; note = 2'-O-methylcytidine-3'-phosphate
  modified_base 7: mod_base = OTHER; note = 2'-fluorocytidine-3'-phosphate
  modified_base 8: mod_base = OTHER; note = 2'-O-methyladenosine-3'-phosphate
  modified_base 9: mod_base = OTHER; note = 2'-fluoroadenosine-3'-phosphate
  modified_base 10: mod_base = OTHER; note = 2'-fluoroadenosine-3'-phosphate
  modified_base 11: mod_base = OTHER; note = 2'-fluoroguanosine-3'-phosphate
  modified_base 12: mod_base = OTHER; note = 2'-O-methyluridine-3'-phosphate
  modified_base 13: mod_base = OTHER; note = 2'-fluorocytidine-3'-phosphate
  modified_base 14: mod_base = OTHER; note = 2'-O-methyluridine-3'-phosphate
  modified_base 15: mod_base = OTHER; note = 2'-fluoroadenosine-3'-phosphate
  modified_base 16: mod_base = OTHER; note = 2'-O-methyluridine-3'-phosphate
  modified_base 17: mod_base = OTHER; note = 2'-fluoroadenosine-3'-phosphate
  modified_base 18: mod_base = OTHER; note = 2'-O-methyluridine-3'-phosphate
  modified_base 19: mod_base = OTHER; note = 2'-fluoroadenosine-3'-phosphate
  modified_base 20: mod_base = OTHER; note = 2'-O-methyluridine-3'-phosphate
  modified_base 21: mod_base = OTHER; note 2'-fluoroadenosine-3'-phosphate-N-[tris(GalNAc-alkyl)-amido decanoyl)]-4-hydroxyprolinol (Hyp-(GalNAc-alkyl)3)
tacttccaaagtctatatata

SEQ ID NO: 85 - RNA, 21 nt, synthetic construct
  source 1..21: mol_type = other RNA
  modified_base 1: mod_base = OTHER; note = 2'-fluorouridine -3'-phosphorothioate
  modified_base 2: mod_base = OTHER; note = 2'-O-methylcytidine-3'- phosphorothioate
  modified_base 3: mod_base = OTHER; note = 2'-fluorocytidine-3'-phosphate
  modified_base 4: mod_base = OTHER; note = 2'-O-methyluridine-3'-phosphate
  modified_base 5: mod_base = OTHER; note = 2'-fluoroadenosine-3'-phosphate
  modified_base 6: mod_base = OTHER; note = 2'-O-methylguanosine-3'-phosphate
  modified_base 7: mod_base = OTHER; note = 2'-fluoroguanosine-3'-phosphate
  modified_base 8: mod_base = OTHER; note = 2'-O-methyladenosine-3'-phosphate
  modified_base 9: mod_base = OTHER; note = 2'-fluoroadenosine-3'-phosphate
  modified_base 10: mod_base = OTHER; note = 2'-fluorocytidine-3'-phosphate
  modified_base 11: mod_base = OTHER; note = 2'-fluorocytidine-3'-phosphate
  modified_base 12: mod_base = OTHER; note = 2'-O-methyluridine-3'-phosphate
  modified_base 13: mod_base = OTHER; note = 2'-fluorouridine-3'-phosphate
  modified_base 14: mod_base = OTHER; note = 2'-O-methyluridine-3'-phosphate
  modified_base 15: mod_base = OTHER; note = 2'-fluorouridine-3'-phosphate
  modified_base 16: mod_base = OTHER; note = 2'-O-methyladenosine-3'-phosphate
  modified_base 17: mod_base = OTHER; note = 2'-fluoroguanosine-3'-phosphate
  modified_base 18: mod_base = OTHER; note = 2'-O-methyladenosine-3'-phosphate
  modified_base 19: mod_base = OTHER; note = 2'-fluoroadenosine-3'-phosphate
  modified_base 20: mod_base = OTHER; note = 2'-O-methyladenosine-3'-phosphate
  modified_base 21: mod_base = OTHER; note 2'-fluorouridine-3'-phosphate-N-[tris(GalNAc-alkyl)-amidode canoyl)]-4-hydroxyprolinol (Hyp-(GalNAc-alkyl)3)
tcctaggaaccttttagaaat

SEQ ID NO: 86 - RNA, 21 nt, synthetic construct
  source 1..21: mol_type = other RNA
  modified_base 1: mod_base = OTHER; note = 2'-fluorocytidine-3'-phosphorothioate
  modified_base 2: mod_base = OTHER; note = 2'-O-methyluridine-3'-phosphorothioate
  modified_base 3: mod_base = OTHER; note = 2'-fluorocytidine-3'-phosphate
  modified_base 4: mod_base = OTHER; note = 2'-O-methylcytidine-3'-phosphate
  modified_base 5: mod_base = OTHER; note = 2'-fluorouridine-3'-phosphate
  modified_base 6: mod_base = OTHER; note = 2'-O-methylguanosine-3'-phosphate
  modified_base 7: mod_base = OTHER; note = 2'-fluoroadenosine-3'-phosphate
  modified_base 8: mod_base = OTHER; note = 2'-O-methylguanosine-3'-phosphate
  modified_base 9: mod_base = OTHER; note = 2'-fluoroguanosine-3'-phosphate
  modified_base 10: mod_base = OTHER; note = 2'-fluoroadenosine-3'-phosphate
  modified_base 11: mod_base = OTHER; note = 2'-fluoroadenosine-3'-phosphate
  modified_base 12: mod_base = OTHER; note = 2'-O-methyladenosine-3'-phosphate
  modified_base 13: mod_base = OTHER; note = 2'-fluoroadenosine-3'-phosphate
  modified_base 14: mod_base = OTHER; note = 2'-O-methyluridine-3'-phosphate
  modified_base 15: mod_base = OTHER; note = 2'-fluorouridine-3'-phosphate
  modified_base 16: mod_base = OTHER; note = 2'-O-methyluridine-3'-phosphate
  modified_base 17: mod_base = OTHER; note = 2'-fluorouridine-3'-phosphate
  modified_base 18: mod_base = OTHER; note = 2'-O-methylguanosine-3'-phosphate
  modified_base 19: mod_base = OTHER; note = 2'-fluoroguanosine-3'-phosphate
  modified_base 20: mod_base = OTHER; note = 2'-O-methyladenosine-3'-phosphate
  modified_base 21: mod_base = OTHER; note 2'-fluoroadenosine-3'-phosphate-N-[tris(GalNAc-alkyl)-amido decanoyl)]-4-hydroxyprolinol (Hyp-(GalNAc-alkyl)3)
ctcctgaggaaaattttggaa

SEQ ID NO: 87 - RNA, 21 nt, synthetic construct
  source 1..21: mol_type = other RNA
  modified_base 1: mod_base = OTHER; note = 2'-fluoroguanosine-3'-phosphorothioate
  modified_base 2: mod_base = OTHER; note = 2'-O-methylcytidine-3'- phosphorothioate
  modified_base 3: mod_base = OTHER; note = 2'-fluorouridine-3'-phosphate
  modified_base 4: mod_base = OTHER; note = 2'-O-methylcytidine-3'-phosphate
  modified_base 5: mod_base = OTHER; note = 2'-fluorocytidine-3'-phosphate
  modified_base 6: mod_base = OTHER; note = 2'-O-methylguanosine-3'-phosphate
  modified_base 7: mod_base = OTHER; note = 2'-fluoroguanosine-3'-phosphate
  modified_base 8: mod_base = OTHER; note = 2'-O-methyladenosine-3'-phosphate
  modified_base 9: mod_base = OTHER; note = 2'-fluoroadenosine-3'-phosphate
  modified_base 10: mod_base = OTHER; note = 2'-fluorouridine-3'-phosphate
  modified_base 11: mod_base = OTHER; note = 2'-fluoroguanosine-3'-phosphate
  modified_base 12: mod_base = OTHER; note = 2'-O-methyluridine-3'-phosphate
  modified_base 13: mod_base = OTHER; note = 2'-fluorouridine-3'-phosphate
  modified_base 14: mod_base = OTHER; note = 2'-O-methylguanosine-3'-phosphate
  modified_base 15: mod_base = OTHER; note = 2'-fluorocytidine-3'-phosphate
  modified_base 16: mod_base = OTHER; note = 2'-O-methyluridine-3'-phosphate
  modified_base 17: mod_base = OTHER; note = 2'-fluoroguanosine-3'-phosphate
  modified_base 18: mod_base = OTHER; note = 2'-O-methyladenosine-3'-phosphate
  modified_base 19: mod_base = OTHER; note = 2'-fluoroadenosine-3'-phosphate
  modified_base 20: mod_base = OTHER; note = 2'-O-methyladenosine-3'-phosphate
  modified_base 21: mod_base = OTHER; note 2'-fluorouridine-3'-phosphate-N-[tris(GalNAc-alkyl)-amidode canoyl)]-4-hydroxyprolinol (Hyp-(GalNAc-alkyl)3)
gctccggaatgttgctgaaat

SEQ ID NO: 88 - RNA, 21 nt, synthetic construct
  source 1..21: mol_type = other RNA
  modified_base 1: mod_base = OTHER; note = 2'-fluoroguanosine-3'-phosphorothioate
  modified_base 2: mod_base = OTHER; note = 2'-O-methyluridine-3'-phosphorothioate
  modified_base 3: mod_base = OTHER; note = 2'-fluoroguanosine-3'-phosphate
  modified_base 4: mod_base = OTHER; note = 2'-O-methyluridine-3'-phosphate
  modified_base 5: mod_base = OTHER; note = 2'-fluorouridine-3'-phosphate
  modified_base 6: mod_base = OTHER; note = 2'-O-methyluridine-3'-phosphate
  modified_base 7: mod_base = OTHER; note = 2'-fluoroguanosine-3'-phosphate
  modified_base 8: mod_base = OTHER; note = 2'-O-methyluridine-3'-phosphate
  modified_base 9: mod_base = OTHER; note = 2'-fluoroguanosine-3'-phosphate
  modified_base 10: mod_base = OTHER; note = 2'-fluoroguanosine-3'-phosphate
  modified_base 11: mod_base = OTHER; note = 2'-fluoroguanosine-3'-phosphate
  modified_base 12: mod_base = OTHER; note = 2'-O-methylguanosine-3'-phosphate
  modified_base 13: mod_base = OTHER; note = 2'-fluoroadenosine-3'-phosphate
  modified_base 14: mod_base = OTHER; note = 2'-O-methylguanosine-3'-phosphate
  modified_base 15: mod_base = OTHER; note = 2'-fluoroadenosine-3'-phosphate
  modified_base 16: mod_base = OTHER; note = 2'-O-methylcytidine-3'-phosphate
  modified_base 17: mod_base = OTHER; note = 2'-fluorocytidine-3'-phosphate
  modified_base 18: mod_base = OTHER; note = 2'-O-methyladenosine-3'-phosphate
  modified_base 19: mod_base = OTHER; note = 2'-fluoroadenosine-3'-phosphate
  modified_base 20: mod_base = OTHER; note = 2'-O-methyluridine-3'-phosphate
  modified_base 21: mod_base = OTHER; note 2'-fluoroadenosine-3'-phosphate-N-[tris(GalNAc-alkyl)-amido decanoyl)]-4-hydroxyprolinol (Hyp-(GalNAc-alkyl)3)
gtgtttgtggggagaccaata

SEQ ID NO: 89 - RNA, 23 nt, synthetic construct
  source 1..23: mol_type = other RNA
  modified_base 1: mod_base = OTHER; note = 2'-O-methyluridine-3'-phosphorothioate
  modified_base 2: mod_base = OTHER; note = 2'-fluorouridine -3'-phosphorothioate
  modified_base 3: mod_base = OTHER; note = 2'-O-methylguanosine-3'-phosphate
  modified_base 4: mod_base = OTHER; note = 2'-fluorouridine-3'-phosphate
  modified_base 5: mod_base = OTHER; note = 2'-O-methylcytidine-3'-phosphate
  modified_base 6: mod_base = OTHER; note = 2'-fluoroguanosine-3'-phosphate
  modified_base 7: mod_base = OTHER; note = 2'-O-methyladenosine-3'-phosphate
  modified_base 8: mod_base = OTHER; note = 2'-fluorouridine-3'-phosphate
  modified_base 9: mod_base = OTHER; note = 2'-O-methylguanosine-3'-phosphate
  modified_base 10: mod_base = OTHER; note = 2'-fluoroadenosine-3'-phosphate
  modified_base 11: mod_base = OTHER; note = 2'-O-methylcytidine-3'-phosphate
  modified_base 12: mod_base = OTHER; note = 2'-O-methyluridine-3'-phosphate
  modified_base 13: mod_base = OTHER; note = 2'-O-methyluridine-3'-phosphate
  modified_base 14: mod_base = OTHER; note = 2'-fluorouridine-3'-phosphate
  modified_base 15: mod_base = OTHER; note = 2'-O-methylcytidine-3'-phosphate
  modified_base 16: mod_base = OTHER; note = 2'-fluoroadenosine-3'-phosphate
  modified_base 17: mod_base = OTHER; note = 2'-O-methylcytidine-3'-phosphate
  modified_base 18: mod_base = OTHER; note = 2'-fluoroadenosine-3'-phosphate
  modified_base 19: mod_base = OTHER; note = 2'-O-methyluridine-3'-phosphate
  modified_base 20: mod_base = OTHER; note = 2'-fluorouridine-3'-phosphate
  modified_base 21: mod_base = OTHER; note = 2'-O-methylcytidine-3'- phosphorothioate
  modified_base 22: mod_base = OTHER; note = 2'-O-methyluridine-3'-phosphorothioate
  modified_base 23: mod_base = OTHER; note = 2'-O-methylguanosine-3'-phosphate
ttgtcgatgactttcacattctg

SEQ ID NO: 90 - RNA, 23 nt, synthetic construct
  source 1..23: mol_type = other RNA
  modified_base 1: mod_base = OTHER; note = 2'-O-methyluridine-3'-phosphorothioate
  modified_base 2: mod_base = OTHER; note = 2'-fluorocytidine-3'-phosphorothioate
  modified_base 3: mod_base = OTHER; note = 2'-O-methylcytidine-3'-phosphate
  modified_base 4: mod_base = OTHER; note = 2'-fluorouridine-3'-phosphate
  modified_base 5: mod_base = OTHER; note = 2'-O-methyladenosine-3'-phosphate
  modified_base 6: mod_base = OTHER; note = 2'-fluoroguanosine-3'-phosphate
  modified_base 7: mod_base = OTHER; note = 2'-O-methylguanosine-3'-phosphate
  modified_base 8: mod_base = OTHER; note = 2'-fluoroadenosine-3'-phosphate
  modified_base 9: mod_base = OTHER; note = 2'-O-methylcytidine-3'-phosphate
  modified_base 10: mod_base = OTHER; note = 2'-fluoroadenosine-3'-phosphate
  modified_base 11: mod_base = OTHER; note = 2'-O-methylcytidine-3'-phosphate
  modified_base 12: mod_base = OTHER; note = 2'-O-methylcytidine-3'-phosphate
  modified_base 13: mod_base = OTHER; note = 2'-O-methylcytidine-3'-phosphate
  modified_base 14: mod_base = OTHER; note = 2'-fluoroadenosine-3'-phosphate
  modified_base 15: mod_base = OTHER; note = 2'-O-methyluridine-3'-phosphate
  modified_base 16: mod_base = OTHER; note = 2'-fluorouridine-3'-phosphate
  modified_base 17: mod_base = OTHER; note = 2'-O-methylguanosine-3'-phosphate
  modified_base 18: mod_base = OTHER; note = 2'-fluoroadenosine-3'-phosphate
  modified_base 19: mod_base = OTHER; note = 2'-O-methyladenosine-3'-phosphate
  modified_base 20: mod_base = OTHER; note = 2'-fluoroadenosine-3'-phosphate
  modified_base 21: mod_base = OTHER; note = 2'-O-methyladenosine-3'- phosphorothioate
  modified_base 22: mod_base = OTHER; note = 2'-O-methylguanosine-3'- phosphorothioate
  modified_base 23: mod_base = OTHER; note = 2'-O-methyluridine-3'-phosphate
tcctaggacacccattgaaaagt

SEQ ID NO: 91 - RNA, 23 nt, synthetic construct
  source 1..23: mol_type = other RNA
  modified_base 1: mod_base = OTHER; note = 2'-O-methyladenosine-3'- phosphorothioate
  modified_base 2: mod_base = OTHER; note = 2'-fluoroadenosine-3'-phosphorothioate
  modified_base 3: mod_base = OTHER; note = 2'-O-methyluridine-3'-phosphate
  modified_base 4: mod_base = OTHER; note = 2'-fluoroguanosine-3'-phosphate
  modified_base 5: mod_base = OTHER; note = 2'-O-methyluridine-3'-phosphate
  modified_base 6: mod_base = OTHER; note = 2'-fluorocytidine-3'-phosphate
  modified_base 7: mod_base = OTHER; note = 2'-O-methyluridine-3'-phosphate
  modified_base 8: mod_base = OTHER; note = 2'-fluorouridine-3'-phosphate
  modified_base 9: mod_base = OTHER; note = 2'-O-methylguanosine-3'-phosphate
  modified_base 10: mod_base = OTHER; note = 2'-fluorouridine-3'-phosphate
  modified_base 11: mod_base = OTHER; note = 2'-O-methylcytidine-3'-phosphate
  modified_base 12: mod_base = OTHER; note = 2'-O-methylguanosine-3'-phosphate
  modified_base 13: mod_base = OTHER; note = 2'-O-methyladenosine-3'-phosphate
  modified_base 14: mod_base = OTHER; note = 2'-fluorouridine-3'-phosphate
  modified_base 15: mod_base = OTHER; note = 2'-O-methylguanosine-3'-phosphate
  modified_base 16: mod_base = OTHER; note = 2'-fluoroadenosine-3'-phosphate
  modified_base 17: mod_base = OTHER; note = 2'-O-methylcytidine-3'-phosphate
  modified_base 18: mod_base = OTHER; note = 2'-fluorouridine-3'-phosphate
  modified_base 19: mod_base = OTHER; note = 2'-O-methyluridine-3'-phosphate
  modified_base 20: mod_base = OTHER; note = 2'-fluorouridine-3'-phosphate
  modified_base 21: mod_base = OTHER; note = 2'-O-methylcytidine-3'- phosphorothioate
  modified_base 22: mod_base = OTHER; note = 2'-O-methyladenosine-3'- phosphorothioate
  modified_base 23: mod_base = OTHER; note = 2'-O-methylcytidine-3'-phosphate
aatgtcttgtcgatgactttcac

SEQ ID NO: 92 - RNA, 23 nt, synthetic construct
  source 1..23: mol_type = other RNA
  modified_base 1: mod_base = OTHER; note = 2'-O-methyluridine-3'-phosphorothioate
  modified_base 2: mod_base = OTHER; note = 2'-fluorocytidine-3'-phosphorothioate
  modified_base 3: mod_base = OTHER; note = 2'-O-methyladenosine-3'-phosphate
  modified_base 4: mod_base = OTHER; note = 2'-fluorocytidine-3'-phosphate
  modified_base 5: mod_base = OTHER; note = 2'-O-methylcytidine-3'-phosphate
  modified_base 6: mod_base = OTHER; note = 2'-fluoroadenosine-3'-phosphate
  modified_base 7: mod_base = OTHER; note = 2'-O-methyladenosine-3'-phosphate
  modified_base 8: mod_base = OTHER; note = 2'-fluorouridine-3'-phosphate
  modified_base 9: mod_base = OTHER; note = 2'-O-methylguanosine-3'-phosphate
  modified_base 10: mod_base = OTHER; note = 2'-fluorouridine-3'-phosphate
  modified_base 11: mod_base = OTHER; note = 2'-O-methylcytidine-3'-phosphate
  modified_base 12: mod_base = OTHER; note = 2'-O-methyluridine-3'-phosphate
  modified_base 13: mod_base = OTHER; note = 2'-O-methyluridine-3'-phosphate
  modified_base 14: mod_base = OTHER; note = 2'-fluoroguanosine-3'-phosphate
  modified_base 15: mod_base = OTHER; note = 2'-O-methyluridine-3'-phosphate
  modified_base 16: mod_base = OTHER; note = 2'-fluorocytidine-3'-phosphate
  modified_base 17: mod_base = OTHER; note = 2'-O-methylguanosine-3'-phosphate
  modified_base 18: mod_base = OTHER; note = 2'-fluoroadenosine-3'-phosphate
  modified_base 19: mod_base = OTHER; note = 2'-O-methyluridine-3'-phosphate
  modified_base 20: mod_base = OTHER; note = 2'-fluoroguanosine-3'-phosphate
  modified_base 21: mod_base = OTHER; note = 2'-O-methyladenosine-3'- phosphorothioate
  modified_base 22: mod_base = OTHER; note = 2'-O-methylcytidine-3'- phosphorothioate
  modified_base 23: mod_base = OTHER; note = 2'-O-methyluridine-3'-phosphate
tcaccaatgtcttgtcgatgact

SEQ ID NO: 93 - RNA, 23 nt, synthetic construct
  source 1..23: mol_type = other RNA
  modified_base 1: mod_base = OTHER; note = 2'-O-methyluridine-3'-phosphorothioate
  modified_base 2: mod_base = OTHER; note = 2'-fluorouridine -3'-phosphorothioate
  modified_base 3: mod_base = OTHER; note = 2'-O-methylcytidine-3'-phosphate
  modified_base 4: mod_base = OTHER; note = 2'-fluorocytidine-3'-phosphate
  modified_base 5: mod_base = OTHER; note = 2'-O-methyluridine-3'-phosphate
  modified_base 6: mod_base = OTHER; note = 2'-fluoroadenosine-3'-phosphate
  modified_base 7: mod_base = OTHER; note = 2'-O-methylguanosine-3'-phosphate
  modified_base 8: mod_base = OTHER; note = 2'-fluoroguanosine-3'-phosphate
  modified_base 9: mod_base = OTHER; note = 2'-O-methyladenosine-3'-phosphate
  modified_base 10: mod_base = OTHER; note = 2'-fluorocytidine-3'-phosphate
  modified_base 11: mod_base = OTHER; note = 2'-O-methyladenosine-3'-phosphate
  modified_base 12: mod_base = OTHER; note = 2'-O-methylcytidine-3'-phosphate
  modified_base 13: mod_base = OTHER; note = 2'-O-methylcytidine-3'-phosphate
  modified_base 14: mod_base = OTHER; note = 2'-fluorocytidine-3'-phosphate
  modified_base 15: mod_base = OTHER; note = 2'-O-methyladenosine-3'-phosphate
  modified_base 16: mod_base = OTHER; note = 2'-fluorouridine-3'-phosphate
  modified_base 17: mod_base = OTHER; note = 2'-O-methyluridine-3'-phosphate
  modified_base 18: mod_base = OTHER; note = 2'-fluoroguanosine-3'-phosphate
  modified_base 19: mod_base = OTHER; note = 2'-O-methyladenosine-3'-phosphate
  modified_base 20: mod_base = OTHER; note = 2'-fluoroadenosine-3'-phosphate
  modified_base 21: mod_base = OTHER; note = 2'-O-methyladenosine-3'- phosphorothioate
  modified_base 22: mod_base = OTHER; note = 2'-O-methyladenosine-3'- phosphorothioate
  modified_base 23: mod_base = OTHER; note = 2'-O-methylguanosine-3'-phosphate
ttcctaggacacccattgaaaag

SEQ ID NO: 94 - RNA, 23 nt, synthetic construct
  source 1..23: mol_type = other RNA
  modified_base 1: mod_base = OTHER; note = 2'-O-methyladenosine-3'- phosphorothioate
  modified_base 2: mod_base = OTHER; note = 2'-fluoroadenosine-3'-phosphorothioate
  modified_base 3: mod_base = OTHER; note = 2'-O-methylguanosine-3'-phosphate
  modified_base 4: mod_base = OTHER; note = 2'-fluoroguanosine-3'-phosphate
  modified_base 5: mod_base = OTHER; note = 2'-O-methyluridine-3'-phosphate
  modified_base 6: mod_base = OTHER; note = 2'-fluorouridine-3'-phosphate
  modified_base 7: mod_base = OTHER; note = 2'-O-methylcytidine-3'-phosphate
  modified_base 8: mod_base = OTHER; note = 2'-fluorocytidine-3'-phosphate
  modified_base 9: mod_base = OTHER; note = 2'-O-methyluridine-3'-phosphate
  modified_base 10: mod_base = OTHER; note = 2'-fluoroadenosine-3'-phosphate
  modified_base 11: mod_base = OTHER; note = 2'-O-methylguanosine-3'-phosphate
  modified_base 12: mod_base = OTHER; note = 2'-O-methylguanosine-3'-phosphate
  modified_base 13: mod_base = OTHER; note = 2'-O-methyladenosine-3'-phosphate
  modified_base 14: mod_base = OTHER; note = 2'-fluorocytidine-3'-phosphate
  modified_base 15: mod_base = OTHER; note = 2'-O-methyladenosine-3'-phosphate
  modified_base 16: mod_base = OTHER; note = 2'-fluorocytidine-3'-phosphate
  modified_base 17: mod_base = OTHER; note = 2'-O-methylcytidine-3'-phosphate
  modified_base 18: mod_base = OTHER; note = 2'-fluorocytidine-3'-phosphate
  modified_base 19: mod_base = OTHER; note = 2'-O-methyladenosine-3'-phosphate
  modified_base 20: mod_base = OTHER; note = 2'-fluorouridine-3'-phosphate
  modified_base 21: mod_base = OTHER; note = 2'-O-methyluridine-3'-phosphorothioate
  modified_base 22: mod_base = OTHER; note = 2'-O-methylguanosine-3'- phosphorothioate
  modified_base 23: mod_base = OTHER; note = 2'-O-methyladenosine-3'-phosphate
aaggttcctaggacacccattga

SEQ ID NO: 95 - RNA, 23 nt, synthetic construct
  source 1..23: mol_type = other RNA
  modified_base 1: mod_base = OTHER; note = 2'-O-methyluridine-3'-phosphorothioate
  modified_base 2: mod_base = OTHER; note = 2'-fluoroguanosine-3'-phosphorothioate
  modified_base 3: mod_base = OTHER; note = 2'-O-methylguanosine-3'-phosphate
  modified_base 4: mod_base = OTHER; note = 2'-fluoroadenosine-3'-phosphate
  modified_base 5: mod_base = OTHER; note = 2'-O-methyladenosine-3'-phosphate
  modified_base 6: mod_base = OTHER; note = 2'-fluoroadenosine-3'-phosphate
  modified_base 7: mod_base = OTHER; note = 2'-O-methyladenosine-3'-phosphate
  modified_base 8: mod_base = OTHER; note = 2'-fluorouridine-3'-phosphate
  modified_base 9: mod_base = OTHER; note = 2'-O-methyladenosine-3'-phosphate
  modified_base 10: mod_base = OTHER; note = 2'-fluorouridine-3'-phosphate
  modified_base 11: mod_base = OTHER; note = 2'-O-methyluridine-3'-phosphate
  modified_base 12: mod_base = OTHER; note = 2'-O-methylguanosine-3'-phosphate
  modified_base 13: mod_base = OTHER; note = 2'-O-methyluridine-3'-phosphate
  modified_base 14: mod_base = OTHER; note = 2'-fluoroguanosine-3'-phosphate
  modified_base 15: mod_base = OTHER; note = 2'-O-methylcytidine-3'-phosphate
  modified_base 16: mod_base = OTHER; note = 2'-fluoroadenosine-3'-phosphate
  modified_base 17: mod_base = OTHER; note = 2'-O-methylcytidine-3'-phosphate
  modified_base 18: mod_base = OTHER; note = 2'-fluorouridine-3'-phosphate
  modified_base 19: mod_base = OTHER; note = 2'-O-methylguanosine-3'-phosphate
  modified_base 20: mod_base = OTHER; note = 2'-fluorouridine-3'-phosphate
  modified_base 21: mod_base = OTHER; note = 2'-O-methylcytidine-3'- phosphorothioate
  modified_base 22: mod_base = OTHER; note = 2'-O-methyladenosine-3'- phosphorothioate
  modified_base 23: mod_base = OTHER; note = 2'-O-methylguanosine-3'-phosphate
tggaaaatattgtgcactgtcag

SEQ ID NO: 96 - RNA, 23 nt, synthetic construct
  source 1..23: mol_type = other RNA
  modified_base 1: mod_base = OTHER; note = 2'-O-methyluridine-3'-phosphorothioate
  modified_base 2: mod_base = OTHER; note = 2'-fluorouridine -3'-phosphorothioate
  modified_base 3: mod_base = OTHER; note = 2'-O-methyladenosine-3'-phosphate
  modified_base 4: mod_base = OTHER; note = 2'-fluoroguanosine-3'-phosphate
  modified_base 5: mod_base = OTHER; note = 2'-O-methylguanosine-3'-phosphate
  modified_base 6: mod_base = OTHER; note = 2'-fluoroadenosine-3'-phosphate
  modified_base 7: mod_base = OTHER; note = 2'-O-methylcytidine-3'-phosphate
  modified_base 8: mod_base = OTHER; note = 2'-fluoroadenosine-3'-phosphate
  modified_base 9: mod_base = OTHER; note = 2'-O-methylcytidine-3'-phosphate
  modified_base 10: mod_base = OTHER; note = 2'-fluorocytidine-3'-phosphate
  modified_base 11: mod_base = OTHER; note = 2'-O-methylcytidine-3'-phosphate
  modified_base 12: mod_base = OTHER; note = 2'-O-methyladenosine-3'-phosphate
  modified_base 13: mod_base = OTHER; note = 2'-O-methyluridine-3'-phosphate
  modified_base 14: mod_base = OTHER; note = 2'-fluorouridine-3'-phosphate
  modified_base 15: mod_base = OTHER; note = 2'-O-methylguanosine-3'-phosphate
  modified_base 16: mod_base = OTHER; note = 2'-fluoroadenosine-3'-phosphate
  modified_base 17: mod_base = OTHER; note = 2'-O-methyladenosine-3'-phosphate
  modified_base 18: mod_base = OTHER; note = 2'-fluoroadenosine-3'-phosphate
  modified_base 19: mod_base = OTHER; note = 2'-O-methyladenosine-3'-phosphate
  modified_base 20: mod_base = OTHER; note = 2'-fluoroguanosine-3'-phosphate
  modified_base 21: mod_base = OTHER; note = 2'-O-methyluridine-3'-phosphorothioate
  modified_base 22: mod_base = OTHER; note = 2'-O-methylcytidine-3'- phosphorothioate
  modified_base 23: mod_base = OTHER; note = 2'-O-methyladenosine-3'-phosphate
ttaggacacccattgaaaagtca

SEQ ID NO: 97 - RNA, 23 nt, synthetic construct
  source 1..23: mol_type = other RNA
  modified_base 1: mod_base = OTHER; note = 2'-O-methyluridine-3'-phosphorothioate
  modified_base 2: mod_base = OTHER; note = 2'-fluorocytidine-3'-phosphorothioate
  modified_base 3: mod_base = OTHER; note = 2'-O-methyladenosine-3'-phosphate
  modified_base 4: mod_base = OTHER; note = 2'-fluoroadenosine-3'-phosphate
  modified_base 5: mod_base = OTHER; note = 2'-O-methyluridine-3'-phosphate
  modified_base 6: mod_base = OTHER; note = 2'-fluoroguanosine-3'-phosphate
  modified_base 7: mod_base = OTHER; note = 2'-O-methyluridine-3'-phosphate
  modified_base 8: mod_base = OTHER; note = 2'-fluorocytidine-3'-phosphate
  modified_base 9: mod_base = OTHER; note = 2'-O-methyluridine-3'-phosphate
  modified_base 10: mod_base = OTHER; note = 2'-fluorouridine-3'-phosphate
  modified_base 11: mod_base = OTHER; note = 2'-O-methylguanosine-3'-phosphate
  modified_base 12: mod_base = OTHER; note = 2'-O-methyluridine-3'-phosphate
  modified_base 13: mod_base = OTHER; note = 2'-O-methylcytidine-3'-phosphate
  modified_base 14: mod_base = OTHER; note = 2'-fluoroguanosine-3'-phosphate
  modified_base 15: mod_base = OTHER; note = 2'-O-methyladenosine-3'-phosphate
  modified_base 16: mod_base = OTHER; note = 2'-fluorouridine-3'-phosphate
  modified_base 17: mod_base = OTHER; note = 2'-O-methylguanosine-3'-phosphate
  modified_base 18: mod_base = OTHER; note = 2'-fluoroadenosine-3'-phosphate
  modified_base 19: mod_base = OTHER; note = 2'-O-methylcytidine-3'-phosphate
  modified_base 20: mod_base = OTHER; note = 2'-fluorouridine-3'-phosphate
  modified_base 21: mod_base = OTHER; note = 2'-O-methyluridine-3'-phosphorothioate
  modified_base 22: mod_base = OTHER; note = 2'-O-methyluridine-3'-phosphorothioate
  modified_base 23: mod_base = OTHER; note = 2'-O-methylcytidine-3'-phosphate
tcaatgtcttgtcgatgactttc

SEQ ID NO: 98 - RNA, 23 nt, synthetic construct
  source 1..23: mol_type = other RNA
  modified_base 1: mod_base = OTHER; note = 2'-O-methyluridine-3'-phosphorothioate
  modified_base 2: mod_base = OTHER; note = 2'-fluorocytidine-3'-phosphorothioate
  modified_base 3: mod_base = OTHER; note = 2'-O-methyluridine-3'-phosphate
  modified_base 4: mod_base = OTHER; note = 2'-fluorocytidine-3'-phosphate
  modified_base 5: mod_base = OTHER; note = 2'-O-methyladenosine-3'-phosphate
  modified_base 6: mod_base = OTHER; note = 2'-fluorocytidine-3'-phosphate
  modified_base 7: mod_base = OTHER; note = 2'-O-methylcytidine-3'-phosphate
  modified_base 8: mod_base = OTHER; note = 2'-fluoroadenosine-3'-phosphate
  modified_base 9: mod_base = OTHER; note = 2'-O-methyladenosine-3'-phosphate
  modified_base 10: mod_base = OTHER; note = 2'-fluorouridine-3'-phosphate
  modified_base 11: mod_base = OTHER; note = 2'-O-methylguanosine-3'-phosphate
  modified_base 12: mod_base = OTHER; note = 2'-O-methyluridine-3'-phosphate
  modified_base 13: mod_base = OTHER; note = 2'-O-methylcytidine-3'-phosphate
  modified_base 14: mod_base = OTHER; note = 2'-fluorouridine-3'-phosphate
  modified_base 15: mod_base = OTHER; note = 2'-O-methyluridine-3'-phosphate
  modified_base 16: mod_base = OTHER; note = 2'-fluoroguanosine-3'-phosphate
  modified_base 17: mod_base = OTHER; note = 2'-O-methyluridine-3'-phosphate
  modified_base 18: mod_base = OTHER; note = 2'-fluorocytidine-3'-phosphate
  modified_base 19: mod_base = OTHER; note = 2'-O-methylguanosine-3'-phosphate
  modified_base 20: mod_base = OTHER; note = 2'-fluoroadenosine-3'-phosphate
  modified_base 21: mod_base = OTHER; note = 2'-O-methyluridine-3'-phosphorothioate
  modified_base 22: mod_base = OTHER; note = 2'-O-methylguanosine-3'- phosphorothioate
  modified_base 23: mod_base = OTHER; note = 2'-O-methyladenosine-3'-phosphate
tctcaccaatgtcttgtcgatga

SEQ ID NO: 99 - RNA, 23 nt, synthetic construct
  source 1..23: mol_type = other RNA
  modified_base 1: mod_base = OTHER; note = 2'-O-methyluridine-3'-phosphorothioate
  modified_base 2: mod_base = OTHER; note = 2'-fluoroadenosine-3'-phosphorothioate
  modified_base 3: mod_base = OTHER; note = 2'-O-methyluridine-3'-phosphate
  modified_base 4: mod_base = OTHER; note = 2'-fluorocytidine-3'-phosphate
  modified_base 5: mod_base = OTHER; note = 2'-O-methyluridine-3'-phosphate
  modified_base 6: mod_base = OTHER; note = 2'-fluorouridine-3'-phosphate
  modified_base 7: mod_base = OTHER; note = 2'-O-methylguanosine-3'-phosphate
  modified_base 8: mod_base = OTHER; note = 2'-fluoroadenosine-3'-phosphate
  modified_base 9: mod_base = OTHER; note = 2'-O-methyladenosine-3'-phosphate
  modified_base 10: mod_base = OTHER; note = 2'-fluorocytidine-3'-phosphate
  modified_base 11: mod_base = OTHER; note = 2'-O-methyladenosine-3'-phosphate
  modified_base 12: mod_base = OTHER; note = 2'-O-methylcytidine-3'-phosphate
  modified_base 13: mod_base = OTHER; note = 2'-O-methylcytidine-3'-phosphate
  modified_base 14: mod_base = OTHER; note = 2'-fluorouridine-3'-phosphate
  modified_base 15: mod_base = OTHER; note = 2'-O-methyluridine-3'-phosphate
  modified_base 16: mod_base = OTHER; note = 2'-fluorouridine-3'-phosphate
  modified_base 17: mod_base = OTHER; note = 2'-O-methylcytidine-3'-phosphate
  modified_base 18: mod_base = OTHER; note = 2'-fluorouridine-3'-phosphate
  modified_base 19: mod_base = OTHER; note = 2'-O-methylcytidine-3'-phosphate
  modified_base 20: mod_base = OTHER; note = 2'-fluorocytidine-3'-phosphate
  modified_base 21: mod_base = OTHER; note = 2'-O-methylcytidine-3'- phosphorothioate
  modified_base 22: mod_base = OTHER; note = 2'-O-methylcytidine-3'- phosphorothioate
  modified_base 23: mod_base = OTHER; note = 2'-O-methylcytidine-3'-phosphate
tatcttgaacacctttctccccc

SEQ ID NO: 100 - RNA, 23 nt, synthetic construct
  source 1..23: mol_type = other RNA
  modified_base 1: mod_base = OTHER; note = 2'-O-methyluridine-3'-phosphorothioate
  modified_base 2: mod_base = OTHER; note = 2'-fluorocytidine-3'-phosphorothioate
  modified_base 3: mod_base = OTHER; note = 2'-O-methyluridine-3'-phosphate
  modified_base 4: mod_base = OTHER; note = 2'-fluoroadenosine-3'-phosphate
  modified_base 5: mod_base = OTHER; note = 2'-O-methylguanosine-3'-phosphate
  modified_base 6: mod_base = OTHER; note = 2'-fluoroguanosine-3'-phosphate
  modified_base 7: mod_base = OTHER; note = 2'-O-methyladenosine-3'-phosphate
  modified_base 8: mod_base = OTHER; note = 2'-fluorocytidine-3'-phosphate
  modified_base 9: mod_base = OTHER; note = 2'-O-methyladenosine-3'-phosphate
  modified_base 10: mod_base = OTHER; note = 2'-fluorocytidine-3'-phosphate
  modified_base 11: mod_base = OTHER; note = 2'-O-methylcytidine-3'-phosphate
  modified_base 12: mod_base = OTHER; note = 2'-O-methylcytidine-3'-phosphate
  modified_base 13: mod_base = OTHER; note = 2'-O-methyladenosine-3'-phosphate
  modified_base 14: mod_base = OTHER; note = 2'-fluorouridine-3'-phosphate
  modified_base 15: mod_base = OTHER; note = 2'-O-methyluridine-3'-phosphate
  modified_base 16: mod_base = OTHER; note = 2'-fluoroguanosine-3'-phosphate
  modified_base 17: mod_base = OTHER; note = 2'-O-methyladenosine-3'-phosphate
  modified_base 18: mod_base = OTHER; note = 2'-fluoroadenosine-3'-phosphate
  modified_base 19: mod_base = OTHER; note = 2'-O-methyladenosine-3'-phosphate
  modified_base 20: mod_base = OTHER; note = 2'-fluoroadenosine-3'-phosphate
  modified_base 21: mod_base = OTHER; note = 2'-O-methylguanosine-3'- phosphorothioate
  modified_base 22: mod_base = OTHER; note = 2'-O-methyluridine-3'-phosphorothioate
  modified_base 23: mod_base = OTHER; note = 2'-O-methylcytidine-3'-phosphate
tctaggacacccattgaaaagtc

SEQ ID NO: 101 - RNA, 23 nt, synthetic construct
  source 1..23: mol_type = other RNA
  modified_base 1: mod_base = OTHER; note = 2'-O-methyluridine-3'-phosphorothioate
  modified_base 2: mod_base = OTHER; note = 2'-fluoroguanosine-3'-phosphorothioate
  modified_base 3: mod_base = OTHER; note = 2'-O-methyluridine-3'-phosphate
  modified_base 4: mod_base = OTHER; note = 2'-fluorouridine-3'-phosphate
  modified_base 5: mod_base = OTHER; note = 2'-O-methylcytidine-3'-phosphate
  modified_base 6: mod_base = OTHER; note = 2'-fluorocytidine-3'-phosphate
  modified_base 7: mod_base = OTHER; note = 2'-O-methyluridine-3'-phosphate
  modified_base 8: mod_base = OTHER; note = 2'-fluoroadenosine-3'-phosphate
  modified_base 9: mod_base = OTHER; note = 2'-O-methylguanosine-3'-phosphate
  modified_base 10: mod_base = OTHER; note = 2'-fluoroguanosine-3'-phosphate
  modified_base 11: mod_base = OTHER; note = 2'-O-methyladenosine-3'-phosphate
  modified_base 12: mod_base = OTHER; note = 2'-O-methylcytidine-3'-phosphate
  modified_base 13: mod_base = OTHER; note = 2'-O-methyladenosine-3'-phosphate
  modified_base 14: mod_base = OTHER; note = 2'-fluorocytidine-3'-phosphate
  modified_base 15: mod_base = OTHER; note = 2'-O-methylcytidine-3'-phosphate
  modified_base 16: mod_base = OTHER; note = 2'-fluorocytidine-3'-phosphate
  modified_base 17: mod_base = OTHER; note = 2'-O-methyladenosine-3'-phosphate
  modified_base 18: mod_base = OTHER; note = 2'-fluorouridine-3'-phosphate
  modified_base 19: mod_base = OTHER; note = 2'-O-methyluridine-3'-phosphate
  modified_base 20: mod_base = OTHER; note = 2'-fluoroguanosine-3'-phosphate
  modified_base 21: mod_base = OTHER; note = 2'-O-methyladenosine-3'- phosphorothioate
  modified_base 22: mod_base = OTHER; note = 2'-O-methyladenosine-3'- phosphorothioate
  modified_base 23: mod_base = OTHER; note = 2'-O-methyladenosine-3'-phosphate
tgttcctaggacacccattgaaa

SEQ ID NO: 102 - RNA, 23 nt, synthetic construct
  source 1..23: mol_type = other RNA
  modified_base 1: mod_base = OTHER; note = 2'-O-methyluridine-3'-phosphorothioate
  modified_base 2: mod_base = OTHER; note = 2'-fluoroguanosine-3'-phosphorothioate
  modified_base 3: mod_base = OTHER; note = 2'-O-methyladenosine-3'-phosphate
  modified_base 4: mod_base = OTHER; note = 2'-fluorocytidine-3'-phosphate
  modified_base 5: mod_base = OTHER; note = 2'-O-methyladenosine-3'-phosphate
  modified_base 6: mod_base = OTHER; note = 2'-fluorocytidine-3'-phosphate
  modified_base 7: mod_base = OTHER; note = 2'-O-methylcytidine-3'-phosphate
  modified_base 8: mod_base = OTHER; note = 2'-fluorocytidine-3'-phosphate
  modified_base 9: mod_base = OTHER; note = 2'-O-methyladenosine-3'-phosphate
  modified_base 10: mod_base = OTHER; note = 2'-fluorouridine-3'-phosphate
  modified_base 11: mod_base = OTHER; note = 2'-O-methyluridine-3'-phosphate
  modified_base 12: mod_base = OTHER; note = 2'-O-methylguanosine-3'-phosphate
  modified_base 13: mod_base = OTHER; note = 2'-O-methyladenosine-3'-phosphate
  modified_base 14: mod_base = OTHER; note = 2'-fluoroadenosine-3'-phosphate
  modified_base 15: mod_base = OTHER; note = 2'-O-methyladenosine-3'-phosphate
  modified_base 16: mod_base = OTHER; note = 2'-fluoroadenosine-3'-phosphate
  modified_base 17: mod_base = OTHER; note = 2'-O-methylguanosine-3'-phosphate
  modified_base 18: mod_base = OTHER; note = 2'-fluorouridine-3'-phosphate
  modified_base 19: mod_base = OTHER; note = 2'-O-methylcytidine-3'-phosphate
  modified_base 20: mod_base = OTHER; note = 2'-fluoroadenosine-3'-phosphate
  modified_base 21: mod_base = OTHER; note = 2'-O-methyladenosine-3'- phosphorothioate
  modified_base 22: mod_base = OTHER; note = 2'-O-methyladenosine-3'- phosphorothioate
  modified_base 23: mod_base = OTHER; note = 2'-O-methyladenosine-3'-phosphate
tgacacccattgaaaagtcaaaa

SEQ ID NO: 103 - RNA, 23 nt, synthetic construct
  source 1..23: mol_type = other RNA
  modified_base 1: mod_base = OTHER; note = 2'-O-methyluridine-3'-phosphorothioate
  modified_base 2: mod_base = OTHER; note = 2'-fluoroadenosine-3'-phosphorothioate
  modified_base 3: mod_base = OTHER; note = 2'-O-methyladenosine-3'-phosphate
  modified_base 4: mod_base = OTHER; note = 2'-fluorouridine-3'-phosphate
  modified_base 5: mod_base = OTHER; note = 2'-O-methylguanosine-3'-phosphate
  modified_base 6: mod_base = OTHER; note = 2'-fluorouridine-3'-phosphate
  modified_base 7: mod_base = OTHER; note = 2'-O-methylcytidine-3'-phosphate
  modified_base 8: mod_base = OTHER; note = 2'-fluorouridine-3'-phosphate
  modified_base 9: mod_base = OTHER; note = 2'-O-methyluridine-3'-phosphate
  modified_base 10: mod_base = OTHER; note = 2'-fluoroguanosine-3'-phosphate
  modified_base 11: mod_base = OTHER; note = 2'-O-methyluridine-3'-phosphate
  modified_base 12: mod_base = OTHER; note = 2'-O-methylcytidine-3'-phosphate
  modified_base 13: mod_base = OTHER; note = 2'-O-methylguanosine-3'-phosphate
  modified_base 14: mod_base = OTHER; note = 2'-fluoroadenosine-3'-phosphate
  modified_base 15: mod_base = OTHER; note = 2'-O-methyluridine-3'-phosphate
  modified_base 16: mod_base = OTHER; note = 2'-fluoroguanosine-3'-phosphate
  modified_base 17: mod_base = OTHER; note = 2'-O-methyladenosine-3'-phosphate
  modified_base 18: mod_base = OTHER; note = 2'-fluorocytidine-3'-phosphate
  modified_base 19: mod_base = OTHER; note = 2'-O-methyluridine-3'-phosphate
  modified_base 20: mod_base = OTHER; note = 2'-fluorouridine-3'-phosphate
  modified_base 21: mod_base = OTHER; note = 2'-O-methyluridine-3'-phosphorothioate
  modified_base 22: mod_base = OTHER; note = 2'-O-methylcytidine-3'- phosphorothioate
  modified_base 23: mod_base = OTHER; note = 2'-O-methyladenosine-3'-phosphate
taatgtcttgtcgatgactttca

SEQ ID NO: 104 - RNA, 23 nt, synthetic construct
  source 1..23: mol_type = other RNA
  modified_base 1: mod_base = OTHER; note = 2'-O-methyluridine-3'-phosphorothioate
  modified_base 2: mod_base = OTHER; note = 2'-fluorouridine -3'-phosphorothioate
  modified_base 3: mod_base = OTHER; note = 2'-O-methylguanosine-3'-phosphate
  modified_base 4: mod_base = OTHER; note = 2'-fluoroadenosine-3'-phosphate
  modified_base 5: mod_base = OTHER; note = 2'-O-methyladenosine-3'-phosphate
  modified_base 6: mod_base = OTHER; note = 2'-fluorocytidine-3'-phosphate
  modified_base 7: mod_base = OTHER; note = 2'-O-methyladenosine-3'-phosphate
  modified_base 8: mod_base = OTHER; note = 2'-fluorocytidine-3'-phosphate
  modified_base 9: mod_base = OTHER; note = 2'-O-methylcytidine-3'-phosphate
  modified_base 10: mod_base = OTHER; note = 2'-fluorouridine-3'-phosphate
  modified_base 11: mod_base = OTHER; note = 2'-O-methyluridine-3'-phosphate
  modified_base 12: mod_base = OTHER; note = 2'-O-methyluridine-3'-phosphate
  modified_base 13: mod_base = OTHER; note = 2'-O-methylcytidine-3'-phosphate
  modified_base 14: mod_base = OTHER; note = 2'-fluorouridine-3'-phosphate
  modified_base 15: mod_base = OTHER; note = 2'-O-methylcytidine-3'-phosphate
  modified_base 16: mod_base = OTHER; note = 2'-fluorocytidine-3'-phosphate
  modified_base 17: mod_base = OTHER; note = 2'-O-methylcytidine-3'-phosphate
  modified_base 18: mod_base = OTHER; note = 2'-fluorocytidine-3'-phosphate
  modified_base 19: mod_base = OTHER; note = 2'-O-methylcytidine-3'-phosphate
  modified_base 20: mod_base = OTHER; note = 2'-fluorouridine-3'-phosphate
  modified_base 21: mod_base = OTHER; note = 2'-O-methylguanosine-3'- phosphorothioate
  modified_base 22: mod_base = OTHER; note = 2'-O-methylguanosine-3'- phosphorothioate
  modified_base 23: mod_base = OTHER; note = 2'-O-methyladenosine-3'-phosphate
ttgaacacctttctccccctgga

SEQ ID NO: 105 - RNA, 23 nt, synthetic construct
  source 1..23: mol_type = other RNA
  modified_base 1: mod_base = OTHER; note = 2'-O-methyladenosine-3'- phosphorothioate
  modified_base 2: mod_base = OTHER; note = 2'-fluoroadenosine-3'-phosphorothioate
  modified_base 3: mod_base = OTHER; note = 2'-O-methylguanosine-3'-phosphate
  modified_base 4: mod_base = OTHER; note = 2'-fluoroguanosine-3'-phosphate
  modified_base 5: mod_base = OTHER; note = 2'-O-methyladenosine-3'-phosphate
  modified_base 6: mod_base = OTHER; note = 2'-fluorouridine-3'-phosphate
  modified_base 7: mod_base = OTHER; note = 2'-O-methyluridine-3'-phosphate
  modified_base 8: mod_base = OTHER; note = 2'-fluorouridine-3'-phosphate
  modified_base 9: mod_base = OTHER; note = 2'-O-methyluridine-3'-phosphate
  modified_base 10: mod_base = OTHER; note = 2'-fluorouridine-3'-phosphate
  modified_base 11: mod_base = OTHER; note = 2'-O-methylcytidine-3'-phosphate
  modified_base 12: mod_base = OTHER; note = 2'-O-methylcytidine-3'-phosphate
  modified_base 13: mod_base = OTHER; note = 2'-O-methyluridine-3'-phosphate
  modified_base 14: mod_base = OTHER; note = 2'-fluorocytidine-3'-phosphate
  modified_base 15: mod_base = OTHER; note = 2'-O-methyladenosine-3'-phosphate
  modified_base 16: mod_base = OTHER; note = 2'-fluorocytidine-3'-phosphate
  modified_base 17: mod_base = OTHER; note = 2'-O-methylcytidine-3'-phosphate
  modified_base 18: mod_base = OTHER; note = 2'-fluoroadenosine-3'-phosphate
  modified_base 19: mod_base = OTHER; note = 2'-O-methyladenosine-3'-phosphate
  modified_base 20: mod_base = OTHER; note = 2'-fluorouridine-3'-phosphate
  modified_base 21: mod_base = OTHER; note = 2'-O-methylguanosine-3'- phosphorothioate
  modified_base 22: mod_base = OTHER; note = 2'-O-methyluridine-3'-phosphorothioate
  modified_base 23: mod_base = OTHER; note = 2'-O-methylcytidine-3'-phosphate
aaggatttttcctcaccaatgtc

SEQ ID NO: 106 - RNA, 23 nt, synthetic construct
  source 1..23: mol_type = other RNA
  modified_base 1: mod_base = OTHER; note = 2'-O-methyladenosine-3'- phosphorothioate
  modified_base 2: mod_base = OTHER; note = 2'-fluoroguanosine-3'-phosphorothioate
  modified_base 3: mod_base = OTHER; note = 2'-O-methylguanosine-3'-phosphate
  modified_base 4: mod_base = OTHER; note = 2'-fluoroadenosine-3'-phosphate
  modified_base 5: mod_base = OTHER; note = 2'-O-methyluridine-3'-phosphate
  modified_base 6: mod_base = OTHER; note = 2'-fluorouridine-3'-phosphate
  modified_base 7: mod_base = OTHER; note = 2'-O-methyluridine-3'-phosphate
  modified_base 8: mod_base = OTHER; note = 2'-fluorouridine-3'-phosphate
  modified_base 9: mod_base = OTHER; note = 2'-O-methyluridine-3'-phosphate
  modified_base 10: mod_base = OTHER; note = 2'-fluorocytidine-3'-phosphate
  modified_base 11: mod_base = OTHER; note = 2'-O-methylcytidine-3'-phosphate
  modified_base 12: mod_base = OTHER; note = 2'-O-methyluridine-3'-phosphate
  modified_base 13: mod_base = OTHER; note = 2'-O-methylcytidine-3'-phosphate
  modified_base 14: mod_base = OTHER; note = 2'-fluoroadenosine-3'-phosphate
  modified_base 15: mod_base = OTHER; note = 2'-O-methylcytidine-3'-phosphate
  modified_base 16: mod_base = OTHER; note = 2'-fluorocytidine-3'-phosphate
  modified_base 17: mod_base = OTHER; note = 2'-O-methyladenosine-3'-phosphate
  modified_base 18: mod_base = OTHER; note = 2'-fluoroadenosine-3'-phosphate
  modified_base 19: mod_base = OTHER; note = 2'-O-methyluridine-3'-phosphate
  modified_base 20: mod_base = OTHER; note = 2'-fluoroguanosine-3'-phosphate
  modified_base 21: mod_base = OTHER; note = 2'-O-methyluridine-3'-phosphorothioate
  modified_base 22: mod_base = OTHER; note = 2'-O-methylcytidine-3'- phosphorothioate
  modified_base 23: mod_base = OTHER; note = 2'-O-methyluridine-3'-phosphate
aggatttttcctcaccaatgtct

SEQ ID NO: 107 - RNA, 23 nt, synthetic construct
  source 1..23: mol_type = other RNA
  modified_base 1: mod_base = OTHER; note = 2'-O-methyluridine-3'-phosphorothioate
  modified_base 2: mod_base = OTHER; note = 2'-fluorouridine -3'-phosphorothioate
  modified_base 3: mod_base = OTHER; note = 2'-O-methyluridine-3'-phosphate
  modified_base 4: mod_base = OTHER; note = 2'-fluoroguanosine-3'-phosphate
  modified_base 5: mod_base = OTHER; note = 2'-O-methyladenosine-3'-phosphate
  modified_base 6: mod_base = OTHER; note = 2'-fluoroadenosine-3'-phosphate
  modified_base 7: mod_base = OTHER; note = 2'-O-methylcytidine-3'-phosphate
  modified_base 8: mod_base = OTHER; note = 2'-fluoroadenosine-3'-phosphate
  modified_base 9: mod_base = OTHER; note = 2'-O-methylcytidine-3'-phosphate
  modified_base 10: mod_base = OTHER; note = 2'-fluorocytidine-3'-phosphate
  modified_base 11: mod_base = OTHER; note = 2'-O-methyluridine-3'-phosphate
  modified_base 12: mod_base = OTHER; note = 2'-O-methyluridine-3'-phosphate
  modified_base 13: mod_base = OTHER; note = 2'-O-methyluridine-3'-phosphate
  modified_base 14: mod_base = OTHER; note = 2'-fluorocytidine-3'-phosphate
  modified_base 15: mod_base = OTHER; note = 2'-O-methyluridine-3'-phosphate
  modified_base 16: mod_base = OTHER; note = 2'-fluorocytidine-3'-phosphate
  modified_base 17: mod_base = OTHER; note = 2'-O-methylcytidine-3'-phosphate
  modified_base 18: mod_base = OTHER; note = 2'-fluorocytidine-3'-phosphate
  modified_base 19: mod_base = OTHER; note = 2'-O-methylcytidine-3'-phosphate
  modified_base 20: mod_base = OTHER; note = 2'-fluorocytidine-3'-phosphate
  modified_base 21: mod_base = OTHER; note = 2'-O-methyluridine-3'-phosphorothioate
  modified_base 22: mod_base = OTHER; note = 2'-O-methylguanosine-3'- phosphorothioate
  modified_base 23: mod_base = OTHER; note = 2'-O-methylguanosine-3'-phosphate
tttgaacacctttctccccctgg

SEQ ID NO: 108 - RNA, 23 nt, synthetic construct
  source 1..23: mol_type = other RNA
  modified_base 1: mod_base = OTHER; note = 2'-O-methyladenosine-3'- phosphorothioate
  modified_base 2: mod_base = OTHER; note = 2'-fluoroadenosine-3'-phosphorothioate
  modified_base 3: mod_base = OTHER; note = 2'-O-methyladenosine-3'-phosphate
  modified_base 4: mod_base = OTHER; note = 2'-fluoroadenosine-3'-phosphate
  modified_base 5: mod_base = OTHER; note = 2'-O-methyluridine-3'-phosphate
  modified_base 6: mod_base = OTHER; note = 2'-fluorocytidine-3'-phosphate
  modified_base 7: mod_base = OTHER; note = 2'-O-methyladenosine-3'-phosphate
  modified_base 8: mod_base = OTHER; note = 2'-fluorocytidine-3'-phosphate
  modified_base 9: mod_base = OTHER; note = 2'-O-methyladenosine-3'-phosphate
  modified_base 10: mod_base = OTHER; note = 2'-fluoroadenosine-3'-phosphate
  modified_base 11: mod_base = OTHER; note = 2'-O-methyladenosine-3'-phosphate
  modified_base 12: mod_base = OTHER; note = 2'-O-methyluridine-3'-phosphate
  modified_base 13: mod_base = OTHER; note = 2'-O-methyluridine-3'-phosphate
  modified_base 14: mod_base = OTHER; note = 2'-fluoroadenosine-3'-phosphate
  modified_base 15: mod_base = OTHER; note = 2'-O-methylcytidine-3'-phosphate
  modified_base 16: mod_base = OTHER; note = 2'-fluorocytidine-3'-phosphate
  modified_base 17: mod_base = OTHER; note = 2'-O-methyladenosine-3'-phosphate
  modified_base 18: mod_base = OTHER; note = 2'-fluorocytidine-3'-phosphate
  modified_base 19: mod_base = OTHER; note = 2'-O-methylcytidine-3'-phosphate
  modified_base 20: mod_base = OTHER; note = 2'-fluoroadenosine-3'-phosphate
  modified_base 21: mod_base = OTHER; note = 2'-O-methyluridine-3'-phosphorothioate
  modified_base 22: mod_base = OTHER; note = 2'-O-methylcytidine-3'- phosphorothioate
  modified_base 23: mod_base = OTHER; note = 2'-O-methylcytidine-3'-phosphate
aaaatcacaaattaccaccatcc

SEQ ID NO: 109 - RNA, 23 nt, synthetic construct
  source 1..23: mol_type = other RNA
  modified_base 1: mod_base = OTHER; note = 2'-O-methyluridine-3'-phosphorothioate
  modified_base 2: mod_base = OTHER; note = 2'-fluoroadenosine-3'-phosphorothioate
  modified_base 3: mod_base = OTHER; note = 2'-O-methyluridine-3'-phosphate
  modified_base 4: mod_base = OTHER; note = 2'-fluoroadenosine-3'-phosphate
  modified_base 5: mod_base = OTHER; note = 2'-O-methyluridine-3'-phosphate
  modified_base 6: mod_base = OTHER; note = 2'-fluorouridine-3'-phosphate
  modified_base 7: mod_base = OTHER; note = 2'-O-methyluridine-3'-phosphate
  modified_base 8: mod_base = OTHER; note = 2'-fluorocytidine-3'-phosphate
  modified_base 9: mod_base = OTHER; note = 2'-O-methylcytidine-3'-phosphate
  modified_base 10: mod_base = OTHER; note = 2'-fluoroadenosine-3'-phosphate
  modified_base 11: mod_base = OTHER; note = 2'-O-methylguanosine-3'-phosphate
  modified_base 12: mod_base = OTHER; note = 2'-O-methylguanosine-3'-phosphate
  modified_base 13: mod_base = OTHER; note = 2'-O-methyladenosine-3'-phosphate
  modified_base 14: mod_base = OTHER; note = 2'-fluorouridine-3'-phosphate
  modified_base 15: mod_base = OTHER; note = 2'-O-methylguanosine-3'-phosphate
  modified_base 16: mod_base = OTHER; note = 2'-fluorocytidine-3'-phosphate
  modified_base 17: mod_base = OTHER; note = 2'-O-methyladenosine-3'-phosphate
  modified_base 18: mod_base = OTHER; note = 2'-fluoroadenosine-3'-phosphate
  modified_base 19: mod_base = OTHER; note = 2'-O-methylguanosine-3'-phosphate
  modified_base 20: mod_base = OTHER; note = 2'-fluorouridine-3'-phosphate
  modified_base 21: mod_base = OTHER; note = 2'-O-methylcytidine-3'- phosphorothioate
  modified_base 22: mod_base = OTHER; note = 2'-O-methylcytidine-3'- phosphorothioate
  modified_base 23: mod_base = OTHER; note = 2'-O-methyladenosine-3'-phosphate
tatatttccaggatgcaagtcca

SEQ ID NO: 110 - RNA, 23 nt, synthetic construct
  source 1..23: mol_type = other RNA
  modified_base 1: mod_base = OTHER; note = 2'-O-methyladenosine-3'- phosphorothioate
  modified_base 2: mod_base = OTHER; note = 2'-fluoroadenosine-3'-phosphorothioate
  modified_base 3: mod_base = OTHER; note = 2'-O-methylguanosine-3'-phosphate
  modified_base 4: mod_base = OTHER; note = 2'-fluoroadenosine-3'-phosphate
  modified_base 5: mod_base = OTHER; note = 2'-O-methylcytidine-3'-phosphate
  modified_base 6: mod_base = OTHER; note = 2'-fluorouridine-3'-phosphate
  modified_base 7: mod_base = OTHER; note = 2'-O-methyluridine-3'-phosphate
  modified_base 8: mod_base = OTHER; note = 2'-fluorocytidine-3'-phosphate
  modified_base 9: mod_base = OTHER; note = 2'-O-methyluridine-3'-phosphate
  modified_base 10: mod_base = OTHER; note = 2'-fluoroadenosine-3'-phosphate
  modified_base 11: mod_base = OTHER; note = 2'-O-methylcytidine-3'-phosphate
  modified_base 12: mod_base = OTHER; note = 2'-O-methylcytidine-3'-phosphate
  modified_base 13: mod_base = OTHER; note = 2'-O-methyluridine-3'-phosphate
  modified_base 14: mod_base = OTHER; note = 2'-fluorouridine-3'-phosphate
  modified_base 15: mod_base = OTHER; note = 2'-O-methylcytidine-3'-phosphate
  modified_base 16: mod_base = OTHER; note = 2'-fluorocytidine-3'-phosphate
  modified_base 17: mod_base = OTHER; note = 2'-O-methylcytidine-3'-phosphate
  modified_base 18: mod_base = OTHER; note = 2'-fluorouridine-3'-phosphate
  modified_base 19: mod_base = OTHER; note = 2'-O-methyluridine-3'-phosphate
  modified_base 20: mod_base = OTHER; note = 2'-fluorocytidine-3'-phosphate
  modified_base 21: mod_base = OTHER; note = 2'-O-methylcytidine-3'- phosphorothioate
  modified_base 22: mod_base = OTHER; note = 2'-O-methyladenosine-3'- phosphorothioate
  modified_base 23: mod_base = OTHER; note = 2'-O-methylcytidine-3'-phosphate
aagacttctaccttcccttccac

SEQ ID NO: 111 - RNA, 23 nt, synthetic construct
  source 1..23: mol_type = other RNA
  modified_base 1: mod_base = OTHER; note = 2'-O-methyladenosine-3'- phosphorothioate
  modified_base 2: mod_base = OTHER; note = 2'-fluoroguanosine-3'-phosphorothioate
  modified_base 3: mod_base = OTHER; note = 2'-O-methylguanosine-3'-phosphate
  modified_base 4: mod_base = OTHER; note = 2'-fluoroadenosine-3'-phosphate
  modified_base 5: mod_base = OTHER; note = 2'-O-methyladenosine-3'-phosphate
  modified_base 6: mod_base = OTHER; note = 2'-fluoroadenosine-3'-phosphate
  modified_base 7: mod_base = OTHER; note = 2'-O-methyluridine-3'-phosphate
  modified_base 8: mod_base = OTHER; note = 2'-fluorocytidine-3'-phosphate
  modified_base 9: mod_base = OTHER; note = 2'-O-methyluridine-3'-phosphate
  modified_base 10: mod_base = OTHER; note = 2'-fluoroadenosine-3'-phosphate
  modified_base 11: mod_base = OTHER; note = 2'-O-methyladenosine-3'-phosphate
  modified_base 12: mod_base = OTHER; note = 2'-O-methyladenosine-3'-phosphate
  modified_base 13: mod_base = OTHER; note = 2'-O-methylcytidine-3'-phosphate
  modified_base 14: mod_base = OTHER; note = 2'-fluoroadenosine-3'-phosphate
  modified_base 15: mod_base = OTHER; note = 2'-O-methylguanosine-3'-phosphate
  modified_base 16: mod_base = OTHER; note = 2'-fluoroadenosine-3'-phosphate
  modified_base 17: mod_base = OTHER; note = 2'-O-methyladenosine-3'-phosphate
  modified_base 18: mod_base = OTHER; note = 2'-fluoroguanosine-3'-phosphate
  modified_base 19: mod_base = OTHER; note = 2'-O-methyladenosine-3'-phosphate
  modified_base 20: mod_base = OTHER; note = 2'-fluorocytidine-3'-phosphate
  modified_base 21: mod_base = OTHER; note = 2'-O-methyladenosine-3'- phosphorothioate
  modified_base 22: mod_base = OTHER; note = 2'-O-methylguanosine-3'- phosphorothioate
  modified_base 23: mod_base = OTHER; note = 2'-O-methylguanosine-3'-phosphate
aggaaatctaaacagaagacagg

SEQ ID NO: 112 - RNA, 23 nt, synthetic construct
  source 1..23: mol_type = other RNA
  modified_base 1: mod_base = OTHER; note = 2'-O-methyladenosine-3'- phosphorothioate
  modified_base 2: mod_base = OTHER; note = 2'-fluoroguanosine-3'-phosphorothioate
  modified_base 3: mod_base = OTHER; note = 2'-O-methyladenosine-3'-phosphate
  modified_base 4: mod_base = OTHER; note = 2'-fluorouridine-3'-phosphate
  modified_base 5: mod_base = OTHER; note = 2'-O-methylcytidine-3'-phosphate
  modified_base 6: mod_base = OTHER; note = 2'-fluorouridine-3'-phosphate
  modified_base 7: mod_base = OTHER; note = 2'-O-methyluridine-3'-phosphate
  modified_base 8: mod_base = OTHER; note = 2'-fluoroguanosine-3'-phosphate
  modified_base 9: mod_base = OTHER; note = 2'-O-methylguanosine-3'-phosphate
  modified_base 10: mod_base = OTHER; note = 2'-fluoroadenosine-3'-phosphate
  modified_base 11: mod_base = OTHER; note = 2'-O-methyladenosine-3'-phosphate
  modified_base 12: mod_base = OTHER; note = 2'-O-methyladenosine-3'-phosphate
  modified_base 13: mod_base = OTHER; note = 2'-O-methylcytidine-3'-phosphate
  modified_base 14: mod_base = OTHER; note = 2'-fluoroadenosine-3'-phosphate
  modified_base 15: mod_base = OTHER; note = 2'-O-methylguanosine-3'-phosphate
  modified_base 16: mod_base = OTHER; note = 2'-fluorocytidine-3'-phosphate
  modified_base 17: mod_base = OTHER; note = 2'-O-methylcytidine-3'-phosphate
  modified_base 18: mod_base = OTHER; note = 2'-fluoroadenosine-3'-phosphate
  modified_base 19: mod_base = OTHER; note = 2'-O-methyladenosine-3'-phosphate
  modified_base 20: mod_base = OTHER; note = 2'-fluoroadenosine-3'-phosphate
  modified_base 21: mod_base = OTHER; note = 2'-O-methylguanosine-3'- phosphorothioate
  modified_base 22: mod_base = OTHER; note = 2'-O-methylguanosine-3'- phosphorothioate
  modified_base 23: mod_base = OTHER; note = 2'-O-methyladenosine-3'-phosphate
agatcttggaaacagccaaagga

SEQ ID NO: 113 - RNA, 23 nt, synthetic construct
  source 1..23: mol_type = other RNA
  modified_base 1: mod_base = OTHER; note = 2'-O-methyladenosine-3'- phosphorothioate
  modified_base 2: mod_base = OTHER; note = 2'-fluorouridine -3'-phosphorothioate
  modified_base 3: mod_base = OTHER; note = 2'-O-methylguanosine-3'-phosphate
  modified_base 4: mod_base = OTHER; note = 2'-fluoroadenosine-3'-phosphate
  modified_base 5: mod_base = OTHER; note = 2'-O-methylcytidine-3'-phosphate
  modified_base 6: mod_base = OTHER; note = 2'-fluoroguanosine-3'-phosphate
  modified_base 7: mod_base = OTHER; note = 2'-O-methyluridine-3'-phosphate
  modified_base 8: mod_base = OTHER; note = 2'-fluorouridine-3'-phosphate
  modified_base 9: mod_base = OTHER; note = 2'-O-methylguanosine-3'-phosphate
  modified_base 10: mod_base = OTHER; note = 2'-fluorocytidine-3'-phosphate
  modified_base 11: mod_base = OTHER; note = 2'-O-methylcytidine-3'-phosphate
  modified_base 12: mod_base = OTHER; note = 2'-O-methylcytidine-3'-phosphate
  modified_base 13: mod_base = OTHER; note = 2'-O-methyladenosine-3'-phosphate
  modified_base 14: mod_base = OTHER; note = 2'-fluoroadenosine-3'-phosphate
  modified_base 15: mod_base = OTHER; note = 2'-O-methyladenosine-3'-phosphate
  modified_base 16: mod_base = OTHER; note = 2'-fluorocytidine-3'-phosphate
  modified_base 17: mod_base = OTHER; note = 2'-O-methyladenosine-3'-phosphate
  modified_base 18: mod_base = OTHER; note = 2'-fluorocytidine-3'-phosphate
  modified_base 19: mod_base = OTHER; note = 2'-O-methyladenosine-3'-phosphate
  modified_base 20: mod_base = OTHER; note = 2'-fluorouridine-3'-phosphate
  modified_base 21: mod_base = OTHER; note = 2'-O-methyluridine-3'-phosphorothioate
  modified_base 22: mod_base = OTHER; note = 2'-O-methyluridine-3'-phosphorothioate
  modified_base 23: mod_base = OTHER; note = 2'-O-methyluridine-3'-phosphate
atgacgttgcccaaacacatttt

SEQ ID NO: 114 - RNA, 23 nt, synthetic construct
  source 1..23: mol_type = other RNA
  modified_base 1: mod_base = OTHER; note = 2'-O-methyluridine-3'-phosphorothioate
  modified_base 2: mod_base = OTHER; note = 2'-fluoroadenosine-3'-phosphorothioate
  modified_base 3: mod_base = OTHER; note = 2'-O-methyladenosine-3'-phosphate
  modified_base 4: mod_base = OTHER; note = 2'-fluoroguanosine-3'-phosphate
  modified_base 5: mod_base = OTHER; note = 2'-O-methylguanosine-3'-phosphate
  modified_base 6: mod_base = OTHER; note = 2'-fluoroguanosine-3'-phosphate
  modified_base 7: mod_base = OTHER; note = 2'-O-methylguanosine-3'-phosphate
  modified_base 8: mod_base = OTHER; note = 2'-fluorouridine-3'-phosphate
  modified_base 9: mod_base = OTHER; note = 2'-O-methylguanosine-3'-phosphate
  modified_base 10: mod_base = OTHER; note = 2'-fluorouridine-3'-phosphate
  modified_base 11: mod_base = OTHER; note = 2'-O-methylcytidine-3'-phosphate
  modified_base 12: mod_base = OTHER; note = 2'-O-methylcytidine-3'-phosphate
  modified_base 13: mod_base = OTHER; note = 2'-O-methyladenosine-3'-phosphate
  modified_base 14: mod_base = OTHER; note = 2'-fluorocytidine-3'-phosphate
  modified_base 15: mod_base = OTHER; note = 2'-O-methyladenosine-3'-phosphate
  modified_base 16: mod_base = OTHER; note = 2'-fluoroguanosine-3'-phosphate
  modified_base 17: mod_base = OTHER; note = 2'-O-methyluridine-3'-phosphate
  modified_base 18: mod_base = OTHER; note = 2'-fluorocytidine-3'-phosphate
  modified_base 19: mod_base = OTHER; note = 2'-O-methyladenosine-3'-phosphate
  modified_base 20: mod_base = OTHER; note = 2'-fluorocytidine-3'-phosphate
  modified_base 21: mod_base = OTHER; note = 2'-O-methyladenosine-3'- phosphorothioate
  modified_base 22: mod_base = OTHER; note = 2'-O-methyladenosine-3'- phosphorothioate
  modified_base 23: mod_base = OTHER; note = 2'-O-methyladenosine-3'-phosphate
taaggggtgtccacagtcacaaa

SEQ ID NO: 115 - RNA, 23 nt, synthetic construct
  source 1..23: mol_type = other RNA
  modified_base 1: mod_base = OTHER; note = 2'-O-methyladenosine-3'- phosphorothioate
  modified_base 2: mod_base = OTHER; note = 2'-fluoroadenosine-3'-phosphorothioate
  modified_base 3: mod_base = OTHER; note = 2'-O-methyluridine-3'-phosphate
  modified_base 4: mod_base = OTHER; note = 2'-fluoroadenosine-3'-phosphate
  modified_base 5: mod_base = OTHER; note = 2'-O-methylguanosine-3'-phosphate
  modified_base 6: mod_base = OTHER; note = 2'-fluorouridine-3'-phosphate
  modified_base 7: mod_base = OTHER; note = 2'-O-methyladenosine-3'-phosphate
  modified_base 8: mod_base = OTHER; note = 2'-fluoroguanosine-3'-phosphate
  modified_base 9: mod_base = OTHER; note = 2'-O-methylcytidine-3'-phosphate
  modified_base 10: mod_base = OTHER; note = 2'-fluorouridine-3'-phosphate
  modified_base 11: mod_base = OTHER; note = 2'-O-methylguanosine-3'-phosphate
  modified_base 12: mod_base = OTHER; note = 2'-O-methylguanosine-3'-phosphate
  modified_base 13: mod_base = OTHER; note = 2'-O-methylcytidine-3'-phosphate
  modified_base 14: mod_base = OTHER; note = 2'-fluoroadenosine-3'-phosphate
  modified_base 15: mod_base = OTHER; note = 2'-O-methylcytidine-3'-phosphate
  modified_base 16: mod_base = OTHER; note = 2'-fluorocytidine-3'-phosphate
  modified_base 17: mod_base = OTHER; note = 2'-O-methylcytidine-3'-phosphate
  modified_base 18: mod_base = OTHER; note = 2'-fluorocytidine-3'-phosphate
  modified_base 19: mod_base = OTHER; note = 2'-O-methyladenosine-3'-phosphate
  modified_base 20: mod_base = OTHER; note = 2'-fluorouridine-3'-phosphate
  modified_base 21: mod_base = OTHER; note = 2'-O-methylcytidine-3'- phosphorothioate
  modified_base 22: mod_base = OTHER; note = 2'-O-methylcytidine-3'- phosphorothioate
  modified_base 23: mod_base = OTHER; note = 2'-O-methyladenosine-3'-phosphate
aatagtagctggcaccccatcca

SEQ ID NO: 116 - RNA, 23 nt, synthetic construct
  source 1..23: mol_type = other RNA
  modified_base 1: mod_base = OTHER; note = 2'-O-methyladenosine-3'- phosphorothioate
  modified_base 2: mod_base = OTHER; note = 2'-fluorocytidine-3'-phosphorothioate
  modified_base 3: mod_base = OTHER; note = 2'-O-methylguanosine-3'-phosphate
  modified_base 4: mod_base = OTHER; note = 2'-fluorouridine-3'-phosphate
  modified_base 5: mod_base = OTHER; note = 2'-O-methyluridine-3'-phosphate
  modified_base 6: mod_base = OTHER; note = 2'-fluoroguanosine-3'-phosphate
  modified_base 7: mod_base = OTHER; note = 2'-O-methylcytidine-3'-phosphate
  modified_base 8: mod_base = OTHER; note = 2'-fluorocytidine-3'-phosphate
  modified_base 9: mod_base = OTHER; note = 2'-O-methylcytidine-3'-phosphate
  modified_base 10: mod_base = OTHER; note = 2'-fluoroadenosine-3'-phosphate
  modified_base 11: mod_base = OTHER; note = 2'-O-methyladenosine-3'-phosphate
  modified_base 12: mod_base = OTHER; note = 2'-O-methyladenosine-3'-phosphate
  modified_base 13: mod_base = OTHER; note = 2'-O-methylcytidine-3'-phosphate
  modified_base 14: mod_base = OTHER; note = 2'-fluoroadenosine-3'-phosphate
  modified_base 15: mod_base = OTHER; note = 2'-O-methylcytidine-3'-phosphate
  modified_base 16: mod_base = OTHER; note = 2'-fluoroadenosine-3'-phosphate
  modified_base 17: mod_base = OTHER; note = 2'-O-methyluridine-3'-phosphate
  modified_base 18: mod_base = OTHER; note = 2'-fluorouridine-3'-phosphate
  modified_base 19: mod_base = OTHER; note = 2'-O-methyluridine-3'-phosphate
  modified_base 20: mod_base = OTHER; note = 2'-fluorouridine-3'-phosphate
  modified_base 21: mod_base = OTHER; note = 2'-O-methylcytidine-3'- phosphorothioate
  modified_base 22: mod_base = OTHER; note = 2'-O-methyladenosine-3'- phosphorothioate
  modified_base 23: mod_base = OTHER; note = 2'-O-methyladenosine-3'-phosphate
acgttgcccaaacacattttcaa

SEQ ID NO: 117 - RNA, 23 nt, synthetic construct
  source 1..23: mol_type = other RNA
  modified_base 1: mod_base = OTHER; note = 2'-O-methyluridine-3'-phosphorothioate
  modified_base 2: mod_base = OTHER; note = 2'-fluoroguanosine-3'-phosphorothioate
  modified_base 3: mod_base = OTHER; note = 2'-O-methyluridine-3'-phosphate
  modified_base 4: mod_base = OTHER; note = 2'-fluorocytidine-3'-phosphate
  modified_base 5: mod_base = OTHER; note = 2'-O-methyladenosine-3'-phosphate
  modified_base 6: mod_base = OTHER; note = 2'-fluoroguanosine-3'-phosphate
  modified_base 7: mod_base = OTHER; note = 2'-O-methyladenosine-3'-phosphate
  modified_base 8: mod_base = OTHER; note = 2'-fluorouridine-3'-phosphate
  modified_base 9: mod_base = OTHER; note = 2'-O-methylcytidine-3'-phosphate
  modified_base 10: mod_base = OTHER; note = 2'-fluorouridine-3'-phosphate
  modified_base 11: mod_base = OTHER; note = 2'-O-methyluridine-3'-phosphate
  modified_base 12: mod_base = OTHER; note = 2'-O-methylguanosine-3'-phosphate
  modified_base 13: mod_base = OTHER; note = 2'-O-methylguanosine-3'-phosphate
  modified_base 14: mod_base = OTHER; note = 2'-fluoroadenosine-3'-phosphate
  modified_base 15: mod_base = OTHER; note = 2'-O-methyladenosine-3'-phosphate
  modified_base 16: mod_base = OTHER; note = 2'-fluoroadenosine-3'-phosphate
  modified_base 17: mod_base = OTHER; note = 2'-O-methylcytidine-3'-phosphate
  modified_base 18: mod_base = OTHER; note = 2'-fluoroadenosine-3'-phosphate
  modified_base 19: mod_base = OTHER; note = 2'-O-methylguanosine-3'-phosphate
  modified_base 20: mod_base = OTHER; note = 2'-fluorocytidine-3'-phosphate
  modified_base 21: mod_base = OTHER; note = 2'-O-methylcytidine-3'- phosphorothioate
  modified_base 22: mod_base = OTHER; note = 2'-O-methyladenosine-3'- phosphorothioate
  modified_base 23: mod_base = OTHER; note = 2'-O-methyladenosine-3'-phosphate
tgtcagatcttggaaacagccaa

SEQ ID NO: 118 - RNA, 23 nt, synthetic construct
  source 1..23: mol_type = other RNA
  modified_base 1: mod_base = OTHER; note = 2'-O-methyladenosine-3'- phosphorothioate
  modified_base 2: mod_base = OTHER; note = 2'-fluoroguanosine-3'-phosphorothioate
  modified_base 3: mod_base = OTHER; note = 2'-O-methylguanosine-3'-phosphate
  modified_base 4: mod_base = OTHER; note = 2'-fluoroguanosine-3'-phosphate
  modified_base 5: mod_base = OTHER; note = 2'-O-methylguanosine-3'-phosphate
  modified_base 6: mod_base = OTHER; note = 2'-fluorouridine-3'-phosphate
  modified_base 7: mod_base = OTHER; note = 2'-O-methylguanosine-3'-phosphate
  modified_base 8: mod_base = OTHER; note = 2'-fluoroguanosine-3'-phosphate
  modified_base 9: mod_base = OTHER; note = 2'-O-methylcytidine-3'-phosphate
  modified_base 10: mod_base = OTHER; note = 2'-fluorouridine-3'-phosphate
  modified_base 11: mod_base = OTHER; note = 2'-O-methyladenosine-3'-phosphate
  modified_base 12: mod_base = OTHER; note = 2'-O-methyluridine-3'-phosphate
  modified_base 13: mod_base = OTHER; note = 2'-O-methyluridine-3'-phosphate
  modified_base 14: mod_base = OTHER; note = 2'-fluorouridine-3'-phosphate
  modified_base 15: mod_base = OTHER; note = 2'-O-methyluridine-3'-phosphate
  modified_base 16: mod_base = OTHER; note = 2'-fluoroguanosine-3'-phosphate
  modified_base 17: mod_base = OTHER; note = 2'-O-methyluridine-3'-phosphate
  modified_base 18: mod_base = OTHER; note = 2'-fluorouridine-3'-phosphate
  modified_base 19: mod_base = OTHER; note = 2'-O-methylguanosine-3'-phosphate
  modified_base 20: mod_base = OTHER; note = 2'-fluoroguanosine-3'-phosphate
  modified_base 21: mod_base = OTHER; note = 2'-O-methyladenosine-3'- phosphorothioate
  modified_base 22: mod_base = OTHER; note = 2'-O-methyladenosine-3'- phosphorothioate
  modified_base 23: mod_base = OTHER; note = 2'-O-methyladenosine-3'-phosphate
aggggtggctattttgttggaaa

SEQ ID NO: 119 - RNA, 23 nt, synthetic construct
  source 1..23: mol_type = other RNA
  modified_base 1: mod_base = OTHER; note = 2'-O-methyladenosine-3'- phosphorothioate
  modified_base 2: mod_base = OTHER; note = 2'-fluoroadenosine-3'-phosphorothioate
  modified_base 3: mod_base = OTHER; note = 2'-O-methylguanosine-3'-phosphate
  modified_base 4: mod_base = OTHER; note = 2'-fluoroguanosine-3'-phosphate
  modified_base 5: mod_base = OTHER; note = 2'-O-methyladenosine-3'-phosphate
  modified_base 6: mod_base = OTHER; note = 2'-fluoroadenosine-3'-phosphate
  modified_base 7: mod_base = OTHER; note = 2'-O-methyladenosine-3'-phosphate
  modified_base 8: mod_base = OTHER; note = 2'-fluorouridine-3'-phosphate
  modified_base 9: mod_base = OTHER; note = 2'-O-methylcytidine-3'-phosphate
  modified_base 10: mod_base = OTHER; note = 2'-fluorouridine-3'-phosphate
  modified_base 11: mod_base = OTHER; note = 2'-O-methyladenosine-3'-phosphate
  modified_base 12: mod_base = OTHER; note = 2'-O-methyladenosine-3'-phosphate
  modified_base 13: mod_base = OTHER; note = 2'-O-methyladenosine-3'-phosphate
  modified_base 14: mod_base = OTHER; note = 2'-fluorocytidine-3'-phosphate
  modified_base 15: mod_base = OTHER; note = 2'-O-methyladenosine-3'-phosphate
  modified_base 16: mod_base = OTHER; note = 2'-fluoroguanosine-3'-phosphate
  modified_base 17: mod_base = OTHER; note = 2'-O-methyladenosine-3'-phosphate
  modified_base 18: mod_base = OTHER; note = 2'-fluoroadenosine-3'-phosphate
  modified_base 19: mod_base = OTHER; note = 2'-O-methylguanosine-3'-phosphate
  modified_base 20: mod_base = OTHER; note = 2'-fluoroadenosine-3'-phosphate
  modified_base 21: mod_base = OTHER; note = 2'-O-methylcytidine-3'- phosphorothioate
  modified_base 22: mod_base = OTHER; note = 2'-O-methyladenosine-3'- phosphorothioate
  modified_base 23: mod_base = OTHER; note = 2'-O-methylguanosine-3'-phosphate
aaggaaatctaaacagaagacag

SEQ ID NO: 120 - RNA, 23 nt, synthetic construct
  source 1..23: mol_type = other RNA
  modified_base 1: mod_base = OTHER; note = 2'-O-methyladenosine-3'- phosphorothioate
  modified_base 2: mod_base = OTHER; note = 2'-fluoroguanosine-3'-phosphorothioate
  modified_base 3: mod_base = OTHER; note = 2'-O-methyladenosine-3'-phosphate
  modified_base 4: mod_base = OTHER; note = 2'-fluorocytidine-3'-phosphate
  modified_base 5: mod_base = OTHER; note = 2'-O-methyluridine-3'-phosphate
  modified_base 6: mod_base = OTHER; note = 2'-fluorouridine-3'-phosphate
  modified_base 7: mod_base = OTHER; note = 2'-O-methylcytidine-3'-phosphate
  modified_base 8: mod_base = OTHER; note = 2'-fluorouridine-3'-phosphate
  modified_base 9: mod_base = OTHER; note = 2'-O-methyladenosine-3'-phosphate
  modified_base 10: mod_base = OTHER; note = 2'-fluorocytidine-3'-phosphate
  modified_base 11: mod_base = OTHER; note = 2'-O-methylcytidine-3'-phosphate
  modified_base 12: mod_base = OTHER; note = 2'-O-methyluridine-3'-phosphate
  modified_base 13: mod_base = OTHER; note = 2'-O-methyluridine-3'-phosphate
  modified_base 14: mod_base = OTHER; note = 2'-fluorocytidine-3'-phosphate
  modified_base 15: mod_base = OTHER; note = 2'-O-methylcytidine-3'-phosphate
  modified_base 16: mod_base = OTHER; note = 2'-fluorocytidine-3'-phosphate
  modified_base 17: mod_base = OTHER; note = 2'-O-methyluridine-3'-phosphate
  modified_base 18: mod_base = OTHER; note = 2'-fluorouridine-3'-phosphate
  modified_base 19: mod_base = OTHER; note = 2'-O-methylcytidine-3'-phosphate
  modified_base 20: mod_base = OTHER; note = 2'-fluorocytidine-3'-phosphate
  modified_base 21: mod_base = OTHER; note = 2'-O-methyladenosine-3'- phosphorothioate
  modified_base 22: mod_base = OTHER; note = 2'-O-methylcytidine-3'- phosphorothioate
  modified_base 23: mod_base = OTHER; note = 2'-O-methyladenosine-3'-phosphate
agacttctaccttcccttccaca

SEQ ID NO: 121 - RNA, 23 nt, synthetic construct
  source 1..23: mol_type = other RNA
  modified_base 1: mod_base = OTHER; note = 2'-O-methyladenosine-3'- phosphorothioate
  modified_base 2: mod_base = OTHER; note = 2'-fluorouridine -3'-phosphorothioate
  modified_base 3: mod_base = OTHER; note = 2'-O-methylcytidine-3'-phosphate
  modified_base 4: mod_base = OTHER; note = 2'-fluorouridine-3'-phosphate
  modified_base 5: mod_base = OTHER; note = 2'-O-methyluridine-3'-phosphate
  modified_base 6: mod_base = OTHER; note = 2'-fluoroguanosine-3'-phosphate
  modified_base 7: mod_base = OTHER; note = 2'-O-methylguanosine-3'-phosphate
  modified_base 8: mod_base = OTHER; note = 2'-fluoroadenosine-3'-phosphate
  modified_base 9: mod_base = OTHER; note = 2'-O-methyladenosine-3'-phosphate
  modified_base 10: mod_base = OTHER; note = 2'-fluoroadenosine-3'-phosphate
  modified_base 11: mod_base = OTHER; note = 2'-O-methylcytidine-3'-phosphate
  modified_base 12: mod_base = OTHER; note = 2'-O-methyladenosine-3'-phosphate
  modified_base 13: mod_base = OTHER; note = 2'-O-methylguanosine-3'-phosphate
  modified_base 14: mod_base = OTHER; note = 2'-fluorocytidine-3'-phosphate
  modified_base 15: mod_base = OTHER; note = 2'-O-methylcytidine-3'-phosphate
  modified_base 16: mod_base = OTHER; note = 2'-fluoroadenosine-3'-phosphate
  modified_base 17: mod_base = OTHER; note = 2'-O-methyladenosine-3'-phosphate
  modified_base 18: mod_base = OTHER; note = 2'-fluoroadenosine-3'-phosphate
  modified_base 19: mod_base = OTHER; note = 2'-O-methylguanosine-3'-phosphate
  modified_base 20: mod_base = OTHER; note = 2'-fluoroguanosine-3'-phosphate
  modified_base 21: mod_base = OTHER; note = 2'-O-methyladenosine-3'- phosphorothioate
  modified_base 22: mod_base = OTHER; note = 2'-O-methyluridine-3'-phosphorothioate
  modified_base 23: mod_base = OTHER; note = 2'-O-methyluridine-3'-phosphate
atcttggaaacagccaaaggatt

SEQ ID NO: 122 - RNA, 23 nt, synthetic construct
  source 1..23: mol_type = other RNA
  modified_base 1: mod_base = OTHER; note = 2'-O-methyluridine-3'-phosphorothioate
  modified_base 2: mod_base = OTHER; note = 2'-fluoroadenosine-3'-phosphorothioate
  modified_base 3: mod_base = OTHER; note = 2'-O-methyluridine-3'-phosphate
  modified_base 4: mod_base = OTHER; note = 2'-fluorocytidine-3'-phosphate
  modified_base 5: mod_base = OTHER; note = 2'-O-methyladenosine-3'-phosphate
  modified_base 6: mod_base = OTHER; note = 2'-fluorouridine-3'-phosphate
  modified_base 7: mod_base = OTHER; note = 2'-O-methylcytidine-3'-phosphate
  modified_base 8: mod_base = OTHER; note = 2'-fluorocytidine-3'-phosphate
  modified_base 9: mod_base = OTHER; note = 2'-O-methylcytidine-3'-phosphate
  modified_base 10: mod_base = OTHER; note = 2'-fluoroadenosine-3'-phosphate
  modified_base 11: mod_base = OTHER; note = 2'-O-methylguanosine-3'-phosphate
  modified_base 12: mod_base = OTHER; note = 2'-O-methylcytidine-3'-phosphate
  modified_base 13: mod_base = OTHER; note = 2'-O-methyluridine-3'-phosphate
  modified_base 14: mod_base = OTHER; note = 2'-fluoroguanosine-3'-phosphate
  modified_base 15: mod_base = OTHER; note = 2'-O-methyladenosine-3'-phosphate
  modified_base 16: mod_base = OTHER; note = 2'-fluoroguanosine-3'-phosphate
  modified_base 17: mod_base = OTHER; note = 2'-O-methyladenosine-3'-phosphate
  modified_base 18: mod_base = OTHER; note = 2'-fluoroguanosine-3'-phosphate
  modified_base 19: mod_base = OTHER; note = 2'-O-methyladenosine-3'-phosphate
  modified_base 20: mod_base = OTHER; note = 2'-fluorouridine-3'-phosphate
  modified_base 21: mod_base = OTHER; note = 2'-O-methylguanosine-3'- phosphorothioate
  modified_base 22: mod_base = OTHER; note = 2'-O-methylguanosine-3'- phosphorothioate
  modified_base 23: mod_base = OTHER; note = 2'-O-methylguanosine-3'-phosphate
tatcatcccagctgagagatggg

SEQ ID NO: 123 - RNA, 23 nt, synthetic construct
  source 1..23: mol_type = other RNA
  modified_base 1: mod_base = OTHER; note = 2'-O-methyladenosine-3'- phosphorothioate
  modified_base 2: mod_base = OTHER; note = 2'-fluorouridine -3'-phosphorothioate
  modified_base 3: mod_base = OTHER; note = 2'-O-methylcytidine-3'-phosphate
  modified_base 4: mod_base = OTHER; note = 2'-fluoroadenosine-3'-phosphate
  modified_base 5: mod_base = OTHER; note = 2'-O-methyladenosine-3'-phosphate
  modified_base 6: mod_base = OTHER; note = 2'-fluorouridine-3'-phosphate
  modified_base 7: mod_base = OTHER; note = 2'-O-methyladenosine-3'-phosphate
  modified_base 8: mod_base = OTHER; note = 2'-fluoroguanosine-3'-phosphate
  modified_base 9: mod_base = OTHER; note = 2'-O-methyluridine-3'-phosphate
  modified_base 10: mod_base = OTHER; note = 2'-fluoroadenosine-3'-phosphate
  modified_base 11: mod_base = OTHER; note = 2'-O-methylguanosine-3'-phosphate
  modified_base 12: mod_base = OTHER; note = 2'-O-methylcytidine-3'-phosphate
  modified_base 13: mod_base = OTHER; note = 2'-O-methyluridine-3'-phosphate
  modified_base 14: mod_base = OTHER; note = 2'-fluoroguanosine-3'-phosphate
  modified_base 15: mod_base = OTHER; note = 2'-O-methylguanosine-3'-phosphate
  modified_base 16: mod_base = OTHER; note = 2'-fluorocytidine-3'-phosphate
  modified_base 17: mod_base = OTHER; note = 2'-O-methyladenosine-3'-phosphate
  modified_base 18: mod_base = OTHER; note = 2'-fluorocytidine-3'-phosphate
  modified_base 19: mod_base = OTHER; note = 2'-O-methylcytidine-3'-phosphate
  modified_base 20: mod_base = OTHER; note = 2'-fluorocytidine-3'-phosphate
  modified_base 21: mod_base = OTHER; note = 2'-O-methylcytidine-3'- phosphorothioate
  modified_base 22: mod_base = OTHER; note = 2'-O-methyladenosine-3'- phosphorothioate
  modified_base 23: mod_base = OTHER; note = 2'-O-methyluridine-3'-phosphate
atcaatagtagctggcaccccat

SEQ ID NO: 124 - RNA, 23 nt, synthetic construct
  source 1..23: mol_type = other RNA
  modified_base 1: mod_base = OTHER; note = 2'-O-methyluridine-3'-phosphorothioate
  modified_base 2: mod_base = OTHER; note = 2'-fluoroadenosine-3'-phosphorothioate
  modified_base 3: mod_base = OTHER; note = 2'-O-methyluridine-3'-phosphate
  modified_base 4: mod_base = OTHER; note = 2'-fluoroguanosine-3'-phosphate
  modified_base 5: mod_base = OTHER; note = 2'-O-methyladenosine-3'-phosphate
  modified_base 6: mod_base = OTHER; note = 2'-fluorocytidine-3'-phosphate
  modified_base 7: mod_base = OTHER; note = 2'-O-methylguanosine-3'-phosphate
  modified_base 8: mod_base = OTHER; note = 2'-fluorouridine-3'-phosphate
  modified_base 9: mod_base = OTHER; note = 2'-O-methyluridine-3'-phosphate
  modified_base 10: mod_base = OTHER; note = 2'-fluoroguanosine-3'-phosphate
  modified_base 11: mod_base = OTHER; note = 2'-O-methylcytidine-3'-phosphate
  modified_base 12: mod_base = OTHER; note = 2'-O-methylcytidine-3'-phosphate
  modified_base 13: mod_base = OTHER; note = 2'-O-methylcytidine-3'-phosphate
  modified_base 14: mod_base = OTHER; note = 2'-fluoroadenosine-3'-phosphate
  modified_base 15: mod_base = OTHER; note = 2'-O-methyladenosine-3'-phosphate
  modified_base 16: mod_base = OTHER; note = 2'-fluoroadenosine-3'-phosphate
  modified_base 17: mod_base = OTHER; note = 2'-O-methylcytidine-3'-phosphate
  modified_base 18: mod_base = OTHER; note = 2'-fluoroadenosine-3'-phosphate
  modified_base 19: mod_base = OTHER; note = 2'-O-methylcytidine-3'-phosphate
  modified_base 20: mod_base = OTHER; note = 2'-fluoroadenosine-3'-phosphate
  modified_base 21: mod_base = OTHER; note = 2'-O-methyluridine-3'-phosphorothioate
  modified_base 22: mod_base = OTHER; note = 2'-O-methyluridine-3'-phosphorothioate
  modified_base 23: mod_base = OTHER; note = 2'-O-methyluridine-3'-phosphate
tatgacgttgcccaaacacattt

SEQ ID NO: 125 - RNA, 23 nt, synthetic construct
  source 1..23: mol_type = other RNA
  modified_base 1: mod_base = OTHER; note = 2'-O-methyluridine-3'-phosphorothioate
  modified_base 2: mod_base = OTHER; note = 2'-fluorouridine -3'-phosphorothioate
  modified_base 3: mod_base = OTHER; note = 2'-O-methylcytidine-3'-phosphate
  modified_base 4: mod_base = OTHER; note = 2'-fluorouridine-3'-phosphate
  modified_base 5: mod_base = OTHER; note = 2'-O-methyluridine-3'-phosphate
  modified_base 6: mod_base = OTHER; note = 2'-fluoroadenosine-3'-phosphate
  modified_base 7: mod_base = OTHER; note = 2'-O-methyladenosine-3'-phosphate
  modified_base 8: mod_base = OTHER; note = 2'-fluoroguanosine-3'-phosphate
  modified_base 9: mod_base = OTHER; note = 2'-O-methylguanosine-3'-phosphate
  modified_base 10: mod_base = OTHER; note = 2'-fluoroadenosine-3'-phosphate
  modified_base 11: mod_base = OTHER; note = 2'-O-methyladenosine-3'-phosphate
  modified_base 12: mod_base = OTHER; note = 2'-O-methyladenosine-3'-phosphate
  modified_base 13: mod_base = OTHER; note = 2'-O-methyluridine-3'-phosphate
  modified_base 14: mod_base = OTHER; note = 2'-fluorocytidine-3'-phosphate
  modified_base 15: mod_base = OTHER; note = 2'-O-methyluridine-3'-phosphate
  modified_base 16: mod_base = OTHER; note = 2'-fluoroadenosine-3'-phosphate
  modified_base 17: mod_base = OTHER; note = 2'-O-methyladenosine-3'-phosphate
  modified_base 18: mod_base = OTHER; note = 2'-fluoroadenosine-3'-phosphate
  modified_base 19: mod_base = OTHER; note = 2'-O-methylcytidine-3'-phosphate
  modified_base 20: mod_base = OTHER; note = 2'-fluoroadenosine-3'-phosphate
  modified_base 21: mod_base = OTHER; note = 2'-O-methylguanosine-3'- phosphorothioate
  modified_base 22: mod_base = OTHER; note = 2'-O-methyladenosine-3'- phosphorothioate
  modified_base 23: mod_base = OTHER; note = 2'-O-methyladenosine-3'-phosphate
ttcttaaggaaatctaaacagaa

SEQ ID NO: 126 - RNA, 23 nt, synthetic construct
  source 1..23: mol_type = other RNA
  modified_base 1: mod_base = OTHER; note = 2'-O-methyluridine-3'-phosphorothioate
  modified_base 2: mod_base = OTHER; note = 2'-fluoroadenosine-3'-phosphorothioate
  modified_base 3: mod_base = OTHER; note = 2'-O-methyluridine-3'-phosphate
  modified_base 4: mod_base = OTHER; note = 2'-fluoroguanosine-3'-phosphate
  modified_base 5: mod_base = OTHER; note = 2'-O-methylcytidine-3'-phosphate
  modified_base 6: mod_base = OTHER; note = 2'-fluoroadenosine-3'-phosphate
  modified_base 7: mod_base = OTHER; note = 2'-O-methyladenosine-3'-phosphate
  modified_base 8: mod_base = OTHER; note = 2'-fluoroguanosine-3'-phosphate
  modified_base 9: mod_base = OTHER; note = 2'-O-methyluridine-3'-phosphate
  modified_base 10: mod_base = OTHER; note = 2'-fluorocytidine-3'-phosphate
  modified_base 11: mod_base = OTHER; note = 2'-O-methylcytidine-3'-phosphate
  modified_base 12: mod_base = OTHER; note = 2'-O-methyladenosine-3'-phosphate
  modified_base 13: mod_base = OTHER; note = 2'-O-methyluridine-3'-phosphate
  modified_base 14: mod_base = OTHER; note = 2'-fluorouridine-3'-phosphate
  modified_base 15: mod_base = OTHER; note = 2'-O-methyluridine-3'-phosphate
  modified_base 16: mod_base = OTHER; note = 2'-fluorocytidine-3'-phosphate
  modified_base 17: mod_base = OTHER; note = 2'-O-methyluridine-3'-phosphate
  modified_base 18: mod_base = OTHER; note = 2'-fluorouridine-3'-phosphate
  modified_base 19: mod_base = OTHER; note = 2'-O-methyluridine-3'-phosphate
  modified_base 20: mod_base = OTHER; note = 2'-fluorocytidine-3'-phosphate
  modified_base 21: mod_base = OTHER; note = 2'-O-methyluridine-3'-phosphorothioate
  modified_base 22: mod_base = OTHER; note = 2'-O-methyladenosine-3'- phosphorothioate
  modified_base 23: mod_base = OTHER; note = 2'-O-methylguanosine-3'-phosphate
tatgcaagtccatttctttctag

SEQ ID NO: 127 - RNA, 23 nt, synthetic construct
  source 1..23: mol_type = other RNA
  modified_base 1: mod_base = OTHER; note = 2'-O-methyluridine-3'-phosphorothioate
  modified_base 2: mod_base = OTHER; note = 2'-fluorouridine -3'-phosphorothioate
  modified_base 3: mod_base = OTHER; note = 2'-O-methyluridine-3'-phosphate
  modified_base 4: mod_base = OTHER; note = 2'-fluoroadenosine-3'-phosphate
  modified_base 5: mod_base = OTHER; note = 2'-O-methyladenosine-3'-phosphate
  modified_base 6: mod_base = OTHER; note = 2'-fluorouridine-3'-phosphate
  modified_base 7: mod_base = OTHER; note = 2'-O-methyladenosine-3'-phosphate
  modified_base 8: mod_base = OTHER; note = 2'-fluorouridine-3'-phosphate
  modified_base 9: mod_base = OTHER; note = 2'-O-methyladenosine-3'-phosphate
  modified_base 10: mod_base = OTHER; note = 2'-fluorouridine-3'-phosphate
  modified_base 11: mod_base = OTHER; note = 2'-O-methyluridine-3'-phosphate
  modified_base 12: mod_base = OTHER; note = 2'-O-methyluridine-3'-phosphate
  modified_base 13: mod_base = OTHER; note = 2'-O-methylcytidine-3'-phosphate
  modified_base 14: mod_base = OTHER; note = 2'-fluorocytidine-3'-phosphate
  modified_base 15: mod_base = OTHER; note = 2'-O-methyladenosine-3'-phosphate
  modified_base 16: mod_base = OTHER; note = 2'-fluoroguanosine-3'-phosphate
  modified_base 17: mod_base = OTHER; note = 2'-O-methylguanosine-3'-phosphate
  modified_base 18: mod_base = OTHER; note = 2'-fluoroadenosine-3'-phosphate
  modified_base 19: mod_base = OTHER; note = 2'-O-methyluridine-3'-phosphate
  modified_base 20: mod_base = OTHER; note = 2'-fluoroguanosine-3'-phosphate
  modified_base 21: mod_base = OTHER; note = 2'-O-methylcytidine-3'- phosphorothioate
  modified_base 22: mod_base = OTHER; note = 2'-O-methyladenosine-3'- phosphorothioate
  modified_base 23: mod_base = OTHER; note = 2'-O-methyladenosine-3'-phosphate
tttaatatatttccaggatgcaa

SEQ ID NO: 128 - RNA, 23 nt, synthetic construct
  source 1..23: mol_type = other RNA
  modified_base 1: mod_base = OTHER; note = 2'-O-methyluridine-3'-phosphorothioate
  modified_base 2: mod_base = OTHER; note = 2'-fluoroadenosine-3'-phosphorothioate
  modified_base 3: mod_base = OTHER; note = 2'-O-methylguanosine-3'-phosphate
  modified_base 4: mod_base = OTHER; note = 2'-fluorouridine-3'-phosphate
  modified_base 5: mod_base = OTHER; note = 2'-O-methyluridine-3'-phosphate
  modified_base 6: mod_base = OTHER; note = 2'-fluorocytidine-3'-phosphate
  modified_base 7: mod_base = OTHER; note = 2'-O-methylcytidine-3'-phosphate
  modified_base 8: mod_base = OTHER; note = 2'-fluorocytidine-3'-phosphate
  modified_base 9: mod_base = OTHER; note = 2'-O-methyladenosine-3'-phosphate
  modified_base 10: mod_base = OTHER; note = 2'-fluorouridine-3'-phosphate
  modified_base 11: mod_base = OTHER; note = 2'-O-methylguanosine-3'-phosphate
  modified_base 12: mod_base = OTHER; note = 2'-O-methylguanosine-3'-phosphate
  modified_base 13: mod_base = OTHER; note = 2'-O-methyluridine-3'-phosphate
  modified_base 14: mod_base = OTHER; note = 2'-fluorocytidine-3'-phosphate
  modified_base 15: mod_base = OTHER; note = 2'-O-methyluridine-3'-phosphate
  modified_base 16: mod_base = OTHER; note = 2'-fluoroguanosine-3'-phosphate
  modified_base 17: mod_base = OTHER; note = 2'-O-methyladenosine-3'-phosphate
  modified_base 18: mod_base = OTHER; note = 2'-fluorocytidine-3'-phosphate
  modified_base 19: mod_base = OTHER; note = 2'-O-methyladenosine-3'-phosphate
  modified_base 20: mod_base = OTHER; note = 2'-fluoroguanosine-3'-phosphate
  modified_base 21: mod_base = OTHER; note = 2'-O-methylguanosine-3'- phosphorothioate
  modified_base 22: mod_base = OTHER; note = 2'-O-methylcytidine-3'- phosphorothioate
  modified_base 23: mod_base = OTHER; note = 2'-O-methyluridine-3'-phosphate
tagttcccatggtctgacaggct

SEQ ID NO: 129 - RNA, 23 nt, synthetic construct
  source 1..23: mol_type = other RNA
  modified_base 1: mod_base = OTHER; note = 2'-O-methyluridine-3'-phosphorothioate
  modified_base 2: mod_base = OTHER; note = 2'-fluoroadenosine-3'-phosphorothioate
  modified_base 3: mod_base = OTHER; note = 2'-O-methyluridine-3'-phosphate
  modified_base 4: mod_base = OTHER; note = 2'-fluorocytidine-3'-phosphate
  modified_base 5: mod_base = OTHER; note = 2'-O-methylcytidine-3'-phosphate
  modified_base 6: mod_base = OTHER; note = 2'-fluorocytidine-3'-phosphate
  modified_base 7: mod_base = OTHER; note = 2'-O-methyladenosine-3'-phosphate
  modified_base 8: mod_base = OTHER; note = 2'-fluorouridine-3'-phosphate
  modified_base 9: mod_base = OTHER; note = 2'-O-methylcytidine-3'-phosphate
  modified_base 10: mod_base = OTHER; note = 2'-fluorocytidine-3'-phosphate
  modified_base 11: mod_base = OTHER; note = 2'-O-methyladenosine-3'-phosphate
  modified_base 12: mod_base = OTHER; note = 2'-O-methylcytidine-3'-phosphate
  modified_base 13: mod_base = OTHER; note = 2'-O-methyladenosine-3'-phosphate
  modified_base 14: mod_base = OTHER; note = 2'-fluorocytidine-3'-phosphate
  modified_base 15: mod_base = OTHER; note = 2'-O-methylcytidine-3'-phosphate
  modified_base 16: mod_base = OTHER; note = 2'-fluoroadenosine-3'-phosphate
  modified_base 17: mod_base = OTHER; note = 2'-O-methyluridine-3'-phosphate
  modified_base 18: mod_base = OTHER; note = 2'-fluoroguanosine-3'-phosphate
  modified_base 19: mod_base = OTHER; note = 2'-O-methyluridine-3'-phosphate
  modified_base 20: mod_base = OTHER; note = 2'-fluorouridine-3'-phosphate
  modified_base 21: mod_base = OTHER; note = 2'-O-methyluridine-3'-phosphorothioate
  modified_base 22: mod_base = OTHER; note = 2'-O-methyladenosine-3'- phosphorothioate
  modified_base 23: mod_base = OTHER; note = 2'-O-methyladenosine-3'-phosphate
tatcccatccacaccatgtttaa

SEQ ID NO: 130 - RNA, 23 nt, synthetic construct
  source 1..23: mol_type = other RNA
  modified_base 1: mod_base = OTHER; note = 2'-O-methyluridine-3'-phosphorothioate
  modified_base 2: mod_base = OTHER; note = 2'-fluorouridine -3'-phosphorothioate
  modified_base 3: mod_base = OTHER; note = 2'-O-methylcytidine-3'-phosphate
  modified_base 4: mod_base = OTHER; note = 2'-fluoroadenosine-3'-phosphate
  modified_base 5: mod_base = OTHER; note = 2'-O-methyladenosine-3'-phosphate
  modified_base 6: mod_base = OTHER; note = 2'-fluoroadenosine-3'-phosphate
  modified_base 7: mod_base = OTHER; note = 2'-O-methyladenosine-3'-phosphate
  modified_base 8: mod_base = OTHER; note = 2'-fluorouridine-3'-phosphate
  modified_base 9: mod_base = OTHER; note = 2'-O-methyluridine-3'-phosphate
  modified_base 10: mod_base = OTHER; note = 2'-fluorouridine-3'-phosphate
  modified_base 11: mod_base = OTHER; note = 2'-O-methyluridine-3'-phosphate
  modified_base 12: mod_base = OTHER; note = 2'-O-methyluridine-3'-phosphate
  modified_base 13: mod_base = OTHER; note = 2'-O-methylcytidine-3'-phosphate
  modified_base 14: mod_base = OTHER; note = 2'-fluoroadenosine-3'-phosphate
  modified_base 15: mod_base = OTHER; note = 2'-O-methyluridine-3'-phosphate
  modified_base 16: mod_base = OTHER; note = 2'-fluorocytidine-3'-phosphate
  modified_base 17: mod_base = OTHER; note = 2'-O-methylcytidine-3'-phosphate
  modified_base 18: mod_base = OTHER; note = 2'-fluorouridine-3'-phosphate
  modified_base 19: mod_base = OTHER; note = 2'-O-methylguanosine-3'-phosphate
  modified_base 20: mod_base = OTHER; note = 2'-fluoroadenosine-3'-phosphate
  modified_base 21: mod_base = OTHER; note = 2'-O-methylguanosine-3'- phosphorothioate
  modified_base 22: mod_base = OTHER; note = 2'-O-methyluridine-3'-phosphorothioate
  modified_base 23: mod_base = OTHER; note = 2'-O-methyluridine-3'-phosphate
ttcaaaatttttcatcctgagtt

SEQ ID NO: 131 - RNA, 23 nt, synthetic construct
  source 1..23: mol_type = other RNA
  modified_base 1: mod_base = OTHER; note = 2'-O-methyluridine-3'-phosphorothioate
  modified_base 2: mod_base = OTHER; note = 2'-fluorouridine -3'-phosphorothioate
  modified_base 3: mod_base = OTHER; note = 2'-O-methyluridine-3'-phosphate
  modified_base 4: mod_base = OTHER; note = 2'-fluoroguanosine-3'-phosphate
  modified_base 5: mod_base = OTHER; note = 2'-O-methyluridine-3'-phosphate
  modified_base 6: mod_base = OTHER; note = 2'-fluorocytidine-3'-phosphate
  modified_base 7: mod_base = OTHER; note = 2'-O-methyladenosine-3'-phosphate
  modified_base 8: mod_base = OTHER; note = 2'-fluoroadenosine-3'-phosphate
  modified_base 9: mod_base = OTHER; note = 2'-O-methylguanosine-3'-phosphate
  modified_base 10: mod_base = OTHER; note = 2'-fluorouridine-3'-phosphate
  modified_base 11: mod_base = OTHER; note = 2'-O-methyladenosine-3'-phosphate
  modified_base 12: mod_base = OTHER; note = 2'-O-methyladenosine-3'-phosphate
  modified_base 13: mod_base = OTHER; note = 2'-O-methyluridine-3'-phosphate
  modified_base 14: mod_base = OTHER; note = 2'-fluoroadenosine-3'-phosphate
  modified_base 15: mod_base = OTHER; note = 2'-O-methylcytidine-3'-phosphate
  modified_base 16: mod_base = OTHER; note = 2'-fluoroadenosine-3'-phosphate
  modified_base 17: mod_base = OTHER; note = 2'-O-methyluridine-3'-phosphate
  modified_base 18: mod_base = OTHER; note = 2'-fluoroguanosine-3'-phosphate
  modified_base 19: mod_base = OTHER; note = 2'-O-methylcytidine-3'-phosphate
  modified_base 20: mod_base = OTHER; note = 2'-fluorouridine-3'-phosphate
  modified_base 21: mod_base = OTHER; note = 2'-O-methylguanosine-3'- phosphorothioate
  modified_base 22: mod_base = OTHER; note = 2'-O-methyladenosine-3'- phosphorothioate
  modified_base 23: mod_base = OTHER; note = 2'-O-methyladenosine-3'-phosphate
tttgtcaagtaatacatgctgaa

SEQ ID NO: 132 - RNA, 23 nt, synthetic construct
  source 1..23: mol_type = other RNA
  modified_base 1: mod_base = OTHER; note = 2'-O-methyluridine-3'-phosphorothioate
  modified_base 2: mod_base = OTHER; note = 2'-fluoroguanosine-3'-phosphorothioate
  modified_base 3: mod_base = OTHER; note = 2'-O-methyladenosine-3'-phosphate
  modified_base 4: mod_base = OTHER; note = 2'-fluorouridine-3'-phosphate
  modified_base 5: mod_base = OTHER; note = 2'-O-methyluridine-3'-phosphate
  modified_base 6: mod_base = OTHER; note = 2'-fluorouridine-3'-phosphate
  modified_base 7: mod_base = OTHER; note = 2'-O-methyladenosine-3'-phosphate
  modified_base 8: mod_base = OTHER; note = 2'-fluoroguanosine-3'-phosphate
  modified_base 9: mod_base = OTHER; note = 2'-O-methylcytidine-3'-phosphate
  modified_base 10: mod_base = OTHER; note = 2'-fluoroadenosine-3'-phosphate
  modified_base 11: mod_base = OTHER; note = 2'-O-methyluridine-3'-phosphate
  modified_base 12: mod_base = OTHER; note = 2'-O-methylguanosine-3'-phosphate
  modified_base 13: mod_base = OTHER; note = 2'-O-methyluridine-3'-phosphate
  modified_base 14: mod_base = OTHER; note = 2'-fluorouridine-3'-phosphate
  modified_base 15: mod_base = OTHER; note = 2'-O-methylguanosine-3'-phosphate
  modified_base 16: mod_base = OTHER; note = 2'-fluorouridine-3'-phosphate
  modified_base 17: mod_base = OTHER; note = 2'-O-methyluridine-3'-phosphate
  modified_base 18: mod_base = OTHER; note = 2'-fluorocytidine-3'-phosphate
  modified_base 19: mod_base = OTHER; note = 2'-O-methyladenosine-3'-phosphate
  modified_base 20: mod_base = OTHER; note = 2'-fluorouridine-3'-phosphate
  modified_base 21: mod_base = OTHER; note = 2'-O-methyladenosine-3'- phosphorothioate
  modified_base 22: mod_base = OTHER; note = 2'-O-methyladenosine-3'- phosphorothioate
  modified_base 23: mod_base = OTHER; note = 2'-O-methyluridine-3'-phosphate
tgatttagcatgttgttcataat

SEQ ID NO: 133 - RNA, 23 nt, synthetic construct
  source 1..23: mol_type = other RNA
  modified_base 1: mod_base = OTHER; note = 2'-O-methyluridine-3'-phosphorothioate
  modified_base 2: mod_base = OTHER; note = 2'-fluorocytidine-3'-phosphorothioate
  modified_base 3: mod_base = OTHER; note = 2'-O-methylcytidine-3'-phosphate
  modified_base 4: mod_base = OTHER; note = 2'-fluorouridine-3'-phosphate
  modified_base 5: mod_base = OTHER; note = 2'-O-methyladenosine-3'-phosphate
  modified_base 6: mod_base = OTHER; note = 2'-fluoroadenosine-3'-phosphate
  modified_base 7: mod_base = OTHER; note = 2'-O-methyladenosine-3'-phosphate
  modified_base 8: mod_base = OTHER; note = 2'-fluoroadenosine-3'-phosphate
  modified_base 9: mod_base = OTHER; note = 2'-O-methylcytidine-3'-phosphate
  modified_base 10: mod_base = OTHER; note = 2'-fluoroadenosine-3'-phosphate
  modified_base 11: mod_base = OTHER; note = 2'-O-methyluridine-3'-phosphate
  modified_base 12: mod_base = OTHER; note = 2'-O-methyluridine-3'-phosphate
  modified_base 13: mod_base = OTHER; note = 2'-O-methyluridine-3'-phosphate
  modified_base 14: mod_base = OTHER; note = 2'-fluoroguanosine-3'-phosphate
  modified_base 15: mod_base = OTHER; note = 2'-O-methylguanosine-3'-phosphate
  modified_base 16: mod_base = OTHER; note = 2'-fluoroadenosine-3'-phosphate
  modified_base 17: mod_base = OTHER; note = 2'-O-methyluridine-3'-phosphate
  modified_base 18: mod_base = OTHER; note = 2'-fluoroadenosine-3'-phosphate
  modified_base 19: mod_base = OTHER; note = 2'-O-methyluridine-3'-phosphate
  modified_base 20: mod_base = OTHER; note = 2'-fluoroadenosine-3'-phosphate
  modified_base 21: mod_base = OTHER; note = 2'-O-methyluridine-3'-phosphorothioate
  modified_base 22: mod_base = OTHER; note = 2'-O-methyluridine-3'-phosphorothioate
  modified_base 23: mod_base = OTHER; note = 2'-O-methylcytidine-3'-phosphate
tcctaaaacatttggatatattc

SEQ ID NO: 134 - RNA, 23 nt, synthetic construct
  source 1..23: mol_type = other RNA
  modified_base 1: mod_base = OTHER; note = 2'-O-methyluridine-3'-phosphorothioate
  modified_base 2: mod_base = OTHER; note = 2'-fluorouridine -3'-phosphorothioate
  modified_base 3: mod_base = OTHER; note = 2'-O-methylguanosine-3'-phosphate
  modified_base 4: mod_base = OTHER; note = 2'-fluoroguanosine-3'-phosphate
  modified_base 5: mod_base = OTHER; note = 2'-O-methyladenosine-3'-phosphate
  modified_base 6: mod_base = OTHER; note = 2'-fluorouridine-3'-phosphate
  modified_base 7: mod_base = OTHER; note = 2'-O-methyladenosine-3'-phosphate
  modified_base 8: mod_base = OTHER; note = 2'-fluorocytidine-3'-phosphate
  modified_base 9: mod_base = OTHER; note = 2'-O-methyladenosine-3'-phosphate
  modified_base 10: mod_base = OTHER; note = 2'-fluoroguanosine-3'-phosphate
  modified_base 11: mod_base = OTHER; note = 2'-O-methylcytidine-3'-phosphate
  modified_base 12: mod_base = OTHER; note = 2'-O-methyluridine-3'-phosphate
  modified_base 13: mod_base = OTHER; note = 2'-O-methyluridine-3'-phosphate
  modified_base 14: mod_base = OTHER; note = 2'-fluorocytidine-3'-phosphate
  modified_base 15: mod_base = OTHER; note = 2'-O-methylcytidine-3'-phosphate
  modified_base 16: mod_base = OTHER; note = 2'-fluoroadenosine-3'-phosphate
  modified_base 17: mod_base = OTHER; note = 2'-O-methyluridine-3'-phosphate
  modified_base 18: mod_base = OTHER; note = 2'-fluorocytidine-3'-phosphate
  modified_base 19: mod_base = OTHER; note = 2'-O-methyluridine-3'-phosphate
  modified_base 20: mod_base = OTHER; note = 2'-fluoroguanosine-3'-phosphate
  modified_base 21: mod_base = OTHER; note = 2'-O-methylguanosine-3'- phosphorothioate
  modified_base 22: mod_base = OTHER; note = 2'-O-methyladenosine-3'- phosphorothioate
  modified_base 23: mod_base = OTHER; note = 2'-O-methyladenosine-3'-phosphate
ttggatacagcttccatctggaa

SEQ ID NO: 135 - RNA, 23 nt, synthetic construct
  source 1..23: mol_type = other RNA
  modified_base 1: mod_base = OTHER; note = 2'-O-methyluridine-3'-phosphorothioate
  modified_base 2: mod_base = OTHER; note = 2'-fluoroadenosine-3'-phosphorothioate
  modified_base 3: mod_base = OTHER; note = 2'-O-methyluridine-3'-phosphate
  modified_base 4: mod_base = OTHER; note = 2'-fluoroadenosine-3'-phosphate
  modified_base 5: mod_base = OTHER; note = 2'-O-methyluridine-3'-phosphate
  modified_base 6: mod_base = OTHER; note = 2'-fluorouridine-3'-phosphate
  modified_base 7: mod_base = OTHER; note = 2'-O-methyluridine-3'-phosphate
  modified_base 8: mod_base = OTHER; note = 2'-fluorocytidine-3'-phosphate
  modified_base 9: mod_base = OTHER; note = 2'-O-methylcytidine-3'-phosphate
  modified_base 10: mod_base = OTHER; note = 2'-fluoroadenosine-3'-phosphate
  modified_base 11: mod_base = OTHER; note = 2'-O-methylguanosine-3'-phosphate
  modified_base 12: mod_base = OTHER; note = 2'-O-methylguanosine-3'-phosphate
  modified_base 13: mod_base = OTHER; note = 2'-O-methyladenosine-3'-phosphate
  modified_base 14: mod_base = OTHER; note = 2'-fluorouridine-3'-phosphate
  modified_base 15: mod_base = OTHER; note = 2'-O-methylguanosine-3'-phosphate
  modified_base 16: mod_base = OTHER; note = 2'-fluoroadenosine-3'-phosphate
  modified_base 17: mod_base = OTHER; note = 2'-O-methyladenosine-3'-phosphate
  modified_base 18: mod_base = OTHER; note = 2'-fluoroadenosine-3'-phosphate
  modified_base 19: mod_base = OTHER; note = 2'-O-methylguanosine-3'-phosphate
  modified_base 20: mod_base = OTHER; note = 2'-fluorouridine-3'-phosphate
  modified_base 21: mod_base = OTHER; note = 2'-O-methylcytidine-3'- phosphorothioate
  modified_base 22: mod_base = OTHER; note = 2'-O-methylcytidine-3'- phosphorothioate
  modified_base 23: mod_base = OTHER; note = 2'-O-methyladenosine-3'-phosphate
tatatttccaggatgaaagtcca

SEQ ID NO: 136 - RNA, 23 nt, synthetic construct
  source 1..23: mol_type = other RNA
  modified_base 1: mod_base = OTHER; note = 2'-O-methyladenosine-3'- phosphorothioate
  modified_base 2: mod_base = OTHER; note = 2'-fluorouridine -3'-phosphorothioate
  modified_base 3: mod_base = OTHER; note = 2'-O-methyluridine-3'-phosphate
  modified_base 4: mod_base = OTHER; note = 2'-fluoroguanosine-3'-phosphate
  modified_base 5: mod_base = OTHER; note = 2'-O-methyladenosine-3'-phosphate
  modified_base 6: mod_base = OTHER; note = 2'-fluorouridine-3'-phosphate
  modified_base 7: mod_base = OTHER; note = 2'-O-methyladenosine-3'-phosphate
  modified_base 8: mod_base = OTHER; note = 2'-fluorocytidine-3'-phosphate
  modified_base 9: mod_base = OTHER; note = 2'-O-methyladenosine-3'-phosphate
  modified_base 10: mod_base = OTHER; note = 2'-fluoroadenosine-3'-phosphate
  modified_base 11: mod_base = OTHER; note = 2'-O-methyladenosine-3'-phosphate
  modified_base 12: mod_base = OTHER; note = 2'-O-methyluridine-3'-phosphate
  modified_base 13: mod_base = OTHER; note = 2'-O-methyluridine-3'-phosphate
  modified_base 14: mod_base = OTHER; note = 2'-fluoroadenosine-3'-phosphate
  modified_base 15: mod_base = OTHER; note = 2'-O-methylguanosine-3'-phosphate
  modified_base 16: mod_base = OTHER; note = 2'-fluorocytidine-3'-phosphate
  modified_base 17: mod_base = OTHER; note = 2'-O-methylcytidine-3'-phosphate
  modified_base 18: mod_base = OTHER; note = 2'-fluoroguanosine-3'-phosphate
  modified_base 19: mod_base = OTHER; note = 2'-O-methylguanosine-3'-phosphate
  modified_base 20: mod_base = OTHER; note = 2'-fluoroguanosine-3'-phosphate
  modified_base 21: mod_base = OTHER; note = 2'-O-methylguanosine-3'- phosphorothioate
  modified_base 22: mod_base = OTHER; note = 2'-O-methylguanosine-3'- phosphorothioate
  modified_base 23: mod_base = OTHER; note = 2'-O-methyladenosine-3'-phosphate
attgatacaaattagccggggga

SEQ ID NO: 137 - RNA, 23 nt, synthetic construct
  source 1..23: mol_type = other RNA
  modified_base 1: mod_base = OTHER; note = 2'-O-methyluridine-3'-phosphorothioate
  modified_base 2: mod_base = OTHER; note = 2'-fluorocytidine-3'-phosphorothioate
  modified_base 3: mod_base = OTHER; note = 2'-O-methylcytidine-3'-phosphate
  modified_base 4: mod_base = OTHER; note = 2'-fluorocytidine-3'-phosphate
  modified_base 5: mod_base = OTHER; note = 2'-O-methyladenosine-3'-phosphate
  modified_base 6: mod_base = OTHER; note = 2'-fluorouridine-3'-phosphate
  modified_base 7: mod_base = OTHER; note = 2'-O-methyluridine-3'-phosphate
  modified_base 8: mod_base = OTHER; note = 2'-fluorocytidine-3'-phosphate
  modified_base 9: mod_base = OTHER; note = 2'-O-methyladenosine-3'-phosphate
  modified_base 10: mod_base = OTHER; note = 2'-fluoroadenosine-3'-phosphate
  modified_base 11: mod_base = OTHER; note = 2'-O-methylguanosine-3'-phosphate
  modified_base 12: mod_base = OTHER; note = 2'-O-methylcytidine-3'-phosphate
  modified_base 13: mod_base = OTHER; note = 2'-O-methylcytidine-3'-phosphate
  modified_base 14: mod_base = OTHER; note = 2'-fluoroadenosine-3'-phosphate
  modified_base 15: mod_base = OTHER; note = 2'-O-methyluridine-3'-phosphate
  modified_base 16: mod_base = OTHER; note = 2'-fluoroguanosine-3'-phosphate
  modified_base 17: mod_base = OTHER; note = 2'-O-methyluridine-3'-phosphate
  modified_base 18: mod_base = OTHER; note = 2'-fluorouridine-3'-phosphate
  modified_base 19: mod_base = OTHER; note = 2'-O-methyluridine-3'-phosphate
  modified_base 20: mod_base = OTHER; note = 2'-fluoroadenosine-3'-phosphate
  modified_base 21: mod_base = OTHER; note = 2'-O-methyladenosine-3'- phosphorothioate
  modified_base 22: mod_base = OTHER; note = 2'-O-methylcytidine-3'- phosphorothioate
  modified_base 23: mod_base = OTHER; note = 2'-O-methyladenosine-3'-phosphate
tcccattcaagccatgtttaaca

SEQ ID NO: 138 - RNA, 23 nt, synthetic construct
  source 1..23: mol_type = other RNA
  modified_base 1: mod_base = OTHER; note = 2'-O-methyladenosine-3'- phosphorothioate
  modified_base 2: mod_base = OTHER; note = 2'-fluorouridine -3'-phosphorothioate
  modified_base 3: mod_base = OTHER; note = 2'-O-methylguanosine-3'-phosphate
  modified_base 4: mod_base = OTHER; note = 2'-fluoroadenosine-3'-phosphate
  modified_base 5: mod_base = OTHER; note = 2'-O-methylcytidine-3'-phosphate
  modified_base 6: mod_base = OTHER; note = 2'-fluoroguanosine-3'-phosphate
  modified_base 7: mod_base = OTHER; note = 2'-O-methyluridine-3'-phosphate
  modified_base 8: mod_base = OTHER; note = 2'-fluorouridine-3'-phosphate
  modified_base 9: mod_base = OTHER; note = 2'-O-methylguanosine-3'-phosphate
  modified_base 10: mod_base = OTHER; note = 2'-fluorouridine-3'-phosphate
  modified_base 11: mod_base = OTHER; note = 2'-O-methylcytidine-3'-phosphate
  modified_base 12: mod_base = OTHER; note = 2'-O-methyluridine-3'-phosphate
  modified_base 13: mod_base = OTHER; note = 2'-O-methyladenosine-3'-phosphate
  modified_base 14: mod_base = OTHER; note = 2'-fluoroadenosine-3'-phosphate
  modified_base 15: mod_base = OTHER; note = 2'-O-methyladenosine-3'-phosphate
  modified_base 16: mod_base = OTHER; note = 2'-fluorocytidine-3'-phosphate
  modified_base 17: mod_base = OTHER; note = 2'-O-methyladenosine-3'-phosphate
  modified_base 18: mod_base = OTHER; note = 2'-fluorocytidine-3'-phosphate
  modified_base 19: mod_base = OTHER; note = 2'-O-methyladenosine-3'-phosphate
  modified_base 20: mod_base = OTHER; note = 2'-fluorouridine-3'-phosphate
  modified_base 21: mod_base = OTHER; note = 2'-O-methyluridine-3'-phosphorothioate
  modified_base 22: mod_base = OTHER; note = 2'-O-methyluridine-3'-phosphorothioate
  modified_base 23: mod_base = OTHER; note = 2'-O-methyluridine-3'-phosphate
atgacgttgtctaaacacatttt

SEQ ID NO: 139 - RNA, 23 nt, synthetic construct
  source 1..23: mol_type = other RNA
  modified_base 1: mod_base = OTHER; note = 2'-O-methyladenosine-3'- phosphorothioate
  modified_base 2: mod_base = OTHER; note = 2'-fluoroadenosine-3'-phosphorothioate
  modified_base 3: mod_base = OTHER; note = 2'-O-methylcytidine-3'-phosphate
  modified_base 4: mod_base = OTHER; note = 2'-fluorocytidine-3'-phosphate
  modified_base 5: mod_base = OTHER; note = 2'-O-methylguanosine-3'-phosphate
  modified_base 6: mod_base = OTHER; note = 2'-fluoroguanosine-3'-phosphate
  modified_base 7: mod_base = OTHER; note = 2'-O-methyladenosine-3'-phosphate
  modified_base 8: mod_base = OTHER; note = 2'-fluoroadenosine-3'-phosphate
  modified_base 9: mod_base = OTHER; note = 2'-O-methyluridine-3'-phosphate
  modified_base 10: mod_base = OTHER; note = 2'-fluorouridine-3'-phosphate
  modified_base 11: mod_base = OTHER; note = 2'-O-methylcytidine-3'-phosphate
  modified_base 12: mod_base = OTHER; note = 2'-O-methyluridine-3'-phosphate
  modified_base 13: mod_base = OTHER; note = 2'-O-methyluridine-3'-phosphate
  modified_base 14: mod_base = OTHER; note = 2'-fluorocytidine-3'-phosphate
  modified_base 15: mod_base = OTHER; note = 2'-O-methylcytidine-3'-phosphate
  modified_base 16: mod_base = OTHER; note = 2'-fluorouridine-3'-phosphate
  modified_base 17: mod_base = OTHER; note = 2'-O-methyluridine-3'-phosphate
  modified_base 18: mod_base = OTHER; note = 2'-fluorouridine-3'-phosphate
  modified_base 19: mod_base = OTHER; note = 2'-O-methyladenosine-3'-phosphate
  modified_base 20: mod_base = OTHER; note = 2'-fluoroguanosine-3'-phosphate
  modified_base 21: mod_base = OTHER; note = 2'-O-methyluridine-3'-phosphorothioate
  modified_base 22: mod_base = OTHER; note = 2'-O-methyladenosine-3'- phosphorothioate
  modified_base 23: mod_base = OTHER; note = 2'-O-methyluridine-3'-phosphate
aaccggaattcttcctttagtat

SEQ ID NO: 140 - RNA, 23 nt, synthetic construct
  source 1..23: mol_type = other RNA
  modified_base 1: mod_base = OTHER; note = 2'-O-methyladenosine-3'- phosphorothioate
  modified_base 2: mod_base = OTHER; note = 2'-fluorouridine -3'-phosphorothioate
  modified_base 3: mod_base = OTHER; note = 2'-O-methylcytidine-3'-phosphate
  modified_base 4: mod_base = OTHER; note = 2'-fluorocytidine-3'-phosphate
  modified_base 5: mod_base = OTHER; note = 2'-O-methyluridine-3'-phosphate
  modified_base 6: mod_base = OTHER; note = 2'-fluoroadenosine-3'-phosphate
  modified_base 7: mod_base = OTHER; note = 2'-O-methyladenosine-3'-phosphate
  modified_base 8: mod_base = OTHER; note = 2'-fluoroadenosine-3'-phosphate
  modified_base 9: mod_base = OTHER; note = 2'-O-methyladenosine-3'-phosphate
  modified_base 10: mod_base = OTHER; note = 2'-fluorocytidine-3'-phosphate
  modified_base 11: mod_base = OTHER; note = 2'-O-methyladenosine-3'-phosphate
  modified_base 12: mod_base = OTHER; note = 2'-O-methyluridine-3'-phosphate
  modified_base 13: mod_base = OTHER; note = 2'-O-methyluridine-3'-phosphate
  modified_base 14: mod_base = OTHER; note = 2'-fluorouridine-3'-phosphate
  modified_base 15: mod_base = OTHER; note = 2'-O-methylguanosine-3'-phosphate
  modified_base 16: mod_base = OTHER; note = 2'-fluoroguanosine-3'-phosphate
  modified_base 17: mod_base = OTHER; note = 2'-O-methyladenosine-3'-phosphate
  modified_base 18: mod_base = OTHER; note = 2'-fluorouridine-3'-phosphate
  modified_base 19: mod_base = OTHER; note = 2'-O-methyladenosine-3'-phosphate
  modified_base 20: mod_base = OTHER; note = 2'-fluorouridine-3'-phosphate
  modified_base 21: mod_base = OTHER; note = 2'-O-methyladenosine-3'- phosphorothioate
  modified_base 22: mod_base = OTHER; note = 2'-O-methyluridine-3'-phosphorothioate
  modified_base 23: mod_base = OTHER; note = 2'-O-methyluridine-3'-phosphate
atcctaaaacatttggatatatt

SEQ ID NO: 141 - RNA, 23 nt, synthetic construct
  source 1..23: mol_type = other RNA
  modified_base 1: mod_base = OTHER; note = 2'-O-methyladenosine-3'- phosphorothioate
  modified_base 2: mod_base = OTHER; note = 2'-fluoroadenosine-3'-phosphorothioate
  modified_base 3: mod_base = OTHER; note = 2'-O-methylcytidine-3'-phosphate
  modified_base 4: mod_base = OTHER; note = 2'-fluoroadenosine-3'-phosphate
  modified_base 5: mod_base = OTHER; note = 2'-O-methyluridine-3'-phosphate
  modified_base 6: mod_base = OTHER; note = 2'-fluorocytidine-3'-phosphate
  modified_base 7: mod_base = OTHER; note = 2'-O-methyladenosine-3'-phosphate
  modified_base 8: mod_base = OTHER; note = 2'-fluoroguanosine-3'-phosphate
  modified_base 9: mod_base = OTHER; note = 2'-O-methyluridine-3'-phosphate
  modified_base 10: mod_base = OTHER; note = 2'-fluoroguanosine-3'-phosphate
  modified_base 11: mod_base = OTHER; note = 2'-O-methylcytidine-3'-phosphate
  modified_base 12: mod_base = OTHER; note = 2'-O-methylcytidine-3'-phosphate
  modified_base 13: mod_base = OTHER; note = 2'-O-methyluridine-3'-phosphate
  modified_base 14: mod_base = OTHER; note = 2'-fluorouridine-3'-phosphate
  modified_base 15: mod_base = OTHER; note = 2'-O-methyluridine-3'-phosphate
  modified_base 16: mod_base = OTHER; note = 2'-fluorocytidine-3'-phosphate
  modified_base 17: mod_base = OTHER; note = 2'-O-methylcytidine-3'-phosphate
  modified_base 18: mod_base = OTHER; note = 2'-fluoroguanosine-3'-phosphate
  modified_base 19: mod_base = OTHER; note = 2'-O-methylcytidine-3'-phosphate
  modified_base 20: mod_base = OTHER; note = 2'-fluoroadenosine-3'-phosphate
  modified_base 21: mod_base = OTHER; note = 2'-O-methylcytidine-3'- phosphorothioate
  modified_base 22: mod_base = OTHER; note = 2'-O-methyladenosine-3'- phosphorothioate
  modified_base 23: mod_base = OTHER; note = 2'-O-methylcytidine-3'-phosphate
aacatcagtgcctttccgcacac

SEQ ID NO: 142 - RNA, 23 nt, synthetic construct
  source 1..23: mol_type = other RNA
  modified_base 1: mod_base = OTHER; note = 2'-O-methyladenosine-3'- phosphorothioate
  modified_base 2: mod_base = OTHER; note = 2'-fluoroadenosine-3'-phosphorothioate
  modified_base 3: mod_base = OTHER; note = 2'-O-methyluridine-3'-phosphate
  modified_base 4: mod_base = OTHER; note = 2'-fluorouridine-3'-phosphate
  modified_base 5: mod_base = OTHER; note = 2'-O-methyluridine-3'-phosphate
  modified_base 6: mod_base = OTHER; note = 2'-fluoroadenosine-3'-phosphate
  modified_base 7: mod_base = OTHER; note = 2'-O-methyladenosine-3'-phosphate
  modified_base 8: mod_base = OTHER; note = 2'-fluoroguanosine-3'-phosphate
  modified_base 9: mod_base = OTHER; note = 2'-O-methyladenosine-3'-phosphate
  modified_base 10: mod_base = OTHER; note = 2'-fluoroadenosine-3'-phosphate
  modified_base 11: mod_base = OTHER; note = 2'-O-methylcytidine-3'-phosphate
  modified_base 12: mod_base = OTHER; note = 2'-O-methylcytidine-3'-phosphate
  modified_base 13: mod_base = OTHER; note = 2'-O-methyladenosine-3'-phosphate
  modified_base 14: mod_base = OTHER; note = 2'-fluorocytidine-3'-phosphate
  modified_base 15: mod_base = OTHER; note = 2'-O-methyluridine-3'-phosphate
  modified_base 16: mod_base = OTHER; note = 2'-fluoroguanosine-3'-phosphate
  modified_base 17: mod_base = OTHER; note = 2'-O-methyluridine-3'-phosphate
  modified_base 18: mod_base = OTHER; note = 2'-fluorouridine-3'-phosphate
  modified_base 19: mod_base = OTHER; note = 2'-O-methyluridine-3'-phosphate
  modified_base 20: mod_base = OTHER; note = 2'-fluorouridine-3'-phosphate
  modified_base 21: mod_base = OTHER; note = 2'-O-methyladenosine-3'- phosphorothioate
  modified_base 22: mod_base = OTHER; note = 2'-O-methyladenosine-3'- phosphorothioate
  modified_base 23: mod_base = OTHER; note = 2'-O-methyladenosine-3'-phosphate
aatttaagaaccactgttttaaa

SEQ ID NO: 143 - RNA, 23 nt, synthetic construct
  source 1..23: mol_type = other RNA
  modified_base 1: mod_base = OTHER; note = 2'-O-methyladenosine-3'- phosphorothioate
  modified_base 2: mod_base = OTHER; note = 2'-fluorocytidine-3'-phosphorothioate
  modified_base 3: mod_base = OTHER; note = 2'-O-methyluridine-3'-phosphate
  modified_base 4: mod_base = OTHER; note = 2'-fluoroguanosine-3'-phosphate
  modified_base 5: mod_base = OTHER; note = 2'-O-methylguanosine-3'-phosphate
  modified_base 6: mod_base = OTHER; note = 2'-fluorouridine-3'-phosphate
  modified_base 7: mod_base = OTHER; note = 2'-O-methyluridine-3'-phosphate
  modified_base 8: mod_base = OTHER; note = 2'-fluorouridine-3'-phosphate
  modified_base 9: mod_base = OTHER; note = 2'-O-methylcytidine-3'-phosphate
  modified_base 10: mod_base = OTHER; note = 2'-fluoroadenosine-3'-phosphate
  modified_base 11: mod_base = OTHER; note = 2'-O-methyladenosine-3'-phosphate
  modified_base 12: mod_base = OTHER; note = 2'-O-methyladenosine-3'-phosphate
  modified_base 13: mod_base = OTHER; note = 2'-O-methyladenosine-3'-phosphate
  modified_base 14: mod_base = OTHER; note = 2'-fluorouridine-3'-phosphate
  modified_base 15: mod_base = OTHER; note = 2'-O-methyluridine-3'-phosphate
  modified_base 16: mod_base = OTHER; note = 2'-fluorouridine-3'-phosphate
  modified_base 17: mod_base = OTHER; note = 2'-O-methyluridine-3'-phosphate
  modified_base 18: mod_base = OTHER; note = 2'-fluorouridine-3'-phosphate
  modified_base 19: mod_base = OTHER; note = 2'-O-methylcytidine-3'-phosphate
  modified_base 20: mod_base = OTHER; note = 2'-fluoroadenosine-3'-phosphate
  modified_base 21: mod_base = OTHER; note = 2'-O-methyluridine-3'-phosphorothioate
  modified_base 22: mod_base = OTHER; note = 2'-O-methylcytidine-3'- phosphorothioate
  modified_base 23: mod_base = OTHER; note = 2'-O-methylcytidine-3'-phosphate
actggtttcaaaatttttcatcc

SEQ ID NO: 144 - RNA, 23 nt, synthetic construct
  source 1..23: mol_type = other RNA
  modified_base 1: mod_base = OTHER; note = 2'-O-methyladenosine-3'- phosphorothioate
  modified_base 2: mod_base = OTHER; note = 2'-fluoroadenosine-3'-phosphorothioate
  modified_base 3: mod_base = OTHER; note = 2'-O-methyladenosine-3'-phosphate
  modified_base 4: mod_base = OTHER; note = 2'-fluoroadenosine-3'-phosphate
  modified_base 5: mod_base = OTHER; note = 2'-O-methylguanosine-3'-phosphate
  modified_base 6: mod_base = OTHER; note = 2'-fluoroguanosine-3'-phosphate
  modified_base 7: mod_base = OTHER; note = 2'-O-methylguanosine-3'-phosphate
  modified_base 8: mod_base = OTHER; note = 2'-fluoroadenosine-3'-phosphate
  modified_base 9: mod_base = OTHER; note = 2'-O-methyluridine-3'-phosphate
  modified_base 10: mod_base = OTHER; note = 2'-fluorouridine-3'-phosphate
  modified_base 11: mod_base = OTHER; note = 2'-O-methylguanosine-3'-phosphate
  modified_base 12: mod_base = OTHER; note = 2'-O-methylcytidine-3'-phosphate
  modified_base 13: mod_base = OTHER; note = 2'-O-methyluridine-3'-phosphate
  modified_base 14: mod_base = OTHER; note = 2'-fluoroadenosine-3'-phosphate
  modified_base 15: mod_base = OTHER; note = 2'-O-methyluridine-3'-phosphate
  modified_base 16: mod_base = OTHER; note = 2'-fluorouridine-3'-phosphate
  modified_base 17: mod_base = OTHER; note = 2'-O-methyluridine-3'-phosphate
  modified_base 18: mod_base = OTHER; note = 2'-fluorouridine-3'-phosphate
  modified_base 19: mod_base = OTHER; note = 2'-O-methylguanosine-3'-phosphate
  modified_base 20: mod_base = OTHER; note = 2'-fluorouridine-3'-phosphate
  modified_base 21: mod_base = OTHER; note = 2'-O-methyluridine-3'-phosphorothioate
  modified_base 22: mod_base = OTHER; note = 2'-O-methylguanosine-3'- phosphorothioate
  modified_base 23: mod_base = OTHER; note = 2'-O-methylguanosine-3'-phosphate
aaaagggattgctattttgttgg

SEQ ID NO: 145 - RNA, 23 nt, synthetic construct
  source 1..23: mol_type = other RNA
  modified_base 1: mod_base = OTHER; note = 2'-O-methyladenosine-3'- phosphorothioate
  modified_base 2: mod_base = OTHER; note = 2'-fluoroadenosine-3'-phosphorothioate
  modified_base 3: mod_base = OTHER; note = 2'-O-methylguanosine-3'-phosphate
  modified_base 4: mod_base = OTHER; note = 2'-fluorouridine-3'-phosphate
  modified_base 5: mod_base = OTHER; note = 2'-O-methylcytidine-3'-phosphate
  modified_base 6: mod_base = OTHER; note = 2'-fluoroguanosine-3'-phosphate
  modified_base 7: mod_base = OTHER; note = 2'-O-methyladenosine-3'-phosphate
  modified_base 8: mod_base = OTHER; note = 2'-fluorocytidine-3'-phosphate
  modified_base 9: mod_base = OTHER; note = 2'-O-methyladenosine-3'-phosphate
  modified_base 10: mod_base = OTHER; note = 2'-fluoroguanosine-3'-phosphate
  modified_base 11: mod_base = OTHER; note = 2'-O-methyladenosine-3'-phosphate
  modified_base 12: mod_base = OTHER; note = 2'-O-methyluridine-3'-phosphate
  modified_base 13: mod_base = OTHER; note = 2'-O-methylcytidine-3'-phosphate
  modified_base 14: mod_base = OTHER; note = 2'-fluorouridine-3'-phosphate
  modified_base 15: mod_base = OTHER; note = 2'-O-methylguanosine-3'-phosphate
  modified_base 16: mod_base = OTHER; note = 2'-fluorouridine-3'-phosphate
  modified_base 17: mod_base = OTHER; note = 2'-O-methyluridine-3'-phosphate
  modified_base 18: mod_base = OTHER; note = 2'-fluorouridine-3'-phosphate
  modified_base 19: mod_base = OTHER; note = 2'-O-methylcytidine-3'-phosphate
  modified_base 20: mod_base = OTHER; note = 2'-fluoroadenosine-3'-phosphate
  modified_base 21: mod_base = OTHER; note = 2'-O-methylguanosine-3'- phosphorothioate
  modified_base 22: mod_base = OTHER; note = 2'-O-methylcytidine-3'- phosphorothioate
  modified_base 23: mod_base = OTHER; note = 2'-O-methyladenosine-3'-phosphate
aagtcgacagatctgtttcagca

SEQ ID NO: 146 - RNA, 23 nt, synthetic construct
  source 1..23: mol_type = other RNA
  modified_base 1: mod_base = OTHER; note = 2'-O-methyluridine-3'-phosphorothioate
  modified_base 2: mod_base = OTHER; note = 2'-fluorocytidine-3'-phosphorothioate
  modified_base 3: mod_base = OTHER; note = 2'-O-methyladenosine-3'-phosphate
  modified_base 4: mod_base = OTHER; note = 2'-fluoroadenosine-3'-phosphate
  modified_base 5: mod_base = OTHER; note = 2'-O-methyladenosine-3'-phosphate
  modified_base 6: mod_base = OTHER; note = 2'-fluoroadenosine-3'-phosphate
  modified_base 7: mod_base = OTHER; note = 2'-O-methyluridine-3'-phosphate
  modified_base 8: mod_base = OTHER; note = 2'-fluoroguanosine-3'-phosphate
  modified_base 9: mod_base = OTHER; note = 2'-O-methylcytidine-3'-phosphate
  modified_base 10: mod_base = OTHER; note = 2'-fluorocytidine-3'-phosphate
  modified_base 11: mod_base = OTHER; note = 2'-O-methylcytidine-3'-phosphate
  modified_base 12: mod_base = OTHER; note = 2'-O-methyluridine-3'-phosphate
  modified_base 13: mod_base = OTHER; note = 2'-O-methyluridine-3'-phosphate
  modified_base 14: mod_base = OTHER; note = 2'-fluorouridine-3'-phosphate
  modified_base 15: mod_base = OTHER; note = 2'-O-methylguanosine-3'-phosphate
  modified_base 16: mod_base = OTHER; note = 2'-fluorocytidine-3'-phosphate
  modified_base 17: mod_base = OTHER; note = 2'-O-methyladenosine-3'-phosphate
  modified_base 18: mod_base = OTHER; note = 2'-fluoroadenosine-3'-phosphate
  modified_base 19: mod_base = OTHER; note = 2'-O-methylcytidine-3'-phosphate
  modified_base 20: mod_base = OTHER; note = 2'-fluoroadenosine-3'-phosphate
  modified_base 21: mod_base = OTHER; note = 2'-O-methyladenosine-3'- phosphorothioate
  modified_base 22: mod_base = OTHER; note = 2'-O-methyluridine-3'-phosphorothioate
  modified_base 23: mod_base = OTHER; note = 2'-O-methyluridine-3'-phosphate
tcaaaatgccctttgcaacaatt

SEQ ID NO: 147 - RNA, 23 nt, synthetic construct
  source 1..23: mol_type = other RNA
  modified_base 1: mod_base = OTHER; note = 2'-O-methyluridine-3'-phosphorothioate
  modified_base 2: mod_base = OTHER; note = 2'-fluoroadenosine-3'-phosphorothioate
  modified_base 3: mod_base = OTHER; note = 2'-O-methylcytidine-3'-phosphate
  modified_base 4: mod_base = OTHER; note = 2'-fluoroadenosine-3'-phosphate
  modified_base 5: mod_base = OTHER; note = 2'-O-methylguanosine-3'-phosphate
  modified_base 6: mod_base = OTHER; note = 2'-fluoroguanosine-3'-phosphate
  modified_base 7: mod_base = OTHER; note = 2'-O-methyluridine-3'-phosphate
  modified_base 8: mod_base = OTHER; note = 2'-fluorouridine-3'-phosphate
  modified_base 9: mod_base = OTHER; note = 2'-O-methyladenosine-3'-phosphate
  modified_base 10: mod_base = OTHER; note = 2'-fluoroadenosine-3'-phosphate
  modified_base 11: mod_base = OTHER; note = 2'-O-methyluridine-3'-phosphate
  modified_base 12: mod_base = OTHER; note = 2'-O-methyladenosine-3'-phosphate
  modified_base 13: mod_base = OTHER; note = 2'-O-methyladenosine-3'-phosphate
  modified_base 14: mod_base = OTHER; note = 2'-fluoroadenosine-3'-phosphate
  modified_base 15: mod_base = OTHER; note = 2'-O-methylcytidine-3'-phosphate
  modified_base 16: mod_base = OTHER; note = 2'-fluoroadenosine-3'-phosphate
  modified_base 17: mod_base = OTHER; note = 2'-O-methyladenosine-3'-phosphate
  modified_base 18: mod_base = OTHER; note = 2'-fluorouridine-3'-phosphate
  modified_base 19: mod_base = OTHER; note = 2'-O-methylguanosine-3'-phosphate
  modified_base 20: mod_base = OTHER; note = 2'-fluoroadenosine-3'-phosphate
  modified_base 21: mod_base = OTHER; note = 2'-O-methylguanosine-3'- phosphorothioate
  modified_base 22: mod_base = OTHER; note = 2'-O-methyladenosine-3'- phosphorothioate
  modified_base 23: mod_base = OTHER; note = 2'-O-methyluridine-3'-phosphate
tacaggttaataaacaatgagat

SEQ ID NO: 148 - RNA, 23 nt, synthetic construct
  source 1..23: mol_type = other RNA
  modified_base 1: mod_base = OTHER; note = 2'-O-methyladenosine-3'- phosphorothioate
  modified_base 2: mod_base = OTHER; note = 2'-fluoroadenosine-3'-phosphorothioate
  modified_base 3: mod_base = OTHER; note = 2'-O-methyladenosine-3'-phosphate
  modified_base 4: mod_base = OTHER; note = 2'-fluoroguanosine-3'-phosphate
  modified_base 5: mod_base = OTHER; note = 2'-O-methylguanosine-3'-phosphate
  modified_base 6: mod_base = OTHER; note = 2'-fluoroguanosine-3'-phosphate
  modified_base 7: mod_base = OTHER; note = 2'-O-methyladenosine-3'-phosphate
  modified_base 8: mod_base = OTHER; note = 2'-fluorouridine-3'-phosphate
  modified_base 9: mod_base = OTHER; note = 2'-O-methyluridine-3'-phosphate
  modified_base 10: mod_base = OTHER; note = 2'-fluoroguanosine-3'-phosphate
  modified_base 11: mod_base = OTHER; note = 2'-O-methylcytidine-3'-phosphate
  modified_base 12: mod_base = OTHER; note = 2'-O-methyluridine-3'-phosphate
  modified_base 13: mod_base = OTHER; note = 2'-O-methyladenosine-3'-phosphate
  modified_base 14: mod_base = OTHER; note = 2'-fluorouridine-3'-phosphate
  modified_base 15: mod_base = OTHER; note = 2'-O-methyluridine-3'-phosphate
  modified_base 16: mod_base = OTHER; note = 2'-fluorouridine-3'-phosphate
  modified_base 17: mod_base = OTHER; note = 2'-O-methyluridine-3'-phosphate
  modified_base 18: mod_base = OTHER; note = 2'-fluoroguanosine-3'-phosphate
  modified_base 19: mod_base = OTHER; note = 2'-O-methyluridine-3'-phosphate
  modified_base 20: mod_base = OTHER; note = 2'-fluorouridine-3'-phosphate
  modified_base 21: mod_base = OTHER; note = 2'-O-methylguanosine-3'- phosphorothioate
  modified_base 22: mod_base = OTHER; note = 2'-O-methylguanosine-3'- phosphorothioate
  modified_base 23: mod_base = OTHER; note = 2'-O-methyladenosine-3'-phosphate
aaagggattgctattttgttgga

SEQ ID NO: 149 - RNA, 23 nt, synthetic construct
  source 1..23: mol_type = other RNA
  modified_base 1: mod_base = OTHER; note = 2'-O-methyladenosine-3'- phosphorothioate
  modified_base 2: mod_base = OTHER; note = 2'-fluoroadenosine-3'-phosphorothioate
  modified_base 3: mod_base = OTHER; note = 2'-O-methyluridine-3'-phosphate
  modified_base 4: mod_base = OTHER; note = 2'-fluoroadenosine-3'-phosphate
  modified_base 5: mod_base = OTHER; note = 2'-O-methylcytidine-3'-phosphate
  modified_base 6: mod_base = OTHER; note = 2'-fluoroadenosine-3'-phosphate
  modified_base 7: mod_base = OTHER; note = 2'-O-methylguanosine-3'-phosphate
  modified_base 8: mod_base = OTHER; note = 2'-fluoroguanosine-3'-phosphate
  modified_base 9: mod_base = OTHER; note = 2'-O-methyluridine-3'-phosphate
  modified_base 10: mod_base = OTHER; note = 2'-fluorouridine-3'-phosphate
  modified_base 11: mod_base = OTHER; note = 2'-O-methyladenosine-3'-phosphate
  modified_base 12: mod_base = OTHER; note = 2'-O-methyladenosine-3'-phosphate
  modified_base 13: mod_base = OTHER; note = 2'-O-methyluridine-3'-phosphate
  modified_base 14: mod_base = OTHER; note = 2'-fluoroadenosine-3'-phosphate
  modified_base 15: mod_base = OTHER; note = 2'-O-methyladenosine-3'-phosphate
  modified_base 16: mod_base = OTHER; note = 2'-fluoroadenosine-3'-phosphate
  modified_base 17: mod_base = OTHER; note = 2'-O-methylcytidine-3'-phosphate
  modified_base 18: mod_base = OTHER; note = 2'-fluoroadenosine-3'-phosphate
  modified_base 19: mod_base = OTHER; note = 2'-O-methyladenosine-3'-phosphate
  modified_base 20: mod_base = OTHER; note = 2'-fluorouridine-3'-phosphate
  modified_base 21: mod_base = OTHER; note = 2'-O-methylguanosine-3'- phosphorothioate
  modified_base 22: mod_base = OTHER; note = 2'-O-methyladenosine-3'- phosphorothioate
  modified_base 23: mod_base = OTHER; note = 2'-O-methylguanosine-3'-phosphate
aatacaggttaataaacaatgag

SEQ ID NO: 150 - RNA, 23 nt, synthetic construct
  source 1..23: mol_type = other RNA
  modified_base 1: mod_base = OTHER; note = 2'-O-methyluridine-3'-phosphorothioate
  modified_base 2: mod_base = OTHER; note = 2'-fluorouridine -3'-phosphorothioate
  modified_base 3: mod_base = OTHER; note = 2'-O-methylguanosine-3'-phosphate
  modified_base 4: mod_base = OTHER; note = 2'-fluoroadenosine-3'-phosphate
  modified_base 5: mod_base = OTHER; note = 2'-O-methyluridine-3'-phosphate
  modified_base 6: mod_base = OTHER; note = 2'-fluoroadenosine-3'-phosphate
  modified_base 7: mod_base = OTHER; note = 2'-O-methyluridine-3'-phosphate
  modified_base 8: mod_base = OTHER; note = 2'-fluorocytidine-3'-phosphate
  modified_base 9: mod_base = OTHER; note = 2'-O-methyluridine-3'-phosphate
  modified_base 10: mod_base = OTHER; note = 2'-fluorouridine-3'-phosphate
  modified_base 11: mod_base = OTHER; note = 2'-O-methylcytidine-3'-phosphate
  modified_base 12: mod_base = OTHER; note = 2'-O-methylcytidine-3'-phosphate
  modified_base 13: mod_base = OTHER; note = 2'-O-methylcytidine-3'-phosphate
  modified_base 14: mod_base = OTHER; note = 2'-fluoroadenosine-3'-phosphate
  modified_base 15: mod_base = OTHER; note = 2'-O-methylguanosine-3'-phosphate
  modified_base 16: mod_base = OTHER; note = 2'-fluorocytidine-3'-phosphate
  modified_base 17: mod_base = OTHER; note = 2'-O-methyluridine-3'-phosphate
  modified_base 18: mod_base = OTHER; note = 2'-fluoroguanosine-3'-phosphate
  modified_base 19: mod_base = OTHER; note = 2'-O-methyladenosine-3'-phosphate
  modified_base 20: mod_base = OTHER; note = 2'-fluorouridine-3'-phosphate
  modified_base 21: mod_base = OTHER; note = 2'-O-methyladenosine-3'- phosphorothioate
  modified_base 22: mod_base = OTHER; note = 2'-O-methylguanosine-3'- phosphorothioate
  modified_base 23: mod_base = OTHER; note = 2'-O-methyladenosine-3'-phosphate
ttgatatcttcccagctgataga

SEQ ID NO: 151 - RNA, 23 nt, synthetic construct
  source 1..23: mol_type = other RNA
  modified_base 1: mod_base = OTHER; note = 2'-O-methyluridine-3'-phosphorothioate
  modified_base 2: mod_base = OTHER; note = 2'-fluorouridine -3'-phosphorothioate
  modified_base 3: mod_base = OTHER; note = 2'-O-methylcytidine-3'-phosphate
  modified_base 4: mod_base = OTHER; note = 2'-fluorouridine-3'-phosphate
  modified_base 5: mod_base = OTHER; note = 2'-O-methyladenosine-3'-phosphate
  modified_base 6: mod_base = OTHER; note = 2'-fluoroadenosine-3'-phosphate
  modified_base 7: mod_base = OTHER; note = 2'-O-methyladenosine-3'-phosphate
  modified_base 8: mod_base = OTHER; note = 2'-fluoroadenosine-3'-phosphate
  modified_base 9: mod_base = OTHER; note = 2'-O-methylguanosine-3'-phosphate
  modified_base 10: mod_base = OTHER; note = 2'-fluoroguanosine-3'-phosphate
  modified_base 11: mod_base = OTHER; note = 2'-O-methyluridine-3'-phosphate
  modified_base 12: mod_base = OTHER; note = 2'-O-methyluridine-3'-phosphate
  modified_base 13: mod_base = OTHER; note = 2'-O-methylcytidine-3'-phosphate
  modified_base 14: mod_base = OTHER; note = 2'-fluorocytidine-3'-phosphate
  modified_base 15: mod_base = OTHER; note = 2'-O-methyluridine-3'-phosphate
  modified_base 16: mod_base = OTHER; note = 2'-fluoroadenosine-3'-phosphate
  modified_base 17: mod_base = OTHER; note = 2'-O-methylguanosine-3'-phosphate
  modified_base 18: mod_base = OTHER; note = 2'-fluoroguanosine-3'-phosphate
  modified_base 19: mod_base = OTHER; note = 2'-O-methyladenosine-3'-phosphate
  modified_base 20: mod_base = OTHER; note = 2'-fluorocytidine-3'-phosphate
  modified_base 21: mod_base = OTHER; note = 2'-O-methyladenosine-3'- phosphorothioate
  modified_base 22: mod_base = OTHER; note = 2'-O-methylcytidine-3'- phosphorothioate
  modified_base 23: mod_base = OTHER; note = 2'-O-methylcytidine-3'-phosphate
ttctaaaaggttcctaggacacc

SEQ ID NO: 152 - RNA, 23 nt, synthetic construct
  source 1..23: mol_type = other RNA
  modified_base 1: mod_base = OTHER; note = 2'-O-methyladenosine-3'- phosphorothioate
  modified_base 2: mod_base = OTHER; note = 2'-fluoroguanosine-3'-phosphorothioate
  modified_base 3: mod_base = OTHER; note = 2'-O-methylguanosine-3'-phosphate
  modified_base 4: mod_base = OTHER; note = 2'-fluoroguanosine-3'-phosphate
  modified_base 5: mod_base = OTHER; note = 2'-O-methyladenosine-3'-phosphate
  modified_base 6: mod_base = OTHER; note = 2'-fluorouridine-3'-phosphate
  modified_base 7: mod_base = OTHER; note = 2'-O-methyluridine-3'-phosphate
  modified_base 8: mod_base = OTHER; note = 2'-fluoroguanosine-3'-phosphate
  modified_base 9: mod_base = OTHER; note = 2'-O-methylcytidine-3'-phosphate
  modified_base 10: mod_base = OTHER; note = 2'-fluorouridine-3'-phosphate
  modified_base 11: mod_base = OTHER; note = 2'-O-methyladenosine-3'-phosphate
  modified_base 12: mod_base = OTHER; note = 2'-O-methyluridine-3'-phosphate
  modified_base 13: mod_base = OTHER; note = 2'-O-methyluridine-3'-phosphate
  modified_base 14: mod_base = OTHER; note = 2'-fluorouridine-3'-phosphate
  modified_base 15: mod_base = OTHER; note = 2'-O-methyluridine-3'-phosphate
  modified_base 16: mod_base = OTHER; note = 2'-fluoroguanosine-3'-phosphate
  modified_base 17: mod_base = OTHER; note = 2'-O-methyluridine-3'-phosphate
  modified_base 18: mod_base = OTHER; note = 2'-fluorouridine-3'-phosphate
  modified_base 19: mod_base = OTHER; note = 2'-O-methylguanosine-3'-phosphate
  modified_base 20: mod_base = OTHER; note = 2'-fluoroguanosine-3'-phosphate
  modified_base 21: mod_base = OTHER; note = 2'-O-methyladenosine-3'- phosphorothioate
  modified_base 22: mod_base = OTHER; note = 2'-O-methyladenosine-3'- phosphorothioate
  modified_base 23: mod_base = OTHER; note = 2'-O-methyladenosine-3'-phosphate
agggattgctattttgttggaaa

SEQ ID NO: 153 - RNA, 23 nt, synthetic construct
  source 1..23: mol_type = other RNA
  modified_base 1: mod_base = OTHER; note = 2'-O-methyladenosine-3'- phosphorothioate
  modified_base 2: mod_base = OTHER; note = 2'-fluorouridine -3'-phosphorothioate
  modified_base 3: mod_base = OTHER; note = 2'-O-methylcytidine-3'-phosphate
  modified_base 4: mod_base = OTHER; note = 2'-fluoroadenosine-3'-phosphate
  modified_base 5: mod_base = OTHER; note = 2'-O-methylguanosine-3'-phosphate
  modified_base 6: mod_base = OTHER; note = 2'-fluorouridine-3'-phosphate
  modified_base 7: mod_base = OTHER; note = 2'-O-methylguanosine-3'-phosphate
  modified_base 8: mod_base = OTHER; note = 2'-fluorocytidine-3'-phosphate
  modified_base 9: mod_base = OTHER; note = 2'-O-methylcytidine-3'-phosphate
  modified_base 10: mod_base = OTHER; note = 2'-fluorouridine-3'-phosphate
  modified_base 11: mod_base = OTHER; note = 2'-O-methyluridine-3'-phosphate
  modified_base 12: mod_base = OTHER; note = 2'-O-methyluridine-3'-phosphate
  modified_base 13: mod_base = OTHER; note = 2'-O-methylcytidine-3'-phosphate
  modified_base 14: mod_base = OTHER; note = 2'-fluorocytidine-3'-phosphate
  modified_base 15: mod_base = OTHER; note = 2'-O-methylguanosine-3'-phosphate
  modified_base 16: mod_base = OTHER; note = 2'-fluorocytidine-3'-phosphate
  modified_base 17: mod_base = OTHER; note = 2'-O-methyladenosine-3'-phosphate
  modified_base 18: mod_base = OTHER; note = 2'-fluorocytidine-3'-phosphate
  modified_base 19: mod_base = OTHER; note = 2'-O-methyladenosine-3'-phosphate
  modified_base 20: mod_base = OTHER; note = 2'-fluorocytidine-3'-phosphate
  modified_base 21: mod_base = OTHER; note = 2'-O-methylcytidine-3'- phosphorothioate
  modified_base 22: mod_base = OTHER; note = 2'-O-methylcytidine-3'- phosphorothioate
  modified_base 23: mod_base = OTHER; note = 2'-O-methylcytidine-3'-phosphate
atcagtgcctttccgcacacccc

SEQ ID NO: 154 - RNA, 23 nt, synthetic construct
  source 1..23: mol_type = other RNA
  modified_base 1: mod_base = OTHER; note = 2'-O-methyladenosine-3'- phosphorothioate
  modified_base 2: mod_base = OTHER; note = 2'-fluorouridine -3'-phosphorothioate
  modified_base 3: mod_base = OTHER; note = 2'-O-methylguanosine-3'-phosphate
  modified_base 4: mod_base = OTHER; note = 2'-fluoroadenosine-3'-phosphate
  modified_base 5: mod_base = OTHER; note = 2'-O-methyluridine-3'-phosphate
  modified_base 6: mod_base = OTHER; note = 2'-fluoroadenosine-3'-phosphate
  modified_base 7: mod_base = OTHER; note = 2'-O-methyladenosine-3'-phosphate
  modified_base 8: mod_base = OTHER; note = 2'-fluoroadenosine-3'-phosphate
  modified_base 9: mod_base = OTHER; note = 2'-O-methylguanosine-3'-phosphate
  modified_base 10: mod_base = OTHER; note = 2'-fluorouridine-3'-phosphate
  modified_base 11: mod_base = OTHER; note = 2'-O-methyladenosine-3'-phosphate
  modified_base 12: mod_base = OTHER; note = 2'-O-methylcytidine-3'-phosphate
  modified_base 13: mod_base = OTHER; note = 2'-O-methyluridine-3'-phosphate
  modified_base 14: mod_base = OTHER; note = 2'-fluoroguanosine-3'-phosphate
  modified_base 15: mod_base = OTHER; note = 2'-O-methylguanosine-3'-phosphate
  modified_base 16: mod_base = OTHER; note = 2'-fluorouridine-3'-phosphate
  modified_base 17: mod_base = OTHER; note = 2'-O-methyluridine-3'-phosphate
  modified_base 18: mod_base = OTHER; note = 2'-fluorouridine-3'-phosphate
  modified_base 19: mod_base = OTHER; note = 2'-O-methylcytidine-3'-phosphate
  modified_base 20: mod_base = OTHER; note = 2'-fluoroadenosine-3'-phosphate
  modified_base 21: mod_base = OTHER; note = 2'-O-methyladenosine-3'- phosphorothioate
  modified_base 22: mod_base = OTHER; note = 2'-O-methyladenosine-3'- phosphorothioate
  modified_base 23: mod_base = OTHER; note = 2'-O-methyladenosine-3'-phosphate
atgataaagtactggtttcaaaa

SEQ ID NO: 155 - RNA, 23 nt, synthetic construct
  source 1..23: mol_type = other RNA
  modified_base 1: mod_base = OTHER; note = 2'-O-methyluridine-3'-phosphorothioate
  modified_base 2: mod_base = OTHER; note = 2'-fluoroadenosine-3'-phosphorothioate
  modified_base 3: mod_base = OTHER; note = 2'-O-methyluridine-3'-phosphate
  modified_base 4: mod_base = OTHER; note = 2'-fluoroadenosine-3'-phosphate
  modified_base 5: mod_base = OTHER; note = 2'-O-methyluridine-3'-phosphate
  modified_base 6: mod_base = OTHER; note = 2'-fluoroadenosine-3'-phosphate
  modified_base 7: mod_base = OTHER; note = 2'-O-methyluridine-3'-phosphate
  modified_base 8: mod_base = OTHER; note = 2'-fluoroadenosine-3'-phosphate
  modified_base 9: mod_base = OTHER; note = 2'-O-methylguanosine-3'-phosphate
  modified_base 10: mod_base = OTHER; note = 2'-fluoroadenosine-3'-phosphate
  modified_base 11: mod_base = OTHER; note = 2'-O-methylcytidine-3'-phosphate
  modified_base 12: mod_base = OTHER; note = 2'-O-methyluridine-3'-phosphate
  modified_base 13: mod_base = OTHER; note = 2'-O-methyluridine-3'-phosphate
  modified_base 14: mod_base = OTHER; note = 2'-fluorouridine-3'-phosphate
  modified_base 15: mod_base = OTHER; note = 2'-O-methylguanosine-3'-phosphate
  modified_base 16: mod_base = OTHER; note = 2'-fluoroguanosine-3'-phosphate
  modified_base 17: mod_base = OTHER; note = 2'-O-methyladenosine-3'-phosphate
  modified_base 18: mod_base = OTHER; note = 2'-fluoroadenosine-3'-phosphate
  modified_base 19: mod_base = OTHER; note = 2'-O-methylguanosine-3'-phosphate
  modified_base 20: mod_base = OTHER; note = 2'-fluorouridine-3'-phosphate
  modified_base 21: mod_base = OTHER; note = 2'-O-methyladenosine-3'- phosphorothioate
  modified_base 22: mod_base = OTHER; note = 2'-O-methylcytidine-3'- phosphorothioate
  modified_base 23: mod_base = OTHER; note = 2'-O-methyluridine-3'-phosphate
tatatatagactttggaagtact

SEQ ID NO: 156 - RNA, 23 nt, synthetic construct
  source 1..23: mol_type = other RNA
  modified_base 1: mod_base = OTHER; note = 2'-O-methyladenosine-3'- phosphorothioate
  modified_base 2: mod_base = OTHER; note = 2'-fluorouridine -3'-phosphorothioate
  modified_base 3: mod_base = OTHER; note = 2'-O-methyluridine-3'-phosphate
  modified_base 4: mod_base = OTHER; note = 2'-fluorouridine-3'-phosphate
  modified_base 5: mod_base = OTHER; note = 2'-O-methylcytidine-3'-phosphate
  modified_base 6: mod_base = OTHER; note = 2'-fluorouridine-3'-phosphate
  modified_base 7: mod_base = OTHER; note = 2'-O-methyladenosine-3'-phosphate
  modified_base 8: mod_base = OTHER; note = 2'-fluoroadenosine-3'-phosphate
  modified_base 9: mod_base = OTHER; note = 2'-O-methyladenosine-3'-phosphate
  modified_base 10: mod_base = OTHER; note = 2'-fluoroadenosine-3'-phosphate
  modified_base 11: mod_base = OTHER; note = 2'-O-methylguanosine-3'-phosphate
  modified_base 12: mod_base = OTHER; note = 2'-O-methylguanosine-3'-phosphate
  modified_base 13: mod_base = OTHER; note = 2'-O-methyluridine-3'-phosphate
  modified_base 14: mod_base = OTHER; note = 2'-fluorouridine-3'-phosphate
  modified_base 15: mod_base = OTHER; note = 2'-O-methylcytidine-3'-phosphate
  modified_base 16: mod_base = OTHER; note = 2'-fluorocytidine-3'-phosphate
  modified_base 17: mod_base = OTHER; note = 2'-O-methyluridine-3'-phosphate
  modified_base 18: mod_base = OTHER; note = 2'-fluoroadenosine-3'-phosphate
  modified_base 19: mod_base = OTHER; note = 2'-O-methylguanosine-3'-phosphate
  modified_base 20: mod_base = OTHER; note = 2'-fluoroguanosine-3'-phosphate
  modified_base 21: mod_base = OTHER; note = 2'-O-methyladenosine-3'- phosphorothioate
  modified_base 22: mod_base = OTHER; note = 2'-O-methylcytidine-3'- phosphorothioate
  modified_base 23: mod_base = OTHER; note = 2'-O-methyladenosine-3'-phosphate
atttctaaaaggttcctaggaca

SEQ ID NO: 157 - RNA, 23 nt, synthetic construct
  source 1..23: mol_type = other RNA
  modified_base 1: mod_base = OTHER; note = 2'-O-methyluridine-3'-phosphorothioate
  modified_base 2: mod_base = OTHER; note = 2'-fluorouridine -3'-phosphorothioate
  modified_base 3: mod_base = OTHER; note = 2'-O-methylcytidine-3'-phosphate
  modified_base 4: mod_base = OTHER; note = 2'-fluorocytidine-3'-phosphate
  modified_base 5: mod_base = OTHER; note = 2'-O-methyladenosine-3'-phosphate
  modified_base 6: mod_base = OTHER; note = 2'-fluoroadenosine-3'-phosphate
  modified_base 7: mod_base = OTHER; note = 2'-O-methyladenosine-3'-phosphate
  modified_base 8: mod_base = OTHER; note = 2'-fluoroadenosine-3'-phosphate
  modified_base 9: mod_base = OTHER; note = 2'-O-methyluridine-3'-phosphate
  modified_base 10: mod_base = OTHER; note = 2'-fluorouridine-3'-phosphate
  modified_base 11: mod_base = OTHER; note = 2'-O-methyluridine-3'-phosphate
  modified_base 12: mod_base = OTHER; note = 2'-O-methyluridine-3'-phosphate
  modified_base 13: mod_base = OTHER; note = 2'-O-methylcytidine-3'-phosphate
  modified_base 14: mod_base = OTHER; note = 2'-fluorocytidine-3'-phosphate
  modified_base 15: mod_base = OTHER; note = 2'-O-methyluridine-3'-phosphate
  modified_base 16: mod_base = OTHER; note = 2'-fluorocytidine-3'-phosphate
  modified_base 17: mod_base = OTHER; note = 2'-O-methyladenosine-3'-phosphate
  modified_base 18: mod_base = OTHER; note = 2'-fluoroguanosine-3'-phosphate
  modified_base 19: mod_base = OTHER; note = 2'-O-methylguanosine-3'-phosphate
  modified_base 20: mod_base = OTHER; note = 2'-fluoroadenosine-3'-phosphate
  modified_base 21: mod_base = OTHER; note = 2'-O-methylguanosine-3'- phosphorothioate
  modified_base 22: mod_base = OTHER; note = 2'-O-methyladenosine-3'- phosphorothioate
  modified_base 23: mod_base = OTHER; note = 2'-O-methyladenosine-3'-phosphate
ttccaaaattttcctcaggagaa

SEQ ID NO: 158 - RNA, 23 nt, synthetic construct
  source 1..23: mol_type = other RNA
  modified_base 1: mod_base = OTHER; note = 2'-O-methyladenosine-3'- phosphorothioate
  modified_base 2: mod_base = OTHER; note = 2'-fluorouridine -3'-phosphorothioate
  modified_base 3: mod_base = OTHER; note = 2'-O-methyluridine-3'-phosphate
  modified_base 4: mod_base = OTHER; note = 2'-fluorouridine-3'-phosphate
  modified_base 5: mod_base = OTHER; note = 2'-O-methylcytidine-3'-phosphate
  modified_base 6: mod_base = OTHER; note = 2'-fluoroadenosine-3'-phosphate
  modified_base 7: mod_base = OTHER; note = 2'-O-methylguanosine-3'-phosphate
  modified_base 8: mod_base = OTHER; note = 2'-fluorocytidine-3'-phosphate
  modified_base 9: mod_base = OTHER; note = 2'-O-methyladenosine-3'-phosphate
  modified_base 10: mod_base = OTHER; note = 2'-fluoroadenosine-3'-phosphate
  modified_base 11: mod_base = OTHER; note = 2'-O-methylcytidine-3'-phosphate
  modified_base 12: mod_base = OTHER; note = 2'-O-methyladenosine-3'-phosphate
  modified_base 13: mod_base = OTHER; note = 2'-O-methyluridine-3'-phosphate
  modified_base 14: mod_base = OTHER; note = 2'-fluorouridine-3'-phosphate
  modified_base 15: mod_base = OTHER; note = 2'-O-methylcytidine-3'-phosphate
  modified_base 16: mod_base = OTHER; note = 2'-fluorocytidine-3'-phosphate
  modified_base 17: mod_base = OTHER; note = 2'-O-methylguanosine-3'-phosphate
  modified_base 18: mod_base = OTHER; note = 2'-fluoroguanosine-3'-phosphate
  modified_base 19: mod_base = OTHER; note = 2'-O-methyladenosine-3'-phosphate
  modified_base 20: mod_base = OTHER; note = 2'-fluoroguanosine-3'-phosphate
  modified_base 21: mod_base = OTHER; note = 2'-O-methylcytidine-3'- phosphorothioate
  modified_base 22: mod_base = OTHER; note = 2'-O-methyladenosine-3'- phosphorothioate
  modified_base 23: mod_base = OTHER; note = 2'-O-methyluridine-3'-phosphate
atttcagcaacattccggagcat

SEQ ID NO: 159 - RNA, 23 nt, synthetic construct
  source 1..23: mol_type = other RNA
  modified_base 1: mod_base = OTHER; note = 2'-O-methyluridine-3'-phosphorothioate
  modified_base 2: mod_base = OTHER; note = 2'-fluoroadenosine-3'-phosphorothioate
  modified_base 3: mod_base = OTHER; note = 2'-O-methyluridine-3'-phosphate
  modified_base 4: mod_base = OTHER; note = 2'-fluorouridine-3'-phosphate
  modified_base 5: mod_base = OTHER; note = 2'-O-methylguanosine-3'-phosphate
  modified_base 6: mod_base = OTHER; note = 2'-fluoroguanosine-3'-phosphate
  modified_base 7: mod_base = OTHER; note = 2'-O-methyluridine-3'-phosphate
  modified_base 8: mod_base = OTHER; note = 2'-fluorocytidine-3'-phosphate
  modified_base 9: mod_base = OTHER; note = 2'-O-methyluridine-3'-phosphate
  modified_base 10: mod_base = OTHER; note = 2'-fluorocytidine-3'-phosphate
  modified_base 11: mod_base = OTHER; note = 2'-O-methylcytidine-3'-phosphate
  modified_base 12: mod_base = OTHER; note = 2'-O-methylcytidine-3'-phosphate
  modified_base 13: mod_base = OTHER; note = 2'-O-methylcytidine-3'-phosphate
  modified_base 14: mod_base = OTHER; note = 2'-fluoroadenosine-3'-phosphate
  modified_base 15: mod_base = OTHER; note = 2'-O-methylcytidine-3'-phosphate
  modified_base 16: mod_base = OTHER; note = 2'-fluoroadenosine-3'-phosphate
  modified_base 17: mod_base = OTHER; note = 2'-O-methyladenosine-3'-phosphate
  modified_base 18: mod_base = OTHER; note = 2'-fluoroadenosine-3'-phosphate
  modified_base 19: mod_base = OTHER; note = 2'-O-methylcytidine-3'-phosphate
  modified_base 20: mod_base = OTHER; note = 2'-fluoroadenosine-3'-phosphate
  modified_base 21: mod_base = OTHER; note = 2'-O-methylcytidine-3'- phosphorothioate
  modified_base 22: mod_base = OTHER; note = 2'-O-methyladenosine-3'- phosphorothioate
  modified_base 23: mod_base = OTHER; note = 2'-O-methylguanosine-3'-phosphate
tattggtctccccacaaacacag

SEQ ID NO: 160 - RNA, 21 nt, synthetic construct
  source 1..21: mol_type = other RNA
  modified_base 1: mod_base = OTHER; note = 2'-fluoroguanosine-3'-phosphorothioate
  modified_base 2: mod_base = OTHER; note = 2'-O-methyladenosine-3'- phosphorothioate
  modified_base 3: mod_base = OTHER; note = 2'-fluoroadenosine-3'-phosphate
  modified_base 4: mod_base = OTHER; note = 2'-O-methyluridine-3'-phosphate
  modified_base 5: mod_base = OTHER; note = 2'-fluoroguanosine-3'-phosphate
  modified_base 6: mod_base = OTHER; note = 2'-O-methyluridine-3'-phosphate
  modified_base 7: mod_base = OTHER; note = 2'-fluoroguanosine-3'-phosphate
  modified_base 8: mod_base = OTHER; note = 2'-O-methyladenosine-3'-phosphate
  modified_base 9: mod_base = OTHER; note = 2'-fluoroadenosine-3'-phosphate
  modified_base 10: mod_base = OTHER; note = 2'-fluoroadenosine-3'-phosphate
  modified_base 11: mod_base = OTHER; note = 2'-fluoroguanosine-3'-phosphate
  modified_base 12: mod_base = OTHER; note = 2'-O-methyluridine-3'-phosphate
  modified_base 13: mod_base = OTHER; note = 2'-fluorocytidine-3'-phosphate
  modified_base 14: mod_base = OTHER; note = 2'-O-methyladenosine-3'-phosphate
  modified_base 15: mod_base = OTHER; note = 2'-fluorouridine-3'-phosphate
  modified_base 16: mod_base = OTHER; note = 2'-O-methylcytidine-3'-phosphate
  modified_base 17: mod_base = OTHER; note = 2'-fluoroguanosine-3'-phosphate
  modified_base 18: mod_base = OTHER; note = 2'-O-methyladenosine-3'-phosphate
  modified_base 19: mod_base = OTHER; note = 2'-fluorocytidine-3'-phosphate
  modified_base 20: mod_base = OTHER; note = 2'-O-methyladenosine-3'-phosphate
  modified_base 21: mod_base = OTHER; note 2'-fluoroadenosine-3'-phosphate-N-[tris(GalNAc-alkyl)-amido decanoyl)]-4-hydroxyprolinol (Hyp-(GalNAc-alkyl)3)
gaatgtgaaagtcatcgacaa

SEQ ID NO: 161 - DNA, 22 bp, synthetic construct
  source 1..22: mol_type = other DNA
  modified_base 1: mod_base = OTHER; note = inverted abasic DNA (2-hydroxymethyl-tetrahydrofurane-5-phosphate)
  modified_base 2: mod_base = OTHER; note = 2'-O-methylguanosine-3'- phosphorothioate
  modified_base 3: mod_base = OTHER; note = 2'-O-methyladenosine-3'- phosphorothioate
  modified_base 4: mod_base = OTHER; note = 2'-fluoroadenosine-3'-phosphate
  modified_base 5: mod_base = OTHER; note = 2'-O-methyluridine-3'-phosphate
  modified_base 6: mod_base = OTHER; note = 2'-fluoroguanosine-3'-phosphate
  modified_base 7: mod_base = OTHER; note = 2'-O-methyluridine-3'-phosphate
  modified_base 8: mod_base = OTHER; note = 2'-fluoroguanosine-3'-phosphate
  modified_base 9: mod_base = OTHER; note = 2'-O-methyladenosine-3'-phosphate
  modified_base 10: mod_base = OTHER; note = 2'-fluoroadenosine-3'-phosphate
  modified_base 11: mod_base = OTHER; note = 2'-fluoroadenosine-3'-phosphate
  modified_base 12: mod_base = OTHER; note = 2'-fluoroguanosine-3'-phosphate
  modified_base 13: mod_base = OTHER; note = 2'-O-methyluridine-3'-phosphate
  modified_base 14: mod_base = OTHER; note = 2'-fluorocytidine-3'-phosphate
  modified_base 15: mod_base = OTHER; note = 2'-O-methyladenosine-3'-phosphate
  modified_base 16: mod_base = OTHER; note = 2'-fluorouridine-3'-phosphate
  modified_base 17: mod_base = OTHER; note = 2'-O-methylcytidine-3'-phosphate
  modified_base 18: mod_base = OTHER; note = 2'-fluoroguanosine-3'-phosphate
  modified_base 19: mod_base = OTHER; note = 2'-O-methyladenosine-3'-phosphate
  modified_base 20: mod_base = OTHER; note = 2'-fluorocytidine-3'-phosphate
  modified_base 21: mod_base = OTHER; note = 2'-O-methyladenosine-3'-phosphate
  modified_base 22: mod_base = OTHER; note 2'-fluoroadenosine-3'-phosphate-N-[tris(GalNAc-alkyl)-amido decanoyl)]-4-hydroxyprolinol (Hyp-(GalNAc-alkyl)3)
  misc_feature 1: note = DNA
  misc_feature 2..22: note = RNA
ngaatgtgaaagtcatcgacaa

SEQ ID NO: 162 - RNA, 21 nt, synthetic construct
  source 1..21: mol_type = other RNA
  modified_base 1: mod_base = OTHER; note = 2'-O-methylguanosine-3'- phosphorothioate
  modified_base 2: mod_base = OTHER; note = 2'-O-methyladenosine-3'- phosphorothioate
  modified_base 3: mod_base = OTHER; note = 2'-O-methyladenosine-3'-phosphate
  modified_base 4: mod_base = OTHER; note = 2'-O-methyluridine-3'-phosphate
  modified_base 5: mod_base = OTHER; note = 2'-O-methylguanosine-3'-phosphate
  modified_base 6: mod_base = OTHER; note = 2'-O-methyluridine-3'-phosphate
  modified_base 7: mod_base = OTHER; note = 2'-fluoroguanosine-3'-phosphate
  modified_base 8: mod_base = OTHER; note = 2'-O-methyladenosine-3'-phosphate
  modified_base 9: mod_base = OTHER; note = 2'-fluoroadenosine-3'-phosphate
  modified_base 10: mod_base = OTHER; note = 2'-fluoroadenosine-3'-phosphate
  modified_base 11: mod_base = OTHER; note = 2'-fluoroguanosine-3'-phosphate
  modified_base 12: mod_base = OTHER; note = 2'-O-methyluridine-3'-phosphate
  modified_base 13: mod_base = OTHER; note = 2'-O-methylcytidine-3'-phosphate
  modified_base 14: mod_base = OTHER; note = 2'-O-methyladenosine-3'-phosphate
  modified_base 15: mod_base = OTHER; note = 2'-O-methyluridine-3'-phosphate
  modified_base 16: mod_base = OTHER; note = 2'-fluorocytidine-3'-phosphate
  modified_base 17: mod_base = OTHER; note = 2'-O-methylguanosine-3'-phosphate
  modified_base 18: mod_base = OTHER; note = 2'-O-methyladenosine-3'-phosphate
  modified_base 19: mod_base = OTHER; note = 2'-O-methylcytidine-3'-phosphate
  modified_base 20: mod_base = OTHER; note = 2'-O-methyladenosine-3'-phosphate
  modified_base 21: mod_base = OTHER; note 2'-O-methyladenosine-3'-phosphate-N-[tris(GalNAc-alkyl)-ami dodecanoyl)]-4-hydroxyprolinol (Hyp-(GalNAc-alkyl)3)
gaatgtgaaagtcatcgacaa

SEQ ID NO: 163 - RNA, 21 nt, synthetic construct
  source 1..21: mol_type = other RNA
  modified_base 1: mod_base = OTHER; note = 2'-O-methylguanosine-3'- phosphorothioate
  modified_base 2: mod_base = OTHER; note = 2'-O-methyladenosine-3'- phosphorothioate
  modified_base 3: mod_base = OTHER; note = 2'-O-methyladenosine-3'-phosphate
  modified_base 4: mod_base = OTHER; note = 2'-O-methyluridine-3'-phosphate
  modified_base 5: mod_base = OTHER; note = 2'-O-methylguanosine-3'-phosphate
  modified_base 6: mod_base = OTHER; note = 2'-O-methyluridine-3'-phosphate
  modified_base 7: mod_base = OTHER; note = 2'-fluoroguanosine-3'-phosphate
  modified_base 8: mod_base = OTHER; note = 2'-O-methyladenosine-3'-phosphate
  modified_base 9: mod_base = OTHER; note = 2'-fluoroadenosine-3'-phosphate
  modified_base 10: mod_base = OTHER; note = 2'-fluoroadenosine-3'-phosphate
  modified_base 11: mod_base = OTHER; note = 2'-fluoroguanosine-3'-phosphate
  modified_base 12: mod_base = OTHER; note = 2'-O-methyluridine-3'-phosphate
  modified_base 13: mod_base = OTHER; note = 2'-O-methylcytidine-3'-phosphate
  modified_base 14: mod_base = OTHER; note = 2'-O-methyladenosine-3'-phosphate
  modified_base 15: mod_base = OTHER; note = 2'-O-methyluridine-3'-phosphate
  modified_base 16: mod_base = OTHER; note = 2'-O-methylcytidine-3'-phosphate
  modified_base 17: mod_base = OTHER; note = 2'-O-methylguanosine-3'-phosphate
  modified_base 18: mod_base = OTHER; note = 2'-O-methyladenosine-3'-phosphate
  modified_base 19: mod_base = OTHER; note = 2'-O-methylcytidine-3'-phosphate
  modified_base 20: mod_base = OTHER; note = 2'-O-methyladenosine-3'-phosphate
  modified_base 21: mod_base = OTHER; note 2'-O-methyladenosine-3'-phosphate-N-[tris(GalNAc-alkyl)-ami dodecanoyl)]-4-hydroxyprolinol (Hyp-(GalNAc-alkyl)3)
gaatgtgaaagtcatcgacaa

SEQ ID NO: 164 - RNA, 21 nt, synthetic construct
  source 1..21: mol_type = other RNA
  modified_base 1: mod_base = OTHER; note = 2'-O-methylguanosine-3'- phosphorothioate
  modified_base 2: mod_base = OTHER; note = 2'-O-methyladenosine-3'- phosphorothioate
  modified_base 3: mod_base = OTHER; note = 2'-O-methyladenosine-3'-phosphate
  modified_base 4: mod_base = OTHER; note = 2'-O-methyluridine-3'-phosphate
  modified_base 5: mod_base = OTHER; note = 2'-O-methylguanosine-3'-phosphate
  modified_base 6: mod_base = OTHER; note = 2'-O-methyluridine-3'-phosphate
  modified_base 7: mod_base = OTHER; note = 2'-fluoroguanosine-3'-phosphate
  modified_base 8: mod_base = OTHER; note = 2'-O-methyladenosine-3'-phosphate
  modified_base 9: mod_base = OTHER; note = 2'-O-methyladenosine-3'-phosphate
  modified_base 10: mod_base = OTHER; note = 2'-fluoroadenosine-3'-phosphate
  modified_base 11: mod_base = OTHER; note = 2'-fluoroguanosine-3'-phosphate
  modified_base 12: mod_base = OTHER; note = 2'-O-methyluridine-3'-phosphate
  modified_base 13: mod_base = OTHER; note = 2'-O-methylcytidine-3'-phosphate
  modified_base 14: mod_base = OTHER; note = 2'-O-methyladenosine-3'-phosphate
  modified_base 15: mod_base = OTHER; note = 2'-O-methyluridine-3'-phosphate
  modified_base 16: mod_base = OTHER; note = 2'-O-methylcytidine-3'-phosphate
  modified_base 17: mod_base = OTHER; note = 2'-O-methylguanosine-3'-phosphate
  modified_base 18: mod_base = OTHER; note = 2'-O-methyladenosine-3'-phosphate
  modified_base 19: mod_base = OTHER; note = 2'-O-methylcytidine-3'-phosphate
  modified_base 20: mod_base = OTHER; note = 2'-O-methyladenosine-3'-phosphate
  modified_base 21: mod_base = OTHER; note 2'-O-methyladenosine-3'-phosphate-N-[tris(GalNAc-alkyl)-ami dodecanoyl)]-4-hydroxyprolinol (Hyp-(GalNAc-alkyl)3)
gaatgtgaaagtcatcgacaa

SEQ ID NO: 165 - RNA, 21 nt, synthetic construct
  source 1..21: mol_type = other RNA
  modified_base 1: mod_base = OTHER; note = 2'-O-methylguanosine-3'- phosphorothioate
  modified_base 2: mod_base = OTHER; note = 2'-O-methyladenosine-3'- phosphorothioate
  modified_base 3: mod_base = OTHER; note = 2'-O-methyladenosine-3'-phosphate
  modified_base 4: mod_base = OTHER; note = 2'-O-methyluridine-3'-phosphate
  modified_base 5: mod_base = OTHER; note = 2'-O-methylguanosine-3'-phosphate
  modified_base 6: mod_base = OTHER; note = 2'-O-methyluridine-3'-phosphate
  modified_base 7: mod_base = OTHER; note = 2'-fluoroguanosine-3'-phosphate
  modified_base 8: mod_base = OTHER; note = 2'-O-methyladenosine-3'-phosphate
  modified_base 9: mod_base = OTHER; note = 2'-O-methyladenosine-3'-phosphate
  modified_base 10: mod_base = OTHER; note = 2'-O-methyladenosine-3'-phosphate
  modified_base 11: mod_base = OTHER; note = 2'-fluoroguanosine-3'-phosphate
  modified_base 12: mod_base = OTHER; note = 2'-O-methyluridine-3'-phosphate
  modified_base 13: mod_base = OTHER; note = 2'-O-methylcytidine-3'-phosphate
  modified_base 14: mod_base = OTHER; note = 2'-O-methyladenosine-3'-phosphate
  modified_base 15: mod_base = OTHER; note = 2'-O-methyluridine-3'-phosphate
  modified_base 16: mod_base = OTHER; note = 2'-O-methylcytidine-3'-phosphate
  modified_base 17: mod_base = OTHER; note = 2'-fluoroguanosine-3'-phosphate
  modified_base 18: mod_base = OTHER; note = 2'-O-methyladenosine-3'-phosphate
  modified_base 19: mod_base = OTHER; note = 2'-O-methylcytidine-3'-phosphate
  modified_base 20: mod_base = OTHER; note = 2'-O-methyladenosine-3'-phosphate
  modified_base 21: mod_base = OTHER; note 2'-O-methyladenosine-3'-phosphate-N-[tris(GalNAc-alkyl)-ami dodecanoyl)]-4-hydroxyprolinol (Hyp-(GalNAc-alkyl)3)
gaatgtgaaagtcatcgacaa

SEQ ID NO: 166 - RNA, 21 nt, synthetic construct
  source 1..21: mol_type = other RNA
  modified_base 1: mod_base = OTHER; note = 2'-O-methylguanosine-3'- phosphorothioate
  modified_base 2: mod_base = OTHER; note = 2'-O-methyladenosine-3'- phosphorothioate
  modified_base 3: mod_base = OTHER; note = 2'-O-methyladenosine-3'-phosphate
  modified_base 4: mod_base = OTHER; note = 2'-O-methyluridine-3'-phosphate
  modified_base 5: mod_base = OTHER; note = 2'-O-methylguanosine-3'-phosphate
  modified_base 6: mod_base = OTHER; note = 2'-O-methyluridine-3'-phosphate
  modified_base 7: mod_base = OTHER; note = 2'-O-methylguanosine-3'-phosphate
  modified_base 8: mod_base = OTHER; note = 2'-O-methyladenosine-3'-phosphate
  modified_base 9: mod_base = OTHER; note = 2'-O-methyladenosine-3'-phosphate
  modified_base 10: mod_base = OTHER; note = 2'-O-methyladenosine-3'-phosphate
  modified_base 11: mod_base = OTHER; note = 2'-fluoroguanosine-3'-phosphate
  modified_base 12: mod_base = OTHER; note = 2'-O-methyluridine-3'-phosphate
  modified_base 13: mod_base = OTHER; note = 2'-O-methylcytidine-3'-phosphate
  modified_base 14: mod_base = OTHER; note = 2'-O-methyladenosine-3'-phosphate
  modified_base 15: mod_base = OTHER; note = 2'-O-methyluridine-3'-phosphate
  modified_base 16: mod_base = OTHER; note = 2'-O-methylcytidine-3'-phosphate
  modified_base 17: mod_base = OTHER; note = 2'-fluoroguanosine-3'-phosphate
  modified_base 18: mod_base = OTHER; note = 2'-O-methyladenosine-3'-phosphate
  modified_base 19: mod_base = OTHER; note = 2'-O-methylcytidine-3'-phosphate
  modified_base 20: mod_base = OTHER; note = 2'-O-methyladenosine-3'-phosphate
  modified_base 21: mod_base = OTHER; note 2'-O-methyladenosine-3'-phosphate-N-[tris(GalNAc-alkyl)-ami dodecanoyl)]-4-hydroxyprolinol (Hyp-(GalNAc-alkyl)3)
gaatgtgaaagtcatcgacaa

SEQ ID NO: 167 - RNA, 21 nt, synthetic construct
  source 1..21: mol_type = other RNA
  modified_base 1: mod_base = OTHER; note = 2'-O-methylguanosine-3'- phosphorothioate
  modified_base 2: mod_base = OTHER; note = 2'-O-methyladenosine-3'- phosphorothioate
  modified_base 3: mod_base = OTHER; note = 2'-O-methyladenosine-3'-phosphate
  modified_base 4: mod_base = OTHER; note = 2'-O-methyluridine-3'-phosphate
  modified_base 5: mod_base = OTHER; note = 2'-O-methylguanosine-3'-phosphate
  modified_base 6: mod_base = OTHER; note = 2'-O-methyluridine-3'-phosphate
  modified_base 7: mod_base = OTHER; note = 2'-fluoroguanosine-3'-phosphate
  modified_base 8: mod_base = OTHER; note = 2'-O-methyladenosine-3'-phosphate
  modified_base 9: mod_base = OTHER; note = 2'-O-methyladenosine-3'-phosphate
  modified_base 10: mod_base = OTHER; note = 2'-O-methyladenosine-3'-phosphate
  modified_base 11: mod_base = OTHER; note = 2'-fluoroguanosine-3'-phosphate
  modified_base 12: mod_base = OTHER; note = 2'-O-methyluridine-3'-phosphate
  modified_base 13: mod_base = OTHER; note = 2'-O-methylcytidine-3'-phosphate
  modified_base 14: mod_base = OTHER; note = 2'-O-methyladenosine-3'-phosphate
  modified_base 15: mod_base = OTHER; note = 2'-O-methyluridine-3'-phosphate
  modified_base 16: mod_base = OTHER; note = 2'-O-methylcytidine-3'-phosphate
  modified_base 17: mod_base = OTHER; note = 2'-O-methylguanosine-3'-phosphate
  modified_base 18: mod_base = OTHER; note = 2'-O-methyladenosine-3'-phosphate
  modified_base 19: mod_base = OTHER; note = 2'-O-methylcytidine-3'-phosphate
  modified_base 20: mod_base = OTHER; note = 2'-O-methyladenosine-3'-phosphate
  modified_base 21: mod_base = OTHER; note 2'-O-methyladenosine-3'-phosphate-N-[tris(GalNAc-alkyl)-ami dodecanoyl)]-4-hydroxyprolinol (Hyp-(GalNAc-alkyl)3)
gaatgtgaaagtcatcgacaa

SEQ ID NO: 168 - RNA, 19 nt, synthetic construct
  source 1..19: mol_type = other RNA
  modified_base 1: mod_base = OTHER; note = 2'-fluoroadenosine-3'-phosphorothioate
  modified_base 2: mod_base = OTHER; note = 2'-O-methyluridine-3'-phosphorothioate
  modified_base 3: mod_base = OTHER; note = 2'-fluoroguanosine-3'-phosphate
  modified_base 4: mod_base = OTHER; note = 2'-O-methyluridine-3'-phosphate
  modified_base 5: mod_base = OTHER; note = 2'-fluoroguanosine-3'-phosphate
  modified_base 6: mod_base = OTHER; note = 2'-O-methyladenosine-3'-phosphate
  modified_base 7: mod_base = OTHER; note = 2'-fluoroadenosine-3'-phosphate
  modified_base 8: mod_base = OTHER; note = 2'-fluoroadenosine-3'-phosphate
  modified_base 9: mod_base = OTHER; note = 2'-fluoroguanosine-3'-phosphate
  modified_base 10: mod_base = OTHER; note = 2'-O-methyluridine-3'-phosphate
  modified_base 11: mod_base = OTHER; note = 2'-fluorocytidine-3'-phosphate
  modified_base 12: mod_base = OTHER; note = 2'-O-methyladenosine-3'-phosphate
  modified_base 13: mod_base = OTHER; note = 2'-fluorouridine-3'-phosphate
  modified_base 14: mod_base = OTHER; note = 2'-O-methylcytidine-3'-phosphate
  modified_base 15: mod_base = OTHER; note = 2'-fluoroguanosine-3'-phosphate
  modified_base 16: mod_base = OTHER; note = 2'-O-methyladenosine-3'-phosphate
  modified_base 17: mod_base = OTHER; note = 2'-fluorocytidine-3'-phosphate
  modified_base 18: mod_base = OTHER; note = 2'-O-methyladenosine-3'-phosphate
  modified_base 19: mod_base = OTHER; note 2'-fluoroadenosine-3'-phosphate-N-[tris(GalNAc-alkyl)-amido decanoyl)]-4-hydroxyprolinol (Hyp-(GalNAc-alkyl)3)
atgtgaaagtcatcgacaa

SEQ ID NO: 169 - RNA, 19 nt, synthetic construct
  source 1..19: mol_type = other RNA
  modified_base 1: mod_base = OTHER; note = 2'-O-methyladenosine-3'- phosphorothioate
  modified_base 2: mod_base = OTHER; note = 2'-O-methyluridine-3'-phosphorothioate
  modified_base 3: mod_base = OTHER; note = 2'-O-methylguanosine-3'-phosphate
  modified_base 4: mod_base = OTHER; note = 2'-O-methyluridine-3'-phosphate
  modified_base 5: mod_base = OTHER; note = 2'-fluoroguanosine-3'-phosphate
  modified_base 6: mod_base = OTHER; note = 2'-O-methyladenosine-3'-phosphate
  modified_base 7: mod_base = OTHER; note = 2'-fluoroadenosine-3'-phosphate
  modified_base 8: mod_base = OTHER; note = 2'-fluoroadenosine-3'-phosphate
  modified_base 9: mod_base = OTHER; note = 2'-fluoroguanosine-3'-phosphate
  modified_base 10: mod_base = OTHER; note = 2'-O-methyluridine-3'-phosphate
  modified_base 11: mod_base = OTHER; note = 2'-O-methylcytidine-3'-phosphate
  modified_base 12: mod_base = OTHER; note = 2'-O-methyladenosine-3'-phosphate
  modified_base 13: mod_base = OTHER; note = 2'-O-methyluridine-3'-phosphate
  modified_base 14: mod_base = OTHER; note = 2'-O-methylcytidine-3'-phosphate
  modified_base 15: mod_base = OTHER; note = 2'-O-methylguanosine-3'-phosphate
  modified_base 16: mod_base = OTHER; note = 2'-O-methyladenosine-3'-phosphate
  modified_base 17: mod_base = OTHER; note = 2'-O-methylcytidine-3'-phosphate
  modified_base 18: mod_base = OTHER; note = 2'-O-methyladenosine-3'-phosphate
  modified_base 19: mod_base = OTHER; note 2'-O-methyladenosine-3'-phosphate-N-[tris(GalNAc-alkyl)-ami dodecanoyl)]-4-hydroxyprolinol (Hyp-(GalNAc-alkyl)3)
atgtgaaagtcatcgacaa

SEQ ID NO: 170 - RNA, 21 nt, synthetic construct
  source 1..21: mol_type = other RNA
  modified_base 1: mod_base = OTHER; note = 2'-fluoroguanosine-3'-phosphorothioate
  modified_base 2: mod_base = OTHER; note = 2'-O-methyladenosine-3'- phosphorothioate
  modified_base 3: mod_base = OTHER; note = 2'-fluoroadenosine-3'-phosphate
  modified_base 4: mod_base = OTHER; note = 2'-O-methyluridine-3'-phosphate
  modified_base 5: mod_base = OTHER; note = 2'-fluoroguanosine-3'-phosphate
  modified_base 6: mod_base = OTHER; note = 2'-O-methyluridine-3'-phosphate
  modified_base 7: mod_base = OTHER; note = 2'-fluoroguanosine-3'-phosphate
  modified_base 8: mod_base = OTHER; note = 2'-O-methyladenosine-3'-phosphate
  modified_base 9: mod_base = OTHER; note = 2'-fluoroadenosine-3'-phosphate
  modified_base 10: mod_base = OTHER; note = 2'-fluoroadenosine-3'-phosphate
  modified_base 11: mod_base = OTHER; note = 2'-fluoroguanosine-3'-phosphate
  modified_base 12: mod_base = OTHER; note = 2'-O-methyluridine-3'-phosphate
  modified_base 13: mod_base = OTHER; note = 2'-fluorocytidine-3'-phosphate
  modified_base 14: mod_base = OTHER; note = 2'-O-methyladenosine-3'-phosphate
  modified_base 15: mod_base = OTHER; note = 2'-fluorouridine-3'-phosphate
  modified_base 16: mod_base = OTHER; note = 2'-O-methylcytidine-3'-phosphate
  modified_base 17: mod_base = OTHER; note = 2'-fluoroguanosine-3'-phosphate
  modified_base 18: mod_base = OTHER; note = 2'-O-methyladenosine-3'-phosphate
  modified_base 19: mod_base = OTHER; note = 2'-fluorocytidine-3'-phosphate
  modified_base 20: mod_base = OTHER; note = 2'-O-methyladenosine-3'-phosphate
  modified_base 21: mod_base = OTHER; note 2'-fluoroadenosine-3'-phosphate-N-[tris(GalNAc-alkyl)-amido decanoyl)]-4-hydroxyprolinol (Hyp-(GalNAc-alkyl)3)
gaatgtgaaagtcatcgacaa

SEQ ID NO: 171 - RNA, 21 nt, synthetic construct
  source 1..21: mol_type = other RNA
  modified_base 1: mod_base = OTHER; note = 2'-fluoroguanosine-3'-phosphorothioate
  modified_base 2: mod_base = OTHER; note = 2'-O-methyladenosine-3'- phosphorothioate
  modified_base 3: mod_base = OTHER; note = 2'-fluoroadenosine-3'-phosphate
  modified_base 4: mod_base = OTHER; note = 2'-O-methyluridine-3'-phosphate
  modified_base 5: mod_base = OTHER; note = 2'-fluoroguanosine-3'-phosphate
  modified_base 6: mod_base = OTHER; note = 2'-O-methyluridine-3'-phosphate
  modified_base 7: mod_base = OTHER; note = 2'-fluoroguanosine-3'-phosphate
  modified_base 8: mod_base = OTHER; note = 2'-O-methyladenosine-3'-phosphate
  modified_base 9: mod_base = OTHER; note = 2'-fluoroadenosine-3'-phosphate
  modified_base 10: mod_base = OTHER; note = 2'-fluoroadenosine-3'-phosphate
  modified_base 11: mod_base = OTHER; note = 2'-fluoroguanosine-3'-phosphate
  modified_base 12: mod_base = OTHER; note = 2'-O-methyluridine-3'-phosphate
  modified_base 13: mod_base = OTHER; note = 2'-fluorocytidine-3'-phosphate
  modified_base 14: mod_base = OTHER; note = 2'-O-methyladenosine-3'-phosphate
  modified_base 15: mod_base = OTHER; note = 2'-fluorouridine-3'-phosphate
  modified_base 16: mod_base = OTHER; note = 2'-O-methylcytidine-3'-phosphate
  modified_base 17: mod_base = OTHER; note = 2'-fluoroguanosine-3'-phosphate
  modified_base 18: mod_base = OTHER; note = 2'-O-methyladenosine-3'-phosphate
  modified_base 19: mod_base = OTHER; note = 2'-fluorocytidine-3'-phosphate
  modified_base 20: mod_base = OTHER; note = 2'-O-methyladenosine-3'-phosphate
  modified_base 21: mod_base = OTHER; note 2'-fluoroadenosine-3'-phosphate-N-[tris(GalNAc-alkyl)-amido decanoyl)]-4-hydroxyprolinol (Hyp-(GalNAc-alkyl)3)
gaatgtgaaagtcatcgacaa

SEQ ID NO: 172 - RNA, 21 nt, synthetic construct
  source 1..21: mol_type = other RNA
  modified_base 1: mod_base = OTHER; note = 2'-fluoroguanosine-3'-phosphorothioate
  modified_base 2: mod_base = OTHER; note = 2'-O-methyladenosine-3'- phosphorothioate
  modified_base 3: mod_base = OTHER; note = 2'-fluoroadenosine-3'-phosphate
  modified_base 4: mod_base = OTHER; note = 2'-O-methyluridine-3'-phosphate
  modified_base 5: mod_base = OTHER; note = 2'-fluoroguanosine-3'-phosphate
  modified_base 6: mod_base = OTHER; note = 2'-O-methyluridine-3'-phosphate
  modified_base 7: mod_base = OTHER; note = 2'-fluoroguanosine-3'-phosphate
  modified_base 8: mod_base = OTHER; note = 2'-O-methyladenosine-3'-phosphate
  modified_base 9: mod_base = OTHER; note = 2'-fluoroadenosine-3'-phosphate
  modified_base 10: mod_base = OTHER; note = 2'-fluoroadenosine-3'-phosphate
  modified_base 11: mod_base = OTHER; note = 2'-fluoroguanosine-3'-phosphate
  modified_base 12: mod_base = OTHER; note = 2'-O-methyluridine-3'-phosphate
  modified_base 13: mod_base = OTHER; note = 2'-fluorocytidine-3'-phosphate
  modified_base 14: mod_base = OTHER; note = 2'-O-methyladenosine-3'-phosphate
  modified_base 15: mod_base = OTHER; note = 2'-fluorouridine-3'-phosphate
  modified_base 16: mod_base = OTHER; note = 2'-O-methylcytidine-3'-phosphate
  modified_base 17: mod_base = OTHER; note = 2'-fluoroguanosine-3'-phosphate
  modified_base 18: mod_base = OTHER; note = 2'-O-methyladenosine-3'-phosphate
  modified_base 19: mod_base = OTHER; note = 2'-fluorocytidine-3'-phosphate
  modified_base 20: mod_base = OTHER; note = 2'-O-methyladenosine-3'-phosphate
  modified_base 21: mod_base = OTHER; note 2'-fluoroadenosine-3'-phosphate-N-[tris(GalNAc-alkyl)-amido decanoyl)]-4-hydroxyprolinol (Hyp-(GalNAc-alkyl)3)
gaatgtgaaagtcatcgacaa

SEQ ID NO: 173 - RNA, 21 nt, synthetic construct
  source 1..21: mol_type = other RNA
  modified_base 1: mod_base = OTHER; note = 2'-fluoroguanosine-3'-phosphorothioate
  modified_base 2: mod_base = OTHER; note = 2'-O-methyladenosine-3'- phosphorothioate
  modified_base 3: mod_base = OTHER; note = 2'-fluoroadenosine-3'-phosphate
  modified_base 4: mod_base = OTHER; note = 2'-O-methyluridine-3'-phosphate
  modified_base 5: mod_base = OTHER; note = 2'-fluoroguanosine-3'-phosphate
  modified_base 6: mod_base = OTHER; note = 2'-O-methyluridine-3'-phosphate
  modified_base 7: mod_base = OTHER; note = 2'-fluoroguanosine-3'-phosphate
  modified_base 8: mod_base = OTHER; note = 2'-O-methyladenosine-3'-phosphate
  modified_base 9: mod_base = OTHER; note = 2'-fluoroadenosine-3'-phosphate
  modified_base 10: mod_base = OTHER; note = 2'-fluoroadenosine-3'-phosphate
  modified_base 11: mod_base = OTHER; note = 2'-fluoroguanosine-3'-phosphate
  modified_base 12: mod_base = OTHER; note = 2'-O-methyluridine-3'-phosphate
  modified_base 13: mod_base = OTHER; note = 2'-fluorocytidine-3'-phosphate
  modified_base 14: mod_base = OTHER; note = 2'-O-methyladenosine-3'-phosphate
  modified_base 15: mod_base = OTHER; note = 2'-fluorouridine-3'-phosphate
  modified_base 16: mod_base = OTHER; note = 2'-O-methylcytidine-3'-phosphate
  modified_base 17: mod_base = OTHER; note = 2'-fluoroguanosine-3'-phosphate
  modified_base 18: mod_base = OTHER; note = 2'-O-methyladenosine-3'-phosphate
  modified_base 19: mod_base = OTHER; note = 2'-fluorocytidine-3'-phosphate
  modified_base 20: mod_base = OTHER; note = 2'-O-methyladenosine-3'-phosphate
  modified_base 21: mod_base = OTHER; note 2'-fluoroadenosine-3'-phosphate-N-[tris(GalNAc-alkyl)-amido decanoyl)]-4-hydroxyprolinol (Hyp-(GalNAc-alkyl)3)
gaatgtgaaagtcatcgacaa

SEQ ID NO: 174 - RNA, 21 nt, synthetic construct
  source 1..21: mol_type = other RNA
  modified_base 1: mod_base = OTHER; note = 2'-fluoroguanosine-3'-phosphorothioate
  modified_base 2: mod_base = OTHER; note = 2'-O-methyladenosine-3'- phosphorothioate
  modified_base 3: mod_base = OTHER; note = 2'-fluoroadenosine-3'-phosphate
  modified_base 4: mod_base = OTHER; note = 2'-O-methyluridine-3'-phosphate
  modified_base 5: mod_base = OTHER; note = 2'-fluoroguanosine-3'-phosphate
  modified_base 6: mod_base = OTHER; note = 2'-O-methyluridine-3'-phosphate
  modified_base 7: mod_base = OTHER; note = 2'-fluoroguanosine-3'-phosphate
  modified_base 8: mod_base = OTHER; note = 2'-O-methyladenosine-3'-phosphate
  modified_base 9: mod_base = OTHER; note = 2'-fluoroadenosine-3'-phosphate
  modified_base 10: mod_base = OTHER; note = 2'-fluoroadenosine-3'-phosphate
  modified_base 11: mod_base = OTHER; note = 2'-fluoroguanosine-3'-phosphate
  modified_base 12: mod_base = OTHER; note = 2'-O-methyluridine-3'-phosphate
  modified_base 13: mod_base = OTHER; note = 2'-fluorocytidine-3'-phosphate
  modified_base 14: mod_base = OTHER; note = 2'-O-methyladenosine-3'-phosphate
  modified_base 15: mod_base = OTHER; note = 2'-fluorouridine-3'-phosphate
  modified_base 16: mod_base = OTHER; note = 2'-O-methylcytidine-3'-phosphate
  modified_base 17: mod_base = OTHER; note = 2'-fluoroguanosine-3'-phosphate
  modified_base 18: mod_base = OTHER; note = 2'-O-methyladenosine-3'-phosphate
  modified_base 19: mod_base = OTHER; note = 2'-fluorocytidine-3'-phosphate
  modified_base 20: mod_base = OTHER; note = 2'-O-methyladenosine-3'-phosphate
  modified_base 21: mod_base = OTHER; note 2'-fluoroadenosine-3'-phosphate-N-[tris(GalNAc-alkyl)-amido decanoyl)]-4-hydroxyprolinol (Hyp-(GalNAc-alkyl)3)
gaatgtgaaagtcatcgacaa

SEQ ID NO: 175 - RNA, 21 nt, synthetic construct
  source 1..21: mol_type = other RNA
  modified_base 1: mod_base = OTHER; note = 2'-O-methylguanosine-3'- phosphorothioate
  modified_base 2: mod_base = OTHER; note = 2'-O-methyladenosine-3'- phosphorothioate
  modified_base 3: mod_base = OTHER; note = 2'-O-methyladenosine-3'-phosphate
  modified_base 4: mod_base = OTHER; note = 2'-O-methyluridine-3'-phosphate
  modified_base 5: mod_base = OTHER; note = 2'-O-methylguanosine-3'-phosphate
  modified_base 6: mod_base = OTHER; note = 2'-O-methyluridine-3'-phosphate
  modified_base 7: mod_base = OTHER; note = 2'-fluoroguanosine-3'-phosphate
  modified_base 8: mod_base = OTHER; note = 2'-O-methyladenosine-3'-phosphate
  modified_base 9: mod_base = OTHER; note = 2'-fluoroadenosine-3'-phosphate
  modified_base 10: mod_base = OTHER; note = 2'-fluoroadenosine-3'-phosphate
  modified_base 11: mod_base = OTHER; note = 2'-fluoroguanosine-3'-phosphate
  modified_base 12: mod_base = OTHER; note = 2'-O-methyluridine-3'-phosphate
  modified_base 13: mod_base = OTHER; note = 2'-O-methylcytidine-3'-phosphate
  modified_base 14: mod_base = OTHER; note = 2'-O-methyladenosine-3'-phosphate
  modified_base 15: mod_base = OTHER; note = 2'-O-methyluridine-3'-phosphate
  modified_base 16: mod_base = OTHER; note = 2'-O-methylcytidine-3'-phosphate
  modified_base 17: mod_base = OTHER; note = 2'-O-methylguanosine-3'-phosphate
  modified_base 18: mod_base = OTHER; note = 2'-O-methyladenosine-3'-phosphate
  modified_base 19: mod_base = OTHER; note = 2'-O-methylcytidine-3'-phosphate
  modified_base 20: mod_base = OTHER; note = 2'-O-methyladenosine-3'-phosphate
  modified_base 21: mod_base = OTHER; note 2'-O-methyladenosine-3'-phosphate-N-[tris(GalNAc-alkyl)-ami dodecanoyl)]-4-hydroxyprolinol (Hyp-(GalNAc-alkyl)3)
gaatgtgaaagtcatcgacaa

SEQ ID NO: 176 - RNA, 21 nt, synthetic construct
  source 1..21: mol_type = other RNA
  modified_base 1: mod_base = OTHER; note = 2'-O-methylguanosine-3'- phosphorothioate
  modified_base 2: mod_base = OTHER; note = 2'-O-methyladenosine-3'- phosphorothioate
  modified_base 3: mod_base = OTHER; note = 2'-O-methyladenosine-3'-phosphate
  modified_base 4: mod_base = OTHER; note = 2'-O-methyluridine-3'-phosphate
  modified_base 5: mod_base = OTHER; note = 2'-O-methylguanosine-3'-phosphate
  modified_base 6: mod_base = OTHER; note = 2'-O-methyluridine-3'-phosphate
  modified_base 7: mod_base = OTHER; note = 2'-fluoroguanosine-3'-phosphate
  modified_base 8: mod_base = OTHER; note = 2'-O-methyladenosine-3'-phosphate
  modified_base 9: mod_base = OTHER; note = 2'-fluoroadenosine-3'-phosphate
  modified_base 10: mod_base = OTHER; note = 2'-fluoroadenosine-3'-phosphate
  modified_base 11: mod_base = OTHER; note = 2'-fluoroguanosine-3'-phosphate
  modified_base 12: mod_base = OTHER; note = 2'-O-methyluridine-3'-phosphate
  modified_base 13: mod_base = OTHER; note = 2'-O-methylcytidine-3'-phosphate
  modified_base 14: mod_base = OTHER; note = 2'-O-methyladenosine-3'-phosphate
  modified_base 15: mod_base = OTHER; note = 2'-O-methyluridine-3'-phosphate
  modified_base 16: mod_base = OTHER; note = 2'-O-methylcytidine-3'-phosphate
  modified_base 17: mod_base = OTHER; note = 2'-O-methylguanosine-3'-phosphate
  modified_base 18: mod_base = OTHER; note = 2'-O-methyladenosine-3'-phosphate
  modified_base 19: mod_base = OTHER; note = 2'-O-methylcytidine-3'-phosphate
  modified_base 20: mod_base = OTHER; note = 2'-O-methyladenosine-3'-phosphate
  modified_base 21: mod_base = OTHER; note 2'-O-methyladenosine-3'-phosphate-N-[tris(GalNAc-alkyl)-ami dodecanoyl)]-4-hydroxyprolinol (Hyp-(GalNAc-alkyl)3)
gaatgtgaaagtcatcgacaa

SEQ ID NO: 177 - RNA, 21 nt, synthetic construct
  source 1..21: mol_type = other RNA
  modified_base 1: mod_base = OTHER; note = 2'-O-methylguanosine-3'- phosphorothioate
  modified_base 2: mod_base = OTHER; note = 2'-O-methyladenosine-3'- phosphorothioate
  modified_base 3: mod_base = OTHER; note = 2'-O-methyladenosine-3'-phosphate
  modified_base 4: mod_base = OTHER; note = 2'-O-methyluridine-3'-phosphate
  modified_base 5: mod_base = OTHER; note = 2'-O-methylguanosine-3'-phosphate
  modified_base 6: mod_base = OTHER; note = 2'-O-methyluridine-3'-phosphate
  modified_base 7: mod_base = OTHER; note = 2'-fluoroguanosine-3'-phosphate
  modified_base 8: mod_base = OTHER; note = 2'-O-methyladenosine-3'-phosphate
  modified_base 9: mod_base = OTHER; note = 2'-O-methyladenosine-3'-phosphate
  modified_base 10: mod_base = OTHER; note = 2'-fluoroadenosine-3'-phosphate
  modified_base 11: mod_base = OTHER; note = 2'-fluoroguanosine-3'-phosphate
  modified_base 12: mod_base = OTHER; note = 2'-O-methyluridine-3'-phosphate
  modified_base 13: mod_base = OTHER; note = 2'-O-methylcytidine-3'-phosphate
  modified_base 14: mod_base = OTHER; note = 2'-O-methyladenosine-3'-phosphate
  modified_base 15: mod_base = OTHER; note = 2'-O-methyluridine-3'-phosphate
  modified_base 16: mod_base = OTHER; note = 2'-O-methylcytidine-3'-phosphate
  modified_base 17: mod_base = OTHER; note = 2'-O-methylguanosine-3'-phosphate
  modified_base 18: mod_base = OTHER; note = 2'-O-methyladenosine-3'-phosphate
  modified_base 19: mod_base = OTHER; note = 2'-O-methylcytidine-3'-phosphate
  modified_base 20: mod_base = OTHER; note = 2'-O-methyladenosine-3'-phosphate
  modified_base 21: mod_base = OTHER; note 2'-O-methyladenosine-3'-phosphate-N-[tris(GalNAc-alkyl)-ami dodecanoyl)]-4-hydroxyprolinol (Hyp-(GalNAc-alkyl)3)
gaatgtgaaagtcatcgacaa

SEQ ID NO: 178 - RNA, 21 nt, synthetic construct
  source 1..21: mol_type = other RNA
  modified_base 1: mod_base = OTHER; note = 2'-O-methylguanosine-3'- phosphorothioate
  modified_base 2: mod_base = OTHER; note = 2'-O-methyladenosine-3'- phosphorothioate
  modified_base 3: mod_base = OTHER; note = 2'-O-methyladenosine-3'-phosphate
  modified_base 4: mod_base = OTHER; note = 2'-O-methyluridine-3'-phosphate
  modified_base 5: mod_base = OTHER; note = 2'-O-methylguanosine-3'-phosphate
  modified_base 6: mod_base = OTHER; note = 2'-O-methyluridine-3'-phosphate
  modified_base 7: mod_base = OTHER; note = 2'-fluoroguanosine-3'-phosphate
  modified_base 8: mod_base = OTHER; note = 2'-O-methyladenosine-3'-phosphate
  modified_base 9: mod_base = OTHER; note = 2'-O-methyladenosine-3'-phosphate
  modified_base 10: mod_base = OTHER; note = 2'-fluoroadenosine-3'-phosphate
  modified_base 11: mod_base = OTHER; note = 2'-fluoroguanosine-3'-phosphate
  modified_base 12: mod_base = OTHER; note = 2'-O-methyluridine-3'-phosphate
  modified_base 13: mod_base = OTHER; note = 2'-O-methylcytidine-3'-phosphate
  modified_base 14: mod_base = OTHER; note = 2'-O-methyladenosine-3'-phosphate
  modified_base 15: mod_base = OTHER; note = 2'-O-methyluridine-3'-phosphate
  modified_base 16: mod_base = OTHER; note = 2'-O-methylcytidine-3'-phosphate
  modified_base 17: mod_base = OTHER; note = 2'-O-methylguanosine-3'-phosphate
  modified_base 18: mod_base = OTHER; note = 2'-O-methyladenosine-3'-phosphate
  modified_base 19: mod_base = OTHER; note = 2'-O-methylcytidine-3'-phosphate
  modified_base 20: mod_base = OTHER; note = 2'-O-methyladenosine-3'-phosphate
  modified_base 21: mod_base = OTHER; note 2'-O-methyladenosine-3'-phosphate-N-[tris(GalNAc-alkyl)-ami dodecanoyl)]-4-hydroxyprolinol (Hyp-(GalNAc-alkyl)3)
gaatgtgaaagtcatcgacaa

SEQ ID NO: 179 - RNA, 21 nt, synthetic construct
  source 1..21: mol_type = other RNA
  modified_base 1: mod_base = OTHER; note = 2'-O-methylguanosine-3'- phosphorothioate
  modified_base 2: mod_base = OTHER; note = 2'-O-methyladenosine-3'- phosphorothioate
  modified_base 3: mod_base = OTHER; note = 2'-O-methyladenosine-3'-phosphate
  modified_base 4: mod_base = OTHER; note = 2'-O-methyluridine-3'-phosphate
  modified_base 5: mod_base = OTHER; note = 2'-O-methylguanosine-3'-phosphate
  modified_base 6: mod_base = OTHER; note = 2'-O-methyluridine-3'-phosphate
  modified_base 7: mod_base = OTHER; note = 2'-fluoroguanosine-3'-phosphate
  modified_base 8: mod_base = OTHER; note = 2'-O-methyladenosine-3'-phosphate
  modified_base 9: mod_base = OTHER; note = 2'-O-methyladenosine-3'-phosphate
  modified_base 10: mod_base = OTHER; note = 2'-fluoroadenosine-3'-phosphate
  modified_base 11: mod_base = OTHER; note = 2'-fluoroguanosine-3'-phosphate
  modified_base 12: mod_base = OTHER; note = 2'-O-methyluridine-3'-phosphate
  modified_base 13: mod_base = OTHER; note = 2'-O-methylcytidine-3'-phosphate
  modified_base 14: mod_base = OTHER; note = 2'-O-methyladenosine-3'-phosphate
  modified_base 15: mod_base = OTHER; note = 2'-O-methyluridine-3'-phosphate
  modified_base 16: mod_base = OTHER; note = 2'-O-methylcytidine-3'-phosphate
  modified_base 17: mod_base = OTHER; note = 2'-O-methylguanosine-3'-phosphate
  modified_base 18: mod_base = OTHER; note = 2'-O-methyladenosine-3'-phosphate
  modified_base 19: mod_base = OTHER; note = 2'-O-methylcytidine-3'-phosphate
  modified_base 20: mod_base = OTHER; note = 2'-O-methyladenosine-3'-phosphate
  modified_base 21: mod_base = OTHER; note 2'-O-methyladenosine-3'-phosphate-N-[tris(GalNAc-alkyl)-ami dodecanoyl)]-4-hydroxyprolinol (Hyp-(GalNAc-alkyl)3)
gaatgtgaaagtcatcgacaa

SEQ ID NO: 180 - RNA, 21 nt, synthetic construct
  source 1..21: mol_type = other RNA
  modified_base 1: mod_base = OTHER; note = 2'-O-methylguanosine-3'- phosphorothioate
  modified_base 2: mod_base = OTHER; note = 2'-O-methyladenosine-3'- phosphorothioate
  modified_base 3: mod_base = OTHER; note = 2'-O-methyladenosine-3'-phosphate
  modified_base 4: mod_base = OTHER; note = 2'-O-methyluridine-3'-phosphate
  modified_base 5: mod_base = OTHER; note = 2'-O-methylguanosine-3'-phosphate
  modified_base 6: mod_base = OTHER; note = 2'-O-methyluridine-3'-phosphate
  modified_base 7: mod_base = OTHER; note = 2'-O-methylguanosine-3'-phosphate
  modified_base 8: mod_base = OTHER; note = 2'-O-methyladenosine-3'-phosphate
  modified_base 9: mod_base = OTHER; note = 2'-O-methyladenosine-3'-phosphate
  modified_base 10: mod_base = OTHER; note = 2'-O-methyladenosine-3'-phosphate
  modified_base 11: mod_base = OTHER; note = 2'-O-methylguanosine-3'-phosphate
  modified_base 12: mod_base = OTHER; note = 2'-O-methyluridine-3'-phosphate
  modified_base 13: mod_base = OTHER; note = 2'-O-methylcytidine-3'-phosphate
  modified_base 14: mod_base = OTHER; note = 2'-O-methyladenosine-3'-phosphate
  modified_base 15: mod_base = OTHER; note = 2'-O-methyluridine-3'-phosphate
  modified_base 16: mod_base = OTHER; note = Cytidine-glycol nucleic acid (GNA) S-Isomer
  modified_base 17: mod_base = OTHER; note = 2'-O-methylguanosine-3'-phosphate
  modified_base 18: mod_base = OTHER; note = 2'-O-methyladenosine-3'-phosphate
  modified_base 19: mod_base = OTHER; note = 2'-O-methylcytidine-3'-phosphate
  modified_base 20: mod_base = OTHER; note = 2'-O-methyladenosine-3'-phosphate
  modified_base 21: mod_base = OTHER; note 2'-O-methyladenosine-3'-phosphate-N-[tris(GalNAc-alkyl)-ami dodecanoyl)]-4-hydroxyprolinol (Hyp-(GalNAc-alkyl)3)
gaatgtgaaagtcatcgacaa

SEQ ID NO: 181 - DNA, 21 bp, synthetic construct
  source 1..21: mol_type = other DNA
  modified_base 1: mod_base = OTHER; note = 2'-O-methylguanosine-3'- phosphorothioate
  modified_base 2: mod_base = OTHER; note = 2'-O-methyladenosine-3'- phosphorothioate
  modified_base 3: mod_base = OTHER; note = 2'-O-methyladenosine-3'-phosphate
  modified_base 4: mod_base = OTHER; note = 2'-O-methyluridine-3'-phosphate
  modified_base 5: mod_base = OTHER; note = 2'-O-methylguanosine-3'-phosphate
  modified_base 7: mod_base = OTHER; note = 2'-O-methylguanosine-3'-phosphate
  modified_base 8: mod_base = OTHER; note = 2'-O-methyladenosine-3'-phosphate
  modified_base 9: mod_base = OTHER; note = 2'-O-methyladenosine-3'-phosphate
  modified_base 10: mod_base = OTHER; note = 2'-O-methyladenosine-3'-phosphate
  modified_base 11: mod_base = OTHER; note = 2'-O-methylguanosine-3'-phosphate
  modified_base 12: mod_base = OTHER; note = 2'-O-methyluridine-3'-phosphate
  modified_base 13: mod_base = OTHER; note = 2'-O-methylcytidine-3'-phosphate
  modified_base 14: mod_base = OTHER; note = 2'-O-methyladenosine-3'-phosphate
  modified_base 15: mod_base = OTHER; note = 2'-O-methyluridine-3'-phosphate
  modified_base 16: mod_base = OTHER; note = Cytidine-glycol nucleic acid (GNA) S-Isomer
  modified_base 17: mod_base = OTHER; note = 2'-O-methylguanosine-3'-phosphate
  modified_base 18: mod_base = OTHER; note = 2'-O-methyladenosine-3'-phosphate
  modified_base 19: mod_base = OTHER; note = 2'-O-methylcytidine-3'-phosphate
  modified_base 20: mod_base = OTHER; note = 2'-O-methyladenosine-3'-phosphate
  modified_base 21: mod_base = OTHER; note 2'-O-methyladenosine-3'-phosphate-N-[tris(GalNAc-alkyl)-ami dodecanoyl)]-4-hydroxyprolinol (Hyp-(GalNAc-alkyl)3)
  misc_feature 1..5: note = RNA
  misc_feature 6: note = DNA
  misc_feature 7..21: note = RNA
gaatgtgaaagtcatcgacaa

SEQ ID NO: 182 - DNA, 21 bp, synthetic construct
  source 1..21: mol_type = other DNA
  modified_base 1: mod_base = OTHER; note = 2'-O-methylguanosine-3'- phosphorothioate
  modified_base 2: mod_base = OTHER; note = 2'-O-methyladenosine-3'- phosphorothioate
  modified_base 3: mod_base = OTHER; note = 2'-O-methyladenosine-3'-phosphate
  modified_base 4: mod_base = OTHER; note = 2'-O-methyluridine-3'-phosphate
  modified_base 6: mod_base = OTHER; note = 2'-O-methyluridine-3'-phosphate
  modified_base 7: mod_base = OTHER; note = 2'-O-methylguanosine-3'-phosphate
  modified_base 8: mod_base = OTHER; note = 2'-O-methyladenosine-3'-phosphate
  modified_base 9: mod_base = OTHER; note = 2'-O-methyladenosine-3'-phosphate
  modified_base 10: mod_base = OTHER; note = 2'-O-methyladenosine-3'-phosphate
  modified_base 12: mod_base = OTHER; note = 2'-O-methyluridine-3'-phosphate
  modified_base 13: mod_base = OTHER; note = 2'-O-methylcytidine-3'-phosphate
  modified_base 14: mod_base = OTHER; note = 2'-O-methyladenosine-3'-phosphate
  modified_base 15: mod_base = OTHER; note = 2'-O-methyluridine-3'-phosphate
  modified_base 16: mod_base = OTHER; note = Cytidine-glycol nucleic acid (GNA) S-Isomer
  modified_base 17: mod_base = OTHER; note = 2'-O-methylguanosine-3'-phosphate
  modified_base 18: mod_base = OTHER; note = 2'-O-methyladenosine-3'-phosphate
  modified_base 19: mod_base = OTHER; note = 2'-O-methylcytidine-3'-phosphate
  modified_base 20: mod_base = OTHER; note = 2'-O-methyladenosine-3'-phosphate
  modified_base 21: mod_base = OTHER; note 2'-O-methyladenosine-3'-phosphate-N-[tris(GalNAc-alkyl)-ami dodecanoyl)]-4-hydroxyprolinol (Hyp-(GalNAc-alkyl)3)
  misc_feature 1..4: note = RNA
  misc_feature 5: note = DNA
  misc_feature 6..10: note = RNA
  misc_feature 11: note = DNA
  misc_feature 12..21: note = RNA
gaatgtgaaagtcatcgacaa

SEQ ID NO: 183 - DNA, 21 bp, synthetic construct
  source 1..21: mol_type = other DNA
  modified_base 1: mod_base = OTHER; note = 2'-O-methylguanosine-3'- phosphorothioate
  modified_base 2: mod_base = OTHER; note = 2'-O-methyladenosine-3'- phosphorothioate
  modified_base 3: mod_base = OTHER; note = 2'-O-methyladenosine-3'-phosphate
  modified_base 4: mod_base = OTHER; note = 2'-O-methyluridine-3'-phosphate
  modified_base 5: mod_base = OTHER; note = 2'-O-methylguanosine-3'-phosphate
  modified_base 7: mod_base = OTHER; note = 2'-O-methylguanosine-3'-phosphate
  modified_base 8: mod_base = OTHER; note = 2'-O-methyladenosine-3'-phosphate
  modified_base 9: mod_base = OTHER; note = 2'-O-methyladenosine-3'-phosphate
  modified_base 10: mod_base = OTHER; note = 2'-O-methyladenosine-3'-phosphate
  modified_base 12: mod_base = OTHER; note = 2'-O-methyluridine-3'-phosphate
  modified_base 13: mod_base = OTHER; note = 2'-O-methylcytidine-3'-phosphate
  modified_base 14: mod_base = OTHER; note = 2'-O-methyladenosine-3'-phosphate
  modified_base 15: mod_base = OTHER; note = 2'-O-methyluridine-3'-phosphate
  modified_base 16: mod_base = OTHER; note = Cytidine-glycol nucleic acid (GNA) S-Isomer
  modified_base 17: mod_base = OTHER; note = 2'-O-methylguanosine-3'-phosphate
  modified_base 18: mod_base = OTHER; note = 2'-O-methyladenosine-3'-phosphate
  modified_base 19: mod_base = OTHER; note = 2'-O-methylcytidine-3'-phosphate
  modified_base 20: mod_base = OTHER; note = 2'-O-methyladenosine-3'-phosphate
  modified_base 21: mod_base = OTHER; note 2'-O-methyladenosine-3'-phosphate-N-[tris(GalNAc-alkyl)-ami dodecanoyl)]-4-hydroxyprolinol (Hyp-(GalNAc-alkyl)3)
  misc_feature 1..5: note = RNA
  misc_feature 6: note = DNA
  misc_feature 7..10: note = RNA
  misc_feature 11: note = DNA
  misc_feature 12..21: note = RNA
gaatgtgaaagtcatcgacaa

SEQ ID NO: 184 - DNA, 21 bp, synthetic construct
  source 1..21: mol_type = other DNA
  modified_base 1: mod_base = OTHER; note = 2'-O-methylguanosine-3'- phosphorothioate
  modified_base 2: mod_base = OTHER; note = 2'-O-methyladenosine-3'- phosphorothioate
  modified_base 3: mod_base = OTHER; note = 2'-O-methyladenosine-3'-phosphate
  modified_base 4: mod_base = OTHER; note = 2'-O-methyluridine-3'-phosphate
  modified_base 5: mod_base = OTHER; note = 2'-O-methylguanosine-3'-phosphate
  modified_base 6: mod_base = OTHER; note = 2'-O-methyluridine-3'-phosphate
  modified_base 8: mod_base = OTHER; note = 2'-O-methyladenosine-3'-phosphate
  modified_base 9: mod_base = OTHER; note = 2'-O-methyladenosine-3'-phosphate
  modified_base 10: mod_base = OTHER; note = 2'-O-methyladenosine-3'-phosphate
  modified_base 12: mod_base = OTHER; note = 2'-O-methyluridine-3'-phosphate
  modified_base 13: mod_base = OTHER; note = 2'-O-methylcytidine-3'-phosphate
  modified_base 14: mod_base = OTHER; note = 2'-O-methyladenosine-3'-phosphate
  modified_base 15: mod_base = OTHER; note = 2'-O-methyluridine-3'-phosphate
  modified_base 16: mod_base = OTHER; note = Cytidine-glycol nucleic acid (GNA) S-Isomer
  modified_base 17: mod_base = OTHER; note = 2'-O-methylguanosine-3'-phosphate
  modified_base 18: mod_base = OTHER; note = 2'-O-methyladenosine-3'-phosphate
  modified_base 19: mod_base = OTHER; note = 2'-O-methylcytidine-3'-phosphate
  modified_base 20: mod_base = OTHER; note = 2'-O-methyladenosine-3'-phosphate
  modified_base 21: mod_base = OTHER; note 2'-O-methyladenosine-3'-phosphate-N-[tris(GalNAc-alkyl)-ami dodecanoyl)]-4-hydroxyprolinol (Hyp-(GalNAc-alkyl)3)
  misc_feature 1..6: note = RNA
  misc_feature 7: note = DNA
  misc_feature 8..10: note = RNA
  misc_feature 11: note = DNA
  misc_feature 12..21: note = RNA
gaatgtgaaagtcatcgacaa

SEQ ID NO: 185 - DNA, 21 bp, synthetic construct
  source 1..21: mol_type = other DNA
  modified_base 1: mod_base = OTHER; note = 2'-O-methylguanosine-3'- phosphorothioate
  modified_base 2: mod_base = OTHER; note = 2'-O-methyladenosine-3'- phosphorothioate
  modified_base 3: mod_base = OTHER; note = 2'-O-methyladenosine-3'-phosphate
  modified_base 4: mod_base = OTHER; note = 2'-O-methyluridine-3'-phosphate
  modified_base 5: mod_base = OTHER; note = 2'-O-methylguanosine-3'-phosphate
  modified_base 6: mod_base = OTHER; note = 2'-O-methyluridine-3'-phosphate
  modified_base 7: mod_base = OTHER; note = 2'-O-methylguanosine-3'-phosphate
  modified_base 8: mod_base = OTHER; note = 2'-O-methyladenosine-3'-phosphate
  modified_base 9: mod_base = OTHER; note = 2'-O-methyladenosine-3'-phosphate
  modified_base 10: mod_base = OTHER; note = 2'-O-methyladenosine-3'-phosphate
  modified_base 12: mod_base = OTHER; note = 2'-O-methyluridine-3'-phosphate
  modified_base 13: mod_base = OTHER; note = 2'-O-methylcytidine-3'-phosphate
  modified_base 14: mod_base = OTHER; note = 2'-O-methyladenosine-3'-phosphate
  modified_base 15: mod_base = OTHER; note = 2'-O-methyluridine-3'-phosphate
  modified_base 16: mod_base = OTHER; note = 2'-O-methylcytidine-3'-phosphate
  modified_base 18: mod_base = OTHER; note = 2'-O-methyladenosine-3'-phosphate
  modified_base 19: mod_base = OTHER; note = 2'-O-methylcytidine-3'-phosphate
  modified_base 20: mod_base = OTHER; note = 2'-O-methyladenosine-3'-phosphate
  modified_base 21: mod_base = OTHER; note 2'-O-methyladenosine-3'-phosphate-N-[tris(GalNAc-alkyl)-ami dodecanoyl)]-4-hydroxyprolinol (Hyp-(GalNAc-alkyl)3)
  misc_feature 1..10: note = RNA
  misc_feature 11: note = DNA
  misc_feature 12..16: note = RNA
  misc_feature 17: note = DNA
  misc_feature 18..21: note = RNA
gaatgtgaaagtcatcgacaa

SEQ ID NO: 186 - DNA, 21 bp, synthetic construct
  source 1..21: mol_type = other DNA
  modified_base 1: mod_base = OTHER; note = 2'-O-methylguanosine-3'- phosphorothioate
  modified_base 2: mod_base = OTHER; note = 2'-O-methyladenosine-3'- phosphorothioate
  modified_base 3: mod_base = OTHER; note = 2'-O-methyladenosine-3'-phosphate
  modified_base 4: mod_base = OTHER; note = 2'-O-methyluridine-3'-phosphate
  modified_base 5: mod_base = OTHER; note = 2'-O-methylguanosine-3'-phosphate
  modified_base 6: mod_base = OTHER; note = 2'-O-methyluridine-3'-phosphate
  modified_base 7: mod_base = OTHER; note = 2'-O-methylguanosine-3'-phosphate
  modified_base 8: mod_base = OTHER; note = 2'-O-methyladenosine-3'-phosphate
  modified_base 9: mod_base = OTHER; note = 2'-O-methyladenosine-3'-phosphate
  modified_base 10: mod_base = OTHER; note = 2'-O-methyladenosine-3'-phosphate
  modified_base 12: mod_base = OTHER; note = 2'-O-methyluridine-3'-phosphate
  modified_base 13: mod_base = OTHER; note = 2'-O-methylcytidine-3'-phosphate
  modified_base 14: mod_base = OTHER; note = 2'-O-methyladenosine-3'-phosphate
  modified_base 15: mod_base = OTHER; note = 2'-O-methyluridine-3'-phosphate
  modified_base 16: mod_base = OTHER; note = 2'-O-methylcytidine-3'-phosphate
  modified_base 18: mod_base = OTHER; note = 2'-O-methyladenosine-3'-phosphate
  modified_base 19: mod_base = OTHER; note = 2'-O-methylcytidine-3'-phosphate
  modified_base 20: mod_base = OTHER; note = 2'-O-methyladenosine-3'-phosphate
  modified_base 21: mod_base = OTHER; note 2'-O-methyladenosine-3'-phosphate-N-[tris(GalNAc-alkyl)-ami dodecanoyl)]-4-hydroxyprolinol (Hyp-(GalNAc-alkyl)3)
  misc_feature 1..10: note = RNA
  misc_feature 11: note = DNA
  misc_feature 12..16: note = RNA
  misc_feature 17: note = DNA
  misc_feature 18..21: note = RNA
gaatgtgaaagtcatctacaa

SEQ ID NO: 187 - DNA, 21 bp, synthetic construct
  source 1..21: mol_type = other DNA
  modified_base 1: mod_base = OTHER; note = 2'-O-methylguanosine-3'- phosphorothioate
  modified_base 2: mod_base = OTHER; note = 2'-O-methyladenosine-3'- phosphorothioate
  modified_base 3: mod_base = OTHER; note = 2'-O-methyladenosine-3'-phosphate
  modified_base 4: mod_base = OTHER; note = 2'-O-methyluridine-3'-phosphate
  modified_base 5: mod_base = OTHER; note = 2'-O-methylguanosine-3'-phosphate
  modified_base 6: mod_base = OTHER; note = 2'-O-methyluridine-3'-phosphate
  modified_base 7: mod_base = OTHER; note = 2'-O-methylguanosine-3'-phosphate
  modified_base 8: mod_base = OTHER; note = 2'-O-methyladenosine-3'-phosphate
  modified_base 9: mod_base = OTHER; note = 2'-O-methyladenosine-3'-phosphate
  modified_base 10: mod_base = OTHER; note = 2'-O-methyladenosine-3'-phosphate
  modified_base 12: mod_base = OTHER; note = 2'-O-methyluridine-3'-phosphate
  modified_base 13: mod_base = OTHER; note = 2'-O-methylcytidine-3'-phosphate
  modified_base 14: mod_base = OTHER; note = 2'-O-methyladenosine-3'-phosphate
  modified_base 15: mod_base = OTHER; note = 2'-O-methyluridine-3'-phosphate
  modified_base 16: mod_base = OTHER; note = 2'-O-methylcytidine-3'-phosphate
  modified_base 17: mod_base = OTHER; note 2-hydroxymethyl-tetrahydrofurane-4-methoxy-3-phosphate (abasic 2'-OMe furanose)
  modified_base 18: mod_base = OTHER; note = 2'-O-methyladenosine-3'-phosphate
  modified_base 19: mod_base = OTHER; note = 2'-O-methylcytidine-3'-phosphate
  modified_base 20: mod_base = OTHER; note = 2'-O-methyladenosine-3'-phosphate
  modified_base 21: mod_base = OTHER; note 2'-O-methyladenosine-3'-phosphate-N-[tris(GalNAc-alkyl)-ami dodecanoyl)]-4-hydroxyprolinol (Hyp-(GalNAc-alkyl)3)
  misc_feature 1..10: note = RNA
  misc_feature 11: note = DNA
  misc_feature 12..21: note = RNA
gaatgtgaaagtcatcnacaa

SEQ ID NO: 188 - DNA, 21 bp, synthetic construct
  source 1..21: mol_type = other DNA
  modified_base 1: mod_base = OTHER; note = 2'-O-methylguanosine-3'- phosphorothioate
  modified_base 2: mod_base = OTHER; note = 2'-O-methyladenosine-3'- phosphorothioate
  modified_base 3: mod_base = OTHER; note = 2'-O-methyladenosine-3'-phosphate
  modified_base 4: mod_base = OTHER; note = 2'-O-methyluridine-3'-phosphate
  modified_base 5: mod_base = OTHER; note = 2'-O-methylguanosine-3'-phosphate
  modified_base 6: mod_base = OTHER; note = 2'-O-methyluridine-3'-phosphate
  modified_base 7: mod_base = OTHER; note = 2'-O-methylguanosine-3'-phosphate
  modified_base 8: mod_base = OTHER; note = 2'-O-methyladenosine-3'-phosphate
  modified_base 9: mod_base = OTHER; note = 2'-O-methyladenosine-3'-phosphate
  modified_base 10: mod_base = OTHER; note = 2'-O-methyladenosine-3'-phosphate
  modified_base 12: mod_base = OTHER; note = 2'-O-methyluridine-3'-phosphate
  modified_base 13: mod_base = OTHER; note = 2'-O-methylcytidine-3'-phosphate
  modified_base 14: mod_base = OTHER; note = 2'-O-methyladenosine-3'-phosphate
  modified_base 16: mod_base = OTHER; note = 2'-O-methylcytidine-3'-phosphate
  modified_base 18: mod_base = OTHER; note = 2'-O-methyladenosine-3'-phosphate
  modified_base 19: mod_base = OTHER; note = 2'-O-methylcytidine-3'-phosphate
  modified_base 20: mod_base = OTHER; note = 2'-O-methyladenosine-3'-phosphate
  modified_base 21: mod_base = OTHER; note 2'-O-methyladenosine-3'-phosphate-N-[tris(GalNAc-alkyl)-ami dodecanoyl)]-4-hydroxyprolinol (Hyp-(GalNAc-alkyl)3)
  misc_feature 1..10: note = RNA
  misc_feature 11: note = DNA
  misc_feature 12..14: note = RNA
  misc_feature 15: note = DNA
  misc_feature 16: note = RNA
  misc_feature 17: note = DNA
  misc_feature 18..21: note = RNA
gaatgtgaaagtcatctacaa

SEQ ID NO: 189 - DNA, 21 bp, synthetic construct
  source 1..21: mol_type = other DNA
  modified_base 1: mod_base = OTHER; note = 2'-O-methylguanosine-3'- phosphorothioate
  modified_base 2: mod_base = OTHER; note = 2'-O-methyladenosine-3'- phosphorothioate
  modified_base 3: mod_base = OTHER; note = 2'-O-methyladenosine-3'-phosphate
  modified_base 4: mod_base = OTHER; note = 2'-O-methyluridine-3'-phosphate
  modified_base 5: mod_base = OTHER; note = 2'-O-methylguanosine-3'-phosphate
  modified_base 6: mod_base = OTHER; note = 2'-O-methyluridine-3'-phosphate
  modified_base 7: mod_base = OTHER; note = 2'-O-methylguanosine-3'-phosphate
  modified_base 8: mod_base = OTHER; note = 2'-O-methyladenosine-3'-phosphate
  modified_base 9: mod_base = OTHER; note = 2'-O-methyladenosine-3'-phosphate
  modified_base 10: mod_base = OTHER; note = 2'-O-methyladenosine-3'-phosphate
  modified_base 12: mod_base = OTHER; note = 2'-O-methyluridine-3'-phosphate
  modified_base 13: mod_base = OTHER; note = 2'-O-methylcytidine-3'-phosphate
  modified_base 14: mod_base = OTHER; note = 2'-O-methyladenosine-3'-phosphate
  modified_base 15: mod_base = OTHER; note = 2'-O-methyluridine-3'-phosphate
  modified_base 16: mod_base = OTHER; note = 2'-O-methylcytidine-3'-phosphate
  modified_base 18: mod_base = OTHER; note = 2'-O-methyladenosine-3'-phosphate
  modified_base 20: mod_base = OTHER; note = 2'-O-methyladenosine-3'-phosphate
  modified_base 21: mod_base = OTHER; note 2'-O-methyladenosine-3'-phosphate-N-[tris(GalNAc-alkyl)-ami dodecanoyl)]-4-hydroxyprolinol (Hyp-(GalNAc-alkyl)3)
  misc_feature 1..10: note = RNA
  misc_feature 11: note = DNA
  misc_feature 12..16: note = RNA
  misc_feature 17: note = DNA
  misc_feature 18: note = RNA
  misc_feature 19: note = DNA
  misc_feature 20..21: note = RNA
gaatgtgaaagtcatcgacaa

SEQ ID NO: 190 - DNA, 21 bp, synthetic construct
  source 1..21: mol_type = other DNA
  modified_base 1: mod_base = OTHER; note = 2'-O-methylguanosine-3'- phosphorothioate
  modified_base 2: mod_base = OTHER; note = 2'-O-methyladenosine-3'- phosphorothioate
  modified_base 3: mod_base = OTHER; note = 2'-O-methyladenosine-3'-phosphate
  modified_base 4: mod_base = OTHER; note = 2'-O-methyluridine-3'-phosphate
  modified_base 5: mod_base = OTHER; note = 2'-O-methylguanosine-3'-phosphate
  modified_base 6: mod_base = OTHER; note = 2'-O-methyluridine-3'-phosphate
  modified_base 7: mod_base = OTHER; note = 2'-O-methylguanosine-3'-phosphate
  modified_base 8: mod_base = OTHER; note = 2'-O-methyladenosine-3'-phosphate
  modified_base 9: mod_base = OTHER; note = 2'-O-methyladenosine-3'-phosphate
  modified_base 10: mod_base = OTHER; note = 2'-O-methyladenosine-3'-phosphate
  modified_base 12: mod_base = OTHER; note = 2'-O-methyluridine-3'-phosphate
  modified_base 13: mod_base = OTHER; note = 2'-O-methylcytidine-3'-phosphate
  modified_base 14: mod_base = OTHER; note = 2'-O-methyladenosine-3'-phosphate
  modified_base 15: mod_base = OTHER; note = 2'-O-methyluridine-3'-phosphate
  modified_base 16: mod_base = OTHER; note = 2'-O-methylcytidine-3'-phosphate
  modified_base 18: mod_base = OTHER; note = 2'-O-methyladenosine-3'-phosphate
  modified_base 20: mod_base = OTHER; note = 2'-O-methyladenosine-3'-phosphate
  modified_base 21: mod_base = OTHER; note 2'-O-methyladenosine-3'-phosphate-N-[tris(GalNAc-alkyl)-ami dodecanoyl)]-4-hydroxyprolinol (Hyp-(GalNAc-alkyl)3)
  misc_feature 1..10: note = RNA
  misc_feature 11: note = DNA
  misc_feature 12..16: note = RNA
  misc_feature 17: note = DNA
  misc_feature 18: note = RNA
  misc_feature 19: note = DNA
  misc_feature 20..21: note = RNA
gaatgtgaaagtcatctacaa

SEQ ID NO: 191 - DNA, 21 bp, synthetic construct
  source 1..21: mol_type = other DNA
  modified_base 1: mod_base = OTHER; note = 2'-O-methylguanosine-3'- phosphorothioate
  modified_base 2: mod_base = OTHER; note = 2'-O-methyladenosine-3'- phosphorothioate
  modified_base 3: mod_base = OTHER; note = 2'-O-methyladenosine-3'-phosphate
  modified_base 4: mod_base = OTHER; note = 2'-O-methyluridine-3'-phosphate
  modified_base 5: mod_base = OTHER; note = 2'-O-methylguanosine-3'-phosphate
  modified_base 6: mod_base = OTHER; note = 2'-O-methyluridine-3'-phosphate
  modified_base 7: mod_base = OTHER; note = 2'-O-methylguanosine-3'-phosphate
  modified_base 8: mod_base = OTHER; note = 2'-O-methyladenosine-3'-phosphate
  modified_base 9: mod_base = OTHER; note = 2'-O-methyladenosine-3'-phosphate
  modified_base 10: mod_base = OTHER; note = 2'-O-methyladenosine-3'-phosphate
  modified_base 12: mod_base = OTHER; note = 2'-O-methyluridine-3'-phosphate
  modified_base 13: mod_base = OTHER; note = 2'-O-methylcytidine-3'-phosphate
  modified_base 14: mod_base = OTHER; note = 2'-O-methyladenosine-3'-phosphate
  modified_base 15: mod_base = OTHER; note = 2'-O-methyluridine-3'-phosphate
  modified_base 16: mod_base = OTHER; note = 2'-O-methylcytidine-3'-phosphate
  modified_base 17: mod_base = OTHER; note 2-hydroxymethyl-tetrahydrofurane-4-methoxy-3-phosphate (abasic 2'-OMe furanose)
  modified_base 18: mod_base = OTHER; note = 2'-O-methyladenosine-3'-phosphate
  modified_base 20: mod_base = OTHER; note = 2'-O-methyladenosine-3'-phosphate
  modified_base 21: mod_base = OTHER; note 2'-O-methyladenosine-3'-phosphate-N-[tris(GalNAc-alkyl)-ami dodecanoyl)]-4-hydroxyprolinol (Hyp-(GalNAc-alkyl)3)
  misc_feature 1..10: note = RNA
  misc_feature 11: note = DNA
  misc_feature 12..18: note = RNA
  misc_feature 19: note = DNA
  misc_feature 20..21: note = RNA
gaatgtgaaagtcatcnacaa

SEQ ID NO: 192 - RNA, 21 nt, synthetic construct
  source 1..21: mol_type = other RNA
  modified_base 1: mod_base = OTHER; note = 2'-fluoroguanosine-3'-phosphorothioate
  modified_base 2: mod_base = OTHER; note = 2'-O-methyladenosine-3'- phosphorothioate
  modified_base 3: mod_base = OTHER; note = 2'-fluoroadenosine-3'-phosphate
  modified_base 4: mod_base = OTHER; note = 2'-O-methyluridine-3'-phosphate
  modified_base 5: mod_base = OTHER; note = 2'-fluoroguanosine-3'-phosphate
  modified_base 6: mod_base = OTHER; note = 2'-O-methyluridine-3'-phosphate
  modified_base 7: mod_base = OTHER; note = 2'-fluoroguanosine-3'-phosphate
  modified_base 8: mod_base = OTHER; note = 2'-O-methyladenosine-3'-phosphate
  modified_base 9: mod_base = OTHER; note = 2'-fluoroadenosine-3'-phosphate
  modified_base 10: mod_base = OTHER; note = 2'-fluoroadenosine-3'-phosphate
  modified_base 11: mod_base = OTHER; note = 2'-fluoroguanosine-3'-phosphate
  modified_base 12: mod_base = OTHER; note = 2'-O-methyluridine-3'-phosphate
  modified_base 13: mod_base = OTHER; note = 2'-fluorocytidine-3'-phosphate
  modified_base 14: mod_base = OTHER; note = 2'-O-methyladenosine-3'-phosphate
  modified_base 15: mod_base = OTHER; note = 2'-fluorouridine-3'-phosphate
  modified_base 16: mod_base = OTHER; note = 2'-O-methylcytidine-3'-phosphate
  modified_base 17: mod_base = OTHER; note = 2'-fluoroguanosine-3'-phosphate
  modified_base 18: mod_base = OTHER; note = 2'-O-methyladenosine-3'-phosphate
  modified_base 19: mod_base = OTHER; note = 2'-fluorocytidine-3'-phosphate
  modified_base 20: mod_base = OTHER; note = 2'-O-methyladenosine-3'-phosphate
  modified_base 21: mod_base = OTHER; note 2'-fluoroadenosine-3'-phosphate-N-[tris(GalNAc-alkyl)-amido decanoyl)]-4-hydroxyprolinol (Hyp-(GalNAc-alkyl)3)
gaatgtgaaagtcatcgacaa

SEQ ID NO: 193 - RNA, 21 nt, synthetic construct
  source 1..21: mol_type = other RNA
  modified_base 1: mod_base = OTHER; note = 2'-fluoroguanosine-3'-phosphorothioate
  modified_base 2: mod_base = OTHER; note = 2'-O-methyladenosine-3'- phosphorothioate
  modified_base 3: mod_base = OTHER; note = 2'-fluoroadenosine-3'-phosphate
  modified_base 4: mod_base = OTHER; note = 2'-O-methyluridine-3'-phosphate
  modified_base 5: mod_base = OTHER; note = 2'-fluoroguanosine-3'-phosphate
  modified_base 6: mod_base = OTHER; note = 2'-O-methyluridine-3'-phosphate
  modified_base 7: mod_base = OTHER; note = 2'-fluoroguanosine-3'-phosphate
  modified_base 8: mod_base = OTHER; note = 2'-O-methyladenosine-3'-phosphate
  modified_base 9: mod_base = OTHER; note = 2'-fluoroadenosine-3'-phosphate
  modified_base 10: mod_base = OTHER; note = 2'-fluoroadenosine-3'-phosphate
  modified_base 11: mod_base = OTHER; note = 2'-fluoroguanosine-3'-phosphate
  modified_base 12: mod_base = OTHER; note = 2'-O-methyluridine-3'-phosphate
  modified_base 13: mod_base = OTHER; note = 2'-fluorocytidine-3'-phosphate
  modified_base 14: mod_base = OTHER; note = 2'-O-methyladenosine-3'-phosphate
  modified_base 15: mod_base = OTHER; note = 2'-fluorouridine-3'-phosphate
  modified_base 16: mod_base = OTHER; note = 2'-O-methylcytidine-3'-phosphate
  modified_base 17: mod_base = OTHER; note = 2'-fluoroguanosine-3'-phosphate
  modified_base 18: mod_base = OTHER; note = 2'-O-methyladenosine-3'-phosphate
  modified_base 19: mod_base = OTHER; note = 2'-fluorocytidine-3'-phosphate
  modified_base 20: mod_base = OTHER; note = 2'-O-methyladenosine-3'-phosphate
  modified_base 21: mod_base = OTHER; note 2'-fluoroadenosine-3'-phosphate-N-[tris(GalNAc-alkyl)-amido decanoyl)]-4-hydroxyprolinol (Hyp-(GalNAc-alkyl)3)
gaatgtgaaagtcatcgacaa

SEQ ID NO: 194 - RNA, 21 nt, synthetic construct
  source 1..21: mol_type = other RNA
  modified_base 1: mod_base = OTHER; note = 2'-fluoroguanosine-3'-phosphorothioate
  modified_base 2: mod_base = OTHER; note = 2'-O-methyladenosine-3'- phosphorothioate
  modified_base 3: mod_base = OTHER; note = 2'-fluoroadenosine-3'-phosphate
  modified_base 4: mod_base = OTHER; note = 2'-O-methyluridine-3'-phosphate
  modified_base 5: mod_base = OTHER; note = 2'-fluoroguanosine-3'-phosphate
  modified_base 6: mod_base = OTHER; note = 2'-O-methyluridine-3'-phosphate
  modified_base 7: mod_base = OTHER; note = 2'-fluoroguanosine-3'-phosphate
  modified_base 8: mod_base = OTHER; note = 2'-O-methyladenosine-3'-phosphate
  modified_base 9: mod_base = OTHER; note = 2'-fluoroadenosine-3'-phosphate
  modified_base 10: mod_base = OTHER; note = 2'-fluoroadenosine-3'-phosphate
  modified_base 11: mod_base = OTHER; note = 2'-fluoroguanosine-3'-phosphate
  modified_base 12: mod_base = OTHER; note = 2'-O-methyluridine-3'-phosphate
  modified_base 13: mod_base = OTHER; note = 2'-fluorocytidine-3'-phosphate
  modified_base 14: mod_base = OTHER; note = 2'-O-methyladenosine-3'-phosphate
  modified_base 15: mod_base = OTHER; note = 2'-fluorouridine-3'-phosphate
  modified_base 16: mod_base = OTHER; note = 2'-O-methylcytidine-3'-phosphate
  modified_base 17: mod_base = OTHER; note = 2'-fluoroguanosine-3'-phosphate
  modified_base 18: mod_base = OTHER; note = 2'-O-methyladenosine-3'-phosphate
  modified_base 19: mod_base = OTHER; note = 2'-fluorocytidine-3'-phosphate
  modified_base 20: mod_base = OTHER; note = 2'-O-methyladenosine-3'-phosphate
  modified_base 21: mod_base = OTHER; note 2'-fluoroadenosine-3'-phosphate-N-[tris(GalNAc-alkyl)-amido decanoyl)]-4-hydroxyprolinol (Hyp-(GalNAc-alkyl)3)
gaatgtgaaagtcatcgacaa

SEQ ID NO: 195 - RNA, 21 nt, synthetic construct
  source 1..21: mol_type = other RNA
  modified_base 1: mod_base = OTHER; note = 2'-fluoroguanosine-3'-phosphorothioate
  modified_base 2: mod_base = OTHER; note = 2'-O-methyladenosine-3'- phosphorothioate
  modified_base 3: mod_base = OTHER; note = 2'-fluoroadenosine-3'-phosphate
  modified_base 4: mod_base = OTHER; note = 2'-O-methyluridine-3'-phosphate
  modified_base 5: mod_base = OTHER; note = 2'-fluoroguanosine-3'-phosphate
  modified_base 6: mod_base = OTHER; note = 2'-O-methyluridine-3'-phosphate
  modified_base 7: mod_base = OTHER; note = 2'-fluoroguanosine-3'-phosphate
  modified_base 8: mod_base = OTHER; note = 2'-O-methyladenosine-3'-phosphate
  modified_base 9: mod_base = OTHER; note = 2'-fluoroadenosine-3'-phosphate
  modified_base 10: mod_base = OTHER; note = 2'-fluoroadenosine-3'-phosphate
  modified_base 11: mod_base = OTHER; note = 2'-fluoroguanosine-3'-phosphate
  modified_base 12: mod_base = OTHER; note = 2'-O-methyluridine-3'-phosphate
  modified_base 13: mod_base = OTHER; note = 2'-fluorocytidine-3'-phosphate
  modified_base 14: mod_base = OTHER; note = 2'-O-methyladenosine-3'-phosphate
  modified_base 15: mod_base = OTHER; note = 2'-fluorouridine-3'-phosphate
  modified_base 16: mod_base = OTHER; note = 2'-O-methylcytidine-3'-phosphate
  modified_base 17: mod_base = OTHER; note = 2'-fluoroguanosine-3'-phosphate
  modified_base 18: mod_base = OTHER; note = 2'-O-methyladenosine-3'-phosphate
  modified_base 19: mod_base = OTHER; note = 2'-fluorocytidine-3'-phosphate
  modified_base 20: mod_base = OTHER; note = 2'-O-methyladenosine-3'-phosphate
  modified_base 21: mod_base = OTHER; note 2'-fluoroadenosine-3'-phosphate-N-[tris(GalNAc-alkyl)-amido decanoyl)]-4-hydroxyprolinol (Hyp-(GalNAc-alkyl)3)
gaatgtgaaagtcatcgacaa

SEQ ID NO: 196 - RNA, 21 nt, synthetic construct
  source 1..21: mol_type = other RNA
  modified_base 1: mod_base = OTHER; note = 2'-fluoroguanosine-3'-phosphorothioate
  modified_base 2: mod_base = OTHER; note = 2'-O-methyladenosine-3'- phosphorothioate
  modified_base 3: mod_base = OTHER; note = 2'-fluoroadenosine-3'-phosphate
  modified_base 4: mod_base = OTHER; note = 2'-O-methyluridine-3'-phosphate
  modified_base 5: mod_base = OTHER; note = 2'-fluoroguanosine-3'-phosphate
  modified_base 6: mod_base = OTHER; note = 2'-O-methyluridine-3'-phosphate
  modified_base 7: mod_base = OTHER; note = 2'-fluoroguanosine-3'-phosphate
  modified_base 8: mod_base = OTHER; note = 2'-O-methyladenosine-3'-phosphate
  modified_base 9: mod_base = OTHER; note = 2'-fluoroadenosine-3'-phosphate
  modified_base 10: mod_base = OTHER; note = 2'-fluoroadenosine-3'-phosphate
  modified_base 11: mod_base = OTHER; note = 2'-fluoroguanosine-3'-phosphate
  modified_base 12: mod_base = OTHER; note = 2'-O-methyluridine-3'-phosphate
  modified_base 13: mod_base = OTHER; note = 2'-fluorocytidine-3'-phosphate
  modified_base 14: mod_base = OTHER; note = 2'-O-methyladenosine-3'-phosphate
  modified_base 15: mod_base = OTHER; note = 2'-fluorouridine-3'-phosphate
  modified_base 16: mod_base = OTHER; note = 2'-O-methylcytidine-3'-phosphate
  modified_base 17: mod_base = OTHER; note = 2'-fluoroguanosine-3'-phosphate
  modified_base 18: mod_base = OTHER; note = 2'-O-methyladenosine-3'-phosphate
  modified_base 19: mod_base = OTHER; note = 2'-fluorocytidine-3'-phosphate
  modified_base 20: mod_base = OTHER; note = 2'-O-methyladenosine-3'-phosphate
  modified_base 21: mod_base = OTHER; note 2'-fluoroadenosine-3'-phosphate-N-[tris(GalNAc-alkyl)-amido decanoyl)]-4-hydroxyprolinol (Hyp-(GalNAc-alkyl)3)
gaatgtgaaagtcatcgacaa

SEQ ID NO: 197 - RNA, 21 nt, synthetic construct
  source 1..21: mol_type = other RNA
  modified_base 1: mod_base = OTHER; note = 2'-fluoroguanosine-3'-phosphorothioate
  modified_base 2: mod_base = OTHER; note = 2'-O-methyladenosine-3'- phosphorothioate
  modified_base 3: mod_base = OTHER; note = 2'-fluoroadenosine-3'-phosphate
  modified_base 4: mod_base = OTHER; note = 2'-O-methyluridine-3'-phosphate
  modified_base 5: mod_base = OTHER; note = 2'-fluoroguanosine-3'-phosphate
  modified_base 6: mod_base = OTHER; note = 2'-O-methyluridine-3'-phosphate
  modified_base 7: mod_base = OTHER; note = 2'-fluoroguanosine-3'-phosphate
  modified_base 8: mod_base = OTHER; note = 2'-O-methyladenosine-3'-phosphate
  modified_base 9: mod_base = OTHER; note = 2'-fluoroadenosine-3'-phosphate
  modified_base 10: mod_base = OTHER; note = 2'-fluoroadenosine-3'-phosphate
  modified_base 11: mod_base = OTHER; note = 2'-fluoroguanosine-3'-phosphate
  modified_base 12: mod_base = OTHER; note = 2'-O-methyluridine-3'-phosphate
  modified_base 13: mod_base = OTHER; note = 2'-fluorocytidine-3'-phosphate
  modified_base 14: mod_base = OTHER; note = 2'-O-methyladenosine-3'-phosphate
  modified_base 15: mod_base = OTHER; note = 2'-fluorouridine-3'-phosphate
  modified_base 16: mod_base = OTHER; note = 2'-O-methylcytidine-3'-phosphate
  modified_base 17: mod_base = OTHER; note = 2'-fluoroguanosine-3'-phosphate
  modified_base 18: mod_base = OTHER; note = 2'-O-methyladenosine-3'-phosphate
  modified_base 19: mod_base = OTHER; note = 2'-fluorocytidine-3'-phosphate
  modified_base 20: mod_base = OTHER; note = 2'-O-methyladenosine-3'-phosphate
  modified_base 21: mod_base = OTHER; note 2'-fluoroadenosine-3'-phosphate-N-[tris(GalNAc-alkyl)-amido decanoyl)]-4-hydroxyprolinol (Hyp-(GalNAc-alkyl)3)
gaatgtgaaagtcatcgacaa

SEQ ID NO: 198 - DNA, 21 bp, synthetic construct
  source 1..21: mol_type = other DNA
  modified_base 1: mod_base = OTHER; note = 2'-O-methylguanosine-3'- phosphorothioate
  modified_base 2: mod_base = OTHER; note = 2'-O-methyladenosine-3'- phosphorothioate
  modified_base 3: mod_base = OTHER; note = 2'-O-methyladenosine-3'-phosphate
  modified_base 4: mod_base = OTHER; note = 2'-O-methyluridine-3'-phosphate
  modified_base 5: mod_base = OTHER; note = 2'-O-methylguanosine-3'-phosphate
  modified_base 6: mod_base = OTHER; note = 2'-O-methyluridine-3'-phosphate
  modified_base 7: mod_base = OTHER; note = 2'-O-methylguanosine-3'-phosphate
  modified_base 8: mod_base = OTHER; note = 2'-O-methyladenosine-3'-phosphate
  modified_base 9: mod_base = OTHER; note = 2'-O-methyladenosine-3'-phosphate
  modified_base 10: mod_base = OTHER; note = 2'-O-methyladenosine-3'-phosphate
  modified_base 12: mod_base = OTHER; note = 2'-O-methyluridine-3'-phosphate
  modified_base 13: mod_base = OTHER; note = 2'-O-methylcytidine-3'-phosphate
  modified_base 14: mod_base = OTHER; note = 2'-O-methyladenosine-3'-phosphate
  modified_base 15: mod_base = OTHER; note = 2'-O-methyluridine-3'-phosphate
  modified_base 16: mod_base = OTHER; note = Cytidine-glycol nucleic acid (GNA) S-Isomer
  modified_base 17: mod_base = OTHER; note = 2'-O-methylguanosine-3'-phosphate
  modified_base 18: mod_base = OTHER; note = 2'-O-methyladenosine-3'-phosphate
  modified_base 19: mod_base = OTHER; note = 2'-O-methylcytidine-3'-phosphate
  modified_base 20: mod_base = OTHER; note = 2'-O-methyladenosine-3'-phosphate
  modified_base 21: mod_base = OTHER; note 2'-O-methyladenosine-3'-phosphate-N-[tris(GalNAc-alkyl)-ami dodecanoyl)]-4-hydroxyprolinol (Hyp-(GalNAc-alkyl)3)
  misc_feature 1..10: note = RNA
  misc_feature 11: note = DNA
  misc_feature 12..21: note = RNA
gaatgtgaaagtcatcgacaa

SEQ ID NO: 199 - RNA, 21 nt, synthetic construct
  source 1..21: mol_type = other RNA
  modified_base 1: mod_base = OTHER; note = 2'-fluoroguanosine-3'-phosphorothioate
  modified_base 2: mod_base = OTHER; note = 2'-O-methyladenosine-3'- phosphorothioate
  modified_base 3: mod_base = OTHER; note = 2'-fluorocytidine-3'-phosphate
  modified_base 4: mod_base = OTHER; note = 2'-O-methyluridine-3'-phosphate
  modified_base 5: mod_base = OTHER; note = 2'-fluorouridine-3'-phosphate
  modified_base 6: mod_base = OTHER; note = 2'-O-methyluridine-3'-phosphate
  modified_base 7: mod_base = OTHER; note = 2'-fluorocytidine-3'-phosphate
  modified_base 8: mod_base = OTHER; note = 2'-O-methyladenosine-3'-phosphate
  modified_base 9: mod_base = OTHER; note = 2'-fluorouridine-3'-phosphate
  modified_base 10: mod_base = OTHER; note = 2'-fluorocytidine-3'-phosphate
  modified_base 11: mod_base = OTHER; note = 2'-fluorocytidine-3'-phosphate
  modified_base 12: mod_base = OTHER; note = 2'-O-methyluridine-3'-phosphate
  modified_base 13: mod_base = OTHER; note = 2'-fluoroguanosine-3'-phosphate
  modified_base 14: mod_base = OTHER; note = 2'-O-methylguanosine-3'-phosphate
  modified_base 15: mod_base = OTHER; note = 2'-fluoroadenosine-3'-phosphate
  modified_base 16: mod_base = OTHER; note = 2'-O-methyladenosine-3'-phosphate
  modified_base 17: mod_base = OTHER; note = 2'-fluoroadenosine-3'-phosphate
  modified_base 18: mod_base = OTHER; note = 2'-O-methyluridine-3'-phosphate
  modified_base 19: mod_base = OTHER; note = 2'-fluoroadenosine-3'-phosphate
  modified_base 20: mod_base = OTHER; note = 2'-O-methyluridine-3'-phosphate
  modified_base 21: mod_base = OTHER; note 2'-fluoroadenosine-3'-phosphate-N-[tris(GalNAc-alkyl)-amido decanoyl)]-4-hydroxyprolinol (Hyp-(GalNAc-alkyl)3)
gactttcatcctggaaatata

SEQ ID NO: 200 - RNA, 21 nt, synthetic construct
  source 1..21: mol_type = other RNA
  modified_base 1: mod_base = OTHER; note = 2'-O-methylguanosine-3'- phosphorothioate
  modified_base 2: mod_base = OTHER; note = 2'-O-methyladenosine-3'- phosphorothioate
  modified_base 3: mod_base = OTHER; note = 2'-O-methylcytidine-3'-phosphate
  modified_base 4: mod_base = OTHER; note = 2'-O-methyluridine-3'-phosphate
  modified_base 5: mod_base = OTHER; note = 2'-O-methyluridine-3'-phosphate
  modified_base 6: mod_base = OTHER; note = 2'-O-methyluridine-3'-phosphate
  modified_base 7: mod_base = OTHER; note = 2'-fluorocytidine-3'-phosphate
  modified_base 8: mod_base = OTHER; note = 2'-O-methyladenosine-3'-phosphate
  modified_base 9: mod_base = OTHER; note = 2'-fluorouridine-3'-phosphate
  modified_base 10: mod_base = OTHER; note = 2'-fluorocytidine-3'-phosphate
  modified_base 11: mod_base = OTHER; note = 2'-fluorocytidine-3'-phosphate
  modified_base 12: mod_base = OTHER; note = 2'-O-methyluridine-3'-phosphate
  modified_base 13: mod_base = OTHER; note = 2'-O-methylguanosine-3'-phosphate
  modified_base 14: mod_base = OTHER; note = 2'-O-methylguanosine-3'-phosphate
  modified_base 15: mod_base = OTHER; note = 2'-O-methyladenosine-3'-phosphate
  modified_base 16: mod_base = OTHER; note = 2'-fluoroadenosine-3'-phosphate
  modified_base 17: mod_base = OTHER; note = 2'-O-methyladenosine-3'-phosphate
  modified_base 18: mod_base = OTHER; note = 2'-O-methyluridine-3'-phosphate
  modified_base 19: mod_base = OTHER; note = 2'-O-methyladenosine-3'-phosphate
  modified_base 20: mod_base = OTHER; note = 2'-O-methyluridine-3'-phosphate
  modified_base 21: mod_base = OTHER; note 2'-O-methyladenosine-3'-phosphate-N-[tris(GalNAc-alkyl)-ami dodecanoyl)]-4-hydroxyprolinol (Hyp-(GalNAc-alkyl)3)
gactttcatcctggaaatata

SEQ ID NO: 201 - RNA, 21 nt, synthetic construct
  source 1..21: mol_type = other RNA
  modified_base 1: mod_base = OTHER; note = 2'-O-methylguanosine-3'- phosphorothioate
  modified_base 2: mod_base = OTHER; note = 2'-O-methyladenosine-3'- phosphorothioate
  modified_base 3: mod_base = OTHER; note = 2'-O-methylcytidine-3'-phosphate
  modified_base 4: mod_base = OTHER; note = 2'-O-methyluridine-3'-phosphate
  modified_base 5: mod_base = OTHER; note = 2'-O-methyluridine-3'-phosphate
  modified_base 6: mod_base = OTHER; note = 2'-O-methyluridine-3'-phosphate
  modified_base 7: mod_base = OTHER; note = 2'-fluorocytidine-3'-phosphate
  modified_base 8: mod_base = OTHER; note = 2'-O-methyladenosine-3'-phosphate
  modified_base 9: mod_base = OTHER; note = 2'-fluorouridine-3'-phosphate
  modified_base 10: mod_base = OTHER; note = 2'-fluorocytidine-3'-phosphate
  modified_base 11: mod_base = OTHER; note = 2'-fluorocytidine-3'-phosphate
  modified_base 12: mod_base = OTHER; note = 2'-O-methyluridine-3'-phosphate
  modified_base 13: mod_base = OTHER; note = 2'-O-methylguanosine-3'-phosphate
  modified_base 14: mod_base = OTHER; note = 2'-O-methylguanosine-3'-phosphate
  modified_base 15: mod_base = OTHER; note = 2'-O-methyladenosine-3'-phosphate
  modified_base 16: mod_base = OTHER; note = 2'-O-methyladenosine-3'-phosphate
  modified_base 17: mod_base = OTHER; note = 2'-O-methyladenosine-3'-phosphate
  modified_base 18: mod_base = OTHER; note = 2'-O-methyluridine-3'-phosphate
  modified_base 19: mod_base = OTHER; note = 2'-O-methyladenosine-3'-phosphate
  modified_base 20: mod_base = OTHER; note = 2'-O-methyluridine-3'-phosphate
  modified_base 21: mod_base = OTHER; note 2'-O-methyladenosine-3'-phosphate-N-[tris(GalNAc-alkyl)-ami dodecanoyl)]-4-hydroxyprolinol (Hyp-(GalNAc-alkyl)3)
gactttcatcctggaaatata

SEQ ID NO: 202 - RNA, 21 nt, synthetic construct
  source 1..21: mol_type = other RNA
  modified_base 1: mod_base = OTHER; note = 2'-O-methylguanosine-3'- phosphorothioate
  modified_base 2: mod_base = OTHER; note = 2'-O-methyladenosine-3'- phosphorothioate
  modified_base 3: mod_base = OTHER; note = 2'-O-methylcytidine-3'-phosphate
  modified_base 4: mod_base = OTHER; note = 2'-O-methyluridine-3'-phosphate
  modified_base 5: mod_base = OTHER; note = 2'-O-methyluridine-3'-phosphate
  modified_base 6: mod_base = OTHER; note = 2'-O-methyluridine-3'-phosphate
  modified_base 7: mod_base = OTHER; note = 2'-fluorocytidine-3'-phosphate
  modified_base 8: mod_base = OTHER; note = 2'-O-methyladenosine-3'-phosphate
  modified_base 9: mod_base = OTHER; note = 2'-O-methyluridine-3'-phosphate
  modified_base 10: mod_base = OTHER; note = 2'-O-methylcytidine-3'-phosphate
  modified_base 11: mod_base = OTHER; note = 2'-fluorocytidine-3'-phosphate
  modified_base 12: mod_base = OTHER; note = 2'-O-methyluridine-3'-phosphate
  modified_base 13: mod_base = OTHER; note = 2'-O-methylguanosine-3'-phosphate
  modified_base 14: mod_base = OTHER; note = 2'-O-methylguanosine-3'-phosphate
  modified_base 15: mod_base = OTHER; note = 2'-O-methyladenosine-3'-phosphate
  modified_base 16: mod_base = OTHER; note = 2'-O-methyladenosine-3'-phosphate
  modified_base 17: mod_base = OTHER; note = 2'-fluoroadenosine-3'-phosphate
  modified_base 18: mod_base = OTHER; note = 2'-O-methyluridine-3'-phosphate
  modified_base 19: mod_base = OTHER; note = 2'-O-methyladenosine-3'-phosphate
  modified_base 20: mod_base = OTHER; note = 2'-O-methyluridine-3'-phosphate
  modified_base 21: mod_base = OTHER; note 2'-O-methyladenosine-3'-phosphate-N-[tris(GalNAc-alkyl)-ami dodecanoyl)]-4-hydroxyprolinol (Hyp-(GalNAc-alkyl)3)
gactttcatcctggaaatata

SEQ ID NO: 203 - RNA, 21 nt, synthetic construct
  source 1..21: mol_type = other RNA
  modified_base 1: mod_base = OTHER; note = 2'-O-methylguanosine-3'- phosphorothioate
  modified_base 2: mod_base = OTHER; note = 2'-O-methyladenosine-3'- phosphorothioate
  modified_base 3: mod_base = OTHER; note = 2'-O-methylcytidine-3'-phosphate
  modified_base 4: mod_base = OTHER; note = 2'-O-methyluridine-3'-phosphate
  modified_base 5: mod_base = OTHER; note = 2'-O-methyluridine-3'-phosphate
  modified_base 6: mod_base = OTHER; note = 2'-O-methyluridine-3'-phosphate
  modified_base 7: mod_base = OTHER; note = 2'-O-methylcytidine-3'-phosphate
  modified_base 8: mod_base = OTHER; note = 2'-O-methyladenosine-3'-phosphate
  modified_base 9: mod_base = OTHER; note = 2'-O-methyluridine-3'-phosphate
  modified_base 10: mod_base = OTHER; note = 2'-O-methylcytidine-3'-phosphate
  modified_base 11: mod_base = OTHER; note = 2'-fluorocytidine-3'-phosphate
  modified_base 12: mod_base = OTHER; note = 2'-O-methyluridine-3'-phosphate
  modified_base 13: mod_base = OTHER; note = 2'-O-methylguanosine-3'-phosphate
  modified_base 14: mod_base = OTHER; note = 2'-O-methylguanosine-3'-phosphate
  modified_base 15: mod_base = OTHER; note = 2'-O-methyladenosine-3'-phosphate
  modified_base 16: mod_base = OTHER; note = 2'-O-methyladenosine-3'-phosphate
  modified_base 17: mod_base = OTHER; note = 2'-fluoroadenosine-3'-phosphate
  modified_base 18: mod_base = OTHER; note = 2'-O-methyluridine-3'-phosphate
  modified_base 19: mod_base = OTHER; note = 2'-O-methyladenosine-3'-phosphate
  modified_base 20: mod_base = OTHER; note = 2'-O-methyluridine-3'-phosphate
  modified_base 21: mod_base = OTHER; note 2'-O-methyladenosine-3'-phosphate-N-[tris(GalNAc-alkyl)-ami dodecanoyl)]-4-hydroxyprolinol (Hyp-(GalNAc-alkyl)3)
gactttcatcctggaaatata

SEQ ID NO: 204 - RNA, 21 nt, synthetic construct
  source 1..21: mol_type = other RNA
  modified_base 1: mod_base = OTHER; note = 2'-O-methylguanosine-3'- phosphorothioate
  modified_base 2: mod_base = OTHER; note = 2'-O-methyladenosine-3'- phosphorothioate
  modified_base 3: mod_base = OTHER; note = 2'-O-methylcytidine-3'-phosphate
  modified_base 4: mod_base = OTHER; note = 2'-O-methyluridine-3'-phosphate
  modified_base 5: mod_base = OTHER; note = 2'-O-methyluridine-3'-phosphate
  modified_base 6: mod_base = OTHER; note = 2'-O-methyluridine-3'-phosphate
  modified_base 7: mod_base = OTHER; note = 2'-fluorocytidine-3'-phosphate
  modified_base 8: mod_base = OTHER; note = 2'-O-methyladenosine-3'-phosphate
  modified_base 9: mod_base = OTHER; note = 2'-O-methyluridine-3'-phosphate
  modified_base 10: mod_base = OTHER; note = 2'-O-methylcytidine-3'-phosphate
  modified_base 11: mod_base = OTHER; note = 2'-fluorocytidine-3'-phosphate
  modified_base 12: mod_base = OTHER; note = 2'-O-methyluridine-3'-phosphate
  modified_base 13: mod_base = OTHER; note = 2'-O-methylguanosine-3'-phosphate
  modified_base 14: mod_base = OTHER; note = 2'-O-methylguanosine-3'-phosphate
  modified_base 15: mod_base = OTHER; note = 2'-O-methyladenosine-3'-phosphate
  modified_base 16: mod_base = OTHER; note = 2'-O-methyladenosine-3'-phosphate
  modified_base 17: mod_base = OTHER; note = 2'-O-methyladenosine-3'-phosphate
  modified_base 18: mod_base = OTHER; note = 2'-O-methyluridine-3'-phosphate
  modified_base 19: mod_base = OTHER; note = 2'-O-methyladenosine-3'-phosphate
  modified_base 20: mod_base = OTHER; note = 2'-O-methyluridine-3'-phosphate
  modified_base 21: mod_base = OTHER; note 2'-O-methyladenosine-3'-phosphate-N-[tris(GalNAc-alkyl)-ami dodecanoyl)]-4-hydroxyprolinol (Hyp-(GalNAc-alkyl)3)
gactttcatcctggaaatata

SEQ ID NO: 205 - RNA, 19 nt, synthetic construct
  source 1..19: mol_type = other RNA
  modified_base 1: mod_base = OTHER; note = 2'-fluorocytidine-3'-phosphorothioate
  modified_base 2: mod_base = OTHER; note = 2'-O-methyluridine-3'-phosphorothioate
  modified_base 3: mod_base = OTHER; note = 2'-fluorouridine-3'-phosphate
  modified_base 4: mod_base = OTHER; note = 2'-O-methyluridine-3'-phosphate
  modified_base 5: mod_base = OTHER; note = 2'-fluorocytidine-3'-phosphate
  modified_base 6: mod_base = OTHER; note = 2'-O-methyladenosine-3'-phosphate
  modified_base 7: mod_base = OTHER; note = 2'-fluorouridine-3'-phosphate
  modified_base 8: mod_base = OTHER; note = 2'-fluorocytidine-3'-phosphate
  modified_base 9: mod_base = OTHER; note = 2'-fluorocytidine-3'-phosphate
  modified_base 10: mod_base = OTHER; note = 2'-O-methyluridine-3'-phosphate
  modified_base 11: mod_base = OTHER; note = 2'-fluoroguanosine-3'-phosphate
  modified_base 12: mod_base = OTHER; note = 2'-O-methylguanosine-3'-phosphate
  modified_base 13: mod_base = OTHER; note = 2'-fluoroadenosine-3'-phosphate
  modified_base 14: mod_base = OTHER; note = 2'-O-methyladenosine-3'-phosphate
  modified_base 15: mod_base = OTHER; note = 2'-fluoroadenosine-3'-phosphate
  modified_base 16: mod_base = OTHER; note = 2'-O-methyluridine-3'-phosphate
  modified_base 17: mod_base = OTHER; note = 2'-fluoroadenosine-3'-phosphate
  modified_base 18: mod_base = OTHER; note = 2'-O-methyluridine-3'-phosphate
  modified_base 19: mod_base = OTHER; note 2'-fluoroadenosine-3'-phosphate-N-[tris(GalNAc-alkyl)-amido decanoyl)]-4-hydroxyprolinol (Hyp-(GalNAc-alkyl)3)
ctttcatcctggaaatata

SEQ ID NO: 206 - RNA, 19 nt, synthetic construct
  source 1..19: mol_type = other RNA
  modified_base 1: mod_base = OTHER; note = 2'-O-methylcytidine-3'- phosphorothioate
  modified_base 2: mod_base = OTHER; note = 2'-O-methyluridine-3'-phosphorothioate
  modified_base 3: mod_base = OTHER; note = 2'-O-methyluridine-3'-phosphate
  modified_base 4: mod_base = OTHER; note = 2'-O-methyluridine-3'-phosphate
  modified_base 5: mod_base = OTHER; note = 2'-fluorocytidine-3'-phosphate
  modified_base 6: mod_base = OTHER; note = 2'-O-methyladenosine-3'-phosphate
  modified_base 7: mod_base = OTHER; note = 2'-fluorouridine-3'-phosphate
  modified_base 8: mod_base = OTHER; note = 2'-fluorocytidine-3'-phosphate
  modified_base 9: mod_base = OTHER; note = 2'-fluorocytidine-3'-phosphate
  modified_base 10: mod_base = OTHER; note = 2'-O-methyluridine-3'-phosphate
  modified_base 11: mod_base = OTHER; note = 2'-O-methylguanosine-3'-phosphate
  modified_base 12: mod_base = OTHER; note = 2'-O-methylguanosine-3'-phosphate
  modified_base 13: mod_base = OTHER; note = 2'-O-methyladenosine-3'-phosphate
  modified_base 14: mod_base = OTHER; note = 2'-O-methyladenosine-3'-phosphate
  modified_base 15: mod_base = OTHER; note = 2'-O-methyladenosine-3'-phosphate
  modified_base 16: mod_base = OTHER; note = 2'-O-methyluridine-3'-phosphate
  modified_base 17: mod_base = OTHER; note = 2'-O-methyladenosine-3'-phosphate
  modified_base 18: mod_base = OTHER; note = 2'-O-methyluridine-3'-phosphate
  modified_base 19: mod_base = OTHER; note 2'-O-methyladenosine-3'-phosphate-N-[tris(GalNAc-alkyl)-ami dodecanoyl)]-4-hydroxyprolinol (Hyp-(GalNAc-alkyl)3)
ctttcatcctggaaatata

SEQ ID NO: 207 - RNA, 21 nt, synthetic construct
  source 1..21: mol_type = other RNA
  modified_base 1: mod_base = OTHER; note = 2'-fluoroguanosine-3'-phosphorothioate
  modified_base 2: mod_base = OTHER; note = 2'-O-methyladenosine-3'- phosphorothioate
  modified_base 3: mod_base = OTHER; note = 2'-fluorocytidine-3'-phosphate
  modified_base 4: mod_base = OTHER; note = 2'-O-methyluridine-3'-phosphate
  modified_base 5: mod_base = OTHER; note = 2'-fluorouridine-3'-phosphate
  modified_base 6: mod_base = OTHER; note = 2'-O-methyluridine-3'-phosphate
  modified_base 7: mod_base = OTHER; note = 2'-fluorocytidine-3'-phosphate
  modified_base 8: mod_base = OTHER; note = 2'-O-methyladenosine-3'-phosphate
  modified_base 9: mod_base = OTHER; note = 2'-fluorouridine-3'-phosphate
  modified_base 10: mod_base = OTHER; note = 2'-fluorocytidine-3'-phosphate
  modified_base 11: mod_base = OTHER; note = 2'-fluorocytidine-3'-phosphate
  modified_base 12: mod_base = OTHER; note = 2'-O-methyluridine-3'-phosphate
  modified_base 13: mod_base = OTHER; note = 2'-fluoroguanosine-3'-phosphate
  modified_base 14: mod_base = OTHER; note = 2'-O-methylguanosine-3'-phosphate
  modified_base 15: mod_base = OTHER; note = 2'-fluoroadenosine-3'-phosphate
  modified_base 16: mod_base = OTHER; note = 2'-O-methyladenosine-3'-phosphate
  modified_base 17: mod_base = OTHER; note = 2'-fluoroadenosine-3'-phosphate
  modified_base 18: mod_base = OTHER; note = 2'-O-methyluridine-3'-phosphate
  modified_base 19: mod_base = OTHER; note = 2'-fluoroadenosine-3'-phosphate
  modified_base 20: mod_base = OTHER; note = 2'-O-methyluridine-3'-phosphate
  modified_base 21: mod_base = OTHER; note 2'-fluoroadenosine-3'-phosphate-N-[tris(GalNAc-alkyl)-amido decanoyl)]-4-hydroxyprolinol (Hyp-(GalNAc-alkyl)3)
gactttcatcctggaaatata

SEQ ID NO: 208 - RNA, 21 nt, synthetic construct
  source 1..21: mol_type = other RNA
  modified_base 1: mod_base = OTHER; note = 2'-fluoroguanosine-3'-phosphorothioate
  modified_base 2: mod_base = OTHER; note = 2'-O-methyladenosine-3'- phosphorothioate
  modified_base 3: mod_base = OTHER; note = 2'-fluorocytidine-3'-phosphate
  modified_base 4: mod_base = OTHER; note = 2'-O-methyluridine-3'-phosphate
  modified_base 5: mod_base = OTHER; note = 2'-fluorouridine-3'-phosphate
  modified_base 6: mod_base = OTHER; note = 2'-O-methyluridine-3'-phosphate
  modified_base 7: mod_base = OTHER; note = 2'-fluorocytidine-3'-phosphate
  modified_base 8: mod_base = OTHER; note = 2'-O-methyladenosine-3'-phosphate
  modified_base 9: mod_base = OTHER; note = 2'-fluorouridine-3'-phosphate
  modified_base 10: mod_base = OTHER; note = 2'-fluorocytidine-3'-phosphate
  modified_base 11: mod_base = OTHER; note = 2'-fluorocytidine-3'-phosphate
  modified_base 12: mod_base = OTHER; note = 2'-O-methyluridine-3'-phosphate
  modified_base 13: mod_base = OTHER; note = 2'-fluoroguanosine-3'-phosphate
  modified_base 14: mod_base = OTHER; note = 2'-O-methylguanosine-3'-phosphate
  modified_base 15: mod_base = OTHER; note = 2'-fluoroadenosine-3'-phosphate
  modified_base 16: mod_base = OTHER; note = 2'-O-methyladenosine-3'-phosphate
  modified_base 17: mod_base = OTHER; note = 2'-fluoroadenosine-3'-phosphate
  modified_base 18: mod_base = OTHER; note = 2'-O-methyluridine-3'-phosphate
  modified_base 19: mod_base = OTHER; note = 2'-fluoroadenosine-3'-phosphate
  modified_base 20: mod_base = OTHER; note = 2'-O-methyluridine-3'-phosphate
  modified_base 21: mod_base = OTHER; note 2'-fluoroadenosine-3'-phosphate-N-[tris(GalNAc-alkyl)-amido decanoyl)]-4-hydroxyprolinol (Hyp-(GalNAc-alkyl)3)
gactttcatcctggaaatata

SEQ ID NO: 209 - RNA, 21 nt, synthetic construct
  source 1..21: mol_type = other RNA
  modified_base 1: mod_base = OTHER; note = 2'-fluoroguanosine-3'-phosphorothioate
  modified_base 2: mod_base = OTHER; note = 2'-O-methyladenosine-3'- phosphorothioate
  modified_base 3: mod_base = OTHER; note = 2'-fluorocytidine-3'-phosphate
  modified_base 4: mod_base = OTHER; note = 2'-O-methyluridine-3'-phosphate
  modified_base 5: mod_base = OTHER; note = 2'-fluorouridine-3'-phosphate
  modified_base 6: mod_base = OTHER; note = 2'-O-methyluridine-3'-phosphate
  modified_base 7: mod_base = OTHER; note = 2'-fluorocytidine-3'-phosphate
  modified_base 8: mod_base = OTHER; note = 2'-O-methyladenosine-3'-phosphate
  modified_base 9: mod_base = OTHER; note = 2'-fluorouridine-3'-phosphate
  modified_base 10: mod_base = OTHER; note = 2'-fluorocytidine-3'-phosphate
  modified_base 11: mod_base = OTHER; note = 2'-fluorocytidine-3'-phosphate
  modified_base 12: mod_base = OTHER; note = 2'-O-methyluridine-3'-phosphate
  modified_base 13: mod_base = OTHER; note = 2'-fluoroguanosine-3'-phosphate
  modified_base 14: mod_base = OTHER; note = 2'-O-methylguanosine-3'-phosphate
  modified_base 15: mod_base = OTHER; note = 2'-fluoroadenosine-3'-phosphate
  modified_base 16: mod_base = OTHER; note = 2'-O-methyladenosine-3'-phosphate
  modified_base 17: mod_base = OTHER; note = 2'-fluoroadenosine-3'-phosphate
  modified_base 18: mod_base = OTHER; note = 2'-O-methyluridine-3'-phosphate
  modified_base 19: mod_base = OTHER; note = 2'-fluoroadenosine-3'-phosphate
  modified_base 20: mod_base = OTHER; note = 2'-O-methyluridine-3'-phosphate
  modified_base 21: mod_base = OTHER; note 2'-fluoroadenosine-3'-phosphate-N-[tris(GalNAc-alkyl)-amido decanoyl)]-4-hydroxyprolinol (Hyp-(GalNAc-alkyl)3)
gactttcatcctggaaatata

SEQ ID NO: 210 - RNA, 21 nt, synthetic construct
  source 1..21: mol_type = other RNA
  modified_base 1: mod_base = OTHER; note = 2'-fluoroguanosine-3'-phosphorothioate
  modified_base 2: mod_base = OTHER; note = 2'-O-methyladenosine-3'- phosphorothioate
  modified_base 3: mod_base = OTHER; note = 2'-fluorocytidine-3'-phosphate
  modified_base 4: mod_base = OTHER; note = 2'-O-methyluridine-3'-phosphate
  modified_base 5: mod_base = OTHER; note = 2'-fluorouridine-3'-phosphate
  modified_base 6: mod_base = OTHER; note = 2'-O-methyluridine-3'-phosphate
  modified_base 7: mod_base = OTHER; note = 2'-fluorocytidine-3'-phosphate
  modified_base 8: mod_base = OTHER; note = 2'-O-methyladenosine-3'-phosphate
  modified_base 9: mod_base = OTHER; note = 2'-fluorouridine-3'-phosphate
  modified_base 10: mod_base = OTHER; note = 2'-fluorocytidine-3'-phosphate
  modified_base 11: mod_base = OTHER; note = 2'-fluorocytidine-3'-phosphate
  modified_base 12: mod_base = OTHER; note = 2'-O-methyluridine-3'-phosphate
  modified_base 13: mod_base = OTHER; note = 2'-fluoroguanosine-3'-phosphate
  modified_base 14: mod_base = OTHER; note = 2'-O-methylguanosine-3'-phosphate
  modified_base 15: mod_base = OTHER; note = 2'-fluoroadenosine-3'-phosphate
  modified_base 16: mod_base = OTHER; note = 2'-O-methyladenosine-3'-phosphate
  modified_base 17: mod_base = OTHER; note = 2'-fluoroadenosine-3'-phosphate
  modified_base 18: mod_base = OTHER; note = 2'-O-methyluridine-3'-phosphate
  modified_base 19: mod_base = OTHER; note = 2'-fluoroadenosine-3'-phosphate
  modified_base 20: mod_base = OTHER; note = 2'-O-methyluridine-3'-phosphate
  modified_base 21: mod_base = OTHER; note 2'-fluoroadenosine-3'-phosphate-N-[tris(GalNAc-alkyl)-amido decanoyl)]-4-hydroxyprolinol (Hyp-(GalNAc-alkyl)3)
gactttcatcctggaaatata

SEQ ID NO: 211 - RNA, 21 nt, synthetic construct
  source 1..21: mol_type = other RNA
  modified_base 1: mod_base = OTHER; note = 2'-fluoroguanosine-3'-phosphorothioate
  modified_base 2: mod_base = OTHER; note = 2'-O-methyladenosine-3'- phosphorothioate
  modified_base 3: mod_base = OTHER; note = 2'-fluorocytidine-3'-phosphate
  modified_base 4: mod_base = OTHER; note = 2'-O-methyluridine-3'-phosphate
  modified_base 5: mod_base = OTHER; note = 2'-fluorouridine-3'-phosphate
  modified_base 6: mod_base = OTHER; note = 2'-O-methyluridine-3'-phosphate
  modified_base 7: mod_base = OTHER; note = 2'-fluorocytidine-3'-phosphate
  modified_base 8: mod_base = OTHER; note = 2'-O-methyladenosine-3'-phosphate
  modified_base 9: mod_base = OTHER; note = 2'-fluorouridine-3'-phosphate
  modified_base 10: mod_base = OTHER; note = 2'-fluorocytidine-3'-phosphate
  modified_base 11: mod_base = OTHER; note = 2'-fluorocytidine-3'-phosphate
  modified_base 12: mod_base = OTHER; note = 2'-O-methyluridine-3'-phosphate
  modified_base 13: mod_base = OTHER; note = 2'-fluoroguanosine-3'-phosphate
  modified_base 14: mod_base = OTHER; note = 2'-O-methylguanosine-3'-phosphate
  modified_base 15: mod_base = OTHER; note = 2'-fluoroadenosine-3'-phosphate
  modified_base 16: mod_base = OTHER; note = 2'-O-methyladenosine-3'-phosphate
  modified_base 17: mod_base = OTHER; note = 2'-fluoroadenosine-3'-phosphate
  modified_base 18: mod_base = OTHER; note = 2'-O-methyluridine-3'-phosphate
  modified_base 19: mod_base = OTHER; note = 2'-fluoroadenosine-3'-phosphate
  modified_base 20: mod_base = OTHER; note = 2'-O-methyluridine-3'-phosphate
  modified_base 21: mod_base = OTHER; note 2'-fluoroadenosine-3'-phosphate-N-[tris(GalNAc-alkyl)-amido decanoyl)]-4-hydroxyprolinol (Hyp-(GalNAc-alkyl)3)
gactttcatcctggaaatata

SEQ ID NO: 212 - RNA, 21 nt, synthetic construct
  source 1..21: mol_type = other RNA
  modified_base 1: mod_base = OTHER; note = 2'-O-methylguanosine-3'- phosphorothioate
  modified_base 2: mod_base = OTHER; note = 2'-O-methyladenosine-3'- phosphorothioate
  modified_base 3: mod_base = OTHER; note = 2'-O-methylcytidine-3'-phosphate
  modified_base 4: mod_base = OTHER; note = 2'-O-methyluridine-3'-phosphate
  modified_base 5: mod_base = OTHER; note = 2'-O-methyluridine-3'-phosphate
  modified_base 6: mod_base = OTHER; note = 2'-O-methyluridine-3'-phosphate
  modified_base 7: mod_base = OTHER; note = 2'-fluorocytidine-3'-phosphate
  modified_base 8: mod_base = OTHER; note = 2'-O-methyladenosine-3'-phosphate
  modified_base 9: mod_base = OTHER; note = 2'-fluorouridine-3'-phosphate
  modified_base 10: mod_base = OTHER; note = 2'-fluorocytidine-3'-phosphate
  modified_base 11: mod_base = OTHER; note = 2'-fluorocytidine-3'-phosphate
  modified_base 12: mod_base = OTHER; note = 2'-O-methyluridine-3'-phosphate
  modified_base 13: mod_base = OTHER; note = 2'-O-methylguanosine-3'-phosphate
  modified_base 14: mod_base = OTHER; note = 2'-O-methylguanosine-3'-phosphate
  modified_base 15: mod_base = OTHER; note = 2'-O-methyladenosine-3'-phosphate
  modified_base 16: mod_base = OTHER; note = 2'-O-methyladenosine-3'-phosphate
  modified_base 17: mod_base = OTHER; note = 2'-O-methyladenosine-3'-phosphate
  modified_base 18: mod_base = OTHER; note = 2'-O-methyluridine-3'-phosphate
  modified_base 19: mod_base = OTHER; note = 2'-O-methyladenosine-3'-phosphate
  modified_base 20: mod_base = OTHER; note = 2'-O-methyluridine-3'-phosphate
  modified_base 21: mod_base = OTHER; note 2'-O-methyladenosine-3'-phosphate-N-[tris(GalNAc-alkyl)-ami dodecanoyl)]-4-hydroxyprolinol (Hyp-(GalNAc-alkyl)3)
gactttcatcctggaaatata

SEQ ID NO: 213 - RNA, 21 nt, synthetic construct
  source 1..21: mol_type = other RNA
  modified_base 1: mod_base = OTHER; note = 2'-O-methylguanosine-3'- phosphorothioate
  modified_base 2: mod_base = OTHER; note = 2'-O-methyladenosine-3'- phosphorothioate
  modified_base 3: mod_base = OTHER; note = 2'-O-methylcytidine-3'-phosphate
  modified_base 4: mod_base = OTHER; note = 2'-O-methyluridine-3'-phosphate
  modified_base 5: mod_base = OTHER; note = 2'-O-methyluridine-3'-phosphate
  modified_base 6: mod_base = OTHER; note = 2'-O-methyluridine-3'-phosphate
  modified_base 7: mod_base = OTHER; note = 2'-fluorocytidine-3'-phosphate
  modified_base 8: mod_base = OTHER; note = 2'-O-methyladenosine-3'-phosphate
  modified_base 9: mod_base = OTHER; note = 2'-fluorouridine-3'-phosphate
  modified_base 10: mod_base = OTHER; note = 2'-fluorocytidine-3'-phosphate
  modified_base 11: mod_base = OTHER; note = 2'-fluorocytidine-3'-phosphate
  modified_base 12: mod_base = OTHER; note = 2'-O-methyluridine-3'-phosphate
  modified_base 13: mod_base = OTHER; note = 2'-O-methylguanosine-3'-phosphate
  modified_base 14: mod_base = OTHER; note = 2'-O-methylguanosine-3'-phosphate
  modified_base 15: mod_base = OTHER; note = 2'-O-methyladenosine-3'-phosphate
  modified_base 16: mod_base = OTHER; note = 2'-O-methyladenosine-3'-phosphate
  modified_base 17: mod_base = OTHER; note = 2'-O-methyladenosine-3'-phosphate
  modified_base 18: mod_base = OTHER; note = 2'-O-methyluridine-3'-phosphate
  modified_base 19: mod_base = OTHER; note = 2'-O-methyladenosine-3'-phosphate
  modified_base 20: mod_base = OTHER; note = 2'-O-methyluridine-3'-phosphate
  modified_base 21: mod_base = OTHER; note 2'-O-methyladenosine-3'-phosphate-N-[tris(GalNAc-alkyl)-ami dodecanoyl)]-4-hydroxyprolinol (Hyp-(GalNAc-alkyl)3)
gactttcatcctggaaatata

SEQ ID NO: 214 - RNA, 21 nt, synthetic construct
  source 1..21: mol_type = other RNA
  modified_base 1: mod_base = OTHER; note = 2'-O-methylguanosine-3'- phosphorothioate
  modified_base 2: mod_base = OTHER; note = 2'-O-methyladenosine-3'- phosphorothioate
  modified_base 3: mod_base = OTHER; note = 2'-O-methylcytidine-3'-phosphate
  modified_base 4: mod_base = OTHER; note = 2'-O-methyluridine-3'-phosphate
  modified_base 5: mod_base = OTHER; note = 2'-O-methyluridine-3'-phosphate
  modified_base 6: mod_base = OTHER; note = 2'-O-methyluridine-3'-phosphate
  modified_base 7: mod_base = OTHER; note = 2'-fluorocytidine-3'-phosphate
  modified_base 8: mod_base = OTHER; note = 2'-O-methyladenosine-3'-phosphate
  modified_base 9: mod_base = OTHER; note = 2'-fluorouridine-3'-phosphate
  modified_base 10: mod_base = OTHER; note = 2'-fluorocytidine-3'-phosphate
  modified_base 11: mod_base = OTHER; note = 2'-fluorocytidine-3'-phosphate
  modified_base 12: mod_base = OTHER; note = 2'-O-methyluridine-3'-phosphate
  modified_base 13: mod_base = OTHER; note = 2'-O-methylguanosine-3'-phosphate
  modified_base 14: mod_base = OTHER; note = 2'-O-methylguanosine-3'-phosphate
  modified_base 15: mod_base = OTHER; note = 2'-O-methyladenosine-3'-phosphate
  modified_base 16: mod_base = OTHER; note = 2'-O-methyladenosine-3'-phosphate
  modified_base 17: mod_base = OTHER; note = 2'-O-methyladenosine-3'-phosphate
  modified_base 18: mod_base = OTHER; note = 2'-O-methyluridine-3'-phosphate
  modified_base 19: mod_base = OTHER; note = 2'-O-methyladenosine-3'-phosphate
  modified_base 20: mod_base = OTHER; note = 2'-O-methyluridine-3'-phosphate
  modified_base 21: mod_base = OTHER; note 2'-O-methyladenosine-3'-phosphate-N-[tris(GalNAc-alkyl)-ami dodecanoyl)]-4-hydroxyprolinol (Hyp-(GalNAc-alkyl)3)
gactttcatcctggaaatata

SEQ ID NO: 215 - RNA, 21 nt, synthetic construct
  source 1..21: mol_type = other RNA
  modified_base 1: mod_base = OTHER; note = 2'-O-methylguanosine-3'- phosphorothioate
  modified_base 2: mod_base = OTHER; note = 2'-O-methyladenosine-3'- phosphorothioate
  modified_base 3: mod_base = OTHER; note = 2'-O-methylcytidine-3'-phosphate
  modified_base 4: mod_base = OTHER; note = 2'-O-methyluridine-3'-phosphate
  modified_base 5: mod_base = OTHER; note = 2'-O-methyluridine-3'-phosphate
  modified_base 6: mod_base = OTHER; note = 2'-O-methyluridine-3'-phosphate
  modified_base 7: mod_base = OTHER; note = 2'-fluorocytidine-3'-phosphate
  modified_base 8: mod_base = OTHER; note = 2'-O-methyladenosine-3'-phosphate
  modified_base 9: mod_base = OTHER; note = 2'-O-methyluridine-3'-phosphate
  modified_base 10: mod_base = OTHER; note = 2'-fluorocytidine-3'-phosphate
  modified_base 11: mod_base = OTHER; note = 2'-fluorocytidine-3'-phosphate
  modified_base 12: mod_base = OTHER; note = 2'-O-methyluridine-3'-phosphate
  modified_base 13: mod_base = OTHER; note = 2'-O-methylguanosine-3'-phosphate
  modified_base 14: mod_base = OTHER; note = 2'-O-methylguanosine-3'-phosphate
  modified_base 15: mod_base = OTHER; note = 2'-O-methyladenosine-3'-phosphate
  modified_base 16: mod_base = OTHER; note = 2'-O-methyladenosine-3'-phosphate
  modified_base 17: mod_base = OTHER; note = 2'-O-methyladenosine-3'-phosphate
  modified_base 18: mod_base = OTHER; note = 2'-O-methyluridine-3'-phosphate
  modified_base 19: mod_base = OTHER; note = 2'-O-methyladenosine-3'-phosphate
  modified_base 20: mod_base = OTHER; note = 2'-O-methyluridine-3'-phosphate
  modified_base 21: mod_base = OTHER; note 2'-O-methyladenosine-3'-phosphate-N-[tris(GalNAc-alkyl)-ami dodecanoyl)]-4-hydroxyprolinol (Hyp-(GalNAc-alkyl)3)
gactttcatcctggaaatata

SEQ ID NO: 216 - RNA, 21 nt, synthetic construct
  source 1..21: mol_type = other RNA
  modified_base 1: mod_base = OTHER; note = 2'-O-methylguanosine-3'- phosphorothioate
  modified_base 2: mod_base = OTHER; note = 2'-O-methyladenosine-3'- phosphorothioate
  modified_base 3: mod_base = OTHER; note = 2'-O-methylcytidine-3'-phosphate
  modified_base 4: mod_base = OTHER; note = 2'-O-methyluridine-3'-phosphate
  modified_base 5: mod_base = OTHER; note = 2'-O-methyluridine-3'-phosphate
  modified_base 6: mod_base = OTHER; note = 2'-O-methyluridine-3'-phosphate
  modified_base 7: mod_base = OTHER; note = 2'-fluorocytidine-3'-phosphate
  modified_base 8: mod_base = OTHER; note = 2'-O-methyladenosine-3'-phosphate
  modified_base 9: mod_base = OTHER; note = 2'-O-methyluridine-3'-phosphate
  modified_base 10: mod_base = OTHER; note = 2'-fluorocytidine-3'-phosphate
  modified_base 11: mod_base = OTHER; note = 2'-fluorocytidine-3'-phosphate
  modified_base 12: mod_base = OTHER; note = 2'-O-methyluridine-3'-phosphate
  modified_base 13: mod_base = OTHER; note = 2'-O-methylguanosine-3'-phosphate
  modified_base 14: mod_base = OTHER; note = 2'-O-methylguanosine-3'-phosphate
  modified_base 15: mod_base = OTHER; note = 2'-O-methyladenosine-3'-phosphate
  modified_base 16: mod_base = OTHER; note = 2'-O-methyladenosine-3'-phosphate
  modified_base 17: mod_base = OTHER; note = 2'-O-methyladenosine-3'-phosphate
  modified_base 18: mod_base = OTHER; note = 2'-O-methyluridine-3'-phosphate
  modified_base 19: mod_base = OTHER; note = 2'-O-methyladenosine-3'-phosphate
  modified_base 20: mod_base = OTHER; note = 2'-O-methyluridine-3'-phosphate
  modified_base 21: mod_base = OTHER; note 2'-O-methyladenosine-3'-phosphate-N-[tris(GalNAc-alkyl)-ami dodecanoyl)]-4-hydroxyprolinol (Hyp-(GalNAc-alkyl)3)
gactttcatcctggaaatata

SEQ ID NO: 217 - RNA, 21 nt, synthetic construct
  source 1..21: mol_type = other RNA
  modified_base 1: mod_base = OTHER; note = 2'-O-methylguanosine-3'- phosphorothioate
  modified_base 2: mod_base = OTHER; note = 2'-O-methyladenosine-3'- phosphorothioate
  modified_base 3: mod_base = OTHER; note = 2'-O-methylcytidine-3'-phosphate
  modified_base 4: mod_base = OTHER; note = 2'-O-methyluridine-3'-phosphate
  modified_base 5: mod_base = OTHER; note = 2'-O-methyluridine-3'-phosphate
  modified_base 6: mod_base = OTHER; note = 2'-O-methyluridine-3'-phosphate
  modified_base 7: mod_base = OTHER; note = 2'-fluorocytidine-3'-phosphate
  modified_base 8: mod_base = OTHER; note = 2'-O-methyladenosine-3'-phosphate
  modified_base 9: mod_base = OTHER; note = 2'-O-methyluridine-3'-phosphate
  modified_base 10: mod_base = OTHER; note = 2'-fluorocytidine-3'-phosphate
  modified_base 11: mod_base = OTHER; note = 2'-fluorocytidine-3'-phosphate
  modified_base 12: mod_base = OTHER; note = 2'-O-methyluridine-3'-phosphate
  modified_base 13: mod_base = OTHER; note = 2'-O-methylguanosine-3'-phosphate
  modified_base 14: mod_base = OTHER; note = 2'-O-methylguanosine-3'-phosphate
  modified_base 15: mod_base = OTHER; note = 2'-O-methyladenosine-3'-phosphate
  modified_base 16: mod_base = OTHER; note = 2'-O-methyladenosine-3'-phosphate
  modified_base 17: mod_base = OTHER; note = 2'-O-methyladenosine-3'-phosphate
  modified_base 18: mod_base = OTHER; note = 2'-O-methyluridine-3'-phosphate
  modified_base 19: mod_base = OTHER; note = 2'-O-methyladenosine-3'-phosphate
  modified_base 20: mod_base = OTHER; note = 2'-O-methyluridine-3'-phosphate
  modified_base 21: mod_base = OTHER; note 2'-O-methyladenosine-3'-phosphate-N-[tris(GalNAc-alkyl)-ami dodecanoyl)]-4-hydroxyprolinol (Hyp-(GalNAc-alkyl)3)
gactttcatcctggaaatata

SEQ ID NO: 218 - RNA, 21 nt, synthetic construct
  source 1..21: mol_type = other RNA
  modified_base 1: mod_base = OTHER; note = 2'-O-methylguanosine-3'- phosphorothioate
  modified_base 2: mod_base = OTHER; note = 2'-O-methyladenosine-3'- phosphorothioate
  modified_base 3: mod_base = OTHER; note = 2'-O-methylcytidine-3'-phosphate
  modified_base 4: mod_base = OTHER; note = 2'-O-methyluridine-3'-phosphate
  modified_base 5: mod_base = OTHER; note = 2'-O-methyluridine-3'-phosphate
  modified_base 6: mod_base = OTHER; note = 2'-O-methyluridine-3'-phosphate
  modified_base 7: mod_base = OTHER; note = 2'-O-methylcytidine-3'-phosphate
  modified_base 8: mod_base = OTHER; note = 2'-O-methyladenosine-3'-phosphate
  modified_base 9: mod_base = OTHER; note = 2'-O-methyluridine-3'-phosphate
  modified_base 10: mod_base = OTHER; note = 2'-O-methylcytidine-3'-phosphate
  modified_base 11: mod_base = OTHER; note = 2'-O-methylcytidine-3'-phosphate
  modified_base 12: mod_base = OTHER; note = 2'-O-methyluridine-3'-phosphate
  modified_base 13: mod_base = OTHER; note = 2'-O-methylguanosine-3'-phosphate
  modified_base 14: mod_base = OTHER; note = 2'-O-methylguanosine-3'-phosphate
  modified_base 15: mod_base = OTHER; note = 2'-O-methyladenosine-3'-phosphate
  modified_base 16: mod_base = OTHER; note = 2'-O-methyladenosine-3'-phosphate
  modified_base 17: mod_base = OTHER; note = Adenosine-glycol nucleic acid (GNA) S-Isomer
  modified_base 18: mod_base = OTHER; note = 2'-O-methyluridine-3'-phosphate
  modified_base 19: mod_base = OTHER; note = 2'-O-methyladenosine-3'-phosphate
  modified_base 20: mod_base = OTHER; note = 2'-O-methyluridine-3'-phosphate
  modified_base 21: mod_base = OTHER; note 2'-O-methyladenosine-3'-phosphate-N-[tris(GalNAc-alkyl)-ami dodecanoyl)]-4-hydroxyprolinol (Hyp-(GalNAc-alkyl)3)
gactttcatcctggaaatata

SEQ ID NO: 219 - DNA, 21 bp, synthetic construct
  source 1..21: mol_type = other DNA
  modified_base 1: mod_base = OTHER; note = 2'-O-methylguanosine-3'- phosphorothioate
  modified_base 2: mod_base = OTHER; note = 2'-O-methyladenosine-3'- phosphorothioate
  modified_base 3: mod_base = OTHER; note = 2'-O-methylcytidine-3'-phosphate
  modified_base 4: mod_base = OTHER; note = 2'-O-methyluridine-3'-phosphate
  modified_base 5: mod_base = OTHER; note = 2'-O-methyluridine-3'-phosphate
  modified_base 6: mod_base = OTHER; note = 2'-O-methyluridine-3'-phosphate
  modified_base 7: mod_base = OTHER; note = 2'-O-methylcytidine-3'-phosphate
  modified_base 8: mod_base = OTHER; note = 2'-O-methyladenosine-3'-phosphate
  modified_base 9: mod_base = OTHER; note = 2'-O-methyluridine-3'-phosphate
  modified_base 10: mod_base = OTHER; note = 2'-O-methylcytidine-3'-phosphate
  modified_base 12: mod_base = OTHER; note = 2'-O-methyluridine-3'-phosphate
  modified_base 13: mod_base = OTHER; note = 2'-O-methylguanosine-3'-phosphate
  modified_base 14: mod_base = OTHER; note = 2'-O-methylguanosine-3'-phosphate
  modified_base 15: mod_base = OTHER; note = 2'-O-methyladenosine-3'-phosphate
  modified_base 16: mod_base = OTHER; note = 2'-O-methyladenosine-3'-phosphate
  modified_base 17: mod_base = OTHER; note = Adenosine-glycol nucleic acid (GNA) S-Isomer
  modified_base 18: mod_base = OTHER; note = 2'-O-methyluridine-3'-phosphate
  modified_base 19: mod_base = OTHER; note = 2'-O-methyladenosine-3'-phosphate
  modified_base 20: mod_base = OTHER; note = 2'-O-methyluridine-3'-phosphate
  modified_base 21: mod_base = OTHER; note 2'-O-methyladenosine-3'-phosphate-N-[tris(GalNAc-alkyl)-ami dodecanoyl)]-4-hydroxyprolinol (Hyp-(GalNAc-alkyl)3)
  misc_feature 1..10: note = RNA
  misc_feature 11: note = DNA
  misc_feature 12..21: note = RNA
gactttcatcctggaaatata

SEQ ID NO: 220 - DNA, 21 bp, synthetic construct
  source 1..21: mol_type = other DNA
  modified_base 1: mod_base = OTHER; note = 2'-O-methylguanosine-3'- phosphorothioate
  modified_base 2: mod_base = OTHER; note = 2'-O-methyladenosine-3'- phosphorothioate
  modified_base 3: mod_base = OTHER; note = 2'-O-methylcytidine-3'-phosphate
  modified_base 4: mod_base = OTHER; note = 2'-O-methyluridine-3'-phosphate
  modified_base 6: mod_base = OTHER; note = 2'-O-methyluridine-3'-phosphate
  modified_base 7: mod_base = OTHER; note = 2'-O-methylcytidine-3'-phosphate
  modified_base 8: mod_base = OTHER; note = 2'-O-methyladenosine-3'-phosphate
  modified_base 9: mod_base = OTHER; note = 2'-O-methyluridine-3'-phosphate
  modified_base 10: mod_base = OTHER; note = 2'-O-methylcytidine-3'-phosphate
  modified_base 12: mod_base = OTHER; note = 2'-O-methyluridine-3'-phosphate
  modified_base 13: mod_base = OTHER; note = 2'-O-methylguanosine-3'-phosphate
  modified_base 14: mod_base = OTHER; note = 2'-O-methylguanosine-3'-phosphate
  modified_base 15: mod_base = OTHER; note = 2'-O-methyladenosine-3'-phosphate
  modified_base 16: mod_base = OTHER; note = 2'-O-methyladenosine-3'-phosphate
  modified_base 17: mod_base = OTHER; note = Adenosine-glycol nucleic acid (GNA) S-Isomer
  modified_base 18: mod_base = OTHER; note = 2'-O-methyluridine-3'-phosphate
  modified_base 19: mod_base = OTHER; note = 2'-O-methyladenosine-3'-phosphate
  modified_base 20: mod_base = OTHER; note = 2'-O-methyluridine-3'-phosphate
  modified_base 21: mod_base = OTHER; note 2'-O-methyladenosine-3'-phosphate-N-[tris(GalNAc-alkyl)-ami dodecanoyl)]-4-hydroxyprolinol (Hyp-(GalNAc-alkyl)3)
  misc_feature 1..4: note = RNA
  misc_feature 5: note = DNA
  misc_feature 6..10: note = RNA
  misc_feature 11: note = DNA
  misc_feature 12..21: note = RNA
gactttcatcctggaaatata

SEQ ID NO: 221 - DNA, 21 bp, synthetic construct
  source 1..21: mol_type = other DNA
  modified_base 1: mod_base = OTHER; note = 2'-O-methylguanosine-3'- phosphorothioate
  modified_base 2: mod_base = OTHER; note = 2'-O-methyladenosine-3'- phosphorothioate
  modified_base 3: mod_base = OTHER; note = 2'-O-methylcytidine-3'-phosphate
  modified_base 4: mod_base = OTHER; note = 2'-O-methyluridine-3'-phosphate
  modified_base 5: mod_base = OTHER; note = 2'-O-methyluridine-3'-phosphate
  modified_base 7: mod_base = OTHER; note = 2'-O-methylcytidine-3'-phosphate
  modified_base 8: mod_base = OTHER; note = 2'-O-methyladenosine-3'-phosphate
  modified_base 9: mod_base = OTHER; note = 2'-O-methyluridine-3'-phosphate
  modified_base 10: mod_base = OTHER; note = 2'-O-methylcytidine-3'-phosphate
  modified_base 12: mod_base = OTHER; note = 2'-O-methyluridine-3'-phosphate
  modified_base 13: mod_base = OTHER; note = 2'-O-methylguanosine-3'-phosphate
  modified_base 14: mod_base = OTHER; note = 2'-O-methylguanosine-3'-phosphate
  modified_base 15: mod_base = OTHER; note = 2'-O-methyladenosine-3'-phosphate
  modified_base 16: mod_base = OTHER; note = 2'-O-methyladenosine-3'-phosphate
  modified_base 17: mod_base = OTHER; note = Adenosine-glycol nucleic acid (GNA) S-Isomer
  modified_base 18: mod_base = OTHER; note = 2'-O-methyluridine-3'-phosphate
  modified_base 19: mod_base = OTHER; note = 2'-O-methyladenosine-3'-phosphate
  modified_base 20: mod_base = OTHER; note = 2'-O-methyluridine-3'-phosphate
  modified_base 21: mod_base = OTHER; note 2'-O-methyladenosine-3'-phosphate-N-[tris(GalNAc-alkyl)-ami dodecanoyl)]-4-hydroxyprolinol (Hyp-(GalNAc-alkyl)3)
  misc_feature 1..5: note = RNA
  misc_feature 6: note = DNA
  misc_feature 7..10: note = RNA
  misc_feature 11: note = DNA
  misc_feature 12..21: note = RNA
gactttcatcctggaaatata

SEQ ID NO: 222 - DNA, 21 bp, synthetic construct
  source 1..21: mol_type = other DNA
  modified_base 1: mod_base = OTHER; note = 2'-O-methylguanosine-3'- phosphorothioate
  modified_base 2: mod_base = OTHER; note = 2'-O-methyladenosine-3'- phosphorothioate
  modified_base 3: mod_base = OTHER; note = 2'-O-methylcytidine-3'-phosphate
  modified_base 4: mod_base = OTHER; note = 2'-O-methyluridine-3'-phosphate
  modified_base 5: mod_base = OTHER; note = 2'-O-methyluridine-3'-phosphate
  modified_base 6: mod_base = OTHER; note = 2'-O-methyluridine-3'-phosphate
  modified_base 8: mod_base = OTHER; note = 2'-O-methyladenosine-3'-phosphate
  modified_base 9: mod_base = OTHER; note = 2'-O-methyluridine-3'-phosphate
  modified_base 10: mod_base = OTHER; note = 2'-O-methylcytidine-3'-phosphate
  modified_base 12: mod_base = OTHER; note = 2'-O-methyluridine-3'-phosphate
  modified_base 13: mod_base = OTHER; note = 2'-O-methylguanosine-3'-phosphate
  modified_base 14: mod_base = OTHER; note = 2'-O-methylguanosine-3'-phosphate
  modified_base 15: mod_base = OTHER; note = 2'-O-methyladenosine-3'-phosphate
  modified_base 16: mod_base = OTHER; note = 2'-O-methyladenosine-3'-phosphate
  modified_base 17: mod_base = OTHER; note = Adenosine-glycol nucleic acid (GNA) S-Isomer
  modified_base 18: mod_base = OTHER; note = 2'-O-methyluridine-3'-phosphate
  modified_base 19: mod_base = OTHER; note = 2'-O-methyladenosine-3'-phosphate
  modified_base 20: mod_base = OTHER; note = 2'-O-methyluridine-3'-phosphate
  modified_base 21: mod_base = OTHER; note 2'-O-methyladenosine-3'-phosphate-N-[tris(GalNAc-alkyl)-ami dodecanoyl)]-4-hydroxyprolinol (Hyp-(GalNAc-alkyl)3)
  misc_feature 1..6: note = RNA
  misc_feature 7: note = DNA
  misc_feature 8..10: note = RNA
  misc_feature 11: note = DNA
  misc_feature 12..21: note = RNA
gactttcatcctggaaatata

SEQ ID NO: 223 - DNA, 21 bp, synthetic construct
  source 1..21: mol_type = other DNA
  modified_base 1: mod_base = OTHER; note = 2'-O-methylguanosine-3'- phosphorothioate
  modified_base 2: mod_base = OTHER; note = 2'-O-methyladenosine-3'- phosphorothioate
  modified_base 3: mod_base = OTHER; note = 2'-O-methylcytidine-3'-phosphate
  modified_base 4: mod_base = OTHER; note = 2'-O-methyluridine-3'-phosphate
  modified_base 5: mod_base = OTHER; note = 2'-O-methyluridine-3'-phosphate
  modified_base 6: mod_base = OTHER; note = 2'-O-methyluridine-3'-phosphate
  modified_base 7: mod_base = OTHER; note = 2'-O-methylcytidine-3'-phosphate
  modified_base 8: mod_base = OTHER; note = 2'-O-methyladenosine-3'-phosphate
  modified_base 9: mod_base = OTHER; note = 2'-O-methyluridine-3'-phosphate
  modified_base 10: mod_base = OTHER; note = 2'-O-methylcytidine-3'-phosphate
  modified_base 12: mod_base = OTHER; note = 2'-O-methyluridine-3'-phosphate
  modified_base 13: mod_base = OTHER; note = 2'-O-methylguanosine-3'-phosphate
  modified_base 14: mod_base = OTHER; note = 2'-O-methylguanosine-3'-phosphate
  modified_base 15: mod_base = OTHER; note = 2'-O-methyladenosine-3'-phosphate
  modified_base 16: mod_base = OTHER; note = 2'-O-methyladenosine-3'-phosphate
  modified_base 18: mod_base = OTHER; note = 2'-O-methyluridine-3'-phosphate
  modified_base 19: mod_base = OTHER; note = 2'-O-methyladenosine-3'-phosphate
  modified_base 20: mod_base = OTHER; note = 2'-O-methyluridine-3'-phosphate
  modified_base 21: mod_base = OTHER; note 2'-O-methyladenosine-3'-phosphate-N-[tris(GalNAc-alkyl)-ami dodecanoyl)]-4-hydroxyprolinol (Hyp-(GalNAc-alkyl)3)
  misc_feature 1..10: note = RNA
  misc_feature 11: note = DNA
  misc_feature 12..16: note = RNA
  misc_feature 17: note = DNA
  misc_feature 18..21: note = RNA
gactttcatcctggaaatata

SEQ ID NO: 224 - DNA, 21 bp, synthetic construct
  source 1..21: mol_type = other DNA
  modified_base 1: mod_base = OTHER; note = 2'-O-methylguanosine-3'- phosphorothioate
  modified_base 2: mod_base = OTHER; note = 2'-O-methyladenosine-3'- phosphorothioate
  modified_base 3: mod_base = OTHER; note = 2'-O-methylcytidine-3'-phosphate
  modified_base 4: mod_base = OTHER; note = 2'-O-methyluridine-3'-phosphate
  modified_base 5: mod_base = OTHER; note = 2'-O-methyluridine-3'-phosphate
  modified_base 6: mod_base = OTHER; note = 2'-O-methyluridine-3'-phosphate
  modified_base 7: mod_base = OTHER; note = 2'-O-methylcytidine-3'-phosphate
  modified_base 8: mod_base = OTHER; note = 2'-O-methyladenosine-3'-phosphate
  modified_base 9: mod_base = OTHER; note = 2'-O-methyluridine-3'-phosphate
  modified_base 10: mod_base = OTHER; note = 2'-O-methylcytidine-3'-phosphate
  modified_base 12: mod_base = OTHER; note = 2'-O-methyluridine-3'-phosphate
  modified_base 13: mod_base = OTHER; note = 2'-O-methylguanosine-3'-phosphate
  modified_base 14: mod_base = OTHER; note = 2'-O-methylguanosine-3'-phosphate
  modified_base 15: mod_base = OTHER; note = 2'-O-methyladenosine-3'-phosphate
  modified_base 16: mod_base = OTHER; note = 2'-O-methyladenosine-3'-phosphate
  modified_base 18: mod_base = OTHER; note = 2'-O-methyluridine-3'-phosphate
  modified_base 19: mod_base = OTHER; note = 2'-O-methyladenosine-3'-phosphate
  modified_base 20: mod_base = OTHER; note = 2'-O-methyluridine-3'-phosphate
  modified_base 21: mod_base = OTHER; note 2'-O-methyladenosine-3'-phosphate-N-[tris(GalNAc-alkyl)-ami dodecanoyl)]-4-hydroxyprolinol (Hyp-(GalNAc-alkyl)3)
  misc_feature 1..10: note = RNA
  misc_feature 11: note = DNA
  misc_feature 12..16: note = RNA
  misc_feature 17: note = DNA
  misc_feature 18..21: note = RNA
gactttcatcctggaattata

SEQ ID NO: 225 - DNA, 21 bp, synthetic construct
  source 1..21: mol_type = other DNA
  modified_base 1: mod_base = OTHER; note = 2'-O-methylguanosine-3'- phosphorothioate
  modified_base 2: mod_base = OTHER; note = 2'-O-methyladenosine-3'- phosphorothioate
  modified_base 3: mod_base = OTHER; note = 2'-O-methylcytidine-3'-phosphate
  modified_base 4: mod_base = OTHER; note = 2'-O-methyluridine-3'-phosphate
  modified_base 5: mod_base = OTHER; note = 2'-O-methyluridine-3'-phosphate
  modified_base 6: mod_base = OTHER; note = 2'-O-methyluridine-3'-phosphate
  modified_base 7: mod_base = OTHER; note = 2'-O-methylcytidine-3'-phosphate
  modified_base 8: mod_base = OTHER; note = 2'-O-methyladenosine-3'-phosphate
  modified_base 9: mod_base = OTHER; note = 2'-O-methyluridine-3'-phosphate
  modified_base 10: mod_base = OTHER; note = 2'-O-methylcytidine-3'-phosphate
  modified_base 12: mod_base = OTHER; note = 2'-O-methyluridine-3'-phosphate
  modified_base 13: mod_base = OTHER; note = 2'-O-methylguanosine-3'-phosphate
  modified_base 14: mod_base = OTHER; note = 2'-O-methylguanosine-3'-phosphate
  modified_base 15: mod_base = OTHER; note = 2'-O-methyladenosine-3'-phosphate
  modified_base 16: mod_base = OTHER; note = 2'-O-methyladenosine-3'-phosphate
  modified_base 17: mod_base = OTHER; note 2-hydroxymethyl-tetrahydrofurane-4-methoxy-3-phosphate (abasic 2'-OMe furanose)
  modified_base 18: mod_base = OTHER; note = 2'-O-methyluridine-3'-phosphate
  modified_base 19: mod_base = OTHER; note = 2'-O-methyladenosine-3'-phosphate
  modified_base 20: mod_base = OTHER; note = 2'-O-methyluridine-3'-phosphate
  modified_base 21: mod_base = OTHER; note 2'-O-methyladenosine-3'-phosphate-N-[tris(GalNAc-alkyl)-ami dodecanoyl)]-4-hydroxyprolinol (Hyp-(GalNAc-alkyl)3)
  misc_feature 1..10: note = RNA
  misc_feature 11: note = DNA
  misc_feature 12..21: note = RNA
gactttcatcctggaantata

SEQ ID NO: 226 - DNA, 21 bp, synthetic construct
  source 1..21: mol_type = other DNA
  modified_base 1: mod_base = OTHER; note = 2'-O-methylguanosine-3'- phosphorothioate
  modified_base 2: mod_base = OTHER; note = 2'-O-methyladenosine-3'- phosphorothioate
  modified_base 3: mod_base = OTHER; note = 2'-O-methylcytidine-3'-phosphate
  modified_base 4: mod_base = OTHER; note = 2'-O-methyluridine-3'-phosphate
  modified_base 5: mod_base = OTHER; note = 2'-O-methyluridine-3'-phosphate
  modified_base 6: mod_base = OTHER; note = 2'-O-methyluridine-3'-phosphate
  modified_base 7: mod_base = OTHER; note = 2'-O-methylcytidine-3'-phosphate
  modified_base 8: mod_base = OTHER; note = 2'-O-methyladenosine-3'-phosphate
  modified_base 9: mod_base = OTHER; note = 2'-O-methyluridine-3'-phosphate
  modified_base 10: mod_base = OTHER; note = 2'-O-methylcytidine-3'-phosphate
  modified_base 12: mod_base = OTHER; note = 2'-O-methyluridine-3'-phosphate
  modified_base 13: mod_base = OTHER; note = 2'-O-methylguanosine-3'-phosphate
  modified_base 14: mod_base = OTHER; note = 2'-O-methylguanosine-3'-phosphate
  modified_base 16: mod_base = OTHER; note = 2'-O-methyladenosine-3'-phosphate
  modified_base 18: mod_base = OTHER; note = 2'-O-methyluridine-3'-phosphate
  modified_base 19: mod_base = OTHER; note = 2'-O-methyladenosine-3'-phosphate
  modified_base 20: mod_base = OTHER; note = 2'-O-methyluridine-3'-phosphate
  modified_base 21: mod_base = OTHER; note 2'-O-methyladenosine-3'-phosphate-N-[tris(GalNAc-alkyl)-ami dodecanoyl)]-4-hydroxyprolinol (Hyp-(GalNAc-alkyl)3)
  misc_feature 1..10: note = RNA
  misc_feature 11: note = DNA
  misc_feature 12..14: note = RNA
  misc_feature 15: note = DNA
  misc_feature 16: note = RNA
  misc_feature 17: note = DNA
  misc_feature 18..21: note = RNA
gactttcatcctggaattata

SEQ ID NO: 227 - DNA, 21 bp, synthetic construct
  source 1..21: mol_type = other DNA
  modified_base 1: mod_base = OTHER; note = 2'-O-methylguanosine-3'- phosphorothioate
  modified_base 2: mod_base = OTHER; note = 2'-O-methyladenosine-3'- phosphorothioate
  modified_base 3: mod_base = OTHER; note = 2'-O-methylcytidine-3'-phosphate
  modified_base 4: mod_base = OTHER; note = 2'-O-methyluridine-3'-phosphate
  modified_base 5: mod_base = OTHER; note = 2'-O-methyluridine-3'-phosphate
  modified_base 6: mod_base = OTHER; note = 2'-O-methyluridine-3'-phosphate
  modified_base 7: mod_base = OTHER; note = 2'-O-methylcytidine-3'-phosphate
  modified_base 8: mod_base = OTHER; note = 2'-O-methyladenosine-3'-phosphate
  modified_base 9: mod_base = OTHER; note = 2'-O-methyluridine-3'-phosphate
  modified_base 10: mod_base = OTHER; note = 2'-O-methylcytidine-3'-phosphate
  modified_base 12: mod_base = OTHER; note = 2'-O-methyluridine-3'-phosphate
  modified_base 13: mod_base = OTHER; note = 2'-O-methylguanosine-3'-phosphate
  modified_base 14: mod_base = OTHER; note = 2'-O-methylguanosine-3'-phosphate
  modified_base 15: mod_base = OTHER; note = 2'-O-methyladenosine-3'-phosphate
  modified_base 16: mod_base = OTHER; note = 2'-O-methyladenosine-3'-phosphate
  modified_base 18: mod_base = OTHER; note = 2'-O-methyluridine-3'-phosphate
  modified_base 20: mod_base = OTHER; note = 2'-O-methyluridine-3'-phosphate
  modified_base 21: mod_base = OTHER; note 2'-O-methyladenosine-3'-phosphate-N-[tris(GalNAc-alkyl)-ami dodecanoyl)]-4-hydroxyprolinol (Hyp-(GalNAc-alkyl)3)
  misc_feature 1..10: note = RNA
  misc_feature 11: note = DNA
  misc_feature 12..16: note = RNA
  misc_feature 17: note = DNA
  misc_feature 18: note = RNA
  misc_feature 19: note = DNA
  misc_feature 20..21: note = RNA
gactttcatcctggaattata

SEQ ID NO: 228 - DNA, 21 bp, synthetic construct
  source 1..21: mol_type = other DNA
  modified_base 1: mod_base = OTHER; note = 2'-O-methylguanosine-3'- phosphorothioate
  modified_base 2: mod_base = OTHER; note = 2'-O-methyladenosine-3'- phosphorothioate
  modified_base 3: mod_base = OTHER; note = 2'-O-methylcytidine-3'-phosphate
  modified_base 4: mod_base = OTHER; note = 2'-O-methyluridine-3'-phosphate
  modified_base 5: mod_base = OTHER; note = 2'-O-methyluridine-3'-phosphate
  modified_base 6: mod_base = OTHER; note = 2'-O-methyluridine-3'-phosphate
  modified_base 7: mod_base = OTHER; note = 2'-O-methylcytidine-3'-phosphate
  modified_base 8: mod_base = OTHER; note = 2'-O-methyladenosine-3'-phosphate
  modified_base 9: mod_base = OTHER; note = 2'-O-methyluridine-3'-phosphate
  modified_base 10: mod_base = OTHER; note = 2'-O-methylcytidine-3'-phosphate
  modified_base 12: mod_base = OTHER; note = 2'-O-methyluridine-3'-phosphate
  modified_base 13: mod_base = OTHER; note = 2'-O-methylguanosine-3'-phosphate
  modified_base 14: mod_base = OTHER; note = 2'-O-methylguanosine-3'-phosphate
  modified_base 15: mod_base = OTHER; note = 2'-O-methyladenosine-3'-phosphate
  modified_base 16: mod_base = OTHER; note = 2'-O-methyladenosine-3'-phosphate
  modified_base 17: mod_base = OTHER; note = Adenosine-glycol nucleic acid (GNA) S-Isomer
  modified_base 18: mod_base = OTHER; note = 2'-O-methyluridine-3'-phosphate
  modified_base 20: mod_base = OTHER; note = 2'-O-methyluridine-3'-phosphate
  modified_base 21: mod_base = OTHER; note 2'-O-methyladenosine-3'-phosphate-N-[tris(GalNAc-alkyl)-ami dodecanoyl)]-4-hydroxyprolinol (Hyp-(GalNAc-alkyl)3)
  misc_feature 1..10: note = RNA
  misc_feature 11: note = DNA
  misc_feature 12..18: note = RNA
  misc_feature 19: note = DNA
  misc_feature 20..21: note = RNA
gactttcatcctggaaatata

SEQ ID NO: 229 - DNA, 21 bp, synthetic construct
  source 1..21: mol_type = other DNA
  modified_base 1: mod_base = OTHER; note = 2'-O-methylguanosine-3'- phosphorothioate
  modified_base 2: mod_base = OTHER; note = 2'-O-methyladenosine-3'- phosphorothioate
  modified_base 3: mod_base = OTHER; note = 2'-O-methylcytidine-3'-phosphate
  modified_base 4: mod_base = OTHER; note = 2'-O-methyluridine-3'-phosphate
  modified_base 5: mod_base = OTHER; note = 2'-O-methyluridine-3'-phosphate
  modified_base 7: mod_base = OTHER; note = 2'-O-methylcytidine-3'-phosphate
  modified_base 8: mod_base = OTHER; note = 2'-O-methyladenosine-3'-phosphate
  modified_base 9: mod_base = OTHER; note = 2'-O-methyluridine-3'-phosphate
  modified_base 10: mod_base = OTHER; note = 2'-O-methylcytidine-3'-phosphate
  modified_base 12: mod_base = OTHER; note = 2'-O-methyluridine-3'-phosphate
  modified_base 13: mod_base = OTHER; note = 2'-O-methylguanosine-3'-phosphate
  modified_base 14: mod_base = OTHER; note = 2'-O-methylguanosine-3'-phosphate
  modified_base 15: mod_base = OTHER; note = 2'-O-methyladenosine-3'-phosphate
  modified_base 16: mod_base = OTHER; note = 2'-O-methyladenosine-3'-phosphate
  modified_base 18: mod_base = OTHER; note = 2'-O-methyluridine-3'-phosphate
  modified_base 20: mod_base = OTHER; note = 2'-O-methyluridine-3'-phosphate
  modified_base 21: mod_base = OTHER; note 2'-O-methyladenosine-3'-phosphate-N-[tris(GalNAc-alkyl)-ami dodecanoyl)]-4-hydroxyprolinol (Hyp-(GalNAc-alkyl)3)
  misc_feature 1..5: note = RNA
  misc_feature 6: note = DNA
  misc_feature 7..10: note = RNA
  misc_feature 11: note = DNA
  misc_feature 12..16: note = RNA
  misc_feature 17: note = DNA
  misc_feature 18: note = RNA
  misc_feature 19: note = DNA
  misc_feature 20..21: note = RNA
gactttcatcctggaaatata

SEQ ID NO: 230 - RNA, 21 nt, synthetic construct
  source 1..21: mol_type = other RNA
  modified_base 1: mod_base = OTHER; note = 2'-fluoroguanosine-3'-phosphorothioate
  modified_base 2: mod_base = OTHER; note = 2'-O-methyladenosine-3'- phosphorothioate
  modified_base 3: mod_base = OTHER; note = 2'-fluorocytidine-3'-phosphate
  modified_base 4: mod_base = OTHER; note = 2'-O-methyluridine-3'-phosphate
  modified_base 5: mod_base = OTHER; note = 2'-fluorouridine-3'-phosphate
  modified_base 6: mod_base = OTHER; note = 2'-O-methyluridine-3'-phosphate
  modified_base 7: mod_base = OTHER; note = 2'-fluorocytidine-3'-phosphate
  modified_base 8: mod_base = OTHER; note = 2'-O-methyladenosine-3'-phosphate
  modified_base 9: mod_base = OTHER; note = 2'-fluorouridine-3'-phosphate
  modified_base 10: mod_base = OTHER; note = 2'-fluorocytidine-3'-phosphate
  modified_base 11: mod_base = OTHER; note = 2'-fluorocytidine-3'-phosphate
  modified_base 12: mod_base = OTHER; note = 2'-O-methyluridine-3'-phosphate
  modified_base 13: mod_base = OTHER; note = 2'-fluoroguanosine-3'-phosphate
  modified_base 14: mod_base = OTHER; note = 2'-O-methylguanosine-3'-phosphate
  modified_base 15: mod_base = OTHER; note = 2'-fluoroadenosine-3'-phosphate
  modified_base 16: mod_base = OTHER; note = 2'-O-methyladenosine-3'-phosphate
  modified_base 17: mod_base = OTHER; note = 2'-fluoroadenosine-3'-phosphate
  modified_base 18: mod_base = OTHER; note = 2'-O-methyluridine-3'-phosphate
  modified_base 19: mod_base = OTHER; note = 2'-fluoroadenosine-3'-phosphate
  modified_base 20: mod_base = OTHER; note = 2'-O-methyluridine-3'-phosphate
  modified_base 21: mod_base = OTHER; note 2'-fluoroadenosine-3'-phosphate-N-[tris(GalNAc-alkyl)-amido decanoyl)]-4-hydroxyprolinol (Hyp-(GalNAc-alkyl)3)
gactttcatcctggaaatata

SEQ ID NO: 231 - RNA, 21 nt, synthetic construct
  source 1..21: mol_type = other RNA
  modified_base 1: mod_base = OTHER; note = 2'-fluoroguanosine-3'-phosphorothioate
  modified_base 2: mod_base = OTHER; note = 2'-O-methyladenosine-3'- phosphorothioate
  modified_base 3: mod_base = OTHER; note = 2'-fluorocytidine-3'-phosphate
  modified_base 4: mod_base = OTHER; note = 2'-O-methyluridine-3'-phosphate
  modified_base 5: mod_base = OTHER; note = 2'-fluorouridine-3'-phosphate
  modified_base 6: mod_base = OTHER; note = 2'-O-methyluridine-3'-phosphate
  modified_base 7: mod_base = OTHER; note = 2'-fluorocytidine-3'-phosphate
  modified_base 8: mod_base = OTHER; note = 2'-O-methyladenosine-3'-phosphate
  modified_base 9: mod_base = OTHER; note = 2'-fluorouridine-3'-phosphate
  modified_base 10: mod_base = OTHER; note = 2'-fluorocytidine-3'-phosphate
  modified_base 11: mod_base = OTHER; note = 2'-fluorocytidine-3'-phosphate
  modified_base 12: mod_base = OTHER; note = 2'-O-methyluridine-3'-phosphate
  modified_base 13: mod_base = OTHER; note = 2'-fluoroguanosine-3'-phosphate
  modified_base 14: mod_base = OTHER; note = 2'-O-methylguanosine-3'-phosphate
  modified_base 15: mod_base = OTHER; note = 2'-fluoroadenosine-3'-phosphate
  modified_base 16: mod_base = OTHER; note = 2'-O-methyladenosine-3'-phosphate
  modified_base 17: mod_base = OTHER; note = 2'-fluoroadenosine-3'-phosphate
  modified_base 18: mod_base = OTHER; note = 2'-O-methyluridine-3'-phosphate
  modified_base 19: mod_base = OTHER; note = 2'-fluoroadenosine-3'-phosphate
  modified_base 20: mod_base = OTHER; note = 2'-O-methyluridine-3'-phosphate
  modified_base 21: mod_base = OTHER; note 2'-fluoroadenosine-3'-phosphate-N-[tris(GalNAc-alkyl)-amido decanoyl)]-4-hydroxyprolinol (Hyp-(GalNAc-alkyl)3)
gactttcatcctggaaatata

SEQ ID NO: 232 - RNA, 21 nt, synthetic construct
  source 1..21: mol_type = other RNA
  modified_base 1: mod_base = OTHER; note = 2'-fluoroguanosine-3'-phosphorothioate
  modified_base 2: mod_base = OTHER; note = 2'-O-methyladenosine-3'- phosphorothioate
  modified_base 3: mod_base = OTHER; note = 2'-fluorocytidine-3'-phosphate
  modified_base 4: mod_base = OTHER; note = 2'-O-methyluridine-3'-phosphate
  modified_base 5: mod_base = OTHER; note = 2'-fluorouridine-3'-phosphate
  modified_base 6: mod_base = OTHER; note = 2'-O-methyluridine-3'-phosphate
  modified_base 7: mod_base = OTHER; note = 2'-fluorocytidine-3'-phosphate
  modified_base 8: mod_base = OTHER; note = 2'-O-methyladenosine-3'-phosphate
  modified_base 9: mod_base = OTHER; note = 2'-fluorouridine-3'-phosphate
  modified_base 10: mod_base = OTHER; note = 2'-fluorocytidine-3'-phosphate
  modified_base 11: mod_base = OTHER; note = 2'-fluorocytidine-3'-phosphate
  modified_base 12: mod_base = OTHER; note = 2'-O-methyluridine-3'-phosphate
  modified_base 13: mod_base = OTHER; note = 2'-fluoroguanosine-3'-phosphate
  modified_base 14: mod_base = OTHER; note = 2'-O-methylguanosine-3'-phosphate
  modified_base 15: mod_base = OTHER; note = 2'-fluoroadenosine-3'-phosphate
  modified_base 16: mod_base = OTHER; note = 2'-O-methyladenosine-3'-phosphate
  modified_base 17: mod_base = OTHER; note = 2'-fluoroadenosine-3'-phosphate
  modified_base 18: mod_base = OTHER; note = 2'-O-methyluridine-3'-phosphate
  modified_base 19: mod_base = OTHER; note = 2'-fluoroadenosine-3'-phosphate
  modified_base 20: mod_base = OTHER; note = 2'-O-methyluridine-3'-phosphate
  modified_base 21: mod_base = OTHER; note 2'-fluoroadenosine-3'-phosphate-N-[tris(GalNAc-alkyl)-amido decanoyl)]-4-hydroxyprolinol (Hyp-(GalNAc-alkyl)3)
gactttcatcctggaaatata

SEQ ID NO: 233 - RNA, 21 nt, synthetic construct
  source 1..21: mol_type = other RNA
  modified_base 1: mod_base = OTHER; note = 2'-fluoroguanosine-3'-phosphorothioate
  modified_base 2: mod_base = OTHER; note = 2'-O-methyladenosine-3'- phosphorothioate
  modified_base 3: mod_base = OTHER; note = 2'-fluorocytidine-3'-phosphate
  modified_base 4: mod_base = OTHER; note = 2'-O-methyluridine-3'-phosphate
  modified_base 5: mod_base = OTHER; note = 2'-fluorouridine-3'-phosphate
  modified_base 6: mod_base = OTHER; note = 2'-O-methyluridine-3'-phosphate
  modified_base 7: mod_base = OTHER; note = 2'-fluorocytidine-3'-phosphate
  modified_base 8: mod_base = OTHER; note = 2'-O-methyladenosine-3'-phosphate
  modified_base 9: mod_base = OTHER; note = 2'-fluorouridine-3'-phosphate
  modified_base 10: mod_base = OTHER; note = 2'-fluorocytidine-3'-phosphate
  modified_base 11: mod_base = OTHER; note = 2'-fluorocytidine-3'-phosphate
  modified_base 12: mod_base = OTHER; note = 2'-O-methyluridine-3'-phosphate
  modified_base 13: mod_base = OTHER; note = 2'-fluoroguanosine-3'-phosphate
  modified_base 14: mod_base = OTHER; note = 2'-O-methylguanosine-3'-phosphate
  modified_base 15: mod_base = OTHER; note = 2'-fluoroadenosine-3'-phosphate
  modified_base 16: mod_base = OTHER; note = 2'-O-methyladenosine-3'-phosphate
  modified_base 17: mod_base = OTHER; note = 2'-fluoroadenosine-3'-phosphate
  modified_base 18: mod_base = OTHER; note = 2'-O-methyluridine-3'-phosphate
  modified_base 19: mod_base = OTHER; note = 2'-fluoroadenosine-3'-phosphate
  modified_base 20: mod_base = OTHER; note = 2'-O-methyluridine-3'-phosphate
  modified_base 21: mod_base = OTHER; note 2'-fluoroadenosine-3'-phosphate-N-[tris(GalNAc-alkyl)-amido decanoyl)]-4-hydroxyprolinol (Hyp-(GalNAc-alkyl)3)
gactttcatcctggaaatata

SEQ ID NO: 234 - RNA, 21 nt, synthetic construct
  source 1..21: mol_type = other RNA
  modified_base 1: mod_base = OTHER; note = 2'-fluoroguanosine-3'-phosphorothioate
  modified_base 2: mod_base = OTHER; note = 2'-O-methyladenosine-3'- phosphorothioate
  modified_base 3: mod_base = OTHER; note = 2'-fluorocytidine-3'-phosphate
  modified_base 4: mod_base = OTHER; note = 2'-O-methyluridine-3'-phosphate
  modified_base 5: mod_base = OTHER; note = 2'-fluorouridine-3'-phosphate
  modified_base 6: mod_base = OTHER; note = 2'-O-methyluridine-3'-phosphate
  modified_base 7: mod_base = OTHER; note = 2'-fluorocytidine-3'-phosphate
  modified_base 8: mod_base = OTHER; note = 2'-O-methyladenosine-3'-phosphate
  modified_base 9: mod_base = OTHER; note = 2'-fluorouridine-3'-phosphate
  modified_base 10: mod_base = OTHER; note = 2'-fluorocytidine-3'-phosphate
  modified_base 11: mod_base = OTHER; note = 2'-fluorocytidine-3'-phosphate
  modified_base 12: mod_base = OTHER; note = 2'-O-methyluridine-3'-phosphate
  modified_base 13: mod_base = OTHER; note = 2'-fluoroguanosine-3'-phosphate
  modified_base 14: mod_base = OTHER; note = 2'-O-methylguanosine-3'-phosphate
  modified_base 15: mod_base = OTHER; note = 2'-fluoroadenosine-3'-phosphate
  modified_base 16: mod_base = OTHER; note = 2'-O-methyladenosine-3'-phosphate
  modified_base 17: mod_base = OTHER; note = 2'-fluoroadenosine-3'-phosphate
  modified_base 18: mod_base = OTHER; note = 2'-O-methyluridine-3'-phosphate
  modified_base 19: mod_base = OTHER; note = 2'-fluoroadenosine-3'-phosphate
  modified_base 20: mod_base = OTHER; note = 2'-O-methyluridine-3'-phosphate
  modified_base 21: mod_base = OTHER; note 2'-fluoroadenosine-3'-phosphate-N-[tris(GalNAc-alkyl)-amido decanoyl)]-4-hydroxyprolinol (Hyp-(GalNAc-alkyl)3)
gactttcatcctggaaatata

SEQ ID NO: 235 - RNA, 21 nt, synthetic construct
  source 1..21: mol_type = other RNA
  modified_base 1: mod_base = OTHER; note = 2'-fluoroguanosine-3'-phosphorothioate
  modified_base 2: mod_base = OTHER; note = 2'-O-methyladenosine-3'- phosphorothioate
  modified_base 3: mod_base = OTHER; note = 2'-fluorocytidine-3'-phosphate
  modified_base 4: mod_base = OTHER; note = 2'-O-methyluridine-3'-phosphate
  modified_base 5: mod_base = OTHER; note = 2'-fluorouridine-3'-phosphate
  modified_base 6: mod_base = OTHER; note = 2'-O-methyluridine-3'-phosphate
  modified_base 7: mod_base = OTHER; note = 2'-fluorocytidine-3'-phosphate
  modified_base 8: mod_base = OTHER; note = 2'-O-methyladenosine-3'-phosphate
  modified_base 9: mod_base = OTHER; note = 2'-fluorouridine-3'-phosphate
  modified_base 10: mod_base = OTHER; note = 2'-fluorocytidine-3'-phosphate
  modified_base 11: mod_base = OTHER; note = 2'-fluorocytidine-3'-phosphate
  modified_base 12: mod_base = OTHER; note = 2'-O-methyluridine-3'-phosphate
  modified_base 13: mod_base = OTHER; note = 2'-fluoroguanosine-3'-phosphate
  modified_base 14: mod_base = OTHER; note = 2'-O-methylguanosine-3'-phosphate
  modified_base 15: mod_base = OTHER; note = 2'-fluoroadenosine-3'-phosphate
  modified_base 16: mod_base = OTHER; note = 2'-O-methyladenosine-3'-phosphate
  modified_base 17: mod_base = OTHER; note = 2'-fluoroadenosine-3'-phosphate
  modified_base 18: mod_base = OTHER; note = 2'-O-methyluridine-3'-phosphate
  modified_base 19: mod_base = OTHER; note = 2'-fluoroadenosine-3'-phosphate
  modified_base 20: mod_base = OTHER; note = 2'-O-methyluridine-3'-phosphate
  modified_base 21: mod_base = OTHER; note 2'-fluoroadenosine-3'-phosphate-N-[tris(GalNAc-alkyl)-amido decanoyl)]-4-hydroxyprolinol (Hyp-(GalNAc-alkyl)3)
gactttcatcctggaaatata

SEQ ID NO: 236 - RNA, 21 nt, synthetic construct
  source 1..21: mol_type = other RNA
  modified_base 1: mod_base = OTHER; note = 2'-fluoroguanosine-3'-phosphorothioate
  modified_base 2: mod_base = OTHER; note = 2'-O-methyladenosine-3'- phosphorothioate
  modified_base 3: mod_base = OTHER; note = 2'-fluorocytidine-3'-phosphate
  modified_base 4: mod_base = OTHER; note = 2'-O-methyluridine-3'-phosphate
  modified_base 5: mod_base = OTHER; note = 2'-fluorouridine-3'-phosphate
  modified_base 6: mod_base = OTHER; note = 2'-O-methyluridine-3'-phosphate
  modified_base 7: mod_base = OTHER; note = 2'-fluorocytidine-3'-phosphate
  modified_base 8: mod_base = OTHER; note = 2'-O-methyladenosine-3'-phosphate
  modified_base 9: mod_base = OTHER; note = 2'-fluorouridine-3'-phosphate
  modified_base 10: mod_base = OTHER; note = 2'-fluorocytidine-3'-phosphate
  modified_base 11: mod_base = OTHER; note = 2'-fluorocytidine-3'-phosphate
  modified_base 12: mod_base = OTHER; note = 2'-O-methyluridine-3'-phosphate
  modified_base 13: mod_base = OTHER; note = 2'-fluoroguanosine-3'-phosphate
  modified_base 14: mod_base = OTHER; note = 2'-O-methylguanosine-3'-phosphate
  modified_base 15: mod_base = OTHER; note = 2'-fluoroadenosine-3'-phosphate
  modified_base 16: mod_base = OTHER; note = 2'-O-methyladenosine-3'-phosphate
  modified_base 17: mod_base = OTHER; note = 2'-fluoroadenosine-3'-phosphate
  modified_base 18: mod_base = OTHER; note = 2'-O-methyluridine-3'-phosphate
  modified_base 19: mod_base = OTHER; note = 2'-fluoroadenosine-3'-phosphate
  modified_base 20: mod_base = OTHER; note = 2'-O-methyluridine-3'-phosphate
  modified_base 21: mod_base = OTHER; note 2'-fluoroadenosine-3'-phosphate-N-[tris(GalNAc-alkyl)-amido decanoyl)]-4-hydroxyprolinol (Hyp-(GalNAc-alkyl)3)
gactttcatcctggaaatata

SEQ ID NO: 237 - DNA, 21 bp, synthetic construct
  source 1..21: mol_type = other DNA
  modified_base 1: mod_base = OTHER; note = 2'-O-methylguanosine-3'- phosphorothioate
  modified_base 2: mod_base = OTHER; note = 2'-O-methyladenosine-3'- phosphorothioate
  modified_base 3: mod_base = OTHER; note = 2'-O-methylcytidine-3'-phosphate
  modified_base 4: mod_base = OTHER; note = 2'-O-methyluridine-3'-phosphate
  modified_base 5: mod_base = OTHER; note = 2'-O-methyluridine-3'-phosphate
  modified_base 6: mod_base = OTHER; note = 2'-O-methyluridine-3'-phosphate
  modified_base 7: mod_base = OTHER; note = 2'-O-methylcytidine-3'-phosphate
  modified_base 8: mod_base = OTHER; note = 2'-O-methyladenosine-3'-phosphate
  modified_base 9: mod_base = OTHER; note = 2'-O-methyluridine-3'-phosphate
  modified_base 10: mod_base = OTHER; note = 2'-O-methylcytidine-3'-phosphate
  modified_base 12: mod_base = OTHER; note = 2'-O-methyluridine-3'-phosphate
  modified_base 13: mod_base = OTHER; note = 2'-O-methylguanosine-3'-phosphate
  modified_base 14: mod_base = OTHER; note = 2'-O-methylguanosine-3'-phosphate
  modified_base 15: mod_base = OTHER; note = 2'-O-methyladenosine-3'-phosphate
  modified_base 16: mod_base = OTHER; note = 2'-O-methyladenosine-3'-phosphate
  modified_base 17: mod_base = OTHER; note = Adenosine-glycol nucleic acid (GNA) S-Isomer
  modified_base 18: mod_base = OTHER; note = 2'-O-methyluridine-3'-phosphate
  modified_base 19: mod_base = OTHER; note = 2'-O-methyladenosine-3'-phosphate
  modified_base 20: mod_base = OTHER; note = 2'-O-methyluridine-3'-phosphate
  modified_base 21: mod_base = OTHER; note 2'-O-methyladenosine-3'-phosphate-N-[tris(GalNAc-alkyl)-ami dodecanoyl)]-4-hydroxyprolinol (Hyp-(GalNAc-alkyl)3)
  misc_feature 1..10: note = RNA
  misc_feature 11: note = DNA
  misc_feature 12..21: note = RNA
gactttcatcctggaaatata

SEQ ID NO: 238 - RNA, 21 nt, synthetic construct
  source 1..21: mol_type = other RNA
  modified_base 1: mod_base = OTHER; note = 2'-O-methyladenosine-3'- phosphorothioate
  modified_base 2: mod_base = OTHER; note = 2'-O-methylguanosine-3'- phosphorothioate
  modified_base 3: mod_base = OTHER; note = 2'-O-methyladenosine-3'-phosphate
  modified_base 4: mod_base = OTHER; note = 2'-O-methyladenosine-3'-phosphate
  modified_base 5: mod_base = OTHER; note = 2'-O-methyladenosine-3'-phosphate
  modified_base 6: mod_base = OTHER; note = 2'-O-methylguanosine-3'-phosphate
  modified_base 7: mod_base = OTHER; note = 2'-fluoroguanosine-3'-phosphate
  modified_base 8: mod_base = OTHER; note = 2'-O-methyluridine-3'-phosphate
  modified_base 9: mod_base = OTHER; note = 2'-fluoroguanosine-3'-phosphate
  modified_base 10: mod_base = OTHER; note = 2'-fluorouridine-3'-phosphate
  modified_base 11: mod_base = OTHER; note = 2'-fluorouridine-3'-phosphate
  modified_base 12: mod_base = OTHER; note = 2'-O-methylcytidine-3'-phosphate
  modified_base 13: mod_base = OTHER; note = 2'-O-methyladenosine-3'-phosphate
  modified_base 14: mod_base = OTHER; note = 2'-O-methyladenosine-3'-phosphate
  modified_base 15: mod_base = OTHER; note = 2'-O-methylguanosine-3'-phosphate
  modified_base 16: mod_base = OTHER; note = 2'-O-methyladenosine-3'-phosphate
  modified_base 17: mod_base = OTHER; note = 2'-O-methyluridine-3'-phosphate
  modified_base 18: mod_base = OTHER; note = 2'-O-methylguanosine-3'-phosphate
  modified_base 19: mod_base = OTHER; note = 2'-O-methyluridine-3'-phosphate
  modified_base 20: mod_base = OTHER; note = 2'-O-methylcytidine-3'-phosphate
  modified_base 21: mod_base = OTHER; note 2'-O-methyladenosine-3'-phosphate-N-[tris(GalNAc-alkyl)-ami dodecanoyl)]-4-hydroxyprolinol (Hyp-(GalNAc-alkyl)3)
agaaaggtgttcaagatgtca

SEQ ID NO: 239 - RNA, 21 nt, synthetic construct
  source 1..21: mol_type = other RNA
  modified_base 1: mod_base = OTHER; note = 2'-O-methylcytidine-3'- phosphorothioate
  modified_base 2: mod_base = OTHER; note = 2'-O-methyladenosine-3'- phosphorothioate
  modified_base 3: mod_base = OTHER; note = 2'-O-methyluridine-3'-phosphate
  modified_base 4: mod_base = OTHER; note = 2'-O-methylcytidine-3'-phosphate
  modified_base 5: mod_base = OTHER; note = 2'-O-methylcytidine-3'-phosphate
  modified_base 6: mod_base = OTHER; note = 2'-O-methyluridine-3'-phosphate
  modified_base 7: mod_base = OTHER; note = 2'-fluoroguanosine-3'-phosphate
  modified_base 8: mod_base = OTHER; note = 2'-O-methylguanosine-3'-phosphate
  modified_base 9: mod_base = OTHER; note = 2'-fluoroadenosine-3'-phosphate
  modified_base 10: mod_base = OTHER; note = 2'-fluoroadenosine-3'-phosphate
  modified_base 11: mod_base = OTHER; note = 2'-fluoroadenosine-3'-phosphate
  modified_base 12: mod_base = OTHER; note = 2'-O-methyluridine-3'-phosphate
  modified_base 13: mod_base = OTHER; note = 2'-O-methyladenosine-3'-phosphate
  modified_base 14: mod_base = OTHER; note = 2'-O-methyluridine-3'-phosphate
  modified_base 15: mod_base = OTHER; note = 2'-O-methyladenosine-3'-phosphate
  modified_base 16: mod_base = OTHER; note = 2'-O-methyluridine-3'-phosphate
  modified_base 17: mod_base = OTHER; note = 2'-O-methyluridine-3'-phosphate
  modified_base 18: mod_base = OTHER; note = 2'-O-methyladenosine-3'-phosphate
  modified_base 19: mod_base = OTHER; note = 2'-O-methyladenosine-3'-phosphate
  modified_base 20: mod_base = OTHER; note = 2'-O-methylcytidine-3'-phosphate
  modified_base 21: mod_base = OTHER; note 2'-O-methyluridine-3'-phosphate-N-[tris(GalNAc-alkyl)-amido decanoyl)]-4-hydroxyprolinol (Hyp-(GalNAc-alkyl)3)
catcctggaaatatattaact

SEQ ID NO: 240 - RNA, 21 nt, synthetic construct
  source 1..21: mol_type = other RNA
  modified_base 1: mod_base = OTHER; note = 2'-O-methylguanosine-3'- phosphorothioate
  modified_base 2: mod_base = OTHER; note = 2'-O-methyladenosine-3'- phosphorothioate
  modified_base 3: mod_base = OTHER; note = 2'-O-methyladenosine-3'-phosphate
  modified_base 4: mod_base = OTHER; note = 2'-O-methyluridine-3'-phosphate
  modified_base 5: mod_base = OTHER; note = 2'-O-methylguanosine-3'-phosphate
  modified_base 6: mod_base = OTHER; note = 2'-O-methyluridine-3'-phosphate
  modified_base 7: mod_base = OTHER; note = 2'-fluoroguanosine-3'-phosphate
  modified_base 8: mod_base = OTHER; note = 2'-O-methyladenosine-3'-phosphate
  modified_base 9: mod_base = OTHER; note = 2'-fluoroadenosine-3'-phosphate
  modified_base 10: mod_base = OTHER; note = 2'-fluoroadenosine-3'-phosphate
  modified_base 11: mod_base = OTHER; note = 2'-fluoroguanosine-3'-phosphate
  modified_base 12: mod_base = OTHER; note = 2'-O-methyluridine-3'-phosphate
  modified_base 13: mod_base = OTHER; note = 2'-O-methylcytidine-3'-phosphate
  modified_base 14: mod_base = OTHER; note = 2'-O-methyladenosine-3'-phosphate
  modified_base 15: mod_base = OTHER; note = 2'-O-methyluridine-3'-phosphate
  modified_base 16: mod_base = OTHER; note = 2'-O-methylcytidine-3'-phosphate
  modified_base 17: mod_base = OTHER; note = 2'-O-methylguanosine-3'-phosphate
  modified_base 18: mod_base = OTHER; note = 2'-O-methyladenosine-3'-phosphate
  modified_base 19: mod_base = OTHER; note = 2'-O-methylcytidine-3'-phosphate
  modified_base 20: mod_base = OTHER; note = 2'-O-methyladenosine-3'-phosphate
  modified_base 21: mod_base = OTHER; note 2'-O-methyladenosine-3'-phosphate-N-[tris(GalNAc-alkyl)-ami dodecanoyl)]-4-hydroxyprolinol (Hyp-(GalNAc-alkyl)3)
gaatgtgaaagtcatcgacaa

SEQ ID NO: 241 - RNA, 21 nt, synthetic construct
  source 1..21: mol_type = other RNA
  modified_base 1: mod_base = OTHER; note = 2'-O-methyladenosine-3'- phosphorothioate
  modified_base 2: mod_base = OTHER; note = 2'-O-methylguanosine-3'- phosphorothioate
  modified_base 3: mod_base = OTHER; note = 2'-O-methyluridine-3'-phosphate
  modified_base 4: mod_base = OTHER; note = 2'-O-methylguanosine-3'-phosphate
  modified_base 5: mod_base = OTHER; note = 2'-O-methylcytidine-3'-phosphate
  modified_base 6: mod_base = OTHER; note = 2'-O-methyladenosine-3'-phosphate
  modified_base 7: mod_base = OTHER; note = 2'-fluorocytidine-3'-phosphate
  modified_base 8: mod_base = OTHER; note = 2'-O-methyladenosine-3'-phosphate
  modified_base 9: mod_base = OTHER; note = 2'-fluoroadenosine-3'-phosphate
  modified_base 10: mod_base = OTHER; note = 2'-fluorouridine-3'-phosphate
  modified_base 11: mod_base = OTHER; note = 2'-fluoroadenosine-3'-phosphate
  modified_base 12: mod_base = OTHER; note = 2'-O-methyluridine-3'-phosphate
  modified_base 13: mod_base = OTHER; note = 2'-O-methyluridine-3'-phosphate
  modified_base 14: mod_base = OTHER; note = 2'-O-methyluridine-3'-phosphate
  modified_base 15: mod_base = OTHER; note = 2'-O-methyluridine-3'-phosphate
  modified_base 16: mod_base = OTHER; note = 2'-O-methylcytidine-3'-phosphate
  modified_base 17: mod_base = OTHER; note = 2'-O-methylcytidine-3'-phosphate
  modified_base 18: mod_base = OTHER; note = 2'-O-methylcytidine-3'-phosphate
  modified_base 19: mod_base = OTHER; note = 2'-O-methyladenosine-3'-phosphate
  modified_base 20: mod_base = OTHER; note = 2'-O-methyluridine-3'-phosphate
  modified_base 21: mod_base = OTHER; note 2'-O-methyladenosine-3'-phosphate-N-[tris(GalNAc-alkyl)-ami dodecanoyl)]-4-hydroxyprolinol (Hyp-(GalNAc-alkyl)3)
agtgcacaatattttcccata

SEQ ID NO: 242 - RNA, 21 nt, synthetic construct
  source 1..21: mol_type = other RNA
  modified_base 1: mod_base = OTHER; note = 2'-O-methylguanosine-3'- phosphorothioate
  modified_base 2: mod_base = OTHER; note = 2'-O-methyladenosine-3'- phosphorothioate
  modified_base 3: mod_base = OTHER; note = 2'-O-methyladenosine-3'-phosphate
  modified_base 4: mod_base = OTHER; note = 2'-O-methyladenosine-3'-phosphate
  modified_base 5: mod_base = OTHER; note = 2'-O-methylguanosine-3'-phosphate
  modified_base 6: mod_base = OTHER; note = 2'-O-methyluridine-3'-phosphate
  modified_base 7: mod_base = OTHER; note = 2'-fluorocytidine-3'-phosphate
  modified_base 8: mod_base = OTHER; note = 2'-O-methyladenosine-3'-phosphate
  modified_base 9: mod_base = OTHER; note = 2'-fluorouridine-3'-phosphate
  modified_base 10: mod_base = OTHER; note = 2'-fluorocytidine-3'-phosphate
  modified_base 11: mod_base = OTHER; note = 2'-fluoroguanosine-3'-phosphate
  modified_base 12: mod_base = OTHER; note = 2'-O-methyladenosine-3'-phosphate
  modified_base 13: mod_base = OTHER; note = 2'-O-methylcytidine-3'-phosphate
  modified_base 14: mod_base = OTHER; note = 2'-O-methyladenosine-3'-phosphate
  modified_base 15: mod_base = OTHER; note = 2'-O-methyladenosine-3'-phosphate
  modified_base 16: mod_base = OTHER; note = 2'-O-methylguanosine-3'-phosphate
  modified_base 17: mod_base = OTHER; note = 2'-O-methyladenosine-3'-phosphate
  modified_base 18: mod_base = OTHER; note = 2'-O-methylcytidine-3'-phosphate
  modified_base 19: mod_base = OTHER; note = 2'-O-methyladenosine-3'-phosphate
  modified_base 20: mod_base = OTHER; note = 2'-O-methyluridine-3'-phosphate
  modified_base 21: mod_base = OTHER; note 2'-O-methyluridine-3'-phosphate-N-[tris(GalNAc-alkyl)-amido decanoyl)]-4-hydroxyprolinol (Hyp-(GalNAc-alkyl)3)
gaaagtcatcgacaagacatt

SEQ ID NO: 243 - RNA, 21 nt, synthetic construct
  source 1..21: mol_type = other RNA
  modified_base 1: mod_base = OTHER; note = 2'-O-methyladenosine-3'- phosphorothioate
  modified_base 2: mod_base = OTHER; note = 2'-O-methyladenosine-3'- phosphorothioate
  modified_base 3: mod_base = OTHER; note = 2'-O-methyluridine-3'-phosphate
  modified_base 4: mod_base = OTHER; note = 2'-O-methylguanosine-3'-phosphate
  modified_base 5: mod_base = OTHER; note = 2'-O-methyluridine-3'-phosphate
  modified_base 6: mod_base = OTHER; note = 2'-O-methylguanosine-3'-phosphate
  modified_base 7: mod_base = OTHER; note = 2'-fluoroadenosine-3'-phosphate
  modified_base 8: mod_base = OTHER; note = 2'-O-methyladenosine-3'-phosphate
  modified_base 9: mod_base = OTHER; note = 2'-fluoroadenosine-3'-phosphate
  modified_base 10: mod_base = OTHER; note = 2'-fluoroguanosine-3'-phosphate
  modified_base 11: mod_base = OTHER; note = 2'-fluorouridine-3'-phosphate
  modified_base 12: mod_base = OTHER; note = 2'-O-methylcytidine-3'-phosphate
  modified_base 13: mod_base = OTHER; note = 2'-O-methyladenosine-3'-phosphate
  modified_base 14: mod_base = OTHER; note = 2'-O-methyluridine-3'-phosphate
  modified_base 15: mod_base = OTHER; note = 2'-O-methylcytidine-3'-phosphate
  modified_base 16: mod_base = OTHER; note = 2'-O-methylguanosine-3'-phosphate
  modified_base 17: mod_base = OTHER; note = 2'-O-methyladenosine-3'-phosphate
  modified_base 18: mod_base = OTHER; note = 2'-O-methylcytidine-3'-phosphate
  modified_base 19: mod_base = OTHER; note = 2'-O-methyladenosine-3'-phosphate
  modified_base 20: mod_base = OTHER; note = 2'-O-methyladenosine-3'-phosphate
  modified_base 21: mod_base = OTHER; note 2'-O-methyladenosine-3'-phosphate-N-[tris(GalNAc-alkyl)-ami dodecanoyl)]-4-hydroxyprolinol (Hyp-(GalNAc-alkyl)3)
aatgtgaaagtcatcgacaaa

SEQ ID NO: 244 - RNA, 21 nt, synthetic construct
  source 1..21: mol_type = other RNA
  modified_base 1: mod_base = OTHER; note = 2'-O-methylcytidine-3'- phosphorothioate
  modified_base 2: mod_base = OTHER; note = 2'-O-methyluridine-3'-phosphorothioate
  modified_base 3: mod_base = OTHER; note = 2'-O-methylguanosine-3'-phosphate
  modified_base 4: mod_base = OTHER; note = 2'-O-methylguanosine-3'-phosphate
  modified_base 5: mod_base = OTHER; note = 2'-O-methyladenosine-3'-phosphate
  modified_base 6: mod_base = OTHER; note = 2'-O-methyladenosine-3'-phosphate
  modified_base 7: mod_base = OTHER; note = 2'-fluoroadenosine-3'-phosphate
  modified_base 8: mod_base = OTHER; note = 2'-O-methyluridine-3'-phosphate
  modified_base 9: mod_base = OTHER; note = 2'-fluoroadenosine-3'-phosphate
  modified_base 10: mod_base = OTHER; note = 2'-fluorouridine-3'-phosphate
  modified_base 11: mod_base = OTHER; note = 2'-fluoroadenosine-3'-phosphate
  modified_base 12: mod_base = OTHER; note = 2'-O-methyluridine-3'-phosphate
  modified_base 13: mod_base = OTHER; note = 2'-O-methyluridine-3'-phosphate
  modified_base 14: mod_base = OTHER; note = 2'-O-methyladenosine-3'-phosphate
  modified_base 15: mod_base = OTHER; note = 2'-O-methyladenosine-3'-phosphate
  modified_base 16: mod_base = OTHER; note = 2'-O-methylcytidine-3'-phosphate
  modified_base 17: mod_base = OTHER; note = 2'-O-methyluridine-3'-phosphate
  modified_base 18: mod_base = OTHER; note = 2'-O-methylguanosine-3'-phosphate
  modified_base 19: mod_base = OTHER; note = 2'-O-methyluridine-3'-phosphate
  modified_base 20: mod_base = OTHER; note = 2'-O-methyluridine-3'-phosphate
  modified_base 21: mod_base = OTHER; note 2'-O-methyladenosine-3'-phosphate-N-[tris(GalNAc-alkyl)-ami dodecanoyl)]-4-hydroxyprolinol (Hyp-(GalNAc-alkyl)3)
ctggaaatatattaactgtta

SEQ ID NO: 245 - RNA, 21 nt, synthetic construct
  source 1..21: mol_type = other RNA
  modified_base 1: mod_base = OTHER; note = 2'-O-methyladenosine-3'- phosphorothioate
  modified_base 2: mod_base = OTHER; note = 2'-O-methyluridine-3'-phosphorothioate
  modified_base 3: mod_base = OTHER; note = 2'-O-methyluridine-3'-phosphate
  modified_base 4: mod_base = OTHER; note = 2'-O-methyluridine-3'-phosphate
  modified_base 5: mod_base = OTHER; note = 2'-O-methyluridine-3'-phosphate
  modified_base 6: mod_base = OTHER; note = 2'-O-methylcytidine-3'-phosphate
  modified_base 7: mod_base = OTHER; note = 2'-fluorocytidine-3'-phosphate
  modified_base 8: mod_base = OTHER; note = 2'-O-methylcytidine-3'-phosphate
  modified_base 9: mod_base = OTHER; note = 2'-fluoroadenosine-3'-phosphate
  modified_base 10: mod_base = OTHER; note = 2'-fluorouridine-3'-phosphate
  modified_base 11: mod_base = OTHER; note = 2'-fluorocytidine-3'-phosphate
  modified_base 12: mod_base = OTHER; note = 2'-O-methyluridine-3'-phosphate
  modified_base 13: mod_base = OTHER; note = 2'-O-methylguanosine-3'-phosphate
  modified_base 14: mod_base = OTHER; note = 2'-O-methyluridine-3'-phosphate
  modified_base 15: mod_base = OTHER; note = 2'-O-methyladenosine-3'-phosphate
  modified_base 16: mod_base = OTHER; note = 2'-O-methyluridine-3'-phosphate
  modified_base 17: mod_base = OTHER; note = 2'-O-methyluridine-3'-phosphate
  modified_base 18: mod_base = OTHER; note = 2'-O-methyladenosine-3'-phosphate
  modified_base 19: mod_base = OTHER; note = 2'-O-methyluridine-3'-phosphate
  modified_base 20: mod_base = OTHER; note = 2'-O-methyluridine-3'-phosphate
  modified_base 21: mod_base = OTHER; note 2'-O-methyluridine-3'-phosphate-N-[tris(GalNAc-alkyl)-amido decanoyl)]-4-hydroxyprolinol (Hyp-(GalNAc-alkyl)3)
attttcccatctgtattattt

SEQ ID NO: 246 - RNA, 21 nt, synthetic construct
  source 1..21: mol_type = other RNA
  modified_base 1: mod_base = OTHER; note = 2'-O-methyluridine-3'-phosphorothioate
  modified_base 2: mod_base = OTHER; note = 2'-O-methylguanosine-3'- phosphorothioate
  modified_base 3: mod_base = OTHER; note = 2'-O-methyluridine-3'-phosphate
  modified_base 4: mod_base = OTHER; note = 2'-O-methylcytidine-3'-phosphate
  modified_base 5: mod_base = OTHER; note = 2'-O-methylguanosine-3'-phosphate
  modified_base 6: mod_base = OTHER; note = 2'-O-methyluridine-3'-phosphate
  modified_base 7: mod_base = OTHER; note = 2'-fluorouridine-3'-phosphate
  modified_base 8: mod_base = OTHER; note = 2'-O-methylcytidine-3'-phosphate
  modified_base 9: mod_base = OTHER; note = 2'-fluorouridine-3'-phosphate
  modified_base 10: mod_base = OTHER; note = 2'-fluorouridine-3'-phosphate
  modified_base 11: mod_base = OTHER; note = 2'-fluorouridine-3'-phosphate
  modified_base 12: mod_base = OTHER; note = 2'-O-methyluridine-3'-phosphate
  modified_base 13: mod_base = OTHER; note = 2'-O-methylcytidine-3'-phosphate
  modified_base 14: mod_base = OTHER; note = 2'-O-methylcytidine-3'-phosphate
  modified_base 15: mod_base = OTHER; note = 2'-O-methyladenosine-3'-phosphate
  modified_base 16: mod_base = OTHER; note = 2'-O-methyladenosine-3'-phosphate
  modified_base 17: mod_base = OTHER; note = 2'-O-methylcytidine-3'-phosphate
  modified_base 18: mod_base = OTHER; note = 2'-O-methyladenosine-3'-phosphate
  modified_base 19: mod_base = OTHER; note = 2'-O-methyladenosine-3'-phosphate
  modified_base 20: mod_base = OTHER; note = 2'-O-methyladenosine-3'-phosphate
  modified_base 21: mod_base = OTHER; note 2'-O-methyladenosine-3'-phosphate-N-[tris(GalNAc-alkyl)-ami dodecanoyl)]-4-hydroxyprolinol (Hyp-(GalNAc-alkyl)3)
tgtcgttcttttccaacaaaa

SEQ ID NO: 247 - RNA, 21 nt, synthetic construct
  source 1..21: mol_type = other RNA
  modified_base 1: mod_base = OTHER; note = 2'-O-methyladenosine-3'- phosphorothioate
  modified_base 2: mod_base = OTHER; note = 2'-O-methyluridine-3'-phosphorothioate
  modified_base 3: mod_base = OTHER; note = 2'-O-methylcytidine-3'-phosphate
  modified_base 4: mod_base = OTHER; note = 2'-O-methylcytidine-3'-phosphate
  modified_base 5: mod_base = OTHER; note = 2'-O-methyluridine-3'-phosphate
  modified_base 6: mod_base = OTHER; note = 2'-O-methylguanosine-3'-phosphate
  modified_base 7: mod_base = OTHER; note = 2'-fluoroguanosine-3'-phosphate
  modified_base 8: mod_base = OTHER; note = 2'-O-methyladenosine-3'-phosphate
  modified_base 9: mod_base = OTHER; note = 2'-fluoroadenosine-3'-phosphate
  modified_base 10: mod_base = OTHER; note = 2'-fluoroadenosine-3'-phosphate
  modified_base 11: mod_base = OTHER; note = 2'-fluorouridine-3'-phosphate
  modified_base 12: mod_base = OTHER; note = 2'-O-methyladenosine-3'-phosphate
  modified_base 13: mod_base = OTHER; note = 2'-O-methyluridine-3'-phosphate
  modified_base 14: mod_base = OTHER; note = 2'-O-methyladenosine-3'-phosphate
  modified_base 15: mod_base = OTHER; note = 2'-O-methyluridine-3'-phosphate
  modified_base 16: mod_base = OTHER; note = 2'-O-methyluridine-3'-phosphate
  modified_base 17: mod_base = OTHER; note = 2'-O-methyladenosine-3'-phosphate
  modified_base 18: mod_base = OTHER; note = 2'-O-methyladenosine-3'-phosphate
  modified_base 19: mod_base = OTHER; note = 2'-O-methylcytidine-3'-phosphate
  modified_base 20: mod_base = OTHER; note = 2'-O-methyluridine-3'-phosphate
  modified_base 21: mod_base = OTHER; note 2'-O-methyladenosine-3'-phosphate-N-[tris(GalNAc-alkyl)-ami dodecanoyl)]-4-hydroxyprolinol (Hyp-(GalNAc-alkyl)3)
atcctggaaatatattaacta

SEQ ID NO: 248 - RNA, 21 nt, synthetic construct
  source 1..21: mol_type = other RNA
  modified_base 1: mod_base = OTHER; note = 2'-O-methylguanosine-3'- phosphorothioate
  modified_base 2: mod_base = OTHER; note = 2'-O-methylcytidine-3'- phosphorothioate
  modified_base 3: mod_base = OTHER; note = 2'-O-methyladenosine-3'-phosphate
  modified_base 4: mod_base = OTHER; note = 2'-O-methyluridine-3'-phosphate
  modified_base 5: mod_base = OTHER; note = 2'-O-methyluridine-3'-phosphate
  modified_base 6: mod_base = OTHER; note = 2'-O-methyluridine-3'-phosphate
  modified_base 7: mod_base = OTHER; note = 2'-fluorouridine-3'-phosphate
  modified_base 8: mod_base = OTHER; note = 2'-O-methylguanosine-3'-phosphate
  modified_base 9: mod_base = OTHER; note = 2'-fluoroadenosine-3'-phosphate
  modified_base 10: mod_base = OTHER; note = 2'-fluoroguanosine-3'-phosphate
  modified_base 11: mod_base = OTHER; note = 2'-fluoroadenosine-3'-phosphate
  modified_base 12: mod_base = OTHER; note = 2'-O-methylguanosine-3'-phosphate
  modified_base 13: mod_base = OTHER; note = 2'-O-methylguanosine-3'-phosphate
  modified_base 14: mod_base = OTHER; note = 2'-O-methyluridine-3'-phosphate
  modified_base 15: mod_base = OTHER; note = 2'-O-methylguanosine-3'-phosphate
  modified_base 16: mod_base = OTHER; note = 2'-O-methyladenosine-3'-phosphate
  modified_base 17: mod_base = OTHER; note = 2'-O-methyluridine-3'-phosphate
  modified_base 18: mod_base = OTHER; note = 2'-O-methylguanosine-3'-phosphate
  modified_base 19: mod_base = OTHER; note = 2'-O-methyladenosine-3'-phosphate
  modified_base 20: mod_base = OTHER; note = 2'-O-methyluridine-3'-phosphate
  modified_base 21: mod_base = OTHER; note 2'-O-methyladenosine-3'-phosphate-N-[tris(GalNAc-alkyl)-ami dodecanoyl)]-4-hydroxyprolinol (Hyp-(GalNAc-alkyl)3)
gcattttgagaggtgatgata

SEQ ID NO: 249 - RNA, 21 nt, synthetic construct
  source 1..21: mol_type = other RNA
  modified_base 1: mod_base = OTHER; note = 2'-O-methylcytidine-3'- phosphorothioate
  modified_base 2: mod_base = OTHER; note = 2'-O-methyladenosine-3'- phosphorothioate
  modified_base 3: mod_base = OTHER; note = 2'-O-methylguanosine-3'-phosphate
  modified_base 4: mod_base = OTHER; note = 2'-O-methylguanosine-3'-phosphate
  modified_base 5: mod_base = OTHER; note = 2'-O-methylguanosine-3'-phosphate
  modified_base 6: mod_base = OTHER; note = 2'-O-methylguanosine-3'-phosphate
  modified_base 7: mod_base = OTHER; note = 2'-fluoroguanosine-3'-phosphate
  modified_base 8: mod_base = OTHER; note = 2'-O-methyladenosine-3'-phosphate
  modified_base 9: mod_base = OTHER; note = 2'-fluoroguanosine-3'-phosphate
  modified_base 10: mod_base = OTHER; note = 2'-fluoroadenosine-3'-phosphate
  modified_base 11: mod_base = OTHER; note = 2'-fluoroadenosine-3'-phosphate
  modified_base 12: mod_base = OTHER; note = 2'-O-methyladenosine-3'-phosphate
  modified_base 13: mod_base = OTHER; note = 2'-O-methylguanosine-3'-phosphate
  modified_base 14: mod_base = OTHER; note = 2'-O-methylguanosine-3'-phosphate
  modified_base 15: mod_base = OTHER; note = 2'-O-methyluridine-3'-phosphate
  modified_base 16: mod_base = OTHER; note = 2'-O-methylguanosine-3'-phosphate
  modified_base 17: mod_base = OTHER; note = 2'-O-methyluridine-3'-phosphate
  modified_base 18: mod_base = OTHER; note = 2'-O-methyluridine-3'-phosphate
  modified_base 19: mod_base = OTHER; note = 2'-O-methylcytidine-3'-phosphate
  modified_base 20: mod_base = OTHER; note = 2'-O-methyladenosine-3'-phosphate
  modified_base 21: mod_base = OTHER; note 2'-O-methyladenosine-3'-phosphate-N-[tris(GalNAc-alkyl)-ami dodecanoyl)]-4-hydroxyprolinol (Hyp-(GalNAc-alkyl)3)
cagggggagaaaggtgttcaa

SEQ ID NO: 250 - RNA, 21 nt, synthetic construct
  source 1..21: mol_type = other RNA
  modified_base 1: mod_base = OTHER; note = 2'-O-methylguanosine-3'- phosphorothioate
  modified_base 2: mod_base = OTHER; note = 2'-O-methylguanosine-3'- phosphorothioate
  modified_base 3: mod_base = OTHER; note = 2'-O-methyladenosine-3'-phosphate
  modified_base 4: mod_base = OTHER; note = 2'-O-methyladenosine-3'-phosphate
  modified_base 5: mod_base = OTHER; note = 2'-O-methyladenosine-3'-phosphate
  modified_base 6: mod_base = OTHER; note = 2'-O-methyluridine-3'-phosphate
  modified_base 7: mod_base = OTHER; note = 2'-fluoroadenosine-3'-phosphate
  modified_base 8: mod_base = OTHER; note = 2'-O-methyluridine-3'-phosphate
  modified_base 9: mod_base = OTHER; note = 2'-fluoroadenosine-3'-phosphate
  modified_base 10: mod_base = OTHER; note = 2'-fluorouridine-3'-phosphate
  modified_base 11: mod_base = OTHER; note = 2'-fluorouridine-3'-phosphate
  modified_base 12: mod_base = OTHER; note = 2'-O-methyladenosine-3'-phosphate
  modified_base 13: mod_base = OTHER; note = 2'-O-methyladenosine-3'-phosphate
  modified_base 14: mod_base = OTHER; note = 2'-O-methylcytidine-3'-phosphate
  modified_base 15: mod_base = OTHER; note = 2'-O-methyluridine-3'-phosphate
  modified_base 16: mod_base = OTHER; note = 2'-O-methylguanosine-3'-phosphate
  modified_base 17: mod_base = OTHER; note = 2'-O-methyluridine-3'-phosphate
  modified_base 18: mod_base = OTHER; note = 2'-O-methyluridine-3'-phosphate
  modified_base 19: mod_base = OTHER; note = 2'-O-methyladenosine-3'-phosphate
  modified_base 20: mod_base = OTHER; note = 2'-O-methyladenosine-3'-phosphate
  modified_base 21: mod_base = OTHER; note 2'-O-methyladenosine-3'-phosphate-N-[tris(GalNAc-alkyl)-ami dodecanoyl)]-4-hydroxyprolinol (Hyp-(GalNAc-alkyl)3)
ggaaatatattaactgttaaa

SEQ ID NO: 251 - RNA, 21 nt, synthetic construct
  source 1..21: mol_type = other RNA
  modified_base 1: mod_base = OTHER; note = 2'-O-methylcytidine-3'- phosphorothioate
  modified_base 2: mod_base = OTHER; note = 2'-O-methyladenosine-3'- phosphorothioate
  modified_base 3: mod_base = OTHER; note = 2'-O-methyluridine-3'-phosphate
  modified_base 4: mod_base = OTHER; note = 2'-O-methyluridine-3'-phosphate
  modified_base 5: mod_base = OTHER; note = 2'-O-methylguanosine-3'-phosphate
  modified_base 6: mod_base = OTHER; note = 2'-O-methylguanosine-3'-phosphate
  modified_base 7: mod_base = OTHER; note = 2'-fluorouridine-3'-phosphate
  modified_base 8: mod_base = OTHER; note = 2'-O-methylguanosine-3'-phosphate
  modified_base 9: mod_base = OTHER; note = 2'-fluoroadenosine-3'-phosphate
  modified_base 10: mod_base = OTHER; note = 2'-fluoroguanosine-3'-phosphate
  modified_base 11: mod_base = OTHER; note = 2'-fluoroguanosine-3'-phosphate
  modified_base 12: mod_base = OTHER; note = 2'-O-methyladenosine-3'-phosphate
  modified_base 13: mod_base = OTHER; note = 2'-O-methyladenosine-3'-phosphate
  modified_base 14: mod_base = OTHER; note = 2'-O-methyladenosine-3'-phosphate
  modified_base 15: mod_base = OTHER; note = 2'-O-methyladenosine-3'-phosphate
  modified_base 16: mod_base = OTHER; note = 2'-O-methyladenosine-3'-phosphate
  modified_base 17: mod_base = OTHER; note = 2'-O-methyluridine-3'-phosphate
  modified_base 18: mod_base = OTHER; note = 2'-O-methylcytidine-3'-phosphate
  modified_base 19: mod_base = OTHER; note = 2'-O-methylcytidine-3'-phosphate
  modified_base 20: mod_base = OTHER; note = 2'-O-methyluridine-3'-phosphate
  modified_base 21: mod_base = OTHER; note 2'-O-methyluridine-3'-phosphate-N-[tris(GalNAc-alkyl)-amido decanoyl)]-4-hydroxyprolinol (Hyp-(GalNAc-alkyl)3)
cattggtgaggaaaaatcctt

SEQ ID NO: 252 - RNA, 21 nt, synthetic construct
  source 1..21: mol_type = other RNA
  modified_base 1: mod_base = OTHER; note = 2'-O-methylguanosine-3'- phosphorothioate
  modified_base 2: mod_base = OTHER; note = 2'-O-methylguanosine-3'- phosphorothioate
  modified_base 3: mod_base = OTHER; note = 2'-O-methylguanosine-3'-phosphate
  modified_base 4: mod_base = OTHER; note = 2'-O-methyladenosine-3'-phosphate
  modified_base 5: mod_base = OTHER; note = 2'-O-methylguanosine-3'-phosphate
  modified_base 6: mod_base = OTHER; note = 2'-O-methyladenosine-3'-phosphate
  modified_base 7: mod_base = OTHER; note = 2'-fluoroadenosine-3'-phosphate
  modified_base 8: mod_base = OTHER; note = 2'-O-methyladenosine-3'-phosphate
  modified_base 9: mod_base = OTHER; note = 2'-fluoroguanosine-3'-phosphate
  modified_base 10: mod_base = OTHER; note = 2'-fluoroguanosine-3'-phosphate
  modified_base 11: mod_base = OTHER; note = 2'-fluorouridine-3'-phosphate
  modified_base 12: mod_base = OTHER; note = 2'-O-methylguanosine-3'-phosphate
  modified_base 13: mod_base = OTHER; note = 2'-O-methyluridine-3'-phosphate
  modified_base 14: mod_base = OTHER; note = 2'-O-methyluridine-3'-phosphate
  modified_base 15: mod_base = OTHER; note = 2'-O-methylcytidine-3'-phosphate
  modified_base 16: mod_base = OTHER; note = 2'-O-methyladenosine-3'-phosphate
  modified_base 17: mod_base = OTHER; note = 2'-O-methyladenosine-3'-phosphate
  modified_base 18: mod_base = OTHER; note = 2'-O-methylguanosine-3'-phosphate
  modified_base 19: mod_base = OTHER; note = 2'-O-methyladenosine-3'-phosphate
  modified_base 20: mod_base = OTHER; note = 2'-O-methyluridine-3'-phosphate
  modified_base 21: mod_base = OTHER; note 2'-O-methyladenosine-3'-phosphate-N-[tris(GalNAc-alkyl)-ami dodecanoyl)]-4-hydroxyprolinol (Hyp-(GalNAc-alkyl)3)
gggagaaaggtgttcaagata

SEQ ID NO: 253 - RNA, 21 nt, synthetic construct
  source 1..21: mol_type = other RNA
  modified_base 1: mod_base = OTHER; note = 2'-O-methylguanosine-3'- phosphorothioate
  modified_base 2: mod_base = OTHER; note = 2'-O-methylguanosine-3'- phosphorothioate
  modified_base 3: mod_base = OTHER; note = 2'-O-methylcytidine-3'-phosphate
  modified_base 4: mod_base = OTHER; note = 2'-O-methyladenosine-3'-phosphate
  modified_base 5: mod_base = OTHER; note = 2'-O-methyluridine-3'-phosphate
  modified_base 6: mod_base = OTHER; note = 2'-O-methyluridine-3'-phosphate
  modified_base 7: mod_base = OTHER; note = 2'-fluorouridine-3'-phosphate
  modified_base 8: mod_base = OTHER; note = 2'-O-methyluridine-3'-phosphate
  modified_base 9: mod_base = OTHER; note = 2'-fluoroguanosine-3'-phosphate
  modified_base 10: mod_base = OTHER; note = 2'-fluoroadenosine-3'-phosphate
  modified_base 11: mod_base = OTHER; note = 2'-fluoroguanosine-3'-phosphate
  modified_base 12: mod_base = OTHER; note = 2'-O-methyladenosine-3'-phosphate
  modified_base 13: mod_base = OTHER; note = 2'-O-methylguanosine-3'-phosphate
  modified_base 14: mod_base = OTHER; note = 2'-O-methylguanosine-3'-phosphate
  modified_base 15: mod_base = OTHER; note = 2'-O-methyluridine-3'-phosphate
  modified_base 16: mod_base = OTHER; note = 2'-O-methylguanosine-3'-phosphate
  modified_base 17: mod_base = OTHER; note = 2'-O-methyladenosine-3'-phosphate
  modified_base 18: mod_base = OTHER; note = 2'-O-methyluridine-3'-phosphate
  modified_base 19: mod_base = OTHER; note = 2'-O-methylguanosine-3'-phosphate
  modified_base 20: mod_base = OTHER; note = 2'-O-methyladenosine-3'-phosphate
  modified_base 21: mod_base = OTHER; note 2'-O-methyluridine-3'-phosphate-N-[tris(GalNAc-alkyl)-amido decanoyl)]-4-hydroxyprolinol (Hyp-(GalNAc-alkyl)3)
ggcattttgagaggtgatgat

SEQ ID NO: 254 - RNA, 21 nt, synthetic construct
  source 1..21: mol_type = other RNA
  modified_base 1: mod_base = OTHER; note = 2'-O-methyluridine-3'-phosphorothioate
  modified_base 2: mod_base = OTHER; note = 2'-O-methyladenosine-3'- phosphorothioate
  modified_base 3: mod_base = OTHER; note = 2'-O-methylcytidine-3'-phosphate
  modified_base 4: mod_base = OTHER; note = 2'-O-methyladenosine-3'-phosphate
  modified_base 5: mod_base = OTHER; note = 2'-O-methyladenosine-3'-phosphate
  modified_base 6: mod_base = OTHER; note = 2'-O-methyladenosine-3'-phosphate
  modified_base 7: mod_base = OTHER; note = 2'-fluoroguanosine-3'-phosphate
  modified_base 8: mod_base = OTHER; note = 2'-O-methylguanosine-3'-phosphate
  modified_base 9: mod_base = OTHER; note = 2'-fluoroguanosine-3'-phosphate
  modified_base 10: mod_base = OTHER; note = 2'-fluorouridine-3'-phosphate
  modified_base 11: mod_base = OTHER; note = 2'-fluoroguanosine-3'-phosphate
  modified_base 12: mod_base = OTHER; note = 2'-O-methyluridine-3'-phosphate
  modified_base 13: mod_base = OTHER; note = 2'-O-methylcytidine-3'-phosphate
  modified_base 14: mod_base = OTHER; note = 2'-O-methylguanosine-3'-phosphate
  modified_base 15: mod_base = OTHER; note = 2'-O-methyluridine-3'-phosphate
  modified_base 16: mod_base = OTHER; note = 2'-O-methyluridine-3'-phosphate
  modified_base 17: mod_base = OTHER; note = 2'-O-methylcytidine-3'-phosphate
  modified_base 18: mod_base = OTHER; note = 2'-O-methyluridine-3'-phosphate
  modified_base 19: mod_base = OTHER; note = 2'-O-methyluridine-3'-phosphate
  modified_base 20: mod_base = OTHER; note = 2'-O-methyluridine-3'-phosphate
  modified_base 21: mod_base = OTHER; note 2'-O-methyluridine-3'-phosphate-N-[tris(GalNAc-alkyl)-amido decanoyl)]-4-hydroxyprolinol (Hyp-(GalNAc-alkyl)3)
tacaaagggtgtcgttctttt

SEQ ID NO: 255 - RNA, 21 nt, synthetic construct
  source 1..21: mol_type = other RNA
  modified_base 1: mod_base = OTHER; note = 2'-O-methyluridine-3'-phosphorothioate
  modified_base 2: mod_base = OTHER; note = 2'-O-methylguanosine-3'- phosphorothioate
  modified_base 3: mod_base = OTHER; note = 2'-O-methylguanosine-3'-phosphate
  modified_base 4: mod_base = OTHER; note = 2'-O-methylguanosine-3'-phosphate
  modified_base 5: mod_base = OTHER; note = 2'-O-methyladenosine-3'-phosphate
  modified_base 6: mod_base = OTHER; note = 2'-O-methyluridine-3'-phosphate
  modified_base 7: mod_base = OTHER; note = 2'-fluorocytidine-3'-phosphate
  modified_base 8: mod_base = OTHER; note = 2'-O-methyluridine-3'-phosphate
  modified_base 9: mod_base = OTHER; note = 2'-fluorouridine-3'-phosphate
  modified_base 10: mod_base = OTHER; note = 2'-fluoroguanosine-3'-phosphate
  modified_base 11: mod_base = OTHER; note = 2'-fluoroguanosine-3'-phosphate
  modified_base 12: mod_base = OTHER; note = 2'-O-methyluridine-3'-phosphate
  modified_base 13: mod_base = OTHER; note = 2'-O-methylguanosine-3'-phosphate
  modified_base 14: mod_base = OTHER; note = 2'-O-methyluridine-3'-phosphate
  modified_base 15: mod_base = OTHER; note = 2'-O-methylcytidine-3'-phosphate
  modified_base 16: mod_base = OTHER; note = 2'-O-methylguanosine-3'-phosphate
  modified_base 17: mod_base = OTHER; note = 2'-O-methyladenosine-3'-phosphate
  modified_base 18: mod_base = OTHER; note = 2'-O-methyladenosine-3'-phosphate
  modified_base 19: mod_base = OTHER; note = 2'-O-methyluridine-3'-phosphate
  modified_base 20: mod_base = OTHER; note = 2'-O-methylcytidine-3'-phosphate
  modified_base 21: mod_base = OTHER; note 2'-O-methyladenosine-3'-phosphate-N-[tris(GalNAc-alkyl)-ami dodecanoyl)]-4-hydroxyprolinol (Hyp-(GalNAc-alkyl)3)
tgggatcttggtgtcgaatca

SEQ ID NO: 256 - RNA, 21 nt, synthetic construct
  source 1..21: mol_type = other RNA
  modified_base 1: mod_base = OTHER; note = 2'-O-methylcytidine-3'- phosphorothioate
  modified_base 2: mod_base = OTHER; note = 2'-O-methyluridine-3'-phosphorothioate
  modified_base 3: mod_base = OTHER; note = 2'-O-methylguanosine-3'-phosphate
  modified_base 4: mod_base = OTHER; note = 2'-O-methyladenosine-3'-phosphate
  modified_base 5: mod_base = OTHER; note = 2'-O-methylcytidine-3'-phosphate
  modified_base 6: mod_base = OTHER; note = 2'-O-methyladenosine-3'-phosphate
  modified_base 7: mod_base = OTHER; note = 2'-fluoroguanosine-3'-phosphate
  modified_base 8: mod_base = OTHER; note = 2'-O-methyluridine-3'-phosphate
  modified_base 9: mod_base = OTHER; note = 2'-fluoroguanosine-3'-phosphate
  modified_base 10: mod_base = OTHER; note = 2'-fluorocytidine-3'-phosphate
  modified_base 11: mod_base = OTHER; note = 2'-fluoroadenosine-3'-phosphate
  modified_base 12: mod_base = OTHER; note = 2'-O-methylcytidine-3'-phosphate
  modified_base 13: mod_base = OTHER; note = 2'-O-methyladenosine-3'-phosphate
  modified_base 14: mod_base = OTHER; note = 2'-O-methyladenosine-3'-phosphate
  modified_base 15: mod_base = OTHER; note = 2'-O-methyluridine-3'-phosphate
  modified_base 16: mod_base = OTHER; note = 2'-O-methyladenosine-3'-phosphate
  modified_base 17: mod_base = OTHER; note = 2'-O-methyluridine-3'-phosphate
  modified_base 18: mod_base = OTHER; note = 2'-O-methyluridine-3'-phosphate
  modified_base 19: mod_base = OTHER; note = 2'-O-methyluridine-3'-phosphate
  modified_base 20: mod_base = OTHER; note = 2'-O-methyluridine-3'-phosphate
  modified_base 21: mod_base = OTHER; note 2'-O-methyladenosine-3'-phosphate-N-[tris(GalNAc-alkyl)-ami dodecanoyl)]-4-hydroxyprolinol (Hyp-(GalNAc-alkyl)3)
ctgacagtgcacaatatttta

SEQ ID NO: 257 - RNA, 21 nt, synthetic construct
  source 1..21: mol_type = other RNA
  modified_base 1: mod_base = OTHER; note = 2'-O-methylcytidine-3'- phosphorothioate
  modified_base 2: mod_base = OTHER; note = 2'-O-methyladenosine-3'- phosphorothioate
  modified_base 3: mod_base = OTHER; note = 2'-O-methylguanosine-3'-phosphate
  modified_base 4: mod_base = OTHER; note = 2'-O-methyluridine-3'-phosphate
  modified_base 5: mod_base = OTHER; note = 2'-O-methylguanosine-3'-phosphate
  modified_base 6: mod_base = OTHER; note = 2'-O-methylcytidine-3'-phosphate
  modified_base 7: mod_base = OTHER; note = 2'-fluoroadenosine-3'-phosphate
  modified_base 8: mod_base = OTHER; note = 2'-O-methylcytidine-3'-phosphate
  modified_base 9: mod_base = OTHER; note = 2'-fluoroadenosine-3'-phosphate
  modified_base 10: mod_base = OTHER; note = 2'-fluoroadenosine-3'-phosphate
  modified_base 11: mod_base = OTHER; note = 2'-fluorouridine-3'-phosphate
  modified_base 12: mod_base = OTHER; note = 2'-O-methyladenosine-3'-phosphate
  modified_base 13: mod_base = OTHER; note = 2'-O-methyluridine-3'-phosphate
  modified_base 14: mod_base = OTHER; note = 2'-O-methyluridine-3'-phosphate
  modified_base 15: mod_base = OTHER; note = 2'-O-methyluridine-3'-phosphate
  modified_base 16: mod_base = OTHER; note = 2'-O-methyluridine-3'-phosphate
  modified_base 17: mod_base = OTHER; note = 2'-O-methylcytidine-3'-phosphate
  modified_base 18: mod_base = OTHER; note = 2'-O-methylcytidine-3'-phosphate
  modified_base 19: mod_base = OTHER; note = 2'-O-methylcytidine-3'-phosphate
  modified_base 20: mod_base = OTHER; note = 2'-O-methyladenosine-3'-phosphate
  modified_base 21: mod_base = OTHER; note 2'-O-methyluridine-3'-phosphate-N-[tris(GalNAc-alkyl)-amido decanoyl)]-4-hydroxyprolinol (Hyp-(GalNAc-alkyl)3)
cagtgcacaatattttcccat

SEQ ID NO: 258 - RNA, 21 nt, synthetic construct
  source 1..21: mol_type = other RNA
  modified_base 1: mod_base = OTHER; note = 2'-O-methyladenosine-3'- phosphorothioate
  modified_base 2: mod_base = OTHER; note = 2'-O-methylcytidine-3'- phosphorothioate
  modified_base 3: mod_base = OTHER; note = 2'-O-methyluridine-3'-phosphate
  modified_base 4: mod_base = OTHER; note = 2'-O-methyluridine-3'-phosphate
  modified_base 5: mod_base = OTHER; note = 2'-O-methyluridine-3'-phosphate
  modified_base 6: mod_base = OTHER; note = 2'-O-methyluridine-3'-phosphate
  modified_base 7: mod_base = OTHER; note = 2'-fluorocytidine-3'-phosphate
  modified_base 8: mod_base = OTHER; note = 2'-O-methyladenosine-3'-phosphate
  modified_base 9: mod_base = OTHER; note = 2'-fluoroadenosine-3'-phosphate
  modified_base 10: mod_base = OTHER; note = 2'-fluorouridine-3'-phosphate
  modified_base 11: mod_base = OTHER; note = 2'-fluoroguanosine-3'-phosphate
  modified_base 12: mod_base = OTHER; note = 2'-O-methylguanosine-3'-phosphate
  modified_base 13: mod_base = OTHER; note = 2'-O-methylguanosine-3'-phosphate
  modified_base 14: mod_base = OTHER; note = 2'-O-methyluridine-3'-phosphate
  modified_base 15: mod_base = OTHER; note = 2'-O-methylguanosine-3'-phosphate
  modified_base 16: mod_base = OTHER; note = 2'-O-methyluridine-3'-phosphate
  modified_base 17: mod_base = OTHER; note = 2'-O-methylcytidine-3'-phosphate
  modified_base 18: mod_base = OTHER; note = 2'-O-methylcytidine-3'-phosphate
  modified_base 19: mod_base = OTHER; note = 2'-O-methyluridine-3'-phosphate
  modified_base 20: mod_base = OTHER; note = 2'-O-methyladenosine-3'-phosphate
  modified_base 21: mod_base = OTHER; note 2'-O-methyladenosine-3'-phosphate-N-[tris(GalNAc-alkyl)-ami dodecanoyl)]-4-hydroxyprolinol (Hyp-(GalNAc-alkyl)3)
acttttcaatgggtgtcctaa

SEQ ID NO: 259 - RNA, 21 nt, synthetic construct
  source 1..21: mol_type = other RNA
  modified_base 1: mod_base = OTHER; note = 2'-O-methyladenosine-3'- phosphorothioate
  modified_base 2: mod_base = OTHER; note = 2'-O-methylcytidine-3'- phosphorothioate
  modified_base 3: mod_base = OTHER; note = 2'-O-methyladenosine-3'-phosphate
  modified_base 4: mod_base = OTHER; note = 2'-O-methyluridine-3'-phosphate
  modified_base 5: mod_base = OTHER; note = 2'-O-methyluridine-3'-phosphate
  modified_base 6: mod_base = OTHER; note = 2'-O-methylguanosine-3'-phosphate
  modified_base 7: mod_base = OTHER; note = 2'-fluoroguanosine-3'-phosphate
  modified_base 8: mod_base = OTHER; note = 2'-O-methyluridine-3'-phosphate
  modified_base 9: mod_base = OTHER; note = 2'-fluoroguanosine-3'-phosphate
  modified_base 10: mod_base = OTHER; note = 2'-fluoroadenosine-3'-phosphate
  modified_base 11: mod_base = OTHER; note = 2'-fluoroguanosine-3'-phosphate
  modified_base 12: mod_base = OTHER; note = 2'-O-methylguanosine-3'-phosphate
  modified_base 13: mod_base = OTHER; note = 2'-O-methyladenosine-3'-phosphate
  modified_base 14: mod_base = OTHER; note = 2'-O-methyladenosine-3'-phosphate
  modified_base 15: mod_base = OTHER; note = 2'-O-methyladenosine-3'-phosphate
  modified_base 16: mod_base = OTHER; note = 2'-O-methyladenosine-3'-phosphate
  modified_base 17: mod_base = OTHER; note = 2'-O-methyladenosine-3'-phosphate
  modified_base 18: mod_base = OTHER; note = 2'-O-methyluridine-3'-phosphate
  modified_base 19: mod_base = OTHER; note = 2'-O-methylcytidine-3'-phosphate
  modified_base 20: mod_base = OTHER; note = 2'-O-methylcytidine-3'-phosphate
  modified_base 21: mod_base = OTHER; note 2'-O-methyluridine-3'-phosphate-N-[tris(GalNAc-alkyl)-amido decanoyl)]-4-hydroxyprolinol (Hyp-(GalNAc-alkyl)3)
acattggtgaggaaaaatcct

SEQ ID NO: 260 - RNA, 21 nt, synthetic construct
  source 1..21: mol_type = other RNA
  modified_base 1: mod_base = OTHER; note = 2'-O-methyluridine-3'-phosphorothioate
  modified_base 2: mod_base = OTHER; note = 2'-O-methyluridine-3'-phosphorothioate
  modified_base 3: mod_base = OTHER; note = 2'-O-methylguanosine-3'-phosphate
  modified_base 4: mod_base = OTHER; note = 2'-O-methylcytidine-3'-phosphate
  modified_base 5: mod_base = OTHER; note = 2'-O-methyluridine-3'-phosphate
  modified_base 6: mod_base = OTHER; note = 2'-O-methyluridine-3'-phosphate
  modified_base 7: mod_base = OTHER; note = 2'-fluorouridine-3'-phosphate
  modified_base 8: mod_base = OTHER; note = 2'-O-methyluridine-3'-phosphate
  modified_base 9: mod_base = OTHER; note = 2'-fluoroguanosine-3'-phosphate
  modified_base 10: mod_base = OTHER; note = 2'-fluoroadenosine-3'-phosphate
  modified_base 11: mod_base = OTHER; note = 2'-fluorocytidine-3'-phosphate
  modified_base 12: mod_base = OTHER; note = 2'-O-methyluridine-3'-phosphate
  modified_base 13: mod_base = OTHER; note = 2'-O-methyluridine-3'-phosphate
  modified_base 14: mod_base = OTHER; note = 2'-O-methyluridine-3'-phosphate
  modified_base 15: mod_base = OTHER; note = 2'-O-methyluridine-3'-phosphate
  modified_base 16: mod_base = OTHER; note = 2'-O-methylcytidine-3'-phosphate
  modified_base 17: mod_base = OTHER; note = 2'-O-methyladenosine-3'-phosphate
  modified_base 18: mod_base = OTHER; note = 2'-O-methyladenosine-3'-phosphate
  modified_base 19: mod_base = OTHER; note = 2'-O-methyluridine-3'-phosphate
  modified_base 20: mod_base = OTHER; note = 2'-O-methylguanosine-3'-phosphate
  modified_base 21: mod_base = OTHER; note 2'-O-methyladenosine-3'-phosphate-N-[tris(GalNAc-alkyl)-ami dodecanoyl)]-4-hydroxyprolinol (Hyp-(GalNAc-alkyl)3)
ttgcttttgacttttcaatga

SEQ ID NO: 261 - RNA, 21 nt, synthetic construct
  source 1..21: mol_type = other RNA
  modified_base 1: mod_base = OTHER; note = 2'-O-methylcytidine-3'- phosphorothioate
  modified_base 2: mod_base = OTHER; note = 2'-O-methyladenosine-3'- phosphorothioate
  modified_base 3: mod_base = OTHER; note = 2'-O-methyluridine-3'-phosphate
  modified_base 4: mod_base = OTHER; note = 2'-O-methyluridine-3'-phosphate
  modified_base 5: mod_base = OTHER; note = 2'-O-methyluridine-3'-phosphate
  modified_base 6: mod_base = OTHER; note = 2'-O-methyluridine-3'-phosphate
  modified_base 7: mod_base = OTHER; note = 2'-fluoroguanosine-3'-phosphate
  modified_base 8: mod_base = OTHER; note = 2'-O-methyladenosine-3'-phosphate
  modified_base 9: mod_base = OTHER; note = 2'-fluoroguanosine-3'-phosphate
  modified_base 10: mod_base = OTHER; note = 2'-fluoroadenosine-3'-phosphate
  modified_base 11: mod_base = OTHER; note = 2'-fluoroguanosine-3'-phosphate
  modified_base 12: mod_base = OTHER; note = 2'-O-methylguanosine-3'-phosphate
  modified_base 13: mod_base = OTHER; note = 2'-O-methyluridine-3'-phosphate
  modified_base 14: mod_base = OTHER; note = 2'-O-methylguanosine-3'-phosphate
  modified_base 15: mod_base = OTHER; note = 2'-O-methyladenosine-3'-phosphate
  modified_base 16: mod_base = OTHER; note = 2'-O-methyluridine-3'-phosphate
  modified_base 17: mod_base = OTHER; note = 2'-O-methylguanosine-3'-phosphate
  modified_base 18: mod_base = OTHER; note = 2'-O-methyladenosine-3'-phosphate
  modified_base 19: mod_base = OTHER; note = 2'-O-methyluridine-3'-phosphate
  modified_base 20: mod_base = OTHER; note = 2'-O-methylguanosine-3'-phosphate
  modified_base 21: mod_base = OTHER; note 2'-O-methyladenosine-3'-phosphate-N-[tris(GalNAc-alkyl)-ami dodecanoyl)]-4-hydroxyprolinol (Hyp-(GalNAc-alkyl)3)
cattttgagaggtgatgatga

SEQ ID NO: 262 - RNA, 21 nt, synthetic construct
  source 1..21: mol_type = other RNA
  modified_base 1: mod_base = OTHER; note = 2'-O-methyluridine-3'-phosphorothioate
  modified_base 2: mod_base = OTHER; note = 2'-O-methyluridine-3'-phosphorothioate
  modified_base 3: mod_base = OTHER; note = 2'-O-methylguanosine-3'-phosphate
  modified_base 4: mod_base = OTHER; note = 2'-O-methyladenosine-3'-phosphate
  modified_base 5: mod_base = OTHER; note = 2'-O-methylcytidine-3'-phosphate
  modified_base 6: mod_base = OTHER; note = 2'-O-methyluridine-3'-phosphate
  modified_base 7: mod_base = OTHER; note = 2'-fluorouridine-3'-phosphate
  modified_base 8: mod_base = OTHER; note = 2'-O-methyluridine-3'-phosphate
  modified_base 9: mod_base = OTHER; note = 2'-fluorouridine-3'-phosphate
  modified_base 10: mod_base = OTHER; note = 2'-fluorocytidine-3'-phosphate
  modified_base 11: mod_base = OTHER; note = 2'-fluoroadenosine-3'-phosphate
  modified_base 12: mod_base = OTHER; note = 2'-O-methyladenosine-3'-phosphate
  modified_base 13: mod_base = OTHER; note = 2'-O-methyluridine-3'-phosphate
  modified_base 14: mod_base = OTHER; note = 2'-O-methylguanosine-3'-phosphate
  modified_base 15: mod_base = OTHER; note = 2'-O-methylguanosine-3'-phosphate
  modified_base 16: mod_base = OTHER; note = 2'-O-methylguanosine-3'-phosphate
  modified_base 17: mod_base = OTHER; note = 2'-O-methyluridine-3'-phosphate
  modified_base 18: mod_base = OTHER; note = 2'-O-methylguanosine-3'-phosphate
  modified_base 19: mod_base = OTHER; note = 2'-O-methyluridine-3'-phosphate
  modified_base 20: mod_base = OTHER; note = 2'-O-methylcytidine-3'-phosphate
  modified_base 21: mod_base = OTHER; note 2'-O-methyladenosine-3'-phosphate-N-[tris(GalNAc-alkyl)-ami dodecanoyl)]-4-hydroxyprolinol (Hyp-(GalNAc-alkyl)3)
ttgacttttcaatgggtgtca

SEQ ID NO: 263 - RNA, 21 nt, synthetic construct
  source 1..21: mol_type = other RNA
  modified_base 1: mod_base = OTHER; note = 2'-O-methylcytidine-3'- phosphorothioate
  modified_base 2: mod_base = OTHER; note = 2'-O-methylguanosine-3'- phosphorothioate
  modified_base 3: mod_base = OTHER; note = 2'-O-methyladenosine-3'-phosphate
  modified_base 4: mod_base = OTHER; note = 2'-O-methylcytidine-3'-phosphate
  modified_base 5: mod_base = OTHER; note = 2'-O-methyluridine-3'-phosphate
  modified_base 6: mod_base = OTHER; note = 2'-O-methyluridine-3'-phosphate
  modified_base 7: mod_base = OTHER; note = 2'-fluorocytidine-3'-phosphate
  modified_base 8: mod_base = OTHER; note = 2'-O-methyluridine-3'-phosphate
  modified_base 9: mod_base = OTHER; note = 2'-fluoroguanosine-3'-phosphate
  modified_base 10: mod_base = OTHER; note = 2'-fluorouridine-3'-phosphate
  modified_base 11: mod_base = OTHER; note = 2'-fluorouridine-3'-phosphate
  modified_base 12: mod_base = OTHER; note = 2'-O-methyluridine-3'-phosphate
  modified_base 13: mod_base = OTHER; note = 2'-O-methyluridine-3'-phosphate
  modified_base 14: mod_base = OTHER; note = 2'-O-methyladenosine-3'-phosphate
  modified_base 15: mod_base = OTHER; note = 2'-O-methylguanosine-3'-phosphate
  modified_base 16: mod_base = OTHER; note = 2'-O-methylguanosine-3'-phosphate
  modified_base 17: mod_base = OTHER; note = 2'-O-methyladenosine-3'-phosphate
  modified_base 18: mod_base = OTHER; note = 2'-O-methylcytidine-3'-phosphate
  modified_base 19: mod_base = OTHER; note = 2'-O-methyladenosine-3'-phosphate
  modified_base 20: mod_base = OTHER; note = 2'-O-methylguanosine-3'-phosphate
  modified_base 21: mod_base = OTHER; note 2'-O-methyladenosine-3'-phosphate-N-[tris(GalNAc-alkyl)-ami dodecanoyl)]-4-hydroxyprolinol (Hyp-(GalNAc-alkyl)3)
cgacttctgttttaggacaga

SEQ ID NO: 264 - RNA, 21 nt, synthetic construct
  source 1..21: mol_type = other RNA
  modified_base 1: mod_base = OTHER; note = 2'-O-methylcytidine-3'- phosphorothioate
  modified_base 2: mod_base = OTHER; note = 2'-O-methyluridine-3'-phosphorothioate
  modified_base 3: mod_base = OTHER; note = 2'-O-methylcytidine-3'-phosphate
  modified_base 4: mod_base = OTHER; note = 2'-O-methyluridine-3'-phosphate
  modified_base 5: mod_base = OTHER; note = 2'-O-methylguanosine-3'-phosphate
  modified_base 6: mod_base = OTHER; note = 2'-O-methyladenosine-3'-phosphate
  modified_base 7: mod_base = OTHER; note = 2'-fluoroguanosine-3'-phosphate
  modified_base 8: mod_base = OTHER; note = 2'-O-methyluridine-3'-phosphate
  modified_base 9: mod_base = OTHER; note = 2'-fluoroguanosine-3'-phosphate
  modified_base 10: mod_base = OTHER; note = 2'-fluoroguanosine-3'-phosphate
  modified_base 11: mod_base = OTHER; note = 2'-fluoroguanosine-3'-phosphate
  modified_base 12: mod_base = OTHER; note = 2'-O-methyluridine-3'-phosphate
  modified_base 13: mod_base = OTHER; note = 2'-O-methylguanosine-3'-phosphate
  modified_base 14: mod_base = OTHER; note = 2'-O-methylcytidine-3'-phosphate
  modified_base 15: mod_base = OTHER; note = 2'-O-methylcytidine-3'-phosphate
  modified_base 16: mod_base = OTHER; note = 2'-O-methyladenosine-3'-phosphate
  modified_base 17: mod_base = OTHER; note = 2'-O-methylguanosine-3'-phosphate
  modified_base 18: mod_base = OTHER; note = 2'-O-methyladenosine-3'-phosphate
  modified_base 19: mod_base = OTHER; note = 2'-O-methyladenosine-3'-phosphate
  modified_base 20: mod_base = OTHER; note = 2'-O-methyluridine-3'-phosphate
  modified_base 21: mod_base = OTHER; note 2'-O-methyladenosine-3'-phosphate-N-[tris(GalNAc-alkyl)-ami dodecanoyl)]-4-hydroxyprolinol (Hyp-(GalNAc-alkyl)3)
ctctgagtgggtgccagaata

SEQ ID NO: 265 - RNA, 21 nt, synthetic construct
  source 1..21: mol_type = other RNA
  modified_base 1: mod_base = OTHER; note = 2'-O-methylguanosine-3'- phosphorothioate
  modified_base 2: mod_base = OTHER; note = 2'-O-methylguanosine-3'- phosphorothioate
  modified_base 3: mod_base = OTHER; note = 2'-O-methylguanosine-3'-phosphate
  modified_base 4: mod_base = OTHER; note = 2'-O-methyluridine-3'-phosphate
  modified_base 5: mod_base = OTHER; note = 2'-O-methylguanosine-3'-phosphate
  modified_base 6: mod_base = OTHER; note = 2'-O-methylcytidine-3'-phosphate
  modified_base 7: mod_base = OTHER; note = 2'-fluorocytidine-3'-phosphate
  modified_base 8: mod_base = OTHER; note = 2'-O-methyladenosine-3'-phosphate
  modified_base 9: mod_base = OTHER; note = 2'-fluoroguanosine-3'-phosphate
  modified_base 10: mod_base = OTHER; note = 2'-fluoroadenosine-3'-phosphate
  modified_base 11: mod_base = OTHER; note = 2'-fluoroadenosine-3'-phosphate
  modified_base 12: mod_base = OTHER; note = 2'-O-methyluridine-3'-phosphate
  modified_base 13: mod_base = OTHER; note = 2'-O-methylguanosine-3'-phosphate
  modified_base 14: mod_base = OTHER; note = 2'-O-methyluridine-3'-phosphate
  modified_base 15: mod_base = OTHER; note = 2'-O-methylguanosine-3'-phosphate
  modified_base 16: mod_base = OTHER; note = 2'-O-methyladenosine-3'-phosphate
  modified_base 17: mod_base = OTHER; note = 2'-O-methyladenosine-3'-phosphate
  modified_base 18: mod_base = OTHER; note = 2'-O-methyladenosine-3'-phosphate
  modified_base 19: mod_base = OTHER; note = 2'-O-methylguanosine-3'-phosphate
  modified_base 20: mod_base = OTHER; note = 2'-O-methyluridine-3'-phosphate
  modified_base 21: mod_base = OTHER; note 2'-O-methyladenosine-3'-phosphate-N-[tris(GalNAc-alkyl)-ami dodecanoyl)]-4-hydroxyprolinol (Hyp-(GalNAc-alkyl)3)
gggtgccagaatgtgaaagta

SEQ ID NO: 266 - RNA, 21 nt, synthetic construct
  source 1..21: mol_type = other RNA
  modified_base 1: mod_base = OTHER; note = 2'-O-methyluridine-3'-phosphorothioate
  modified_base 2: mod_base = OTHER; note = 2'-O-methylcytidine-3'- phosphorothioate
  modified_base 3: mod_base = OTHER; note = 2'-O-methyladenosine-3'-phosphate
  modified_base 4: mod_base = OTHER; note = 2'-O-methyladenosine-3'-phosphate
  modified_base 5: mod_base = OTHER; note = 2'-O-methyluridine-3'-phosphate
  modified_base 6: mod_base = OTHER; note = 2'-O-methylguanosine-3'-phosphate
  modified_base 7: mod_base = OTHER; note = 2'-fluoroguanosine-3'-phosphate
  modified_base 8: mod_base = OTHER; note = 2'-O-methylguanosine-3'-phosphate
  modified_base 9: mod_base = OTHER; note = 2'-fluorouridine-3'-phosphate
  modified_base 10: mod_base = OTHER; note = 2'-fluoroguanosine-3'-phosphate
  modified_base 11: mod_base = OTHER; note = 2'-fluorouridine-3'-phosphate
  modified_base 12: mod_base = OTHER; note = 2'-O-methylcytidine-3'-phosphate
  modified_base 13: mod_base = OTHER; note = 2'-O-methylcytidine-3'-phosphate
  modified_base 14: mod_base = OTHER; note = 2'-O-methyluridine-3'-phosphate
  modified_base 15: mod_base = OTHER; note = 2'-O-methyladenosine-3'-phosphate
  modified_base 16: mod_base = OTHER; note = 2'-O-methylguanosine-3'-phosphate
  modified_base 17: mod_base = OTHER; note = 2'-O-methylguanosine-3'-phosphate
  modified_base 18: mod_base = OTHER; note = 2'-O-methyladenosine-3'-phosphate
  modified_base 19: mod_base = OTHER; note = 2'-O-methyladenosine-3'-phosphate
  modified_base 20: mod_base = OTHER; note = 2'-O-methylcytidine-3'-phosphate
  modified_base 21: mod_base = OTHER; note 2'-O-methyladenosine-3'-phosphate-N-[tris(GalNAc-alkyl)-ami dodecanoyl)]-4-hydroxyprolinol (Hyp-(GalNAc-alkyl)3)
tcaatgggtgtcctaggaaca

SEQ ID NO: 267 - RNA, 21 nt, synthetic construct
  source 1..21: mol_type = other RNA
  modified_base 1: mod_base = OTHER; note = 2'-O-methyladenosine-3'- phosphorothioate
  modified_base 2: mod_base = OTHER; note = 2'-O-methyladenosine-3'- phosphorothioate
  modified_base 3: mod_base = OTHER; note = 2'-O-methyladenosine-3'-phosphate
  modified_base 4: mod_base = OTHER; note = 2'-O-methylguanosine-3'-phosphate
  modified_base 5: mod_base = OTHER; note = 2'-O-methyluridine-3'-phosphate
  modified_base 6: mod_base = OTHER; note = 2'-O-methylcytidine-3'-phosphate
  modified_base 7: mod_base = OTHER; note = 2'-fluoroadenosine-3'-phosphate
  modified_base 8: mod_base = OTHER; note = 2'-O-methyluridine-3'-phosphate
  modified_base 9: mod_base = OTHER; note = 2'-fluorocytidine-3'-phosphate
  modified_base 10: mod_base = OTHER; note = 2'-fluoroguanosine-3'-phosphate
  modified_base 11: mod_base = OTHER; note = 2'-fluoroadenosine-3'-phosphate
  modified_base 12: mod_base = OTHER; note = 2'-O-methylcytidine-3'-phosphate
  modified_base 13: mod_base = OTHER; note = 2'-O-methyladenosine-3'-phosphate
  modified_base 14: mod_base = OTHER; note = 2'-O-methyladenosine-3'-phosphate
  modified_base 15: mod_base = OTHER; note = 2'-O-methylguanosine-3'-phosphate
  modified_base 16: mod_base = OTHER; note = 2'-O-methyladenosine-3'-phosphate
  modified_base 17: mod_base = OTHER; note = 2'-O-methylcytidine-3'-phosphate
  modified_base 18: mod_base = OTHER; note = 2'-O-methyladenosine-3'-phosphate
  modified_base 19: mod_base = OTHER; note = 2'-O-methyluridine-3'-phosphate
  modified_base 20: mod_base = OTHER; note = 2'-O-methyluridine-3'-phosphate
  modified_base 21: mod_base = OTHER; note 2'-O-methyladenosine-3'-phosphate-N-[tris(GalNAc-alkyl)-ami dodecanoyl)]-4-hydroxyprolinol (Hyp-(GalNAc-alkyl)3)
aaagtcatcgacaagacatta

SEQ ID NO: 268 - RNA, 21 nt, synthetic construct
  source 1..21: mol_type = other RNA
  modified_base 1: mod_base = OTHER; note = 2'-O-methyladenosine-3'- phosphorothioate
  modified_base 2: mod_base = OTHER; note = 2'-O-methyluridine-3'-phosphorothioate
  modified_base 3: mod_base = OTHER; note = 2'-O-methyluridine-3'-phosphate
  modified_base 4: mod_base = OTHER; note = 2'-O-methyluridine-3'-phosphate
  modified_base 5: mod_base = OTHER; note = 2'-O-methyluridine-3'-phosphate
  modified_base 6: mod_base = OTHER; note = 2'-O-methylguanosine-3'-phosphate
  modified_base 7: mod_base = OTHER; note = 2'-fluoroadenosine-3'-phosphate
  modified_base 8: mod_base = OTHER; note = 2'-O-methylguanosine-3'-phosphate
  modified_base 9: mod_base = OTHER; note = 2'-fluoroadenosine-3'-phosphate
  modified_base 10: mod_base = OTHER; note = 2'-fluoroguanosine-3'-phosphate
  modified_base 11: mod_base = OTHER; note = 2'-fluoroguanosine-3'-phosphate
  modified_base 12: mod_base = OTHER; note = 2'-O-methyluridine-3'-phosphate
  modified_base 13: mod_base = OTHER; note = 2'-O-methylguanosine-3'-phosphate
  modified_base 14: mod_base = OTHER; note = 2'-O-methyladenosine-3'-phosphate
  modified_base 15: mod_base = OTHER; note = 2'-O-methyluridine-3'-phosphate
  modified_base 16: mod_base = OTHER; note = 2'-O-methylguanosine-3'-phosphate
  modified_base 17: mod_base = OTHER; note = 2'-O-methyladenosine-3'-phosphate
  modified_base 18: mod_base = OTHER; note = 2'-O-methyluridine-3'-phosphate
  modified_base 19: mod_base = OTHER; note = 2'-O-methylguanosine-3'-phosphate
  modified_base 20: mod_base = OTHER; note = 2'-O-methylcytidine-3'-phosphate
  modified_base 21: mod_base = OTHER; note 2'-O-methyladenosine-3'-phosphate-N-[tris(GalNAc-alkyl)-ami dodecanoyl)]-4-hydroxyprolinol (Hyp-(GalNAc-alkyl)3)
attttgagaggtgatgatgca

SEQ ID NO: 269 - RNA, 21 nt, synthetic construct
  source 1..21: mol_type = other RNA
  modified_base 1: mod_base = OTHER; note = 2'-O-methyladenosine-3'- phosphorothioate
  modified_base 2: mod_base = OTHER; note = 2'-O-methyluridine-3'-phosphorothioate
  modified_base 3: mod_base = OTHER; note = 2'-O-methylcytidine-3'-phosphate
  modified_base 4: mod_base = OTHER; note = 2'-O-methylguanosine-3'-phosphate
  modified_base 5: mod_base = OTHER; note = 2'-O-methyladenosine-3'-phosphate
  modified_base 6: mod_base = OTHER; note = 2'-O-methylcytidine-3'-phosphate
  modified_base 7: mod_base = OTHER; note = 2'-fluoroadenosine-3'-phosphate
  modified_base 8: mod_base = OTHER; note = 2'-O-methyladenosine-3'-phosphate
  modified_base 9: mod_base = OTHER; note = 2'-fluoroguanosine-3'-phosphate
  modified_base 10: mod_base = OTHER; note = 2'-fluoroadenosine-3'-phosphate
  modified_base 11: mod_base = OTHER; note = 2'-fluorocytidine-3'-phosphate
  modified_base 12: mod_base = OTHER; note = 2'-O-methyladenosine-3'-phosphate
  modified_base 13: mod_base = OTHER; note = 2'-O-methyluridine-3'-phosphate
  modified_base 14: mod_base = OTHER; note = 2'-O-methyluridine-3'-phosphate
  modified_base 15: mod_base = OTHER; note = 2'-O-methylguanosine-3'-phosphate
  modified_base 16: mod_base = OTHER; note = 2'-O-methylguanosine-3'-phosphate
  modified_base 17: mod_base = OTHER; note = 2'-O-methyluridine-3'-phosphate
  modified_base 18: mod_base = OTHER; note = 2'-O-methylguanosine-3'-phosphate
  modified_base 19: mod_base = OTHER; note = 2'-O-methyladenosine-3'-phosphate
  modified_base 20: mod_base = OTHER; note = 2'-O-methylguanosine-3'-phosphate
  modified_base 21: mod_base = OTHER; note 2'-O-methyladenosine-3'-phosphate-N-[tris(GalNAc-alkyl)-ami dodecanoyl)]-4-hydroxyprolinol (Hyp-(GalNAc-alkyl)3)
atcgacaagacattggtgaga

SEQ ID NO: 270 - RNA, 21 nt, synthetic construct
  source 1..21: mol_type = other RNA
  modified_base 1: mod_base = OTHER; note = 2'-O-methylguanosine-3'- phosphorothioate
  modified_base 2: mod_base = OTHER; note = 2'-O-methylguanosine-3'- phosphorothioate
  modified_base 3: mod_base = OTHER; note = 2'-O-methyluridine-3'-phosphate
  modified_base 4: mod_base = OTHER; note = 2'-O-methylguanosine-3'-phosphate
  modified_base 5: mod_base = OTHER; note = 2'-O-methylcytidine-3'-phosphate
  modified_base 6: mod_base = OTHER; note = 2'-O-methylcytidine-3'-phosphate
  modified_base 7: mod_base = OTHER; note = 2'-fluoroadenosine-3'-phosphate
  modified_base 8: mod_base = OTHER; note = 2'-O-methylguanosine-3'-phosphate
  modified_base 9: mod_base = OTHER; note = 2'-fluoroadenosine-3'-phosphate
  modified_base 10: mod_base = OTHER; note = 2'-fluoroadenosine-3'-phosphate
  modified_base 11: mod_base = OTHER; note = 2'-fluorouridine-3'-phosphate
  modified_base 12: mod_base = OTHER; note = 2'-O-methylguanosine-3'-phosphate
  modified_base 13: mod_base = OTHER; note = 2'-O-methyluridine-3'-phosphate
  modified_base 14: mod_base = OTHER; note = 2'-O-methylguanosine-3'-phosphate
  modified_base 15: mod_base = OTHER; note = 2'-O-methyladenosine-3'-phosphate
  modified_base 16: mod_base = OTHER; note = 2'-O-methyladenosine-3'-phosphate
  modified_base 17: mod_base = OTHER; note = 2'-O-methyladenosine-3'-phosphate
  modified_base 18: mod_base = OTHER; note = 2'-O-methylguanosine-3'-phosphate
  modified_base 19: mod_base = OTHER; note = 2'-O-methyluridine-3'-phosphate
  modified_base 20: mod_base = OTHER; note = 2'-O-methylcytidine-3'-phosphate
  modified_base 21: mod_base = OTHER; note 2'-O-methyladenosine-3'-phosphate-N-[tris(GalNAc-alkyl)-ami dodecanoyl)]-4-hydroxyprolinol (Hyp-(GalNAc-alkyl)3)
ggtgccagaatgtgaaagtca

SEQ ID NO: 271 - RNA, 21 nt, synthetic construct
  source 1..21: mol_type = other RNA
  modified_base 1: mod_base = OTHER; note = 2'-O-methylguanosine-3'- phosphorothioate
  modified_base 2: mod_base = OTHER; note = 2'-O-methyladenosine-3'- phosphorothioate
  modified_base 3: mod_base = OTHER; note = 2'-O-methylcytidine-3'-phosphate
  modified_base 4: mod_base = OTHER; note = 2'-O-methyladenosine-3'-phosphate
  modified_base 5: mod_base = OTHER; note = 2'-O-methylguanosine-3'-phosphate
  modified_base 6: mod_base = OTHER; note = 2'-O-methyluridine-3'-phosphate
  modified_base 7: mod_base = OTHER; note = 2'-fluoroguanosine-3'-phosphate
  modified_base 8: mod_base = OTHER; note = 2'-O-methylcytidine-3'-phosphate
  modified_base 9: mod_base = OTHER; note = 2'-fluoroadenosine-3'-phosphate
  modified_base 10: mod_base = OTHER; note = 2'-fluorocytidine-3'-phosphate
  modified_base 11: mod_base = OTHER; note = 2'-fluoroadenosine-3'-phosphate
  modified_base 12: mod_base = OTHER; note = 2'-O-methyladenosine-3'-phosphate
  modified_base 13: mod_base = OTHER; note = 2'-O-methyluridine-3'-phosphate
  modified_base 14: mod_base = OTHER; note = 2'-O-methyladenosine-3'-phosphate
  modified_base 15: mod_base = OTHER; note = 2'-O-methyluridine-3'-phosphate
  modified_base 16: mod_base = OTHER; note = 2'-O-methyluridine-3'-phosphate
  modified_base 17: mod_base = OTHER; note = 2'-O-methyluridine-3'-phosphate
  modified_base 18: mod_base = OTHER; note = 2'-O-methyluridine-3'-phosphate
  modified_base 19: mod_base = OTHER; note = 2'-O-methylcytidine-3'-phosphate
  modified_base 20: mod_base = OTHER; note = 2'-O-methylcytidine-3'-phosphate
  modified_base 21: mod_base = OTHER; note 2'-O-methyladenosine-3'-phosphate-N-[tris(GalNAc-alkyl)-ami dodecanoyl)]-4-hydroxyprolinol (Hyp-(GalNAc-alkyl)3)
gacagtgcacaatattttcca

SEQ ID NO: 272 - RNA, 21 nt, synthetic construct
  source 1..21: mol_type = other RNA
  modified_base 1: mod_base = OTHER; note = 2'-O-methyladenosine-3'- phosphorothioate
  modified_base 2: mod_base = OTHER; note = 2'-O-methylcytidine-3'- phosphorothioate
  modified_base 3: mod_base = OTHER; note = 2'-O-methyladenosine-3'-phosphate
  modified_base 4: mod_base = OTHER; note = 2'-O-methyladenosine-3'-phosphate
  modified_base 5: mod_base = OTHER; note = 2'-O-methyladenosine-3'-phosphate
  modified_base 6: mod_base = OTHER; note = 2'-O-methylguanosine-3'-phosphate
  modified_base 7: mod_base = OTHER; note = 2'-fluoroadenosine-3'-phosphate
  modified_base 8: mod_base = OTHER; note = 2'-O-methylguanosine-3'-phosphate
  modified_base 9: mod_base = OTHER; note = 2'-fluoroadenosine-3'-phosphate
  modified_base 10: mod_base = OTHER; note = 2'-fluorocytidine-3'-phosphate
  modified_base 11: mod_base = OTHER; note = 2'-fluoroadenosine-3'-phosphate
  modified_base 12: mod_base = OTHER; note = 2'-O-methylcytidine-3'-phosphate
  modified_base 13: mod_base = OTHER; note = 2'-O-methyluridine-3'-phosphate
  modified_base 14: mod_base = OTHER; note = 2'-O-methylguanosine-3'-phosphate
  modified_base 15: mod_base = OTHER; note = 2'-O-methyluridine-3'-phosphate
  modified_base 16: mod_base = OTHER; note = 2'-O-methylguanosine-3'-phosphate
  modified_base 17: mod_base = OTHER; note = 2'-O-methylcytidine-3'-phosphate
  modified_base 18: mod_base = OTHER; note = 2'-O-methyladenosine-3'-phosphate
  modified_base 19: mod_base = OTHER; note = 2'-O-methylguanosine-3'-phosphate
  modified_base 20: mod_base = OTHER; note = 2'-O-methyladenosine-3'-phosphate
  modified_base 21: mod_base = OTHER; note 2'-O-methyladenosine-3'-phosphate-N-[tris(GalNAc-alkyl)-ami dodecanoyl)]-4-hydroxyprolinol (Hyp-(GalNAc-alkyl)3)
acaaagagacactgtgcagaa

SEQ ID NO: 273 - RNA, 21 nt, synthetic construct
  source 1..21: mol_type = other RNA
  modified_base 1: mod_base = OTHER; note = 2'-O-methyluridine-3'-phosphorothioate
  modified_base 2: mod_base = OTHER; note = 2'-O-methyluridine-3'-phosphorothioate
  modified_base 3: mod_base = OTHER; note = 2'-O-methyluridine-3'-phosphate
  modified_base 4: mod_base = OTHER; note = 2'-O-methyluridine-3'-phosphate
  modified_base 5: mod_base = OTHER; note = 2'-O-methylcytidine-3'-phosphate
  modified_base 6: mod_base = OTHER; note = 2'-O-methyladenosine-3'-phosphate
  modified_base 7: mod_base = OTHER; note = 2'-fluoroadenosine-3'-phosphate
  modified_base 8: mod_base = OTHER; note = 2'-O-methyluridine-3'-phosphate
  modified_base 9: mod_base = OTHER; note = 2'-fluoroguanosine-3'-phosphate
  modified_base 10: mod_base = OTHER; note = 2'-fluoroguanosine-3'-phosphate
  modified_base 11: mod_base = OTHER; note = 2'-fluoroguanosine-3'-phosphate
  modified_base 12: mod_base = OTHER; note = 2'-O-methyluridine-3'-phosphate
  modified_base 13: mod_base = OTHER; note = 2'-O-methylguanosine-3'-phosphate
  modified_base 14: mod_base = OTHER; note = 2'-O-methyluridine-3'-phosphate
  modified_base 15: mod_base = OTHER; note = 2'-O-methylcytidine-3'-phosphate
  modified_base 16: mod_base = OTHER; note = 2'-O-methylcytidine-3'-phosphate
  modified_base 17: mod_base = OTHER; note = 2'-O-methyluridine-3'-phosphate
  modified_base 18: mod_base = OTHER; note = 2'-O-methyladenosine-3'-phosphate
  modified_base 19: mod_base = OTHER; note = 2'-O-methylguanosine-3'-phosphate
  modified_base 20: mod_base = OTHER; note = 2'-O-methylguanosine-3'-phosphate
  modified_base 21: mod_base = OTHER; note 2'-O-methyladenosine-3'-phosphate-N-[tris(GalNAc-alkyl)-ami dodecanoyl)]-4-hydroxyprolinol (Hyp-(GalNAc-alkyl)3)
ttttcaatgggtgtcctagga

SEQ ID NO: 274 - RNA, 21 nt, synthetic construct
  source 1..21: mol_type = other RNA
  modified_base 1: mod_base = OTHER; note = 2'-O-methylcytidine-3'- phosphorothioate
  modified_base 2: mod_base = OTHER; note = 2'-O-methylcytidine-3'- phosphorothioate
  modified_base 3: mod_base = OTHER; note = 2'-O-methylguanosine-3'-phosphate
  modified_base 4: mod_base = OTHER; note = 2'-O-methyluridine-3'-phosphate
  modified_base 5: mod_base = OTHER; note = 2'-O-methyluridine-3'-phosphate
  modified_base 6: mod_base = OTHER; note = 2'-O-methyluridine-3'-phosphate
  modified_base 7: mod_base = OTHER; note = 2'-fluorocytidine-3'-phosphate
  modified_base 8: mod_base = OTHER; note = 2'-O-methylcytidine-3'-phosphate
  modified_base 9: mod_base = OTHER; note = 2'-fluoroadenosine-3'-phosphate
  modified_base 10: mod_base = OTHER; note = 2'-fluoroadenosine-3'-phosphate
  modified_base 11: mod_base = OTHER; note = 2'-fluoroguanosine-3'-phosphate
  modified_base 12: mod_base = OTHER; note = 2'-O-methyladenosine-3'-phosphate
  modified_base 13: mod_base = OTHER; note = 2'-O-methyluridine-3'-phosphate
  modified_base 14: mod_base = OTHER; note = 2'-O-methylcytidine-3'-phosphate
  modified_base 15: mod_base = OTHER; note = 2'-O-methyluridine-3'-phosphate
  modified_base 16: mod_base = OTHER; note = 2'-O-methylguanosine-3'-phosphate
  modified_base 17: mod_base = OTHER; note = 2'-O-methyladenosine-3'-phosphate
  modified_base 18: mod_base = OTHER; note = 2'-O-methylcytidine-3'-phosphate
  modified_base 19: mod_base = OTHER; note = 2'-O-methyladenosine-3'-phosphate
  modified_base 20: mod_base = OTHER; note = 2'-O-methylguanosine-3'-phosphate
  modified_base 21: mod_base = OTHER; note 2'-O-methyluridine-3'-phosphate-N-[tris(GalNAc-alkyl)-amido decanoyl)]-4-hydroxyprolinol (Hyp-(GalNAc-alkyl)3)
ccgtttccaagatctgacagt

SEQ ID NO: 275 - RNA, 21 nt, synthetic construct
  source 1..21: mol_type = other RNA
  modified_base 1: mod_base = OTHER; note = 2'-O-methyladenosine-3'- phosphorothioate
  modified_base 2: mod_base = OTHER; note = 2'-O-methylguanosine-3'- phosphorothioate
  modified_base 3: mod_base = OTHER; note = 2'-O-methylguanosine-3'-phosphate
  modified_base 4: mod_base = OTHER; note = 2'-O-methylguanosine-3'-phosphate
  modified_base 5: mod_base = OTHER; note = 2'-O-methylguanosine-3'-phosphate
  modified_base 6: mod_base = OTHER; note = 2'-O-methylguanosine-3'-phosphate
  modified_base 7: mod_base = OTHER; note = 2'-fluoroadenosine-3'-phosphate
  modified_base 8: mod_base = OTHER; note = 2'-O-methylguanosine-3'-phosphate
  modified_base 9: mod_base = OTHER; note = 2'-fluoroadenosine-3'-phosphate
  modified_base 10: mod_base = OTHER; note = 2'-fluoroadenosine-3'-phosphate
  modified_base 11: mod_base = OTHER; note = 2'-fluoroadenosine-3'-phosphate
  modified_base 12: mod_base = OTHER; note = 2'-O-methylguanosine-3'-phosphate
  modified_base 13: mod_base = OTHER; note = 2'-O-methylguanosine-3'-phosphate
  modified_base 14: mod_base = OTHER; note = 2'-O-methyluridine-3'-phosphate
  modified_base 15: mod_base = OTHER; note = 2'-O-methylguanosine-3'-phosphate
  modified_base 16: mod_base = OTHER; note = 2'-O-methyluridine-3'-phosphate
  modified_base 17: mod_base = OTHER; note = 2'-O-methyluridine-3'-phosphate
  modified_base 18: mod_base = OTHER; note = 2'-O-methylcytidine-3'-phosphate
  modified_base 19: mod_base = OTHER; note = 2'-O-methyladenosine-3'-phosphate
  modified_base 20: mod_base = OTHER; note = 2'-O-methyladenosine-3'-phosphate
  modified_base 21: mod_base = OTHER; note 2'-O-methyladenosine-3'-phosphate-N-[tris(GalNAc-alkyl)-ami dodecanoyl)]-4-hydroxyprolinol (Hyp-(GalNAc-alkyl)3)
agggggagaaaggtgttcaaa

SEQ ID NO: 276 - RNA, 21 nt, synthetic construct
  source 1..21: mol_type = other RNA
  modified_base 1: mod_base = OTHER; note = 2'-O-methyladenosine-3'- phosphorothioate
  modified_base 2: mod_base = OTHER; note = 2'-O-methylguanosine-3'- phosphorothioate
  modified_base 3: mod_base = OTHER; note = 2'-O-methyluridine-3'-phosphate
  modified_base 4: mod_base = OTHER; note = 2'-O-methylcytidine-3'-phosphate
  modified_base 5: mod_base = OTHER; note = 2'-O-methyladenosine-3'-phosphate
  modified_base 6: mod_base = OTHER; note = 2'-O-methyluridine-3'-phosphate
  modified_base 7: mod_base = OTHER; note = 2'-fluorocytidine-3'-phosphate
  modified_base 8: mod_base = OTHER; note = 2'-O-methylguanosine-3'-phosphate
  modified_base 9: mod_base = OTHER; note = 2'-fluoroadenosine-3'-phosphate
  modified_base 10: mod_base = OTHER; note = 2'-fluorocytidine-3'-phosphate
  modified_base 11: mod_base = OTHER; note = 2'-fluoroadenosine-3'-phosphate
  modified_base 12: mod_base = OTHER; note = 2'-O-methyladenosine-3'-phosphate
  modified_base 13: mod_base = OTHER; note = 2'-O-methylguanosine-3'-phosphate
  modified_base 14: mod_base = OTHER; note = 2'-O-methyladenosine-3'-phosphate
  modified_base 15: mod_base = OTHER; note = 2'-O-methylcytidine-3'-phosphate
  modified_base 16: mod_base = OTHER; note = 2'-O-methyladenosine-3'-phosphate
  modified_base 17: mod_base = OTHER; note = 2'-O-methyluridine-3'-phosphate
  modified_base 18: mod_base = OTHER; note = 2'-O-methyluridine-3'-phosphate
  modified_base 19: mod_base = OTHER; note = 2'-O-methylguanosine-3'-phosphate
  modified_base 20: mod_base = OTHER; note = 2'-O-methylguanosine-3'-phosphate
  modified_base 21: mod_base = OTHER; note 2'-O-methyluridine-3'-phosphate-N-[tris(GalNAc-alkyl)-amido decanoyl)]-4-hydroxyprolinol (Hyp-(GalNAc-alkyl)3)
agtcatcgacaagacattggt

SEQ ID NO: 277 - RNA, 23 nt, synthetic construct
  source 1..23: mol_type = other RNA
  modified_base 1: mod_base = OTHER; note = 2'-O-methyluridine-3'-phosphorothioate
  modified_base 2: mod_base = OTHER; note = 2'-fluorouridine -3'-phosphorothioate
  modified_base 3: mod_base = OTHER; note = 2'-O-methylguanosine-3'-phosphate
  modified_base 4: mod_base = OTHER; note = 2'-fluorouridine-3'-phosphate
  modified_base 5: mod_base = OTHER; note = 2'-O-methylcytidine-3'-phosphate
  modified_base 6: mod_base = OTHER; note = 2'-fluoroguanosine-3'-phosphate
  modified_base 7: mod_base = OTHER; note = 2'-O-methyladenosine-3'-phosphate
  modified_base 8: mod_base = OTHER; note = 2'-fluorouridine-3'-phosphate
  modified_base 9: mod_base = OTHER; note = 2'-O-methylguanosine-3'-phosphate
  modified_base 10: mod_base = OTHER; note = 2'-fluoroadenosine-3'-phosphate
  modified_base 11: mod_base = OTHER; note = 2'-O-methylcytidine-3'-phosphate
  modified_base 12: mod_base = OTHER; note = 2'-O-methyluridine-3'-phosphate
  modified_base 13: mod_base = OTHER; note = 2'-O-methyluridine-3'-phosphate
  modified_base 14: mod_base = OTHER; note = 2'-fluorouridine-3'-phosphate
  modified_base 15: mod_base = OTHER; note = 2'-O-methylcytidine-3'-phosphate
  modified_base 16: mod_base = OTHER; note = 2'-fluoroadenosine-3'-phosphate
  modified_base 17: mod_base = OTHER; note = 2'-O-methylcytidine-3'-phosphate
  modified_base 18: mod_base = OTHER; note = 2'-fluoroadenosine-3'-phosphate
  modified_base 19: mod_base = OTHER; note = 2'-O-methyluridine-3'-phosphate
  modified_base 20: mod_base = OTHER; note = 2'-fluorouridine-3'-phosphate
  modified_base 21: mod_base = OTHER; note = 2'-O-methylcytidine-3'- phosphorothioate
  modified_base 22: mod_base = OTHER; note = 2'-O-methyluridine-3'-phosphorothioate
  modified_base 23: mod_base = OTHER; note = 2'-O-methylguanosine-3'-phosphate
ttgtcgatgactttcacattctg

SEQ ID NO: 278 - RNA, 23 nt, synthetic construct
  source 1..23: mol_type = other RNA
  modified_base 1: mod_base = OTHER; note = Phosphate-2'-O-methyluridine-3'-phosphorothioate
  modified_base 2: mod_base = OTHER; note = 2'-fluorouridine -3'-phosphorothioate
  modified_base 3: mod_base = OTHER; note = 2'-O-methylguanosine-3'-phosphate
  modified_base 4: mod_base = OTHER; note = 2'-fluorouridine-3'-phosphate
  modified_base 5: mod_base = OTHER; note = 2'-O-methylcytidine-3'-phosphate
  modified_base 6: mod_base = OTHER; note = 2'-fluoroguanosine-3'-phosphate
  modified_base 7: mod_base = OTHER; note = 2'-O-methyladenosine-3'-phosphate
  modified_base 8: mod_base = OTHER; note = 2'-fluorouridine-3'-phosphate
  modified_base 9: mod_base = OTHER; note = 2'-O-methylguanosine-3'-phosphate
  modified_base 10: mod_base = OTHER; note = 2'-fluoroadenosine-3'-phosphate
  modified_base 11: mod_base = OTHER; note = 2'-O-methylcytidine-3'-phosphate
  modified_base 12: mod_base = OTHER; note = 2'-O-methyluridine-3'-phosphate
  modified_base 13: mod_base = OTHER; note = 2'-O-methyluridine-3'-phosphate
  modified_base 14: mod_base = OTHER; note = 2'-fluorouridine-3'-phosphate
  modified_base 15: mod_base = OTHER; note = 2'-O-methylcytidine-3'-phosphate
  modified_base 16: mod_base = OTHER; note = 2'-fluoroadenosine-3'-phosphate
  modified_base 17: mod_base = OTHER; note = 2'-O-methylcytidine-3'-phosphate
  modified_base 18: mod_base = OTHER; note = 2'-fluoroadenosine-3'-phosphate
  modified_base 19: mod_base = OTHER; note = 2'-O-methyluridine-3'-phosphate
  modified_base 20: mod_base = OTHER; note = 2'-fluorouridine-3'-phosphate
  modified_base 21: mod_base = OTHER; note = 2'-O-methylcytidine-3'- phosphorothioate
  modified_base 22: mod_base = OTHER; note = 2'-O-methyluridine-3'-phosphorothioate
  modified_base 23: mod_base = OTHER; note = 2'-O-methylguanosine-3'-phosphate
ttgtcgatgactttcacattctg

SEQ ID NO: 279 - RNA, 23 nt, synthetic construct
  source 1..23: mol_type = other RNA
  modified_base 1: mod_base = OTHER; note = 2'-O-methyluridine-3'-phosphorothioate
  modified_base 2: mod_base = OTHER; note = 2'-fluorouridine -3'-phosphorothioate
  modified_base 3: mod_base = OTHER; note = 2'-O-methylguanosine-3'-phosphate
  modified_base 4: mod_base = OTHER; note = 2'-fluorouridine-3'-phosphate
  modified_base 5: mod_base = OTHER; note = 2'-O-methylcytidine-3'-phosphate
  modified_base 6: mod_base = OTHER; note = 2'-fluoroguanosine-3'-phosphate
  modified_base 7: mod_base = OTHER; note = 2'-O-methyladenosine-3'-phosphate
  modified_base 8: mod_base = OTHER; note = 2'-fluorouridine-3'-phosphate
  modified_base 9: mod_base = OTHER; note = 2'-O-methylguanosine-3'-phosphate
  modified_base 10: mod_base = OTHER; note = 2'-fluoroadenosine-3'-phosphate
  modified_base 11: mod_base = OTHER; note = 2'-O-methylcytidine-3'-phosphate
  modified_base 12: mod_base = OTHER; note = 2'-O-methyluridine-3'-phosphate
  modified_base 13: mod_base = OTHER; note = 2'-O-methyluridine-3'-phosphate
  modified_base 14: mod_base = OTHER; note = 2'-fluorouridine-3'-phosphate
  modified_base 15: mod_base = OTHER; note = 2'-O-methylcytidine-3'-phosphate
  modified_base 16: mod_base = OTHER; note = 2'-fluoroadenosine-3'-phosphate
  modified_base 17: mod_base = OTHER; note = 2'-O-methylcytidine-3'-phosphate
  modified_base 18: mod_base = OTHER; note = 2'-fluoroadenosine-3'-phosphate
  modified_base 19: mod_base = OTHER; note = 2'-O-methyluridine-3'-phosphate
  modified_base 20: mod_base = OTHER; note = 2'-fluorouridine-3'-phosphate
  modified_base 21: mod_base = OTHER; note = 2'-O-methylcytidine-3'- phosphorothioate
  modified_base 22: mod_base = OTHER; note = 2'-O-methyluridine-3'-phosphorothioate
  modified_base 23: mod_base = OTHER; note = 2'-O-methylguanosine-3'-phosphate
ttgtcgatgactttcacattctg

SEQ ID NO: 280 - RNA, 23 nt, synthetic construct
  source 1..23: mol_type = other RNA
  modified_base 1: mod_base = OTHER; note = 2'-O-methyluridine-3'-phosphorothioate
  modified_base 2: mod_base = OTHER; note = 2'-fluorouridine -3'-phosphorothioate
  modified_base 3: mod_base = OTHER; note = 2'-O-methylguanosine-3'-phosphate
  modified_base 4: mod_base = OTHER; note = 2'-fluorouridine-3'-phosphate
  modified_base 5: mod_base = OTHER; note = 2'-O-methylcytidine-3'-phosphate
  modified_base 6: mod_base = OTHER; note = 2'-fluoroguanosine-3'-phosphate
  modified_base 7: mod_base = OTHER; note = 2'-O-methyladenosine-3'-phosphate
  modified_base 8: mod_base = OTHER; note = 2'-fluorouridine-3'-phosphate
  modified_base 9: mod_base = OTHER; note = 2'-O-methylguanosine-3'-phosphate
  modified_base 10: mod_base = OTHER; note = 2'-fluoroadenosine-3'-phosphate
  modified_base 11: mod_base = OTHER; note = 2'-O-methylcytidine-3'-phosphate
  modified_base 12: mod_base = OTHER; note = 2'-O-methyluridine-3'-phosphate
  modified_base 13: mod_base = OTHER; note = 2'-O-methyluridine-3'-phosphate
  modified_base 14: mod_base = OTHER; note = 2'-fluorouridine-3'-phosphate
  modified_base 15: mod_base = OTHER; note = 2'-O-methylcytidine-3'-phosphate
  modified_base 16: mod_base = OTHER; note = 2'-fluoroadenosine-3'-phosphate
  modified_base 17: mod_base = OTHER; note = 2'-O-methylcytidine-3'-phosphate
  modified_base 18: mod_base = OTHER; note = 2'-fluoroadenosine-3'-phosphate
  modified_base 19: mod_base = OTHER; note = 2'-O-methyluridine-3'-phosphate
  modified_base 20: mod_base = OTHER; note = 2'-fluorouridine-3'-phosphate
  modified_base 21: mod_base = OTHER; note = 2'-O-methylcytidine-3'- phosphorothioate
  modified_base 22: mod_base = OTHER; note = 2'-O-methyluridine-3'-phosphorothioate
  modified_base 23: mod_base = OTHER; note = 2'-O-methylguanosine-3'-phosphate
ttgtcgatgactttcacattctg

SEQ ID NO: 281 - RNA, 23 nt, synthetic construct
  source 1..23: mol_type = other RNA
  modified_base 1: mod_base = OTHER; note = 2'-O-methyluridine-3'-phosphorothioate
  modified_base 2: mod_base = OTHER; note = 2'-fluorouridine -3'-phosphorothioate
  modified_base 3: mod_base = OTHER; note = 2'-O-methylguanosine-3'-phosphate
  modified_base 4: mod_base = OTHER; note = 2'-fluorouridine-3'-phosphate
  modified_base 5: mod_base = OTHER; note = 2'-O-methylcytidine-3'-phosphate
  modified_base 6: mod_base = OTHER; note = 2'-fluoroguanosine-3'-phosphate
  modified_base 7: mod_base = OTHER; note = 2'-O-methyladenosine-3'-phosphate
  modified_base 8: mod_base = OTHER; note = 2'-fluorouridine-3'-phosphate
  modified_base 9: mod_base = OTHER; note = 2'-O-methylguanosine-3'-phosphate
  modified_base 10: mod_base = OTHER; note = 2'-fluoroadenosine-3'-phosphate
  modified_base 11: mod_base = OTHER; note = 2'-O-methylcytidine-3'-phosphate
  modified_base 12: mod_base = OTHER; note = 2'-O-methyluridine-3'-phosphate
  modified_base 13: mod_base = OTHER; note = 2'-O-methyluridine-3'-phosphate
  modified_base 14: mod_base = OTHER; note = 2'-fluorouridine-3'-phosphate
  modified_base 15: mod_base = OTHER; note = 2'-O-methylcytidine-3'-phosphate
  modified_base 16: mod_base = OTHER; note = 2'-fluoroadenosine-3'-phosphate
  modified_base 17: mod_base = OTHER; note = 2'-O-methylcytidine-3'-phosphate
  modified_base 18: mod_base = OTHER; note = 2'-fluoroadenosine-3'-phosphate
  modified_base 19: mod_base = OTHER; note = 2'-O-methyluridine-3'-phosphate
  modified_base 20: mod_base = OTHER; note = 2'-fluorouridine-3'-phosphate
  modified_base 21: mod_base = OTHER; note = 2'-O-methylcytidine-3'- phosphorothioate
  modified_base 22: mod_base = OTHER; note = 2'-O-methyluridine-3'-phosphorothioate
  modified_base 23: mod_base = OTHER; note = 2'-O-methylguanosine-3'-phosphate
ttgtcgatgactttcacattctg

SEQ ID NO: 282 - RNA, 23 nt, synthetic construct
  source 1..23: mol_type = other RNA
  modified_base 1: mod_base = OTHER; note = 2'-O-methyluridine-3'-phosphorothioate
  modified_base 2: mod_base = OTHER; note = 2'-fluorouridine -3'-phosphorothioate
  modified_base 3: mod_base = OTHER; note = 2'-O-methylguanosine-3'-phosphate
  modified_base 4: mod_base = OTHER; note = 2'-fluorouridine-3'-phosphate
  modified_base 5: mod_base = OTHER; note = 2'-O-methylcytidine-3'-phosphate
  modified_base 6: mod_base = OTHER; note = 2'-fluoroguanosine-3'-phosphate
  modified_base 7: mod_base = OTHER; note = 2'-O-methyladenosine-3'-phosphate
  modified_base 8: mod_base = OTHER; note = 2'-fluorouridine-3'-phosphate
  modified_base 9: mod_base = OTHER; note = 2'-O-methylguanosine-3'-phosphate
  modified_base 10: mod_base = OTHER; note = 2'-fluoroadenosine-3'-phosphate
  modified_base 11: mod_base = OTHER; note = 2'-O-methylcytidine-3'-phosphate
  modified_base 12: mod_base = OTHER; note = 2'-O-methyluridine-3'-phosphate
  modified_base 13: mod_base = OTHER; note = 2'-O-methyluridine-3'-phosphate
  modified_base 14: mod_base = OTHER; note = 2'-fluorouridine-3'-phosphate
  modified_base 15: mod_base = OTHER; note = 2'-O-methylcytidine-3'-phosphate
  modified_base 16: mod_base = OTHER; note = 2'-fluoroadenosine-3'-phosphate
  modified_base 17: mod_base = OTHER; note = 2'-O-methylcytidine-3'-phosphate
  modified_base 18: mod_base = OTHER; note = 2'-fluoroadenosine-3'-phosphate
  modified_base 19: mod_base = OTHER; note = 2'-O-methyluridine-3'-phosphate
  modified_base 20: mod_base = OTHER; note = 2'-fluorouridine-3'-phosphate
  modified_base 21: mod_base = OTHER; note = 2'-O-methylcytidine-3'- phosphorothioate
  modified_base 22: mod_base = OTHER; note = 2'-O-methyluridine-3'-phosphorothioate
  modified_base 23: mod_base = OTHER; note = 2'-O-methylguanosine-3'-phosphate
ttgtcgatgactttcacattctg

SEQ ID NO: 283 - RNA, 23 nt, synthetic construct
  source 1..23: mol_type = other RNA
  modified_base 1: mod_base = OTHER; note = 2'-O-methyluridine-3'-phosphorothioate
  modified_base 2: mod_base = OTHER; note = 2'-fluorouridine -3'-phosphorothioate
  modified_base 3: mod_base = OTHER; note = 2'-O-methylguanosine-3'-phosphate
  modified_base 4: mod_base = OTHER; note = 2'-fluorouridine-3'-phosphate
  modified_base 5: mod_base = OTHER; note = 2'-O-methylcytidine-3'-phosphate
  modified_base 6: mod_base = OTHER; note = 2'-fluoroguanosine-3'-phosphate
  modified_base 7: mod_base = OTHER; note = 2'-O-methyladenosine-3'-phosphate
  modified_base 8: mod_base = OTHER; note = 2'-fluorouridine-3'-phosphate
  modified_base 9: mod_base = OTHER; note = 2'-O-methylguanosine-3'-phosphate
  modified_base 10: mod_base = OTHER; note = 2'-fluoroadenosine-3'-phosphate
  modified_base 11: mod_base = OTHER; note = 2'-O-methylcytidine-3'-phosphate
  modified_base 12: mod_base = OTHER; note = 2'-O-methyluridine-3'-phosphate
  modified_base 13: mod_base = OTHER; note = 2'-O-methyluridine-3'-phosphate
  modified_base 14: mod_base = OTHER; note = 2'-fluorouridine-3'-phosphate
  modified_base 15: mod_base = OTHER; note = 2'-O-methylcytidine-3'-phosphate
  modified_base 16: mod_base = OTHER; note = 2'-fluoroadenosine-3'-phosphate
  modified_base 17: mod_base = OTHER; note = 2'-O-methylcytidine-3'-phosphate
  modified_base 18: mod_base = OTHER; note = 2'-fluoroadenosine-3'-phosphate
  modified_base 19: mod_base = OTHER; note = 2'-O-methyluridine-3'-phosphate
  modified_base 20: mod_base = OTHER; note = 2'-fluorouridine-3'-phosphate
  modified_base 21: mod_base = OTHER; note = 2'-O-methylcytidine-3'- phosphorothioate
  modified_base 22: mod_base = OTHER; note = 2'-O-methyluridine-3'-phosphorothioate
  modified_base 23: mod_base = OTHER; note = 2'-O-methylguanosine-3'-phosphate
ttgtcgatgactttcacattctg

SEQ ID NO: 284 - RNA, 23 nt, synthetic construct
  source 1..23: mol_type = other RNA
  modified_base 1: mod_base = OTHER; note = 2'-O-methyluridine-3'-phosphorothioate
  modified_base 2: mod_base = OTHER; note = 2'-fluorouridine -3'-phosphorothioate
  modified_base 3: mod_base = OTHER; note = 2'-O-methylguanosine-3'-phosphate
  modified_base 4: mod_base = OTHER; note = 2'-fluorouridine-3'-phosphate
  modified_base 5: mod_base = OTHER; note = 2'-O-methylcytidine-3'-phosphate
  modified_base 6: mod_base = OTHER; note = 2'-fluoroguanosine-3'-phosphate
  modified_base 7: mod_base = OTHER; note = 2'-O-methyladenosine-3'-phosphate
  modified_base 8: mod_base = OTHER; note = 2'-fluorouridine-3'-phosphate
  modified_base 9: mod_base = OTHER; note = 2'-O-methylguanosine-3'-phosphate
  modified_base 10: mod_base = OTHER; note = 2'-fluoroadenosine-3'-phosphate
  modified_base 11: mod_base = OTHER; note = 2'-O-methylcytidine-3'-phosphate
  modified_base 12: mod_base = OTHER; note = 2'-O-methyluridine-3'-phosphate
  modified_base 13: mod_base = OTHER; note = 2'-O-methyluridine-3'-phosphate
  modified_base 14: mod_base = OTHER; note = 2'-fluorouridine-3'-phosphate
  modified_base 15: mod_base = OTHER; note = 2'-O-methylcytidine-3'-phosphate
  modified_base 16: mod_base = OTHER; note = 2'-fluoroadenosine-3'-phosphate
  modified_base 17: mod_base = OTHER; note = 2'-O-methylcytidine-3'-phosphate
  modified_base 18: mod_base = OTHER; note = 2'-fluoroadenosine-3'-phosphate
  modified_base 19: mod_base = OTHER; note = 2'-O-methyluridine-3'-phosphate
  modified_base 20: mod_base = OTHER; note = 2'-fluorouridine-3'-phosphate
  modified_base 21: mod_base = OTHER; note = 2'-O-methylcytidine-3'- phosphorothioate
  modified_base 22: mod_base = OTHER; note = 2'-O-methyluridine-3'-phosphorothioate
  modified_base 23: mod_base = OTHER; note = 2'-O-methylguanosine-3'-phosphate
ttgtcgatgactttcacattctg

SEQ ID NO: 285 - RNA, 21 nt, synthetic construct
  source 1..21: mol_type = other RNA
  modified_base 1: mod_base = OTHER; note = 2'-O-methyluridine-3'-phosphorothioate
  modified_base 2: mod_base = OTHER; note = 2'-fluorouridine -3'-phosphorothioate
  modified_base 3: mod_base = OTHER; note = 2'-O-methylguanosine-3'-phosphate
  modified_base 4: mod_base = OTHER; note = 2'-fluorouridine-3'-phosphate
  modified_base 5: mod_base = OTHER; note = 2'-O-methylcytidine-3'-phosphate
  modified_base 6: mod_base = OTHER; note = 2'-fluoroguanosine-3'-phosphate
  modified_base 7: mod_base = OTHER; note = 2'-O-methyladenosine-3'-phosphate
  modified_base 8: mod_base = OTHER; note = 2'-fluorouridine-3'-phosphate
  modified_base 9: mod_base = OTHER; note = 2'-O-methylguanosine-3'-phosphate
  modified_base 10: mod_base = OTHER; note = 2'-fluoroadenosine-3'-phosphate
  modified_base 11: mod_base = OTHER; note = 2'-O-methylcytidine-3'-phosphate
  modified_base 12: mod_base = OTHER; note = 2'-O-methyluridine-3'-phosphate
  modified_base 13: mod_base = OTHER; note = 2'-O-methyluridine-3'-phosphate
  modified_base 14: mod_base = OTHER; note = 2'-fluorouridine-3'-phosphate
  modified_base 15: mod_base = OTHER; note = 2'-O-methylcytidine-3'-phosphate
  modified_base 16: mod_base = OTHER; note = 2'-fluoroadenosine-3'-phosphate
  modified_base 17: mod_base = OTHER; note = 2'-O-methylcytidine-3'-phosphate
  modified_base 18: mod_base = OTHER; note = 2'-fluoroadenosine-3'-phosphate
  modified_base 19: mod_base = OTHER; note = 2'-O-methyluridine-3'-phosphorothioate
  modified_base 20: mod_base = OTHER; note = 2'-O-methyluridine-3'-phosphorothioate
  modified_base 21: mod_base = OTHER; note = 2'-O-methylcytidine-3'-phosphate
ttgtcgatgactttcacattc

SEQ ID NO: 286 - RNA, 21 nt, synthetic construct
  source 1..21: mol_type = other RNA
  modified_base 1: mod_base = OTHER; note = 2'-O-methyluridine-3'-phosphorothioate
  modified_base 2: mod_base = OTHER; note = 2'-fluorouridine -3'-phosphorothioate
  modified_base 3: mod_base = OTHER; note = 2'-O-methylguanosine-3'-phosphate
  modified_base 4: mod_base = OTHER; note = 2'-O-methyluridine-3'-phosphate
  modified_base 5: mod_base = OTHER; note = 2'-O-methylcytidine-3'-phosphate
  modified_base 6: mod_base = OTHER; note = 2'-fluoroguanosine-3'-phosphate
  modified_base 7: mod_base = OTHER; note = 2'-O-methyladenosine-3'-phosphate
  modified_base 8: mod_base = OTHER; note = 2'-O-methyluridine-3'-phosphate
  modified_base 9: mod_base = OTHER; note = 2'-O-methylguanosine-3'-phosphate
  modified_base 10: mod_base = OTHER; note = 2'-O-methyladenosine-3'-phosphate
  modified_base 11: mod_base = OTHER; note = 2'-O-methylcytidine-3'-phosphate
  modified_base 12: mod_base = OTHER; note = 2'-O-methyluridine-3'-phosphate
  modified_base 13: mod_base = OTHER; note = 2'-O-methyluridine-3'-phosphate
  modified_base 14: mod_base = OTHER; note = 2'-fluorouridine-3'-phosphate
  modified_base 15: mod_base = OTHER; note = 2'-O-methylcytidine-3'-phosphate
  modified_base 16: mod_base = OTHER; note = 2'-fluoroadenosine-3'-phosphate
  modified_base 17: mod_base = OTHER; note = 2'-O-methylcytidine-3'-phosphate
  modified_base 18: mod_base = OTHER; note = 2'-O-methyladenosine-3'-phosphate
  modified_base 19: mod_base = OTHER; note = 2'-O-methyluridine-3'-phosphorothioate
  modified_base 20: mod_base = OTHER; note = 2'-O-methyluridine-3'-phosphorothioate
  modified_base 21: mod_base = OTHER; note = 2'-O-methylcytidine-3'-phosphate
ttgtcgatgactttcacattc

SEQ ID NO: 287 - RNA, 23 nt, synthetic construct
  source 1..23: mol_type = other RNA
  modified_base 1: mod_base = OTHER; note = 2'-O-methyluridine-3'-phosphorothioate
  modified_base 2: mod_base = OTHER; note = 2'-fluorouridine -3'-phosphorothioate
  modified_base 3: mod_base = OTHER; note = 2'-O-methylguanosine-3'-phosphate
  modified_base 4: mod_base = OTHER; note = 2'-O-methyluridine-3'-phosphate
  modified_base 5: mod_base = OTHER; note = 2'-O-methylcytidine-3'-phosphate
  modified_base 6: mod_base = OTHER; note = 2'-fluoroguanosine-3'-phosphate
  modified_base 7: mod_base = OTHER; note = 2'-O-methyladenosine-3'-phosphate
  modified_base 8: mod_base = OTHER; note = 2'-fluorouridine-3'-phosphate
  modified_base 9: mod_base = OTHER; note = 2'-O-methylguanosine-3'-phosphate
  modified_base 10: mod_base = OTHER; note = 2'-fluoroadenosine-3'-phosphate
  modified_base 11: mod_base = OTHER; note = 2'-O-methylcytidine-3'-phosphate
  modified_base 12: mod_base = OTHER; note = 2'-O-methyluridine-3'-phosphate
  modified_base 13: mod_base = OTHER; note = 2'-O-methyluridine-3'-phosphate
  modified_base 14: mod_base = OTHER; note = 2'-fluorouridine-3'-phosphate
  modified_base 15: mod_base = OTHER; note = 2'-O-methylcytidine-3'-phosphate
  modified_base 16: mod_base = OTHER; note = 2'-fluoroadenosine-3'-phosphate
  modified_base 17: mod_base = OTHER; note = 2'-O-methylcytidine-3'-phosphate
  modified_base 18: mod_base = OTHER; note = 2'-O-methyladenosine-3'-phosphate
  modified_base 19: mod_base = OTHER; note = 2'-O-methyluridine-3'-phosphate
  modified_base 20: mod_base = OTHER; note = 2'-O-methyluridine-3'-phosphate
  modified_base 21: mod_base = OTHER; note = 2'-O-methylcytidine-3'- phosphorothioate
  modified_base 22: mod_base = OTHER; note = 2'-O-methyluridine-3'-phosphorothioate
  modified_base 23: mod_base = OTHER; note = 2'-O-methylguanosine-3'-phosphate
ttgtcgatgactttcacattctg

SEQ ID NO: 288 - RNA, 23 nt, synthetic construct
  source 1..23: mol_type = other RNA
  modified_base 1: mod_base = OTHER; note = 2'-O-methyluridine-3'-phosphorothioate
  modified_base 2: mod_base = OTHER; note = 2'-fluorouridine -3'-phosphorothioate
  modified_base 3: mod_base = OTHER; note = 2'-O-methylguanosine-3'-phosphate
  modified_base 4: mod_base = OTHER; note = 2'-O-methyluridine-3'-phosphate
  modified_base 5: mod_base = OTHER; note = 2'-O-methylcytidine-3'-phosphate
  modified_base 6: mod_base = OTHER; note = 2'-fluoroguanosine-3'-phosphate
  modified_base 7: mod_base = OTHER; note = 2'-O-methyladenosine-3'-phosphate
  modified_base 8: mod_base = OTHER; note = 2'-fluorouridine-3'-phosphate
  modified_base 9: mod_base = OTHER; note = 2'-fluoroguanosine-3'-phosphate
  modified_base 10: mod_base = OTHER; note = 2'-O-methyladenosine-3'-phosphate
  modified_base 11: mod_base = OTHER; note = 2'-O-methylcytidine-3'-phosphate
  modified_base 12: mod_base = OTHER; note = 2'-O-methyluridine-3'-phosphate
  modified_base 13: mod_base = OTHER; note = 2'-O-methyluridine-3'-phosphate
  modified_base 14: mod_base = OTHER; note = 2'-fluorouridine-3'-phosphate
  modified_base 15: mod_base = OTHER; note = 2'-O-methylcytidine-3'-phosphate
  modified_base 16: mod_base = OTHER; note = 2'-fluoroadenosine-3'-phosphate
  modified_base 17: mod_base = OTHER; note = 2'-O-methylcytidine-3'-phosphate
  modified_base 18: mod_base = OTHER; note = 2'-O-methyladenosine-3'-phosphate
  modified_base 19: mod_base = OTHER; note = 2'-O-methyluridine-3'-phosphate
  modified_base 20: mod_base = OTHER; note = 2'-O-methyluridine-3'-phosphate
  modified_base 21: mod_base = OTHER; note = 2'-O-methylcytidine-3'- phosphorothioate
  modified_base 22: mod_base = OTHER; note = 2'-O-methyluridine-3'-phosphorothioate
  modified_base 23: mod_base = OTHER; note = 2'-O-methylguanosine-3'-phosphate
ttgtcgatgactttcacattctg

SEQ ID NO: 289 - RNA, 23 nt, synthetic construct
  source 1..23: mol_type = other RNA
  modified_base 1: mod_base = OTHER; note = 2'-O-methyluridine-3'-phosphorothioate
  modified_base 2: mod_base = OTHER; note = 2'-fluorouridine -3'-phosphorothioate
  modified_base 3: mod_base = OTHER; note = 2'-O-methylguanosine-3'-phosphate
  modified_base 4: mod_base = OTHER; note = 2'-O-methyluridine-3'-phosphate
  modified_base 5: mod_base = OTHER; note = 2'-O-methylcytidine-3'-phosphate
  modified_base 6: mod_base = OTHER; note = 2'-fluoroguanosine-3'-phosphate
  modified_base 7: mod_base = OTHER; note = 2'-O-methyladenosine-3'-phosphate
  modified_base 8: mod_base = OTHER; note = 2'-O-methyluridine-3'-phosphate
  modified_base 9: mod_base = OTHER; note = 2'-O-methylguanosine-3'-phosphate
  modified_base 10: mod_base = OTHER; note = 2'-O-methyladenosine-3'-phosphate
  modified_base 11: mod_base = OTHER; note = 2'-O-methylcytidine-3'-phosphate
  modified_base 12: mod_base = OTHER; note = 2'-O-methyluridine-3'-phosphate
  modified_base 13: mod_base = OTHER; note = 2'-O-methyluridine-3'-phosphate
  modified_base 14: mod_base = OTHER; note = 2'-fluorouridine-3'-phosphate
  modified_base 15: mod_base = OTHER; note = 2'-O-methylcytidine-3'-phosphate
  modified_base 16: mod_base = OTHER; note = 2'-fluoroadenosine-3'-phosphate
  modified_base 17: mod_base = OTHER; note = 2'-O-methylcytidine-3'-phosphate
  modified_base 18: mod_base = OTHER; note = 2'-O-methyladenosine-3'-phosphate
  modified_base 19: mod_base = OTHER; note = 2'-O-methyluridine-3'-phosphate
  modified_base 20: mod_base = OTHER; note = 2'-O-methyluridine-3'-phosphate
  modified_base 21: mod_base = OTHER; note = 2'-O-methylcytidine-3'- phosphorothioate
  modified_base 22: mod_base = OTHER; note = 2'-O-methyluridine-3'-phosphorothioate
  modified_base 23: mod_base = OTHER; note = 2'-O-methylguanosine-3'-phosphate
ttgtcgatgactttcacattctg

SEQ ID NO: 290 - RNA, 23 nt, synthetic construct
  source 1..23: mol_type = other RNA
  modified_base 1: mod_base = OTHER; note = 2'-O-methyluridine-3'-phosphorothioate
  modified_base 2: mod_base = OTHER; note = 2'-fluorouridine -3'-phosphorothioate
  modified_base 3: mod_base = OTHER; note = 2'-O-methylguanosine-3'-phosphate
  modified_base 4: mod_base = OTHER; note = 2'-O-methyluridine-3'-phosphate
  modified_base 5: mod_base = OTHER; note = 2'-O-methylcytidine-3'-phosphate
  modified_base 6: mod_base = OTHER; note = 2'-fluoroguanosine-3'-phosphate
  modified_base 7: mod_base = OTHER; note = 2'-O-methyladenosine-3'-phosphate
  modified_base 8: mod_base = OTHER; note = 2'-O-methyluridine-3'-phosphate
  modified_base 9: mod_base = OTHER; note = 2'-O-methylguanosine-3'-phosphate
  modified_base 10: mod_base = OTHER; note = 2'-O-methyladenosine-3'-phosphate
  modified_base 11: mod_base = OTHER; note = 2'-O-methylcytidine-3'-phosphate
  modified_base 12: mod_base = OTHER; note = 2'-O-methyluridine-3'-phosphate
  modified_base 13: mod_base = OTHER; note = 2'-O-methyluridine-3'-phosphate
  modified_base 14: mod_base = OTHER; note = 2'-fluorouridine-3'-phosphate
  modified_base 15: mod_base = OTHER; note = 2'-O-methylcytidine-3'-phosphate
  modified_base 16: mod_base = OTHER; note = 2'-O-methyladenosine-3'-phosphate
  modified_base 17: mod_base = OTHER; note = 2'-O-methylcytidine-3'-phosphate
  modified_base 18: mod_base = OTHER; note = 2'-O-methyladenosine-3'-phosphate
  modified_base 19: mod_base = OTHER; note = 2'-O-methyluridine-3'-phosphate
  modified_base 20: mod_base = OTHER; note = 2'-O-methyluridine-3'-phosphate
  modified_base 21: mod_base = OTHER; note = 2'-O-methylcytidine-3'- phosphorothioate
  modified_base 22: mod_base = OTHER; note = 2'-O-methyluridine-3'-phosphorothioate
  modified_base 23: mod_base = OTHER; note = 2'-O-methylguanosine-3'-phosphate
ttgtcgatgactttcacattctg

SEQ ID NO: 291 - RNA, 23 nt, synthetic construct
  source 1..23: mol_type = other RNA
  modified_base 1: mod_base = OTHER; note = 2'-O-methyluridine-3'-phosphorothioate
  modified_base 2: mod_base = OTHER; note = 2'-fluorouridine -3'-phosphorothioate
  modified_base 3: mod_base = OTHER; note = 2'-O-methylguanosine-3'-phosphate
  modified_base 4: mod_base = OTHER; note = 2'-O-methyluridine-3'-phosphate
  modified_base 5: mod_base = OTHER; note = 2'-O-methylcytidine-3'-phosphate
  modified_base 6: mod_base = OTHER; note = 2'-O-methylguanosine-3'-phosphate
  modified_base 7: mod_base = OTHER; note = 2'-O-methyladenosine-3'-phosphate
  modified_base 8: mod_base = OTHER; note = 2'-O-methyluridine-3'-phosphate
  modified_base 9: mod_base = OTHER; note = 2'-O-methylguanosine-3'-phosphate
  modified_base 10: mod_base = OTHER; note = 2'-O-methyladenosine-3'-phosphate
  modified_base 11: mod_base = OTHER; note = 2'-O-methylcytidine-3'-phosphate
  modified_base 12: mod_base = OTHER; note = 2'-O-methyluridine-3'-phosphate
  modified_base 13: mod_base = OTHER; note = 2'-O-methyluridine-3'-phosphate
  modified_base 14: mod_base = OTHER; note = 2'-fluorouridine-3'-phosphate
  modified_base 15: mod_base = OTHER; note = 2'-O-methylcytidine-3'-phosphate
  modified_base 16: mod_base = OTHER; note = 2'-O-methyladenosine-3'-phosphate
  modified_base 17: mod_base = OTHER; note = 2'-O-methylcytidine-3'-phosphate
  modified_base 18: mod_base = OTHER; note = 2'-O-methyladenosine-3'-phosphate
  modified_base 19: mod_base = OTHER; note = 2'-O-methyluridine-3'-phosphate
  modified_base 20: mod_base = OTHER; note = 2'-O-methyluridine-3'-phosphate
  modified_base 21: mod_base = OTHER; note = 2'-O-methylcytidine-3'- phosphorothioate
  modified_base 22: mod_base = OTHER; note = 2'-O-methyluridine-3'-phosphorothioate
  modified_base 23: mod_base = OTHER; note = 2'-O-methylguanosine-3'-phosphate
ttgtcgatgactttcacattctg

SEQ ID NO: 292 - RNA, 23 nt, synthetic construct
  source 1..23: mol_type = other RNA
  modified_base 1: mod_base = OTHER; note = 2'-O-methyluridine-3'-phosphorothioate
  modified_base 2: mod_base = OTHER; note = 2'-fluorouridine -3'-phosphorothioate
  modified_base 3: mod_base = OTHER; note = 2'-O-methylguanosine-3'-phosphate
  modified_base 4: mod_base = OTHER; note = 2'-O-methyluridine-3'-phosphate
  modified_base 5: mod_base = OTHER; note = 2'-O-methylcytidine-3'-phosphate
  modified_base 6: mod_base = OTHER; note = 2'-fluoroguanosine-3'-phosphate
  modified_base 7: mod_base = OTHER; note = 2'-O-methyladenosine-3'-phosphate
  modified_base 8: mod_base = OTHER; note = 2'-fluorouridine-3'-phosphate
  modified_base 9: mod_base = OTHER; note = 2'-O-methylguanosine-3'-phosphate
  modified_base 10: mod_base = OTHER; note = 2'-fluoroadenosine-3'-phosphate
  modified_base 11: mod_base = OTHER; note = 2'-O-methylcytidine-3'-phosphate
  modified_base 12: mod_base = OTHER; note = 2'-O-methyluridine-3'-phosphate
  modified_base 13: mod_base = OTHER; note = 2'-O-methyluridine-3'-phosphate
  modified_base 14: mod_base = OTHER; note = 2'-fluorouridine-3'-phosphate
  modified_base 15: mod_base = OTHER; note = 2'-O-methylcytidine-3'-phosphate
  modified_base 16: mod_base = OTHER; note = 2'-fluoroadenosine-3'-phosphate
  modified_base 17: mod_base = OTHER; note = 2'-O-methylcytidine-3'-phosphate
  modified_base 18: mod_base = OTHER; note = 2'-O-methyladenosine-3'-phosphate
  modified_base 19: mod_base = OTHER; note = 2'-O-methyluridine-3'-phosphate
  modified_base 20: mod_base = OTHER; note = 2'-O-methyluridine-3'-phosphate
  modified_base 21: mod_base = OTHER; note = 2'-O-methylcytidine-3'- phosphorothioate
  modified_base 22: mod_base = OTHER; note = 2'-O-methyluridine-3'-phosphorothioate
  modified_base 23: mod_base = OTHER; note = 2'-O-methylguanosine-3'-phosphate
ttgtcgatgactttcacattctg

SEQ ID NO: 293 - RNA, 23 nt, synthetic construct
  source 1..23: mol_type = other RNA
  modified_base 1: mod_base = OTHER; note = 2'-O-methyluridine-3'-phosphorothioate
  modified_base 2: mod_base = OTHER; note = 2'-fluorouridine -3'-phosphorothioate
  modified_base 3: mod_base = OTHER; note = 2'-O-methylguanosine-3'-phosphate
  modified_base 4: mod_base = OTHER; note = 2'-O-methyluridine-3'-phosphate
  modified_base 5: mod_base = OTHER; note = 2'-O-methylcytidine-3'-phosphate
  modified_base 6: mod_base = OTHER; note = 2'-fluoroguanosine-3'-phosphate
  modified_base 7: mod_base = OTHER; note = 2'-O-methyladenosine-3'-phosphate
  modified_base 8: mod_base = OTHER; note = 2'-fluorouridine-3'-phosphate
  modified_base 9: mod_base = OTHER; note = 2'-fluoroguanosine-3'-phosphate
  modified_base 10: mod_base = OTHER; note = 2'-O-methyladenosine-3'-phosphate
  modified_base 11: mod_base = OTHER; note = 2'-O-methylcytidine-3'-phosphate
  modified_base 12: mod_base = OTHER; note = 2'-O-methyluridine-3'-phosphate
  modified_base 13: mod_base = OTHER; note = 2'-O-methyluridine-3'-phosphate
  modified_base 14: mod_base = OTHER; note = 2'-fluorouridine-3'-phosphate
  modified_base 15: mod_base = OTHER; note = 2'-O-methylcytidine-3'-phosphate
  modified_base 16: mod_base = OTHER; note = 2'-fluoroadenosine-3'-phosphate
  modified_base 17: mod_base = OTHER; note = 2'-O-methylcytidine-3'-phosphate
  modified_base 18: mod_base = OTHER; note = 2'-O-methyladenosine-3'-phosphate
  modified_base 19: mod_base = OTHER; note = 2'-O-methyluridine-3'-phosphate
  modified_base 20: mod_base = OTHER; note = 2'-O-methyluridine-3'-phosphate
  modified_base 21: mod_base = OTHER; note = 2'-O-methylcytidine-3'- phosphorothioate
  modified_base 22: mod_base = OTHER; note = 2'-O-methyluridine-3'-phosphorothioate
  modified_base 23: mod_base = OTHER; note = 2'-O-methylguanosine-3'-phosphate
ttgtcgatgactttcacattctg

SEQ ID NO: 294 - RNA, 23 nt, synthetic construct
  source 1..23: mol_type = other RNA
  modified_base 1: mod_base = OTHER; note = 2'-O-methyluridine-3'-phosphorothioate
  modified_base 2: mod_base = OTHER; note = 2'-fluorouridine -3'-phosphorothioate
  modified_base 3: mod_base = OTHER; note = 2'-O-methylguanosine-3'-phosphate
  modified_base 4: mod_base = OTHER; note = 2'-O-methyluridine-3'-phosphate
  modified_base 5: mod_base = OTHER; note = 2'-O-methylcytidine-3'-phosphate
  modified_base 6: mod_base = OTHER; note = 2'-fluoroguanosine-3'-phosphate
  modified_base 7: mod_base = OTHER; note = 2'-O-methyladenosine-3'-phosphate
  modified_base 8: mod_base = OTHER; note = 2'-fluorouridine-3'-phosphate
  modified_base 9: mod_base = OTHER; note = 2'-O-methylguanosine-3'-phosphate
  modified_base 10: mod_base = OTHER; note = 2'-fluoroadenosine-3'-phosphate
  modified_base 11: mod_base = OTHER; note = 2'-O-methylcytidine-3'-phosphate
  modified_base 12: mod_base = OTHER; note = 2'-O-methyluridine-3'-phosphate
  modified_base 13: mod_base = OTHER; note = 2'-O-methyluridine-3'-phosphate
  modified_base 14: mod_base = OTHER; note = 2'-fluorouridine-3'-phosphate
  modified_base 15: mod_base = OTHER; note = 2'-O-methylcytidine-3'-phosphate
  modified_base 16: mod_base = OTHER; note = 2'-fluoroadenosine-3'-phosphate
  modified_base 17: mod_base = OTHER; note = 2'-O-methylcytidine-3'-phosphate
  modified_base 18: mod_base = OTHER; note = 2'-O-methyladenosine-3'-phosphate
  modified_base 19: mod_base = OTHER; note = 2'-O-methyluridine-3'-phosphate
  modified_base 20: mod_base = OTHER; note = 2'-O-methyluridine-3'-phosphate
  modified_base 21: mod_base = OTHER; note = 2'-O-methylcytidine-3'- phosphorothioate
  modified_base 22: mod_base = OTHER; note = 2'-O-methyluridine-3'-phosphorothioate
  modified_base 23: mod_base = OTHER; note = 2'-O-methylguanosine-3'-phosphate
ttgtcgatgactttcacattctg

SEQ ID NO: 295 - RNA, 23 nt, synthetic construct
  source 1..23: mol_type = other RNA
  modified_base 1: mod_base = OTHER; note = 2'-O-methyluridine-3'-phosphorothioate
  modified_base 2: mod_base = OTHER; note = 2'-fluorouridine -3'-phosphorothioate
  modified_base 3: mod_base = OTHER; note = 2'-O-methylguanosine-3'-phosphate
  modified_base 4: mod_base = OTHER; note = 2'-O-methyluridine-3'-phosphate
  modified_base 5: mod_base = OTHER; note = 2'-O-methylcytidine-3'-phosphate
  modified_base 6: mod_base = OTHER; note = 2'-fluoroguanosine-3'-phosphate
  modified_base 7: mod_base = OTHER; note = 2'-O-methyladenosine-3'-phosphate
  modified_base 8: mod_base = OTHER; note = 2'-fluorouridine-3'-phosphate
  modified_base 9: mod_base = OTHER; note = 2'-fluoroguanosine-3'-phosphate
  modified_base 10: mod_base = OTHER; note = 2'-O-methyladenosine-3'-phosphate
  modified_base 11: mod_base = OTHER; note = 2'-O-methylcytidine-3'-phosphate
  modified_base 12: mod_base = OTHER; note = 2'-O-methyluridine-3'-phosphate
  modified_base 13: mod_base = OTHER; note = 2'-O-methyluridine-3'-phosphate
  modified_base 14: mod_base = OTHER; note = 2'-fluorouridine-3'-phosphate
  modified_base 15: mod_base = OTHER; note = 2'-O-methylcytidine-3'-phosphate
  modified_base 16: mod_base = OTHER; note = 2'-fluoroadenosine-3'-phosphate
  modified_base 17: mod_base = OTHER; note = 2'-O-methylcytidine-3'-phosphate
  modified_base 18: mod_base = OTHER; note = 2'-O-methyladenosine-3'-phosphate
  modified_base 19: mod_base = OTHER; note = 2'-O-methyluridine-3'-phosphate
  modified_base 20: mod_base = OTHER; note = 2'-O-methyluridine-3'-phosphate
  modified_base 21: mod_base = OTHER; note = 2'-O-methylcytidine-3'- phosphorothioate
  modified_base 22: mod_base = OTHER; note = 2'-O-methyluridine-3'-phosphorothioate
  modified_base 23: mod_base = OTHER; note = 2'-O-methylguanosine-3'-phosphate
ttgtcgatgactttcacattctg

SEQ ID NO: 296 - RNA, 23 nt, synthetic construct
  source 1..23: mol_type = other RNA
  modified_base 1: mod_base = OTHER; note = 2'-O-methyluridine-3'-phosphorothioate
  modified_base 2: mod_base = OTHER; note = 2'-fluorouridine -3'-phosphorothioate
  modified_base 3: mod_base = OTHER; note = 2'-O-methylguanosine-3'-phosphate
  modified_base 4: mod_base = OTHER; note = 2'-O-methyluridine-3'-phosphate
  modified_base 5: mod_base = OTHER; note = 2'-O-methylcytidine-3'-phosphate
  modified_base 6: mod_base = OTHER; note = 2'-fluoroguanosine-3'-phosphate
  modified_base 7: mod_base = OTHER; note = 2'-O-methyladenosine-3'-phosphate
  modified_base 8: mod_base = OTHER; note = 2'-O-methyluridine-3'-phosphate
  modified_base 9: mod_base = OTHER; note = 2'-O-methylguanosine-3'-phosphate
  modified_base 10: mod_base = OTHER; note = 2'-O-methyladenosine-3'-phosphate
  modified_base 11: mod_base = OTHER; note = 2'-O-methylcytidine-3'-phosphate
  modified_base 12: mod_base = OTHER; note = 2'-O-methyluridine-3'-phosphate
  modified_base 13: mod_base = OTHER; note = 2'-O-methyluridine-3'-phosphate
  modified_base 14: mod_base = OTHER; note = 2'-fluorouridine-3'-phosphate
  modified_base 15: mod_base = OTHER; note = 2'-O-methylcytidine-3'-phosphate
  modified_base 16: mod_base = OTHER; note = 2'-fluoroadenosine-3'-phosphate
  modified_base 17: mod_base = OTHER; note = 2'-O-methylcytidine-3'-phosphate
  modified_base 18: mod_base = OTHER; note = 2'-O-methyladenosine-3'-phosphate
  modified_base 19: mod_base = OTHER; note = 2'-O-methyluridine-3'-phosphate
  modified_base 20: mod_base = OTHER; note = 2'-O-methyluridine-3'-phosphate
  modified_base 21: mod_base = OTHER; note = 2'-O-methylcytidine-3'- phosphorothioate
  modified_base 22: mod_base = OTHER; note = 2'-O-methyluridine-3'-phosphorothioate
  modified_base 23: mod_base = OTHER; note = 2'-O-methylguanosine-3'-phosphate
ttgtcgatgactttcacattctg

SEQ ID NO: 297 - RNA, 23 nt, synthetic construct
  source 1..23: mol_type = other RNA
  modified_base 1: mod_base = OTHER; note = 2'-O-methyluridine-3'-phosphorothioate
  modified_base 2: mod_base = OTHER; note = 2'-fluorouridine -3'-phosphorothioate
  modified_base 3: mod_base = OTHER; note = 2'-O-methylguanosine-3'-phosphate
  modified_base 4: mod_base = OTHER; note = 2'-fluorouridine-3'-phosphate
  modified_base 5: mod_base = OTHER; note = 2'-O-methylcytidine-3'-phosphate
  modified_base 6: mod_base = OTHER; note = 2'-fluoroguanosine-3'-phosphate
  modified_base 7: mod_base = OTHER; note = 2'-O-methyladenosine-3'-phosphate
  modified_base 8: mod_base = OTHER; note = 2'-fluorouridine-3'-phosphate
  modified_base 9: mod_base = OTHER; note = 2'-O-methylguanosine-3'-phosphate
  modified_base 10: mod_base = OTHER; note = 2'-fluoroadenosine-3'-phosphate
  modified_base 11: mod_base = OTHER; note = 2'-O-methylcytidine-3'-phosphate
  modified_base 12: mod_base = OTHER; note = 2'-O-methyluridine-3'-phosphate
  modified_base 13: mod_base = OTHER; note = 2'-O-methyluridine-3'-phosphate
  modified_base 14: mod_base = OTHER; note = 2'-fluorouridine-3'-phosphate
  modified_base 15: mod_base = OTHER; note = 2'-O-methylcytidine-3'-phosphate
  modified_base 16: mod_base = OTHER; note = 2'-fluoroadenosine-3'-phosphate
  modified_base 17: mod_base = OTHER; note = 2'-O-methylcytidine-3'-phosphate
  modified_base 18: mod_base = OTHER; note = 2'-fluoroadenosine-3'-phosphate
  modified_base 19: mod_base = OTHER; note = 2'-O-methyluridine-3'-phosphate
  modified_base 20: mod_base = OTHER; note = 2'-fluorouridine-3'-phosphate
  modified_base 21: mod_base = OTHER; note = 2'-O-methylcytidine-3'- phosphorothioate
  modified_base 22: mod_base = OTHER; note = 2'-O-methyluridine-3'-phosphorothioate
  modified_base 23: mod_base = OTHER; note = 2'-O-methylguanosine-3'-phosphate
ttgtcgatgactttcacattctg

SEQ ID NO: 298 - RNA, 23 nt, synthetic construct
  source 1..23: mol_type = other RNA
  modified_base 1: mod_base = OTHER; note = 2'-O-methyluridine-3'-phosphorothioate
  modified_base 2: mod_base = OTHER; note = 2'-fluorouridine -3'-phosphorothioate
  modified_base 3: mod_base = OTHER; note = 2'-O-methylguanosine-3'-phosphate
  modified_base 4: mod_base = OTHER; note = 2'-fluorouridine-3'-phosphate
  modified_base 5: mod_base = OTHER; note = 2'-O-methylcytidine-3'-phosphate
  modified_base 6: mod_base = OTHER; note = 2'-fluoroguanosine-3'-phosphate
  modified_base 7: mod_base = OTHER; note = 2'-O-methyladenosine-3'-phosphate
  modified_base 8: mod_base = OTHER; note = 2'-fluorouridine-3'-phosphate
  modified_base 9: mod_base = OTHER; note = 2'-O-methylguanosine-3'-phosphate
  modified_base 10: mod_base = OTHER; note = 2'-fluoroadenosine-3'-phosphate
  modified_base 11: mod_base = OTHER; note = 2'-O-methylcytidine-3'-phosphate
  modified_base 12: mod_base = OTHER; note = 2'-O-methyluridine-3'-phosphate
  modified_base 13: mod_base = OTHER; note = 2'-O-methyluridine-3'-phosphate
  modified_base 14: mod_base = OTHER; note = 2'-fluorouridine-3'-phosphate
  modified_base 15: mod_base = OTHER; note = 2'-O-methylcytidine-3'-phosphate
  modified_base 16: mod_base = OTHER; note = 2'-fluoroadenosine-3'-phosphate
  modified_base 17: mod_base = OTHER; note = 2'-O-methylcytidine-3'-phosphate
  modified_base 18: mod_base = OTHER; note = 2'-fluoroadenosine-3'-phosphate
  modified_base 19: mod_base = OTHER; note = 2'-O-methyluridine-3'-phosphate
  modified_base 20: mod_base = OTHER; note = 2'-fluorouridine-3'-phosphate
  modified_base 21: mod_base = OTHER; note = 2'-O-methylcytidine-3'- phosphorothioate
  modified_base 22: mod_base = OTHER; note = 2'-O-methyluridine-3'-phosphorothioate
  modified_base 23: mod_base = OTHER; note = 2'-O-methylguanosine-3'-phosphate
ttgtcgatgactttcacattctg

SEQ ID NO: 299 - RNA, 23 nt, synthetic construct
  source 1..23: mol_type = other RNA
  modified_base 1: mod_base = OTHER; note = 2'-O-methyluridine-3'-phosphorothioate
  modified_base 2: mod_base = OTHER; note = 2'-fluorouridine -3'-phosphorothioate
  modified_base 3: mod_base = OTHER; note = 2'-O-methylguanosine-3'-phosphate
  modified_base 4: mod_base = OTHER; note = 2'-fluorouridine-3'-phosphate
  modified_base 5: mod_base = OTHER; note = 2'-O-methylcytidine-3'-phosphate
  modified_base 6: mod_base = OTHER; note = 2'-fluoroguanosine-3'-phosphate
  modified_base 7: mod_base = OTHER; note = 2'-O-methyladenosine-3'-phosphate
  modified_base 8: mod_base = OTHER; note = 2'-fluorouridine-3'-phosphate
  modified_base 9: mod_base = OTHER; note = 2'-O-methylguanosine-3'-phosphate
  modified_base 10: mod_base = OTHER; note = 2'-fluoroadenosine-3'-phosphate
  modified_base 11: mod_base = OTHER; note = 2'-O-methylcytidine-3'-phosphate
  modified_base 12: mod_base = OTHER; note = 2'-O-methyluridine-3'-phosphate
  modified_base 13: mod_base = OTHER; note = 2'-O-methyluridine-3'-phosphate
  modified_base 14: mod_base = OTHER; note = 2'-fluorouridine-3'-phosphate
  modified_base 15: mod_base = OTHER; note = 2'-O-methylcytidine-3'-phosphate
  modified_base 16: mod_base = OTHER; note = 2'-fluoroadenosine-3'-phosphate
  modified_base 17: mod_base = OTHER; note = 2'-O-methylcytidine-3'-phosphate
  modified_base 18: mod_base = OTHER; note = 2'-fluoroadenosine-3'-phosphate
  modified_base 19: mod_base = OTHER; note = 2'-O-methyluridine-3'-phosphate
  modified_base 20: mod_base = OTHER; note = 2'-fluorouridine-3'-phosphate
  modified_base 21: mod_base = OTHER; note = 2'-O-methylcytidine-3'- phosphorothioate
  modified_base 22: mod_base = OTHER; note = 2'-O-methyluridine-3'-phosphorothioate
  modified_base 23: mod_base = OTHER; note = 2'-O-methylguanosine-3'-phosphate
ttgtcgatgactttcacattctg

SEQ ID NO: 300 - RNA, 23 nt, synthetic construct
  source 1..23: mol_type = other RNA
  modified_base 1: mod_base = OTHER; note = 2'-O-methyluridine-3'-phosphorothioate
  modified_base 2: mod_base = OTHER; note = 2'-fluorouridine -3'-phosphorothioate
  modified_base 3: mod_base = OTHER; note = 2'-O-methylguanosine-3'-phosphate
  modified_base 4: mod_base = OTHER; note = 2'-fluorouridine-3'-phosphate
  modified_base 5: mod_base = OTHER; note = 2'-O-methylcytidine-3'-phosphate
  modified_base 6: mod_base = OTHER; note = 2'-fluoroguanosine-3'-phosphate
  modified_base 7: mod_base = OTHER; note = 2'-O-methyladenosine-3'-phosphate
  modified_base 8: mod_base = OTHER; note = 2'-fluorouridine-3'-phosphate
  modified_base 9: mod_base = OTHER; note = 2'-O-methylguanosine-3'-phosphate
  modified_base 10: mod_base = OTHER; note = 2'-fluoroadenosine-3'-phosphate
  modified_base 11: mod_base = OTHER; note = 2'-O-methylcytidine-3'-phosphate
  modified_base 12: mod_base = OTHER; note = 2'-O-methyluridine-3'-phosphate
  modified_base 13: mod_base = OTHER; note = 2'-O-methyluridine-3'-phosphate
  modified_base 14: mod_base = OTHER; note = 2'-fluorouridine-3'-phosphate
  modified_base 15: mod_base = OTHER; note = 2'-O-methylcytidine-3'-phosphate
  modified_base 16: mod_base = OTHER; note = 2'-fluoroadenosine-3'-phosphate
  modified_base 17: mod_base = OTHER; note = 2'-O-methylcytidine-3'-phosphate
  modified_base 18: mod_base = OTHER; note = 2'-fluoroadenosine-3'-phosphate
  modified_base 19: mod_base = OTHER; note = 2'-O-methyluridine-3'-phosphate
  modified_base 20: mod_base = OTHER; note = 2'-fluorouridine-3'-phosphate
  modified_base 21: mod_base = OTHER; note = 2'-O-methylcytidine-3'- phosphorothioate
  modified_base 22: mod_base = OTHER; note = 2'-O-methyluridine-3'-phosphorothioate
  modified_base 23: mod_base = OTHER; note = 2'-O-methylguanosine-3'-phosphate
ttgtcgatgactttcacattctg

SEQ ID NO: 301 - RNA, 23 nt, synthetic construct
  source 1..23: mol_type = other RNA
  modified_base 1: mod_base = OTHER; note = 2'-O-methyluridine-3'-phosphorothioate
  modified_base 2: mod_base = OTHER; note = 2'-fluorouridine -3'-phosphorothioate
  modified_base 3: mod_base = OTHER; note = 2'-O-methylguanosine-3'-phosphate
  modified_base 4: mod_base = OTHER; note = 2'-fluorouridine-3'-phosphate
  modified_base 5: mod_base = OTHER; note = 2'-O-methylcytidine-3'-phosphate
  modified_base 6: mod_base = OTHER; note = 2'-fluoroguanosine-3'-phosphate
  modified_base 7: mod_base = OTHER; note = 2'-O-methyladenosine-3'-phosphate
  modified_base 8: mod_base = OTHER; note = 2'-fluorouridine-3'-phosphate
  modified_base 9: mod_base = OTHER; note = 2'-O-methylguanosine-3'-phosphate
  modified_base 10: mod_base = OTHER; note = 2'-fluoroadenosine-3'-phosphate
  modified_base 11: mod_base = OTHER; note = 2'-O-methylcytidine-3'-phosphate
  modified_base 12: mod_base = OTHER; note = 2'-O-methyluridine-3'-phosphate
  modified_base 13: mod_base = OTHER; note = 2'-O-methyluridine-3'-phosphate
  modified_base 14: mod_base = OTHER; note = 2'-fluorouridine-3'-phosphate
  modified_base 15: mod_base = OTHER; note = 2'-O-methylcytidine-3'-phosphate
  modified_base 16: mod_base = OTHER; note = 2'-fluoroadenosine-3'-phosphate
  modified_base 17: mod_base = OTHER; note = 2'-O-methylcytidine-3'-phosphate
  modified_base 18: mod_base = OTHER; note = 2'-fluoroadenosine-3'-phosphate
  modified_base 19: mod_base = OTHER; note = 2'-O-methyluridine-3'-phosphate
  modified_base 20: mod_base = OTHER; note = 2'-fluorouridine-3'-phosphate
  modified_base 21: mod_base = OTHER; note = 2'-O-methylcytidine-3'- phosphorothioate
  modified_base 22: mod_base = OTHER; note = 2'-O-methyluridine-3'-phosphorothioate
  modified_base 23: mod_base = OTHER; note = 2'-O-methylguanosine-3'-phosphate
ttgtcgatgactttcacattctg

SEQ ID NO: 302 - RNA, 23 nt, synthetic construct
  source 1..23: mol_type = other RNA
  modified_base 1: mod_base = OTHER; note = 2'-O-methyluridine-3'-phosphorothioate
  modified_base 2: mod_base = OTHER; note = 2'-fluorouridine -3'-phosphorothioate
  modified_base 3: mod_base = OTHER; note = 2'-O-methylguanosine-3'-phosphate
  modified_base 4: mod_base = OTHER; note = 2'-fluorouridine-3'-phosphate
  modified_base 5: mod_base = OTHER; note = 2'-O-methylcytidine-3'-phosphate
  modified_base 6: mod_base = OTHER; note = 2'-fluoroguanosine-3'-phosphate
  modified_base 7: mod_base = OTHER; note = 2'-O-methyladenosine-3'-phosphate
  modified_base 8: mod_base = OTHER; note = 2'-fluorouridine-3'-phosphate
  modified_base 9: mod_base = OTHER; note = 2'-O-methylguanosine-3'-phosphate
  modified_base 10: mod_base = OTHER; note = 2'-fluoroadenosine-3'-phosphate
  modified_base 11: mod_base = OTHER; note = 2'-O-methylcytidine-3'-phosphate
  modified_base 12: mod_base = OTHER; note = 2'-O-methyluridine-3'-phosphate
  modified_base 13: mod_base = OTHER; note = 2'-O-methyluridine-3'-phosphate
  modified_base 14: mod_base = OTHER; note = 2'-fluorouridine-3'-phosphate
  modified_base 15: mod_base = OTHER; note = 2'-O-methylcytidine-3'-phosphate
  modified_base 16: mod_base = OTHER; note = 2'-fluoroadenosine-3'-phosphate
  modified_base 17: mod_base = OTHER; note = 2'-O-methylcytidine-3'-phosphate
  modified_base 18: mod_base = OTHER; note = 2'-fluoroadenosine-3'-phosphate
  modified_base 19: mod_base = OTHER; note = 2'-O-methyluridine-3'-phosphate
  modified_base 20: mod_base = OTHER; note = 2'-fluorouridine-3'-phosphate
  modified_base 21: mod_base = OTHER; note = 2'-O-methylcytidine-3'- phosphorothioate
  modified_base 22: mod_base = OTHER; note = 2'-O-methyluridine-3'-phosphorothioate
  modified_base 23: mod_base = OTHER; note = 2'-O-methylguanosine-3'-phosphate
ttgtcgatgactttcacattctg

SEQ ID NO: 303 - RNA, 23 nt, synthetic construct
  source 1..23: mol_type = other RNA
  modified_base 1: mod_base = OTHER; note = 2'-O-methyluridine-3'-phosphorothioate
  modified_base 2: mod_base = OTHER; note = 2'-fluorouridine -3'-phosphorothioate
  modified_base 3: mod_base = OTHER; note = 2'-O-methylguanosine-3'-phosphate
  modified_base 4: mod_base = OTHER; note = 2'-fluorouridine-3'-phosphate
  modified_base 5: mod_base = OTHER; note = 2'-O-methylcytidine-3'-phosphate
  modified_base 6: mod_base = OTHER; note = 2'-fluoroguanosine-3'-phosphate
  modified_base 7: mod_base = OTHER; note = 2'-O-methyladenosine-3'-phosphate
  modified_base 8: mod_base = OTHER; note = 2'-fluorouridine-3'-phosphate
  modified_base 9: mod_base = OTHER; note = 2'-O-methylguanosine-3'-phosphate
  modified_base 10: mod_base = OTHER; note = 2'-fluoroadenosine-3'-phosphate
  modified_base 11: mod_base = OTHER; note = 2'-O-methylcytidine-3'-phosphate
  modified_base 12: mod_base = OTHER; note = 2'-O-methyluridine-3'-phosphate
  modified_base 13: mod_base = OTHER; note = 2'-O-methyluridine-3'-phosphate
  modified_base 14: mod_base = OTHER; note = 2'-fluorouridine-3'-phosphate
  modified_base 15: mod_base = OTHER; note = 2'-O-methylcytidine-3'-phosphate
  modified_base 16: mod_base = OTHER; note = 2'-fluoroadenosine-3'-phosphate
  modified_base 17: mod_base = OTHER; note = 2'-O-methylcytidine-3'-phosphate
  modified_base 18: mod_base = OTHER; note = 2'-fluoroadenosine-3'-phosphate
  modified_base 19: mod_base = OTHER; note = 2'-O-methyluridine-3'-phosphate
  modified_base 20: mod_base = OTHER; note = 2'-fluorouridine-3'-phosphate
  modified_base 21: mod_base = OTHER; note = 2'-O-methylcytidine-3'- phosphorothioate
  modified_base 22: mod_base = OTHER; note = 2'-O-methyluridine-3'-phosphorothioate
  modified_base 23: mod_base = OTHER; note = 2'-O-methylguanosine-3'-phosphate
ttgtcgatgactttcacattctg

SEQ ID NO: 304 - RNA, 23 nt, synthetic construct
  source 1..23: mol_type = other RNA
  modified_base 1: mod_base = OTHER; note = 2'-O-methyluridine-3'-phosphorothioate
  modified_base 2: mod_base = OTHER; note = 2'-fluorouridine -3'-phosphorothioate
  modified_base 3: mod_base = OTHER; note = 2'-O-methylguanosine-3'-phosphate
  modified_base 4: mod_base = OTHER; note = 2'-fluorouridine-3'-phosphate
  modified_base 5: mod_base = OTHER; note = 2'-O-methylcytidine-3'-phosphate
  modified_base 6: mod_base = OTHER; note = 2'-fluoroguanosine-3'-phosphate
  modified_base 7: mod_base = OTHER; note = 2'-O-methyladenosine-3'-phosphate
  modified_base 8: mod_base = OTHER; note = 2'-fluorouridine-3'-phosphate
  modified_base 9: mod_base = OTHER; note = 2'-O-methylguanosine-3'-phosphate
  modified_base 10: mod_base = OTHER; note = 2'-fluoroadenosine-3'-phosphate
  modified_base 11: mod_base = OTHER; note = 2'-O-methylcytidine-3'-phosphate
  modified_base 12: mod_base = OTHER; note = 2'-O-methyluridine-3'-phosphate
  modified_base 13: mod_base = OTHER; note = 2'-O-methyluridine-3'-phosphate
  modified_base 14: mod_base = OTHER; note = 2'-fluorouridine-3'-phosphate
  modified_base 15: mod_base = OTHER; note = 2'-O-methylcytidine-3'-phosphate
  modified_base 16: mod_base = OTHER; note = 2'-fluoroadenosine-3'-phosphate
  modified_base 17: mod_base = OTHER; note = 2'-O-methylcytidine-3'-phosphate
  modified_base 18: mod_base = OTHER; note = 2'-fluoroadenosine-3'-phosphate
  modified_base 19: mod_base = OTHER; note = 2'-O-methyluridine-3'-phosphate
  modified_base 20: mod_base = OTHER; note = 2'-fluorouridine-3'-phosphate
  modified_base 21: mod_base = OTHER; note = 2'-O-methylcytidine-3'- phosphorothioate
  modified_base 22: mod_base = OTHER; note = 2'-O-methyluridine-3'-phosphorothioate
  modified_base 23: mod_base = OTHER; note = 2'-O-methylguanosine-3'-phosphate
ttgtcgatgactttcacattctg

SEQ ID NO: 305 - RNA, 23 nt, synthetic construct
  source 1..23: mol_type = other RNA
  modified_base 1: mod_base = OTHER; note = 2'-O-methyluridine-3'-phosphorothioate
  modified_base 2: mod_base = OTHER; note = 2'-fluorouridine -3'-phosphorothioate
  modified_base 3: mod_base = OTHER; note = 2'-O-methylguanosine-3'-phosphate
  modified_base 4: mod_base = OTHER; note = 2'-fluorouridine-3'-phosphate
  modified_base 5: mod_base = OTHER; note = 2'-O-methylcytidine-3'-phosphate
  modified_base 6: mod_base = OTHER; note = 2'-fluoroguanosine-3'-phosphate
  modified_base 7: mod_base = OTHER; note = 2'-O-methyladenosine-3'-phosphate
  modified_base 8: mod_base = OTHER; note = 2'-fluorouridine-3'-phosphate
  modified_base 9: mod_base = OTHER; note = 2'-O-methylguanosine-3'-phosphate
  modified_base 10: mod_base = OTHER; note = 2'-fluoroadenosine-3'-phosphate
  modified_base 11: mod_base = OTHER; note = 2'-O-methylcytidine-3'-phosphate
  modified_base 12: mod_base = OTHER; note = 2'-O-methyluridine-3'-phosphate
  modified_base 13: mod_base = OTHER; note = 2'-O-methyluridine-3'-phosphate
  modified_base 14: mod_base = OTHER; note = 2'-fluorouridine-3'-phosphate
  modified_base 15: mod_base = OTHER; note = 2'-O-methylcytidine-3'-phosphate
  modified_base 16: mod_base = OTHER; note = 2'-fluoroadenosine-3'-phosphate
  modified_base 17: mod_base = OTHER; note = 2'-O-methylcytidine-3'-phosphate
  modified_base 18: mod_base = OTHER; note = 2'-fluoroadenosine-3'-phosphate
  modified_base 19: mod_base = OTHER; note = 2'-O-methyluridine-3'-phosphate
  modified_base 20: mod_base = OTHER; note = 2'-fluorouridine-3'-phosphate
  modified_base 21: mod_base = OTHER; note = 2'-O-methylcytidine-3'- phosphorothioate
  modified_base 22: mod_base = OTHER; note = 2'-O-methyluridine-3'-phosphorothioate
  modified_base 23: mod_base = OTHER; note = 2'-O-methylguanosine-3'-phosphate
ttgtcgatgactttcacattctg

SEQ ID NO: 306 - RNA, 23 nt, synthetic construct
  source 1..23: mol_type = other RNA
  modified_base 1: mod_base = OTHER; note = 2'-O-methyluridine-3'-phosphorothioate
  modified_base 2: mod_base = OTHER; note = 2'-fluorouridine -3'-phosphorothioate
  modified_base 3: mod_base = OTHER; note = 2'-O-methylguanosine-3'-phosphate
  modified_base 4: mod_base = OTHER; note = 2'-fluorouridine-3'-phosphate
  modified_base 5: mod_base = OTHER; note = 2'-O-methylcytidine-3'-phosphate
  modified_base 6: mod_base = OTHER; note = 2'-fluoroguanosine-3'-phosphate
  modified_base 7: mod_base = OTHER; note = 2'-O-methyladenosine-3'-phosphate
  modified_base 8: mod_base = OTHER; note = 2'-fluorouridine-3'-phosphate
  modified_base 9: mod_base = OTHER; note = 2'-O-methylguanosine-3'-phosphate
  modified_base 10: mod_base = OTHER; note = 2'-fluoroadenosine-3'-phosphate
  modified_base 11: mod_base = OTHER; note = 2'-O-methylcytidine-3'-phosphate
  modified_base 12: mod_base = OTHER; note = 2'-O-methyluridine-3'-phosphate
  modified_base 13: mod_base = OTHER; note = 2'-O-methyluridine-3'-phosphate
  modified_base 14: mod_base = OTHER; note = 2'-fluorouridine-3'-phosphate
  modified_base 15: mod_base = OTHER; note = 2'-O-methylcytidine-3'-phosphate
  modified_base 16: mod_base = OTHER; note = 2'-fluoroadenosine-3'-phosphate
  modified_base 17: mod_base = OTHER; note = 2'-O-methylcytidine-3'-phosphate
  modified_base 18: mod_base = OTHER; note = 2'-fluoroadenosine-3'-phosphate
  modified_base 19: mod_base = OTHER; note = 2'-O-methyluridine-3'-phosphate
  modified_base 20: mod_base = OTHER; note = 2'-fluorouridine-3'-phosphate
  modified_base 21: mod_base = OTHER; note = 2'-O-methylcytidine-3'- phosphorothioate
  modified_base 22: mod_base = OTHER; note = 2'-O-methyluridine-3'-phosphorothioate
  modified_base 23: mod_base = OTHER; note = 2'-O-methylguanosine-3'-phosphate
ttgtcgatgactttcacattctg

SEQ ID NO: 307 - RNA, 23 nt, synthetic construct
  source 1..23: mol_type = other RNA
  modified_base 1: mod_base = OTHER; note = 2'-O-methyluridine-3'-phosphorothioate
  modified_base 2: mod_base = OTHER; note = 2'-fluorouridine -3'-phosphorothioate
  modified_base 3: mod_base = OTHER; note = 2'-O-methylguanosine-3'-phosphate
  modified_base 4: mod_base = OTHER; note = 2'-fluorouridine-3'-phosphate
  modified_base 5: mod_base = OTHER; note = 2'-O-methylcytidine-3'-phosphate
  modified_base 6: mod_base = OTHER; note = 2'-fluoroguanosine-3'-phosphate
  modified_base 7: mod_base = OTHER; note = 2'-O-methyladenosine-3'-phosphate
  modified_base 8: mod_base = OTHER; note = 2'-fluorouridine-3'-phosphate
  modified_base 9: mod_base = OTHER; note = 2'-O-methylguanosine-3'-phosphate
  modified_base 10: mod_base = OTHER; note = 2'-fluoroadenosine-3'-phosphate
  modified_base 11: mod_base = OTHER; note = 2'-O-methylcytidine-3'-phosphate
  modified_base 12: mod_base = OTHER; note = 2'-O-methyluridine-3'-phosphate
  modified_base 13: mod_base = OTHER; note = 2'-O-methyluridine-3'-phosphate
  modified_base 14: mod_base = OTHER; note = 2'-fluorouridine-3'-phosphate
  modified_base 15: mod_base = OTHER; note = 2'-O-methylcytidine-3'-phosphate
  modified_base 16: mod_base = OTHER; note = 2'-fluoroadenosine-3'-phosphate
  modified_base 17: mod_base = OTHER; note = 2'-O-methylcytidine-3'-phosphate
  modified_base 18: mod_base = OTHER; note = 2'-fluoroadenosine-3'-phosphate
  modified_base 19: mod_base = OTHER; note = 2'-O-methyluridine-3'-phosphate
  modified_base 20: mod_base = OTHER; note = 2'-fluorouridine-3'-phosphate
  modified_base 21: mod_base = OTHER; note = 2'-O-methylcytidine-3'- phosphorothioate
  modified_base 22: mod_base = OTHER; note = 2'-O-methyluridine-3'-phosphorothioate
  modified_base 23: mod_base = OTHER; note = 2'-O-methylguanosine-3'-phosphate
ttgtcgatgactttcacattctg

SEQ ID NO: 308 - RNA, 23 nt, synthetic construct
  source 1..23: mol_type = other RNA
  modified_base 1: mod_base = OTHER; note = 2'-O-methyluridine-3'-phosphorothioate
  modified_base 2: mod_base = OTHER; note = 2'-fluorouridine -3'-phosphorothioate
  modified_base 3: mod_base = OTHER; note = 2'-O-methylguanosine-3'-phosphate
  modified_base 4: mod_base = OTHER; note = 2'-fluorouridine-3'-phosphate
  modified_base 5: mod_base = OTHER; note = 2'-O-methylcytidine-3'-phosphate
  modified_base 6: mod_base = OTHER; note = 2'-fluoroguanosine-3'-phosphate
  modified_base 7: mod_base = OTHER; note = 2'-O-methyladenosine-3'-phosphate
  modified_base 8: mod_base = OTHER; note = 2'-fluorouridine-3'-phosphate
  modified_base 9: mod_base = OTHER; note = 2'-O-methylguanosine-3'-phosphate
  modified_base 10: mod_base = OTHER; note = 2'-fluoroadenosine-3'-phosphate
  modified_base 11: mod_base = OTHER; note = 2'-O-methylcytidine-3'-phosphate
  modified_base 12: mod_base = OTHER; note = 2'-O-methyluridine-3'-phosphate
  modified_base 13: mod_base = OTHER; note = 2'-O-methyluridine-3'-phosphate
  modified_base 14: mod_base = OTHER; note = 2'-fluorouridine-3'-phosphate
  modified_base 15: mod_base = OTHER; note = 2'-O-methylcytidine-3'-phosphate
  modified_base 16: mod_base = OTHER; note = 2'-fluoroadenosine-3'-phosphate
  modified_base 17: mod_base = OTHER; note = 2'-O-methylcytidine-3'-phosphate
  modified_base 18: mod_base = OTHER; note = 2'-fluoroadenosine-3'-phosphate
  modified_base 19: mod_base = OTHER; note = 2'-O-methyluridine-3'-phosphate
  modified_base 20: mod_base = OTHER; note = 2'-fluorouridine-3'-phosphate
  modified_base 21: mod_base = OTHER; note = 2'-O-methylcytidine-3'- phosphorothioate
  modified_base 22: mod_base = OTHER; note = 2'-O-methyluridine-3'-phosphorothioate
  modified_base 23: mod_base = OTHER; note = 2'-O-methylguanosine-3'-phosphate
ttgtcgatgactttcacattctg

SEQ ID NO: 309 - DNA, 23 bp, synthetic construct
  source 1..23: mol_type = other DNA
  modified_base 1: mod_base = OTHER; note = 2'-O-methyluridine-3'-phosphorothioate
  modified_base 2: mod_base = OTHER; note = 2'-deoxythymidine-3'-phosphorothioate
  modified_base 3: mod_base = OTHER; note = 2'-O-methylguanosine-3'-phosphate
  modified_base 4: mod_base = OTHER; note = 2'-O-methyluridine-3'-phosphate
  modified_base 5: mod_base = OTHER; note = 2'-O-methylcytidine-3'-phosphate
  modified_base 6: mod_base = OTHER; note = 2'-O-methylguanosine-3'-phosphate
  modified_base 7: mod_base = OTHER; note = 2'-O-methyladenosine-3'-phosphate
  modified_base 8: mod_base = OTHER; note = 2'-O-methyluridine-3'-phosphate
  modified_base 9: mod_base = OTHER; note = 2'-O-methylguanosine-3'-phosphate
  modified_base 11: mod_base = OTHER; note = 2'-O-methylcytidine-3'-phosphate
  modified_base 12: mod_base = OTHER; note = 2'-O-methyluridine-3'-phosphate
  modified_base 13: mod_base = OTHER; note = 2'-O-methyluridine-3'-phosphate
  modified_base 15: mod_base = OTHER; note = 2'-O-methylcytidine-3'-phosphate
  modified_base 16: mod_base = OTHER; note = 2'-O-methyladenosine-3'-phosphate
  modified_base 17: mod_base = OTHER; note = 2'-O-methylcytidine-3'-phosphate
  modified_base 18: mod_base = OTHER; note = 2'-O-methyladenosine-3'-phosphate
  modified_base 19: mod_base = OTHER; note = 2'-O-methyluridine-3'-phosphate
  modified_base 20: mod_base = OTHER; note = 2'-O-methyluridine-3'-phosphate
  modified_base 21: mod_base = OTHER; note = 2'-O-methylcytidine-3'- phosphorothioate
  modified_base 22: mod_base = OTHER; note = 2'-O-methyluridine-3'-phosphorothioate
  modified_base 23: mod_base = OTHER; note = 2'-O-methylguanosine-3'-phosphate
  misc_feature 1: note = RNA
  misc_feature 2: note = DNA
  misc_feature 3..9: note = RNA
  misc_feature 10: note = DNA
  misc_feature 11..13: note = RNA
  misc_feature 14: note = DNA
  misc_feature 15..23: note = RNA
ttgtcgatgactttcacattctg

SEQ ID NO: 310 - DNA, 23 bp, synthetic construct
  source 1..23: mol_type = other DNA
  modified_base 1: mod_base = OTHER; note = 2'-O-methyluridine-3'-phosphorothioate
  modified_base 2: mod_base = OTHER; note = uridine -3'-phosphorothioate
  modified_base 3: mod_base = OTHER; note = 2'-O-methylguanosine-3'-phosphate
  modified_base 4: mod_base = OTHER; note = 2'-O-methyluridine-3'-phosphate
  modified_base 5: mod_base = OTHER; note = 2'-O-methylcytidine-3'-phosphate
  modified_base 6: mod_base = OTHER; note = 2'-O-methylguanosine-3'-phosphate
  modified_base 7: mod_base = OTHER; note = 2'-O-methyladenosine-3'-phosphate
  modified_base 8: mod_base = OTHER; note = 2'-O-methyluridine-3'-phosphate
  modified_base 9: mod_base = OTHER; note = 2'-O-methylguanosine-3'-phosphate
  modified_base 10: mod_base = OTHER; note = 2'-O-methyladenosine-3'-phosphate
  modified_base 11: mod_base = OTHER; note = 2'-O-methylcytidine-3'-phosphate
  modified_base 12: mod_base = OTHER; note = 2'-O-methyluridine-3'-phosphate
  modified_base 13: mod_base = OTHER; note = 2'-O-methyluridine-3'-phosphate
  modified_base 15: mod_base = OTHER; note = 2'-O-methylcytidine-3'-phosphate
  modified_base 16: mod_base = OTHER; note = 2'-O-methyladenosine-3'-phosphate
  modified_base 17: mod_base = OTHER; note = 2'-O-methylcytidine-3'-phosphate
  modified_base 18: mod_base = OTHER; note = 2'-O-methyladenosine-3'-phosphate
  modified_base 19: mod_base = OTHER; note = 2'-O-methyluridine-3'-phosphate
  modified_base 20: mod_base = OTHER; note = 2'-O-methyluridine-3'-phosphate
  modified_base 21: mod_base = OTHER; note = 2'-O-methylcytidine-3'- phosphorothioate
  modified_base 22: mod_base = OTHER; note = 2'-O-methyluridine-3'-phosphorothioate
  modified_base 23: mod_base = OTHER; note = 2'-O-methylguanosine-3'-phosphate
  misc_feature 1..13: note = RNA
  misc_feature 14: note = DNA
  misc_feature 15..23: note = RNA
ttgtcgatgactttcacattctg

SEQ ID NO: 311 - DNA, 23 bp, synthetic construct
  source 1..23: mol_type = other DNA
  modified_base 1: mod_base = OTHER; note = 2'-O-methyluridine-3'-phosphorothioate
  modified_base 2: mod_base = OTHER; note = 2'-deoxythymidine-3'-phosphorothioate
  modified_base 3: mod_base = OTHER; note = 2'-O-methylguanosine-3'-phosphate
  modified_base 4: mod_base = OTHER; note = 2'-O-methyluridine-3'-phosphate
  modified_base 5: mod_base = OTHER; note = 2'-O-methylcytidine-3'-phosphate
  modified_base 7: mod_base = OTHER; note = 2'-O-methyladenosine-3'-phosphate
  modified_base 8: mod_base = OTHER; note = 2'-O-methyluridine-3'-phosphate
  modified_base 9: mod_base = OTHER; note = 2'-O-methylguanosine-3'-phosphate
  modified_base 10: mod_base = OTHER; note = 2'-O-methyladenosine-3'-phosphate
  modified_base 11: mod_base = OTHER; note = 2'-O-methylcytidine-3'-phosphate
  modified_base 12: mod_base = OTHER; note = 2'-O-methyluridine-3'-phosphate
  modified_base 13: mod_base = OTHER; note = 2'-O-methyluridine-3'-phosphate
  modified_base 15: mod_base = OTHER; note = 2'-O-methylcytidine-3'-phosphate
  modified_base 16: mod_base = OTHER; note = 2'-O-methyladenosine-3'-phosphate
  modified_base 17: mod_base = OTHER; note = 2'-O-methylcytidine-3'-phosphate
  modified_base 18: mod_base = OTHER; note = 2'-O-methyladenosine-3'-phosphate
  modified_base 19: mod_base = OTHER; note = 2'-O-methyluridine-3'-phosphate
  modified_base 20: mod_base = OTHER; note = 2'-O-methyluridine-3'-phosphate
  modified_base 21: mod_base = OTHER; note = 2'-O-methylcytidine-3'- phosphorothioate
  modified_base 22: mod_base = OTHER; note = 2'-O-methyluridine-3'-phosphorothioate
  modified_base 23: mod_base = OTHER; note = 2'-O-methylguanosine-3'-phosphate
  misc_feature 1: note = RNA
  misc_feature 2: note = DNA
  misc_feature 3..5: note = RNA
  misc_feature 6: note = DNA
  misc_feature 7..13: note = RNA
  misc_feature 14: note = DNA
  misc_feature 15..23: note = RNA
ttgtcgatgactttcacattctg

SEQ ID NO: 312 - DNA, 23 bp, synthetic construct
  source 1..23: mol_type = other DNA
  modified_base 1: mod_base = OTHER; note = 2'-O-methyluridine-3'-phosphorothioate
  modified_base 2: mod_base = OTHER; note = uridine -3'-phosphorothioate
  modified_base 3: mod_base = OTHER; note = 2'-O-methylguanosine-3'-phosphate
  modified_base 4: mod_base = OTHER; note = 2'-O-methyluridine-3'-phosphate
  modified_base 5: mod_base = OTHER; note = 2'-O-methylcytidine-3'-phosphate
  modified_base 7: mod_base = OTHER; note = 2'-O-methyladenosine-3'-phosphate
  modified_base 8: mod_base = OTHER; note = 2'-O-methyluridine-3'-phosphate
  modified_base 9: mod_base = OTHER; note = 2'-O-methylguanosine-3'-phosphate
  modified_base 10: mod_base = OTHER; note = 2'-O-methyladenosine-3'-phosphate
  modified_base 11: mod_base = OTHER; note = 2'-O-methylcytidine-3'-phosphate
  modified_base 12: mod_base = OTHER; note = 2'-O-methyluridine-3'-phosphate
  modified_base 13: mod_base = OTHER; note = 2'-O-methyluridine-3'-phosphate
  modified_base 15: mod_base = OTHER; note = 2'-O-methylcytidine-3'-phosphate
  modified_base 16: mod_base = OTHER; note = 2'-O-methyladenosine-3'-phosphate
  modified_base 17: mod_base = OTHER; note = 2'-O-methylcytidine-3'-phosphate
  modified_base 18: mod_base = OTHER; note = 2'-O-methyladenosine-3'-phosphate
  modified_base 19: mod_base = OTHER; note = 2'-O-methyluridine-3'-phosphate
  modified_base 20: mod_base = OTHER; note = 2'-O-methyluridine-3'-phosphate
  modified_base 21: mod_base = OTHER; note = 2'-O-methylcytidine-3'- phosphorothioate
  modified_base 22: mod_base = OTHER; note = 2'-O-methyluridine-3'-phosphorothioate
  modified_base 23: mod_base = OTHER; note = 2'-O-methylguanosine-3'-phosphate
  misc_feature 1..5: note = RNA
  misc_feature 6: note = DNA
  misc_feature 7..13: note = RNA
  misc_feature 14: note = DNA
  misc_feature 15..23: note = RNA
ttgtcgatgactttcacattctg

SEQ ID NO: 313 - DNA, 23 bp, synthetic construct
  source 1..23: mol_type = other DNA
  modified_base 1: mod_base = OTHER; note = 2'-O-methyluridine-3'-phosphorothioate
  modified_base 2: mod_base = OTHER; note = 2'-deoxythymidine-3'-phosphorothioate
  modified_base 3: mod_base = OTHER; note = 2'-O-methylguanosine-3'-phosphate
  modified_base 4: mod_base = OTHER; note = 2'-O-methyluridine-3'-phosphate
  modified_base 5: mod_base = OTHER; note = 2'-O-methylcytidine-3'-phosphate
  modified_base 6: mod_base = OTHER; note = 2'-O-methylguanosine-3'-phosphate
  modified_base 7: mod_base = OTHER; note = 2'-O-methyladenosine-3'-phosphate
  modified_base 8: mod_base = OTHER; note = 2'-O-methyluridine-3'-phosphate
  modified_base 9: mod_base = OTHER; note = 2'-O-methylguanosine-3'-phosphate
  modified_base 10: mod_base = OTHER; note = 2'-O-methyladenosine-3'-phosphate
  modified_base 11: mod_base = OTHER; note = 2'-O-methylcytidine-3'-phosphate
  modified_base 12: mod_base = OTHER; note = 2'-O-methyluridine-3'-phosphate
  modified_base 13: mod_base = OTHER; note = 2'-O-methyluridine-3'-phosphate
  modified_base 15: mod_base = OTHER; note = 2'-O-methylcytidine-3'-phosphate
  modified_base 17: mod_base = OTHER; note = 2'-O-methylcytidine-3'-phosphate
  modified_base 18: mod_base = OTHER; note = 2'-O-methyladenosine-3'-phosphate
  modified_base 19: mod_base = OTHER; note = 2'-O-methyluridine-3'-phosphate
  modified_base 20: mod_base = OTHER; note = 2'-O-methyluridine-3'-phosphate
  modified_base 21: mod_base = OTHER; note = 2'-O-methylcytidine-3'- phosphorothioate
  modified_base 22: mod_base = OTHER; note = 2'-O-methyluridine-3'-phosphorothioate
  modified_base 23: mod_base = OTHER; note = 2'-O-methylguanosine-3'-phosphate
  misc_feature 1: note = RNA
  misc_feature 2: note = DNA
  misc_feature 3..13: note = RNA
  misc_feature 14: note = DNA
  misc_feature 15: note = RNA
  misc_feature 16: note = DNA
  misc_feature 17..23: note = RNA
ttgtcgatgactttcacattctg

SEQ ID NO: 314 - DNA, 23 bp, synthetic construct
  source 1..23: mol_type = other DNA
  modified_base 1: mod_base = OTHER; note = 2'-O-methyluridine-3'-phosphorothioate
  modified_base 2: mod_base = OTHER; note = 2'-deoxythymidine-3'-phosphorothioate
  modified_base 3: mod_base = OTHER; note = 2'-O-methylguanosine-3'-phosphate
  modified_base 4: mod_base = OTHER; note = 2'-O-methyluridine-3'-phosphate
  modified_base 5: mod_base = OTHER; note = 2'-O-methylcytidine-3'-phosphate
  modified_base 7: mod_base = OTHER; note = 2'-O-methyladenosine-3'-phosphate
  modified_base 8: mod_base = OTHER; note = 2'-O-methyluridine-3'-phosphate
  modified_base 9: mod_base = OTHER; note = 2'-O-methylguanosine-3'-phosphate
  modified_base 10: mod_base = OTHER; note = 2'-O-methyladenosine-3'-phosphate
  modified_base 11: mod_base = OTHER; note = 2'-O-methylcytidine-3'-phosphate
  modified_base 12: mod_base = OTHER; note = 2'-O-methyluridine-3'-phosphate
  modified_base 13: mod_base = OTHER; note = 2'-O-methyluridine-3'-phosphate
  modified_base 15: mod_base = OTHER; note = 2'-O-methylcytidine-3'-phosphate
  modified_base 17: mod_base = OTHER; note = 2'-O-methylcytidine-3'-phosphate
  modified_base 18: mod_base = OTHER; note = 2'-O-methyladenosine-3'-phosphate
  modified_base 19: mod_base = OTHER; note = 2'-O-methyluridine-3'-phosphate
  modified_base 20: mod_base = OTHER; note = 2'-O-methyluridine-3'-phosphate
  modified_base 21: mod_base = OTHER; note = 2'-O-methylcytidine-3'- phosphorothioate
  modified_base 22: mod_base = OTHER; note = 2'-O-methyluridine-3'-phosphorothioate
  modified_base 23: mod_base = OTHER; note = 2'-O-methylguanosine-3'-phosphate
  misc_feature 1: note = RNA
  misc_feature 2: note = DNA
  misc_feature 3..5: note = RNA
  misc_feature 6: note = DNA
  misc_feature 7..13: note = RNA
  misc_feature 14: note = DNA
  misc_feature 15: note = RNA
  misc_feature 16: note = DNA
  misc_feature 17..23: note = RNA
ttgtcgatgactttcacattctg

SEQ ID NO: 315 - DNA, 23 bp, synthetic construct
  source 1..23: mol_type = other DNA
  modified_base 1: mod_base = OTHER; note = 2'-O-methyluridine-3'-phosphorothioate
  modified_base 2: mod_base = OTHER; note = 2'-deoxythymidine-3'-phosphorothioate
  modified_base 3: mod_base = OTHER; note = 2'-O-methylguanosine-3'-phosphate
  modified_base 4: mod_base = OTHER; note = 2'-O-methyluridine-3'-phosphate
  modified_base 5: mod_base = OTHER; note = 2'-O-methylcytidine-3'-phosphate
  modified_base 6: mod_base = OTHER; note = 2'-O-methylguanosine-3'-phosphate
  modified_base 7: mod_base = OTHER; note = 2'-O-methyladenosine-3'-phosphate
  modified_base 8: mod_base = OTHER; note = 2'-O-methyluridine-3'-phosphate
  modified_base 9: mod_base = OTHER; note = 2'-O-methylguanosine-3'-phosphate
  modified_base 11: mod_base = OTHER; note = 2'-O-methylcytidine-3'-phosphate
  modified_base 12: mod_base = OTHER; note = 2'-O-methyluridine-3'-phosphate
  modified_base 13: mod_base = OTHER; note = 2'-O-methyluridine-3'-phosphate
  modified_base 15: mod_base = OTHER; note = 2'-O-methylcytidine-3'-phosphate
  modified_base 16: mod_base = OTHER; note = 2'-O-methyladenosine-3'-phosphate
  modified_base 17: mod_base = OTHER; note = 2'-O-methylcytidine-3'-phosphate
  modified_base 18: mod_base = OTHER; note = 2'-O-methyladenosine-3'-phosphate
  modified_base 19: mod_base = OTHER; note = 2'-O-methyluridine-3'-phosphate
  modified_base 20: mod_base = OTHER; note = 2'-O-methyluridine-3'-phosphate
  modified_base 21: mod_base = OTHER; note = 2'-O-methylcytidine-3'- phosphorothioate
  modified_base 22: mod_base = OTHER; note = 2'-O-methyluridine-3'-phosphorothioate
  modified_base 23: mod_base = OTHER; note = 2'-O-methylguanosine-3'-phosphate
  misc_feature 1: note = RNA
  misc_feature 2: note = DNA
  misc_feature 3..9: note = RNA
  misc_feature 10: note = DNA
  misc_feature 11..13: note = RNA
  misc_feature 14: note = DNA
  misc_feature 15..23: note = RNA
ttgtcgatgactttcacattctg

SEQ ID NO: 316 - RNA, 23 nt, synthetic construct
  source 1..23: mol_type = other RNA
  modified_base 1: mod_base = OTHER; note = 2'-O-methyluridine-3'-phosphorothioate
  modified_base 2: mod_base = OTHER; note = 2'-fluoroadenosine-3'-phosphorothioate
  modified_base 3: mod_base = OTHER; note = 2'-O-methyluridine-3'-phosphate
  modified_base 4: mod_base = OTHER; note = 2'-fluoroadenosine-3'-phosphate
  modified_base 5: mod_base = OTHER; note = 2'-O-methyluridine-3'-phosphate
  modified_base 6: mod_base = OTHER; note = 2'-fluorouridine-3'-phosphate
  modified_base 7: mod_base = OTHER; note = 2'-O-methyluridine-3'-phosphate
  modified_base 8: mod_base = OTHER; note = 2'-fluorocytidine-3'-phosphate
  modified_base 9: mod_base = OTHER; note = 2'-O-methylcytidine-3'-phosphate
  modified_base 10: mod_base = OTHER; note = 2'-fluoroadenosine-3'-phosphate
  modified_base 11: mod_base = OTHER; note = 2'-O-methylguanosine-3'-phosphate
  modified_base 12: mod_base = OTHER; note = 2'-O-methylguanosine-3'-phosphate
  modified_base 13: mod_base = OTHER; note = 2'-O-methyladenosine-3'-phosphate
  modified_base 14: mod_base = OTHER; note = 2'-fluorouridine-3'-phosphate
  modified_base 15: mod_base = OTHER; note = 2'-O-methylguanosine-3'-phosphate
  modified_base 16: mod_base = OTHER; note = 2'-fluoroadenosine-3'-phosphate
  modified_base 17: mod_base = OTHER; note = 2'-O-methyladenosine-3'-phosphate
  modified_base 18: mod_base = OTHER; note = 2'-fluoroadenosine-3'-phosphate
  modified_base 19: mod_base = OTHER; note = 2'-O-methylguanosine-3'-phosphate
  modified_base 20: mod_base = OTHER; note = 2'-fluorouridine-3'-phosphate
  modified_base 21: mod_base = OTHER; note = 2'-O-methylcytidine-3'- phosphorothioate
  modified_base 22: mod_base = OTHER; note = 2'-O-methylcytidine-3'- phosphorothioate
  modified_base 23: mod_base = OTHER; note = 2'-O-methyladenosine-3'-phosphate
tatatttccaggatgaaagtcca

SEQ ID NO: 317 - RNA, 23 nt, synthetic construct
  source 1..23: mol_type = other RNA
  modified_base 1: mod_base = OTHER; note = 2'-O-methyluridine-3'-phosphorothioate
  modified_base 2: mod_base = OTHER; note = 2'-fluoroadenosine-3'-phosphorothioate
  modified_base 3: mod_base = OTHER; note = 2'-O-methyluridine-3'-phosphate
  modified_base 4: mod_base = OTHER; note = 2'-fluoroadenosine-3'-phosphate
  modified_base 5: mod_base = OTHER; note = 2'-O-methyluridine-3'-phosphate
  modified_base 6: mod_base = OTHER; note = 2'-fluorouridine-3'-phosphate
  modified_base 7: mod_base = OTHER; note = 2'-O-methyluridine-3'-phosphate
  modified_base 8: mod_base = OTHER; note = 2'-fluorocytidine-3'-phosphate
  modified_base 9: mod_base = OTHER; note = 2'-O-methylcytidine-3'-phosphate
  modified_base 10: mod_base = OTHER; note = 2'-fluoroadenosine-3'-phosphate
  modified_base 11: mod_base = OTHER; note = 2'-O-methylguanosine-3'-phosphate
  modified_base 12: mod_base = OTHER; note = 2'-O-methylguanosine-3'-phosphate
  modified_base 13: mod_base = OTHER; note = 2'-O-methyladenosine-3'-phosphate
  modified_base 14: mod_base = OTHER; note = 2'-fluorouridine-3'-phosphate
  modified_base 15: mod_base = OTHER; note = 2'-O-methylguanosine-3'-phosphate
  modified_base 16: mod_base = OTHER; note = 2'-fluoroadenosine-3'-phosphate
  modified_base 17: mod_base = OTHER; note = 2'-O-methyladenosine-3'-phosphate
  modified_base 18: mod_base = OTHER; note = 2'-fluoroadenosine-3'-phosphate
  modified_base 19: mod_base = OTHER; note = 2'-O-methylguanosine-3'-phosphate
  modified_base 20: mod_base = OTHER; note = 2'-fluorouridine-3'-phosphate
  modified_base 21: mod_base = OTHER; note = 2'-O-methylcytidine-3'- phosphorothioate
  modified_base 22: mod_base = OTHER; note = 2'-O-methylcytidine-3'- phosphorothioate
  modified_base 23: mod_base = OTHER; note = 2'-O-methyladenosine-3'-phosphate
tatatttccaggatgaaagtcca

SEQ ID NO: 318 - RNA, 23 nt, synthetic construct
  source 1..23: mol_type = other RNA
  modified_base 1: mod_base = OTHER; note = 2'-O-methyluridine-3'-phosphorothioate
  modified_base 2: mod_base = OTHER; note = 2'-fluoroadenosine-3'-phosphorothioate
  modified_base 3: mod_base = OTHER; note = 2'-O-methyluridine-3'-phosphate
  modified_base 4: mod_base = OTHER; note = 2'-fluoroadenosine-3'-phosphate
  modified_base 5: mod_base = OTHER; note = 2'-O-methyluridine-3'-phosphate
  modified_base 6: mod_base = OTHER; note = 2'-fluorouridine-3'-phosphate
  modified_base 7: mod_base = OTHER; note = 2'-O-methyluridine-3'-phosphate
  modified_base 8: mod_base = OTHER; note = 2'-fluorocytidine-3'-phosphate
  modified_base 9: mod_base = OTHER; note = 2'-O-methylcytidine-3'-phosphate
  modified_base 10: mod_base = OTHER; note = 2'-fluoroadenosine-3'-phosphate
  modified_base 11: mod_base = OTHER; note = 2'-O-methylguanosine-3'-phosphate
  modified_base 12: mod_base = OTHER; note = 2'-O-methylguanosine-3'-phosphate
  modified_base 13: mod_base = OTHER; note = 2'-O-methyladenosine-3'-phosphate
  modified_base 14: mod_base = OTHER; note = 2'-fluorouridine-3'-phosphate
  modified_base 15: mod_base = OTHER; note = 2'-O-methylguanosine-3'-phosphate
  modified_base 16: mod_base = OTHER; note = 2'-fluoroadenosine-3'-phosphate
  modified_base 17: mod_base = OTHER; note = 2'-O-methyladenosine-3'-phosphate
  modified_base 18: mod_base = OTHER; note = 2'-fluoroadenosine-3'-phosphate
  modified_base 19: mod_base = OTHER; note = 2'-O-methylguanosine-3'-phosphate
  modified_base 20: mod_base = OTHER; note = 2'-fluorouridine-3'-phosphate
  modified_base 21: mod_base = OTHER; note = 2'-O-methylcytidine-3'- phosphorothioate
  modified_base 22: mod_base = OTHER; note = 2'-O-methylcytidine-3'- phosphorothioate
  modified_base 23: mod_base = OTHER; note = 2'-O-methyladenosine-3'-phosphate
tatatttccaggatgaaagtcca

SEQ ID NO: 319 - RNA, 23 nt, synthetic construct
  source 1..23: mol_type = other RNA
  modified_base 1: mod_base = OTHER; note = 2'-O-methyluridine-3'-phosphorothioate
  modified_base 2: mod_base = OTHER; note = 2'-fluoroadenosine-3'-phosphorothioate
  modified_base 3: mod_base = OTHER; note = 2'-O-methyluridine-3'-phosphate
  modified_base 4: mod_base = OTHER; note = 2'-fluoroadenosine-3'-phosphate
  modified_base 5: mod_base = OTHER; note = 2'-O-methyluridine-3'-phosphate
  modified_base 6: mod_base = OTHER; note = 2'-fluorouridine-3'-phosphate
  modified_base 7: mod_base = OTHER; note = 2'-O-methyluridine-3'-phosphate
  modified_base 8: mod_base = OTHER; note = 2'-fluorocytidine-3'-phosphate
  modified_base 9: mod_base = OTHER; note = 2'-O-methylcytidine-3'-phosphate
  modified_base 10: mod_base = OTHER; note = 2'-fluoroadenosine-3'-phosphate
  modified_base 11: mod_base = OTHER; note = 2'-O-methylguanosine-3'-phosphate
  modified_base 12: mod_base = OTHER; note = 2'-O-methylguanosine-3'-phosphate
  modified_base 13: mod_base = OTHER; note = 2'-O-methyladenosine-3'-phosphate
  modified_base 14: mod_base = OTHER; note = 2'-fluorouridine-3'-phosphate
  modified_base 15: mod_base = OTHER; note = 2'-O-methylguanosine-3'-phosphate
  modified_base 16: mod_base = OTHER; note = 2'-fluoroadenosine-3'-phosphate
  modified_base 17: mod_base = OTHER; note = 2'-O-methyladenosine-3'-phosphate
  modified_base 18: mod_base = OTHER; note = 2'-fluoroadenosine-3'-phosphate
  modified_base 19: mod_base = OTHER; note = 2'-O-methylguanosine-3'-phosphate
  modified_base 20: mod_base = OTHER; note = 2'-fluorouridine-3'-phosphate
  modified_base 21: mod_base = OTHER; note = 2'-O-methylcytidine-3'- phosphorothioate
  modified_base 22: mod_base = OTHER; note = 2'-O-methylcytidine-3'- phosphorothioate
  modified_base 23: mod_base = OTHER; note = 2'-O-methyladenosine-3'-phosphate
tatatttccaggatgaaagtcca

SEQ ID NO: 320 - RNA, 23 nt, synthetic construct
  source 1..23: mol_type = other RNA
  modified_base 1: mod_base = OTHER; note = 2'-O-methyluridine-3'-phosphorothioate
  modified_base 2: mod_base = OTHER; note = 2'-fluoroadenosine-3'-phosphorothioate
  modified_base 3: mod_base = OTHER; note = 2'-O-methyluridine-3'-phosphate
  modified_base 4: mod_base = OTHER; note = 2'-fluoroadenosine-3'-phosphate
  modified_base 5: mod_base = OTHER; note = 2'-O-methyluridine-3'-phosphate
  modified_base 6: mod_base = OTHER; note = 2'-fluorouridine-3'-phosphate
  modified_base 7: mod_base = OTHER; note = 2'-O-methyluridine-3'-phosphate
  modified_base 8: mod_base = OTHER; note = 2'-fluorocytidine-3'-phosphate
  modified_base 9: mod_base = OTHER; note = 2'-O-methylcytidine-3'-phosphate
  modified_base 10: mod_base = OTHER; note = 2'-fluoroadenosine-3'-phosphate
  modified_base 11: mod_base = OTHER; note = 2'-O-methylguanosine-3'-phosphate
  modified_base 12: mod_base = OTHER; note = 2'-O-methylguanosine-3'-phosphate
  modified_base 13: mod_base = OTHER; note = 2'-O-methyladenosine-3'-phosphate
  modified_base 14: mod_base = OTHER; note = 2'-fluorouridine-3'-phosphate
  modified_base 15: mod_base = OTHER; note = 2'-O-methylguanosine-3'-phosphate
  modified_base 16: mod_base = OTHER; note = 2'-fluoroadenosine-3'-phosphate
  modified_base 17: mod_base = OTHER; note = 2'-O-methyladenosine-3'-phosphate
  modified_base 18: mod_base = OTHER; note = 2'-fluoroadenosine-3'-phosphate
  modified_base 19: mod_base = OTHER; note = 2'-O-methylguanosine-3'-phosphate
  modified_base 20: mod_base = OTHER; note = 2'-fluorouridine-3'-phosphate
  modified_base 21: mod_base = OTHER; note = 2'-O-methylcytidine-3'- phosphorothioate
  modified_base 22: mod_base = OTHER; note = 2'-O-methylcytidine-3'- phosphorothioate
  modified_base 23: mod_base = OTHER; note = 2'-O-methyladenosine-3'-phosphate
tatatttccaggatgaaagtcca

SEQ ID NO: 321 - RNA, 23 nt, synthetic construct
  source 1..23: mol_type = other RNA
  modified_base 1: mod_base = OTHER; note = 2'-O-methyluridine-3'-phosphorothioate
  modified_base 2: mod_base = OTHER; note = 2'-fluoroadenosine-3'-phosphorothioate
  modified_base 3: mod_base = OTHER; note = 2'-O-methyluridine-3'-phosphate
  modified_base 4: mod_base = OTHER; note = 2'-fluoroadenosine-3'-phosphate
  modified_base 5: mod_base = OTHER; note = 2'-O-methyluridine-3'-phosphate
  modified_base 6: mod_base = OTHER; note = 2'-fluorouridine-3'-phosphate
  modified_base 7: mod_base = OTHER; note = 2'-O-methyluridine-3'-phosphate
  modified_base 8: mod_base = OTHER; note = 2'-fluorocytidine-3'-phosphate
  modified_base 9: mod_base = OTHER; note = 2'-O-methylcytidine-3'-phosphate
  modified_base 10: mod_base = OTHER; note = 2'-fluoroadenosine-3'-phosphate
  modified_base 11: mod_base = OTHER; note = 2'-O-methylguanosine-3'-phosphate
  modified_base 12: mod_base = OTHER; note = 2'-O-methylguanosine-3'-phosphate
  modified_base 13: mod_base = OTHER; note = 2'-O-methyladenosine-3'-phosphate
  modified_base 14: mod_base = OTHER; note = 2'-fluorouridine-3'-phosphate
  modified_base 15: mod_base = OTHER; note = 2'-O-methylguanosine-3'-phosphate
  modified_base 16: mod_base = OTHER; note = 2'-fluoroadenosine-3'-phosphate
  modified_base 17: mod_base = OTHER; note = 2'-O-methyladenosine-3'-phosphate
  modified_base 18: mod_base = OTHER; note = 2'-fluoroadenosine-3'-phosphate
  modified_base 19: mod_base = OTHER; note = 2'-O-methylguanosine-3'-phosphate
  modified_base 20: mod_base = OTHER; note = 2'-fluorouridine-3'-phosphate
  modified_base 21: mod_base = OTHER; note = 2'-O-methylcytidine-3'- phosphorothioate
  modified_base 22: mod_base = OTHER; note = 2'-O-methylcytidine-3'- phosphorothioate
  modified_base 23: mod_base = OTHER; note = 2'-O-methyladenosine-3'-phosphate
tatatttccaggatgaaagtcca

SEQ ID NO: 322 - RNA, 21 nt, synthetic construct
  source 1..21: mol_type = other RNA
  modified_base 1: mod_base = OTHER; note = 2'-O-methyluridine-3'-phosphorothioate
  modified_base 2: mod_base = OTHER; note = 2'-fluoroadenosine-3'-phosphorothioate
  modified_base 3: mod_base = OTHER; note = 2'-O-methyluridine-3'-phosphate
  modified_base 4: mod_base = OTHER; note = 2'-fluoroadenosine-3'-phosphate
  modified_base 5: mod_base = OTHER; note = 2'-O-methyluridine-3'-phosphate
  modified_base 6: mod_base = OTHER; note = 2'-fluorouridine-3'-phosphate
  modified_base 7: mod_base = OTHER; note = 2'-O-methyluridine-3'-phosphate
  modified_base 8: mod_base = OTHER; note = 2'-fluorocytidine-3'-phosphate
  modified_base 9: mod_base = OTHER; note = 2'-O-methylcytidine-3'-phosphate
  modified_base 10: mod_base = OTHER; note = 2'-fluoroadenosine-3'-phosphate
  modified_base 11: mod_base = OTHER; note = 2'-O-methylguanosine-3'-phosphate
  modified_base 12: mod_base = OTHER; note = 2'-O-methylguanosine-3'-phosphate
  modified_base 13: mod_base = OTHER; note = 2'-O-methyladenosine-3'-phosphate
  modified_base 14: mod_base = OTHER; note = 2'-fluorouridine-3'-phosphate
  modified_base 15: mod_base = OTHER; note = 2'-O-methylguanosine-3'-phosphate
  modified_base 16: mod_base = OTHER; note = 2'-fluoroadenosine-3'-phosphate
  modified_base 17: mod_base = OTHER; note = 2'-O-methyladenosine-3'-phosphate
  modified_base 18: mod_base = OTHER; note = 2'-fluoroadenosine-3'-phosphate
  modified_base 19: mod_base = OTHER; note = 2'-O-methylguanosine-3'- phosphorothioate
  modified_base 20: mod_base = OTHER; note = 2'-O-methyluridine-3'-phosphorothioate
  modified_base 21: mod_base = OTHER; note = 2'-O-methylcytidine-3'-phosphate
tatatttccaggatgaaagtc

SEQ ID NO: 323 - RNA, 21 nt, synthetic construct
  source 1..21: mol_type = other RNA
  modified_base 1: mod_base = OTHER; note = 2'-O-methyluridine-3'-phosphorothioate
  modified_base 2: mod_base = OTHER; note = 2'-fluoroadenosine-3'-phosphorothioate
  modified_base 3: mod_base = OTHER; note = 2'-O-methyluridine-3'-phosphate
  modified_base 4: mod_base = OTHER; note = 2'-O-methyladenosine-3'-phosphate
  modified_base 5: mod_base = OTHER; note = 2'-O-methyluridine-3'-phosphate
  modified_base 6: mod_base = OTHER; note = 2'-fluorouridine-3'-phosphate
  modified_base 7: mod_base = OTHER; note = 2'-O-methyluridine-3'-phosphate
  modified_base 8: mod_base = OTHER; note = 2'-O-methylcytidine-3'-phosphate
  modified_base 9: mod_base = OTHER; note = 2'-O-methylcytidine-3'-phosphate
  modified_base 10: mod_base = OTHER; note = 2'-O-methyladenosine-3'-phosphate
  modified_base 11: mod_base = OTHER; note = 2'-O-methylguanosine-3'-phosphate
  modified_base 12: mod_base = OTHER; note = 2'-O-methylguanosine-3'-phosphate
  modified_base 13: mod_base = OTHER; note = 2'-O-methyladenosine-3'-phosphate
  modified_base 14: mod_base = OTHER; note = 2'-fluorouridine-3'-phosphate
  modified_base 15: mod_base = OTHER; note = 2'-O-methylguanosine-3'-phosphate
  modified_base 16: mod_base = OTHER; note = 2'-fluoroadenosine-3'-phosphate
  modified_base 17: mod_base = OTHER; note = 2'-O-methyladenosine-3'-phosphate
  modified_base 18: mod_base = OTHER; note = 2'-O-methyladenosine-3'-phosphate
  modified_base 19: mod_base = OTHER; note = 2'-O-methylguanosine-3'- phosphorothioate
  modified_base 20: mod_base = OTHER; note = 2'-O-methyluridine-3'-phosphorothioate
  modified_base 21: mod_base = OTHER; note = 2'-O-methylcytidine-3'-phosphate
tatatttccaggatgaaagtc

SEQ ID NO: 324 - RNA, 23 nt, synthetic construct
  source 1..23: mol_type = other RNA
  modified_base 1: mod_base = OTHER; note = 2'-O-methyluridine-3'-phosphorothioate
  modified_base 2: mod_base = OTHER; note = 2'-fluoroadenosine-3'-phosphorothioate
  modified_base 3: mod_base = OTHER; note = 2'-O-methyluridine-3'-phosphate
  modified_base 4: mod_base = OTHER; note = 2'-O-methyladenosine-3'-phosphate
  modified_base 5: mod_base = OTHER; note = 2'-O-methyluridine-3'-phosphate
  modified_base 6: mod_base = OTHER; note = 2'-fluorouridine-3'-phosphate
  modified_base 7: mod_base = OTHER; note = 2'-O-methyluridine-3'-phosphate
  modified_base 8: mod_base = OTHER; note = 2'-fluorocytidine-3'-phosphate
  modified_base 9: mod_base = OTHER; note = 2'-O-methylcytidine-3'-phosphate
  modified_base 10: mod_base = OTHER; note = 2'-fluoroadenosine-3'-phosphate
  modified_base 11: mod_base = OTHER; note = 2'-O-methylguanosine-3'-phosphate
  modified_base 12: mod_base = OTHER; note = 2'-O-methylguanosine-3'-phosphate
  modified_base 13: mod_base = OTHER; note = 2'-O-methyladenosine-3'-phosphate
  modified_base 14: mod_base = OTHER; note = 2'-fluorouridine-3'-phosphate
  modified_base 15: mod_base = OTHER; note = 2'-O-methylguanosine-3'-phosphate
  modified_base 16: mod_base = OTHER; note = 2'-fluoroadenosine-3'-phosphate
  modified_base 17: mod_base = OTHER; note = 2'-O-methyladenosine-3'-phosphate
  modified_base 18: mod_base = OTHER; note = 2'-O-methyladenosine-3'-phosphate
  modified_base 19: mod_base = OTHER; note = 2'-O-methylguanosine-3'-phosphate
  modified_base 20: mod_base = OTHER; note = 2'-O-methyluridine-3'-phosphate
  modified_base 21: mod_base = OTHER; note = 2'-O-methylcytidine-3'- phosphorothioate
  modified_base 22: mod_base = OTHER; note = 2'-O-methylcytidine-3'- phosphorothioate
  modified_base 23: mod_base = OTHER; note = 2'-O-methyladenosine-3'-phosphate
tatatttccaggatgaaagtcca

SEQ ID NO: 325 - RNA, 23 nt, synthetic construct
  source 1..23: mol_type = other RNA
  modified_base 1: mod_base = OTHER; note = 2'-O-methyluridine-3'-phosphorothioate
  modified_base 2: mod_base = OTHER; note = 2'-fluoroadenosine-3'-phosphorothioate
  modified_base 3: mod_base = OTHER; note = 2'-O-methyluridine-3'-phosphate
  modified_base 4: mod_base = OTHER; note = 2'-O-methyladenosine-3'-phosphate
  modified_base 5: mod_base = OTHER; note = 2'-O-methyluridine-3'-phosphate
  modified_base 6: mod_base = OTHER; note = 2'-fluorouridine-3'-phosphate
  modified_base 7: mod_base = OTHER; note = 2'-O-methyluridine-3'-phosphate
  modified_base 8: mod_base = OTHER; note = 2'-fluorocytidine-3'-phosphate
  modified_base 9: mod_base = OTHER; note = 2'-fluorocytidine-3'-phosphate
  modified_base 10: mod_base = OTHER; note = 2'-O-methyladenosine-3'-phosphate
  modified_base 11: mod_base = OTHER; note = 2'-O-methylguanosine-3'-phosphate
  modified_base 12: mod_base = OTHER; note = 2'-O-methylguanosine-3'-phosphate
  modified_base 13: mod_base = OTHER; note = 2'-O-methyladenosine-3'-phosphate
  modified_base 14: mod_base = OTHER; note = 2'-fluorouridine-3'-phosphate
  modified_base 15: mod_base = OTHER; note = 2'-O-methylguanosine-3'-phosphate
  modified_base 16: mod_base = OTHER; note = 2'-fluoroadenosine-3'-phosphate
  modified_base 17: mod_base = OTHER; note = 2'-O-methyladenosine-3'-phosphate
  modified_base 18: mod_base = OTHER; note = 2'-O-methyladenosine-3'-phosphate
  modified_base 19: mod_base = OTHER; note = 2'-O-methylguanosine-3'-phosphate
  modified_base 20: mod_base = OTHER; note = 2'-O-methyluridine-3'-phosphate
  modified_base 21: mod_base = OTHER; note = 2'-O-methylcytidine-3'- phosphorothioate
  modified_base 22: mod_base = OTHER; note = 2'-O-methylcytidine-3'- phosphorothioate
  modified_base 23: mod_base = OTHER; note = 2'-O-methyladenosine-3'-phosphate
tatatttccaggatgaaagtcca

SEQ ID NO: 326 - RNA, 23 nt, synthetic construct
  source 1..23: mol_type = other RNA
  modified_base 1: mod_base = OTHER; note = 2'-O-methyluridine-3'-phosphorothioate
  modified_base 2: mod_base = OTHER; note = 2'-fluoroadenosine-3'-phosphorothioate
  modified_base 3: mod_base = OTHER; note = 2'-O-methyluridine-3'-phosphate
  modified_base 4: mod_base = OTHER; note = 2'-O-methyladenosine-3'-phosphate
  modified_base 5: mod_base = OTHER; note = 2'-O-methyluridine-3'-phosphate
  modified_base 6: mod_base = OTHER; note = 2'-fluorouridine-3'-phosphate
  modified_base 7: mod_base = OTHER; note = 2'-O-methyluridine-3'-phosphate
  modified_base 8: mod_base = OTHER; note = 2'-O-methylcytidine-3'-phosphate
  modified_base 9: mod_base = OTHER; note = 2'-O-methylcytidine-3'-phosphate
  modified_base 10: mod_base = OTHER; note = 2'-O-methyladenosine-3'-phosphate
  modified_base 11: mod_base = OTHER; note = 2'-O-methylguanosine-3'-phosphate
  modified_base 12: mod_base = OTHER; note = 2'-O-methylguanosine-3'-phosphate
  modified_base 13: mod_base = OTHER; note = 2'-O-methyladenosine-3'-phosphate
  modified_base 14: mod_base = OTHER; note = 2'-fluorouridine-3'-phosphate
  modified_base 15: mod_base = OTHER; note = 2'-O-methylguanosine-3'-phosphate
  modified_base 16: mod_base = OTHER; note = 2'-fluoroadenosine-3'-phosphate
  modified_base 17: mod_base = OTHER; note = 2'-O-methyladenosine-3'-phosphate
  modified_base 18: mod_base = OTHER; note = 2'-O-methyladenosine-3'-phosphate
  modified_base 19: mod_base = OTHER; note = 2'-O-methylguanosine-3'-phosphate
  modified_base 20: mod_base = OTHER; note = 2'-O-methyluridine-3'-phosphate
  modified_base 21: mod_base = OTHER; note = 2'-O-methylcytidine-3'- phosphorothioate
  modified_base 22: mod_base = OTHER; note = 2'-O-methylcytidine-3'- phosphorothioate
  modified_base 23: mod_base = OTHER; note = 2'-O-methyladenosine-3'-phosphate
tatatttccaggatgaaagtcca

SEQ ID NO: 327 - RNA, 23 nt, synthetic construct
  source 1..23: mol_type = other RNA
  modified_base 1: mod_base = OTHER; note = 2'-O-methyluridine-3'-phosphorothioate
  modified_base 2: mod_base = OTHER; note = 2'-fluoroadenosine-3'-phosphorothioate
  modified_base 3: mod_base = OTHER; note = 2'-O-methyluridine-3'-phosphate
  modified_base 4: mod_base = OTHER; note = 2'-O-methyladenosine-3'-phosphate
  modified_base 5: mod_base = OTHER; note = 2'-O-methyluridine-3'-phosphate
  modified_base 6: mod_base = OTHER; note = 2'-fluorouridine-3'-phosphate
  modified_base 7: mod_base = OTHER; note = 2'-O-methyluridine-3'-phosphate
  modified_base 8: mod_base = OTHER; note = 2'-O-methylcytidine-3'-phosphate
  modified_base 9: mod_base = OTHER; note = 2'-O-methylcytidine-3'-phosphate
  modified_base 10: mod_base = OTHER; note = 2'-O-methyladenosine-3'-phosphate
  modified_base 11: mod_base = OTHER; note = 2'-O-methylguanosine-3'-phosphate
  modified_base 12: mod_base = OTHER; note = 2'-O-methylguanosine-3'-phosphate
  modified_base 13: mod_base = OTHER; note = 2'-O-methyladenosine-3'-phosphate
  modified_base 14: mod_base = OTHER; note = 2'-fluorouridine-3'-phosphate
  modified_base 15: mod_base = OTHER; note = 2'-O-methylguanosine-3'-phosphate
  modified_base 16: mod_base = OTHER; note = 2'-O-methyladenosine-3'-phosphate
  modified_base 17: mod_base = OTHER; note = 2'-O-methyladenosine-3'-phosphate
  modified_base 18: mod_base = OTHER; note = 2'-O-methyladenosine-3'-phosphate
  modified_base 19: mod_base = OTHER; note = 2'-O-methylguanosine-3'-phosphate
  modified_base 20: mod_base = OTHER; note = 2'-O-methyluridine-3'-phosphate
  modified_base 21: mod_base = OTHER; note = 2'-O-methylcytidine-3'- phosphorothioate
  modified_base 22: mod_base = OTHER; note = 2'-O-methylcytidine-3'- phosphorothioate
  modified_base 23: mod_base = OTHER; note = 2'-O-methyladenosine-3'-phosphate
tatatttccaggatgaaagtcca

SEQ ID NO: 328 - RNA, 23 nt, synthetic construct
  source 1..23: mol_type = other RNA
  modified_base 1: mod_base = OTHER; note = 2'-O-methyluridine-3'-phosphorothioate
  modified_base 2: mod_base = OTHER; note = 2'-fluoroadenosine-3'-phosphorothioate
  modified_base 3: mod_base = OTHER; note = 2'-O-methyluridine-3'-phosphate
  modified_base 4: mod_base = OTHER; note = 2'-O-methyladenosine-3'-phosphate
  modified_base 5: mod_base = OTHER; note = 2'-O-methyluridine-3'-phosphate
  modified_base 6: mod_base = OTHER; note = 2'-O-methyluridine-3'-phosphate
  modified_base 7: mod_base = OTHER; note = 2'-O-methyluridine-3'-phosphate
  modified_base 8: mod_base = OTHER; note = 2'-O-methylcytidine-3'-phosphate
  modified_base 9: mod_base = OTHER; note = 2'-O-methylcytidine-3'-phosphate
  modified_base 10: mod_base = OTHER; note = 2'-O-methyladenosine-3'-phosphate
  modified_base 11: mod_base = OTHER; note = 2'-O-methylguanosine-3'-phosphate
  modified_base 12: mod_base = OTHER; note = 2'-O-methylguanosine-3'-phosphate
  modified_base 13: mod_base = OTHER; note = 2'-O-methyladenosine-3'-phosphate
  modified_base 14: mod_base = OTHER; note = 2'-fluorouridine-3'-phosphate
  modified_base 15: mod_base = OTHER; note = 2'-O-methylguanosine-3'-phosphate
  modified_base 16: mod_base = OTHER; note = 2'-O-methyladenosine-3'-phosphate
  modified_base 17: mod_base = OTHER; note = 2'-O-methyladenosine-3'-phosphate
  modified_base 18: mod_base = OTHER; note = 2'-O-methyladenosine-3'-phosphate
  modified_base 19: mod_base = OTHER; note = 2'-O-methylguanosine-3'-phosphate
  modified_base 20: mod_base = OTHER; note = 2'-O-methyluridine-3'-phosphate
  modified_base 21: mod_base = OTHER; note = 2'-O-methylcytidine-3'- phosphorothioate
  modified_base 22: mod_base = OTHER; note = 2'-O-methylcytidine-3'- phosphorothioate
  modified_base 23: mod_base = OTHER; note = 2'-O-methyladenosine-3'-phosphate
tatatttccaggatgaaagtcca

SEQ ID NO: 329 - RNA, 23 nt, synthetic construct
  source 1..23: mol_type = other RNA
  modified_base 1: mod_base = OTHER; note = 2'-O-methyluridine-3'-phosphorothioate
  modified_base 2: mod_base = OTHER; note = 2'-fluoroadenosine-3'-phosphorothioate
  modified_base 3: mod_base = OTHER; note = 2'-O-methyluridine-3'-phosphate
  modified_base 4: mod_base = OTHER; note = 2'-O-methyladenosine-3'-phosphate
  modified_base 5: mod_base = OTHER; note = 2'-O-methyluridine-3'-phosphate
  modified_base 6: mod_base = OTHER; note = 2'-fluorouridine-3'-phosphate
  modified_base 7: mod_base = OTHER; note = 2'-O-methyluridine-3'-phosphate
  modified_base 8: mod_base = OTHER; note = 2'-fluorocytidine-3'-phosphate
  modified_base 9: mod_base = OTHER; note = 2'-O-methylcytidine-3'-phosphate
  modified_base 10: mod_base = OTHER; note = 2'-fluoroadenosine-3'-phosphate
  modified_base 11: mod_base = OTHER; note = 2'-O-methylguanosine-3'-phosphate
  modified_base 12: mod_base = OTHER; note = 2'-O-methylguanosine-3'-phosphate
  modified_base 13: mod_base = OTHER; note = 2'-O-methyladenosine-3'-phosphate
  modified_base 14: mod_base = OTHER; note = 2'-fluorouridine-3'-phosphate
  modified_base 15: mod_base = OTHER; note = 2'-O-methylguanosine-3'-phosphate
  modified_base 16: mod_base = OTHER; note = 2'-fluoroadenosine-3'-phosphate
  modified_base 17: mod_base = OTHER; note = 2'-O-methyladenosine-3'-phosphate
  modified_base 18: mod_base = OTHER; note = 2'-O-methyladenosine-3'-phosphate
  modified_base 19: mod_base = OTHER; note = 2'-O-methylguanosine-3'-phosphate
  modified_base 20: mod_base = OTHER; note = 2'-O-methyluridine-3'-phosphate
  modified_base 21: mod_base = OTHER; note = 2'-O-methylcytidine-3'- phosphorothioate
  modified_base 22: mod_base = OTHER; note = 2'-O-methylcytidine-3'- phosphorothioate
  modified_base 23: mod_base = OTHER; note = 2'-O-methyladenosine-3'-phosphate
tatatttccaggatgaaagtcca

SEQ ID NO: 330 - RNA, 23 nt, synthetic construct
  source 1..23: mol_type = other RNA
  modified_base 1: mod_base = OTHER; note = 2'-O-methyluridine-3'-phosphorothioate
  modified_base 2: mod_base = OTHER; note = 2'-fluoroadenosine-3'-phosphorothioate
  modified_base 3: mod_base = OTHER; note = 2'-O-methyluridine-3'-phosphate
  modified_base 4: mod_base = OTHER; note = 2'-O-methyladenosine-3'-phosphate
  modified_base 5: mod_base = OTHER; note = 2'-O-methyluridine-3'-phosphate
  modified_base 6: mod_base = OTHER; note = 2'-fluorouridine-3'-phosphate
  modified_base 7: mod_base = OTHER; note = 2'-O-methyluridine-3'-phosphate
  modified_base 8: mod_base = OTHER; note = 2'-fluorocytidine-3'-phosphate
  modified_base 9: mod_base = OTHER; note = 2'-fluorocytidine-3'-phosphate
  modified_base 10: mod_base = OTHER; note = 2'-O-methyladenosine-3'-phosphate
  modified_base 11: mod_base = OTHER; note = 2'-O-methylguanosine-3'-phosphate
  modified_base 12: mod_base = OTHER; note = 2'-O-methylguanosine-3'-phosphate
  modified_base 13: mod_base = OTHER; note = 2'-O-methyladenosine-3'-phosphate
  modified_base 14: mod_base = OTHER; note = 2'-fluorouridine-3'-phosphate
  modified_base 15: mod_base = OTHER; note = 2'-O-methylguanosine-3'-phosphate
  modified_base 16: mod_base = OTHER; note = 2'-fluoroadenosine-3'-phosphate
  modified_base 17: mod_base = OTHER; note = 2'-O-methyladenosine-3'-phosphate
  modified_base 18: mod_base = OTHER; note = 2'-O-methyladenosine-3'-phosphate
  modified_base 19: mod_base = OTHER; note = 2'-O-methylguanosine-3'-phosphate
  modified_base 20: mod_base = OTHER; note = 2'-O-methyluridine-3'-phosphate
  modified_base 21: mod_base = OTHER; note = 2'-O-methylcytidine-3'- phosphorothioate
  modified_base 22: mod_base = OTHER; note = 2'-O-methylcytidine-3'- phosphorothioate
  modified_base 23: mod_base = OTHER; note = 2'-O-methyladenosine-3'-phosphate
tatatttccaggatgaaagtcca

SEQ ID NO: 331 - RNA, 23 nt, synthetic construct
  source 1..23: mol_type = other RNA
  modified_base 1: mod_base = OTHER; note = 2'-O-methyluridine-3'-phosphorothioate
  modified_base 2: mod_base = OTHER; note = 2'-fluoroadenosine-3'-phosphorothioate
  modified_base 3: mod_base = OTHER; note = 2'-O-methyluridine-3'-phosphate
  modified_base 4: mod_base = OTHER; note = 2'-O-methyladenosine-3'-phosphate
  modified_base 5: mod_base = OTHER; note = 2'-O-methyluridine-3'-phosphate
  modified_base 6: mod_base = OTHER; note = 2'-fluorouridine-3'-phosphate
  modified_base 7: mod_base = OTHER; note = 2'-O-methyluridine-3'-phosphate
  modified_base 8: mod_base = OTHER; note = 2'-O-methylcytidine-3'-phosphate
  modified_base 9: mod_base = OTHER; note = 2'-O-methylcytidine-3'-phosphate
  modified_base 10: mod_base = OTHER; note = 2'-O-methyladenosine-3'-phosphate
  modified_base 11: mod_base = OTHER; note = 2'-O-methylguanosine-3'-phosphate
  modified_base 12: mod_base = OTHER; note = 2'-O-methylguanosine-3'-phosphate
  modified_base 13: mod_base = OTHER; note = 2'-O-methyladenosine-3'-phosphate
  modified_base 14: mod_base = OTHER; note = 2'-fluorouridine-3'-phosphate
  modified_base 15: mod_base = OTHER; note = 2'-O-methylguanosine-3'-phosphate
  modified_base 16: mod_base = OTHER; note = 2'-fluoroadenosine-3'-phosphate
  modified_base 17: mod_base = OTHER; note = 2'-O-methyladenosine-3'-phosphate
  modified_base 18: mod_base = OTHER; note = 2'-O-methyladenosine-3'-phosphate
  modified_base 19: mod_base = OTHER; note = 2'-O-methylguanosine-3'-phosphate
  modified_base 20: mod_base = OTHER; note = 2'-O-methyluridine-3'-phosphate
  modified_base 21: mod_base = OTHER; note = 2'-O-methylcytidine-3'- phosphorothioate
  modified_base 22: mod_base = OTHER; note = 2'-O-methylcytidine-3'- phosphorothioate
  modified_base 23: mod_base = OTHER; note = 2'-O-methyladenosine-3'-phosphate
tatatttccaggatgaaagtcca

SEQ ID NO: 332 - RNA, 23 nt, synthetic construct
  source 1..23: mol_type = other RNA
  modified_base 1: mod_base = OTHER; note = 2'-O-methyluridine-3'-phosphorothioate
  modified_base 2: mod_base = OTHER; note = 2'-fluoroadenosine-3'-phosphorothioate
  modified_base 3: mod_base = OTHER; note = 2'-O-methyluridine-3'-phosphate
  modified_base 4: mod_base = OTHER; note = 2'-O-methyladenosine-3'-phosphate
  modified_base 5: mod_base = OTHER; note = 2'-O-methyluridine-3'-phosphate
  modified_base 6: mod_base = OTHER; note = 2'-fluorouridine-3'-phosphate
  modified_base 7: mod_base = OTHER; note = 2'-O-methyluridine-3'-phosphate
  modified_base 8: mod_base = OTHER; note = 2'-fluorocytidine-3'-phosphate
  modified_base 9: mod_base = OTHER; note = 2'-O-methylcytidine-3'-phosphate
  modified_base 10: mod_base = OTHER; note = 2'-fluoroadenosine-3'-phosphate
  modified_base 11: mod_base = OTHER; note = 2'-O-methylguanosine-3'-phosphate
  modified_base 12: mod_base = OTHER; note = 2'-O-methylguanosine-3'-phosphate
  modified_base 13: mod_base = OTHER; note = 2'-O-methyladenosine-3'-phosphate
  modified_base 14: mod_base = OTHER; note = 2'-fluorouridine-3'-phosphate
  modified_base 15: mod_base = OTHER; note = 2'-O-methylguanosine-3'-phosphate
  modified_base 16: mod_base = OTHER; note = 2'-fluoroadenosine-3'-phosphate
  modified_base 17: mod_base = OTHER; note = 2'-O-methyladenosine-3'-phosphate
  modified_base 18: mod_base = OTHER; note = 2'-O-methyladenosine-3'-phosphate
  modified_base 19: mod_base = OTHER; note = 2'-O-methylguanosine-3'-phosphate
  modified_base 20: mod_base = OTHER; note = 2'-O-methyluridine-3'-phosphate
  modified_base 21: mod_base = OTHER; note = 2'-O-methylcytidine-3'- phosphorothioate
  modified_base 22: mod_base = OTHER; note = 2'-O-methylcytidine-3'- phosphorothioate
  modified_base 23: mod_base = OTHER; note = 2'-O-methyladenosine-3'-phosphate
tatatttccaggatgaaagtcca

SEQ ID NO: 333 - RNA, 23 nt, synthetic construct
  source 1..23: mol_type = other RNA
  modified_base 1: mod_base = OTHER; note = 2'-O-methyluridine-3'-phosphorothioate
  modified_base 2: mod_base = OTHER; note = 2'-fluoroadenosine-3'-phosphorothioate
  modified_base 3: mod_base = OTHER; note = 2'-O-methyluridine-3'-phosphate
  modified_base 4: mod_base = OTHER; note = 2'-O-methyladenosine-3'-phosphate
  modified_base 5: mod_base = OTHER; note = 2'-O-methyluridine-3'-phosphate
  modified_base 6: mod_base = OTHER; note = 2'-fluorouridine-3'-phosphate
  modified_base 7: mod_base = OTHER; note = 2'-O-methyluridine-3'-phosphate
  modified_base 8: mod_base = OTHER; note = 2'-fluorocytidine-3'-phosphate
  modified_base 9: mod_base = OTHER; note = 2'-fluorocytidine-3'-phosphate
  modified_base 10: mod_base = OTHER; note = 2'-O-methyladenosine-3'-phosphate
  modified_base 11: mod_base = OTHER; note = 2'-O-methylguanosine-3'-phosphate
  modified_base 12: mod_base = OTHER; note = 2'-O-methylguanosine-3'-phosphate
  modified_base 13: mod_base = OTHER; note = 2'-O-methyladenosine-3'-phosphate
  modified_base 14: mod_base = OTHER; note = 2'-fluorouridine-3'-phosphate
  modified_base 15: mod_base = OTHER; note = 2'-O-methylguanosine-3'-phosphate
  modified_base 16: mod_base = OTHER; note = 2'-fluoroadenosine-3'-phosphate
  modified_base 17: mod_base = OTHER; note = 2'-O-methyladenosine-3'-phosphate
  modified_base 18: mod_base = OTHER; note = 2'-O-methyladenosine-3'-phosphate
  modified_base 19: mod_base = OTHER; note = 2'-O-methylguanosine-3'-phosphate
  modified_base 20: mod_base = OTHER; note = 2'-O-methyluridine-3'-phosphate
  modified_base 21: mod_base = OTHER; note = 2'-O-methylcytidine-3'- phosphorothioate
  modified_base 22: mod_base = OTHER; note = 2'-O-methylcytidine-3'- phosphorothioate
  modified_base 23: mod_base = OTHER; note = 2'-O-methyladenosine-3'-phosphate
tatatttccaggatgaaagtcca

SEQ ID NO: 334 - RNA, 23 nt, synthetic construct
  source 1..23: mol_type = other RNA
  modified_base 1: mod_base = OTHER; note = 2'-O-methyluridine-3'-phosphorothioate
  modified_base 2: mod_base = OTHER; note = 2'-fluoroadenosine-3'-phosphorothioate
  modified_base 3: mod_base = OTHER; note = 2'-O-methyluridine-3'-phosphate
  modified_base 4: mod_base = OTHER; note = 2'-O-methyladenosine-3'-phosphate
  modified_base 5: mod_base = OTHER; note = 2'-O-methyluridine-3'-phosphate
  modified_base 6: mod_base = OTHER; note = 2'-fluorouridine-3'-phosphate
  modified_base 7: mod_base = OTHER; note = 2'-O-methyluridine-3'-phosphate
  modified_base 8: mod_base = OTHER; note = 2'-O-methylcytidine-3'-phosphate
  modified_base 9: mod_base = OTHER; note = 2'-O-methylcytidine-3'-phosphate
  modified_base 10: mod_base = OTHER; note = 2'-O-methyladenosine-3'-phosphate
  modified_base 11: mod_base = OTHER; note = 2'-O-methylguanosine-3'-phosphate
  modified_base 12: mod_base = OTHER; note = 2'-O-methylguanosine-3'-phosphate
  modified_base 13: mod_base = OTHER; note = 2'-O-methyladenosine-3'-phosphate
  modified_base 14: mod_base = OTHER; note = 2'-fluorouridine-3'-phosphate
  modified_base 15: mod_base = OTHER; note = 2'-O-methylguanosine-3'-phosphate
  modified_base 16: mod_base = OTHER; note = 2'-fluoroadenosine-3'-phosphate
  modified_base 17: mod_base = OTHER; note = 2'-O-methyladenosine-3'-phosphate
  modified_base 18: mod_base = OTHER; note = 2'-O-methyladenosine-3'-phosphate
  modified_base 19: mod_base = OTHER; note = 2'-O-methylguanosine-3'-phosphate
  modified_base 20: mod_base = OTHER; note = 2'-O-methyluridine-3'-phosphate
  modified_base 21: mod_base = OTHER; note = 2'-O-methylcytidine-3'- phosphorothioate
  modified_base 22: mod_base = OTHER; note = 2'-O-methylcytidine-3'- phosphorothioate
  modified_base 23: mod_base = OTHER; note = 2'-O-methyladenosine-3'-phosphate
tatatttccaggatgaaagtcca

SEQ ID NO: 335 - RNA, 23 nt, synthetic construct
  source 1..23: mol_type = other RNA
  modified_base 1: mod_base = OTHER; note = 2'-O-methyluridine-3'-phosphorothioate
  modified_base 2: mod_base = OTHER; note = 2'-fluoroadenosine-3'-phosphorothioate
  modified_base 3: mod_base = OTHER; note = 2'-O-methyluridine-3'-phosphate
  modified_base 4: mod_base = OTHER; note = 2'-fluoroadenosine-3'-phosphate
  modified_base 5: mod_base = OTHER; note = 2'-O-methyluridine-3'-phosphate
  modified_base 6: mod_base = OTHER; note = 2'-fluorouridine-3'-phosphate
  modified_base 7: mod_base = OTHER; note = 2'-O-methyluridine-3'-phosphate
  modified_base 8: mod_base = OTHER; note = 2'-fluorocytidine-3'-phosphate
  modified_base 9: mod_base = OTHER; note = 2'-O-methylcytidine-3'-phosphate
  modified_base 10: mod_base = OTHER; note = 2'-fluoroadenosine-3'-phosphate
  modified_base 11: mod_base = OTHER; note = 2'-O-methylguanosine-3'-phosphate
  modified_base 12: mod_base = OTHER; note = 2'-O-methylguanosine-3'-phosphate
  modified_base 13: mod_base = OTHER; note = 2'-O-methyladenosine-3'-phosphate
  modified_base 14: mod_base = OTHER; note = 2'-fluorouridine-3'-phosphate
  modified_base 15: mod_base = OTHER; note = 2'-O-methylguanosine-3'-phosphate
  modified_base 16: mod_base = OTHER; note = 2'-fluoroadenosine-3'-phosphate
  modified_base 17: mod_base = OTHER; note = 2'-O-methyladenosine-3'-phosphate
  modified_base 18: mod_base = OTHER; note = 2'-fluoroadenosine-3'-phosphate
  modified_base 19: mod_base = OTHER; note = 2'-O-methylguanosine-3'-phosphate
  modified_base 20: mod_base = OTHER; note = 2'-fluorouridine-3'-phosphate
  modified_base 21: mod_base = OTHER; note = 2'-O-methylcytidine-3'- phosphorothioate
  modified_base 22: mod_base = OTHER; note = 2'-O-methylcytidine-3'- phosphorothioate
  modified_base 23: mod_base = OTHER; note = 2'-O-methyladenosine-3'-phosphate
tatatttccaggatgaaagtcca

SEQ ID NO: 336 - RNA, 23 nt, synthetic construct
  source 1..23: mol_type = other RNA
  modified_base 1: mod_base = OTHER; note = 2'-O-methyluridine-3'-phosphorothioate
  modified_base 2: mod_base = OTHER; note = 2'-fluoroadenosine-3'-phosphorothioate
  modified_base 3: mod_base = OTHER; note = 2'-O-methyluridine-3'-phosphate
  modified_base 4: mod_base = OTHER; note = 2'-fluoroadenosine-3'-phosphate
  modified_base 5: mod_base = OTHER; note = 2'-O-methyluridine-3'-phosphate
  modified_base 6: mod_base = OTHER; note = 2'-fluorouridine-3'-phosphate
  modified_base 7: mod_base = OTHER; note = 2'-O-methyluridine-3'-phosphate
  modified_base 8: mod_base = OTHER; note = 2'-fluorocytidine-3'-phosphate
  modified_base 9: mod_base = OTHER; note = 2'-O-methylcytidine-3'-phosphate
  modified_base 10: mod_base = OTHER; note = 2'-fluoroadenosine-3'-phosphate
  modified_base 11: mod_base = OTHER; note = 2'-O-methylguanosine-3'-phosphate
  modified_base 12: mod_base = OTHER; note = 2'-O-methylguanosine-3'-phosphate
  modified_base 13: mod_base = OTHER; note = 2'-O-methyladenosine-3'-phosphate
  modified_base 14: mod_base = OTHER; note = 2'-fluorouridine-3'-phosphate
  modified_base 15: mod_base = OTHER; note = 2'-O-methylguanosine-3'-phosphate
  modified_base 16: mod_base = OTHER; note = 2'-fluoroadenosine-3'-phosphate
  modified_base 17: mod_base = OTHER; note = 2'-O-methyladenosine-3'-phosphate
  modified_base 18: mod_base = OTHER; note = 2'-fluoroadenosine-3'-phosphate
  modified_base 19: mod_base = OTHER; note = 2'-O-methylguanosine-3'-phosphate
  modified_base 20: mod_base = OTHER; note = 2'-fluorouridine-3'-phosphate
  modified_base 21: mod_base = OTHER; note = 2'-O-methylcytidine-3'- phosphorothioate
  modified_base 22: mod_base = OTHER; note = 2'-O-methylcytidine-3'- phosphorothioate
  modified_base 23: mod_base = OTHER; note = 2'-O-methyladenosine-3'-phosphate
tatatttccaggatgaaagtcca

SEQ ID NO: 337 - RNA, 23 nt, synthetic construct
  source 1..23: mol_type = other RNA
  modified_base 1: mod_base = OTHER; note = 2'-O-methyluridine-3'-phosphorothioate
  modified_base 2: mod_base = OTHER; note = 2'-fluoroadenosine-3'-phosphorothioate
  modified_base 3: mod_base = OTHER; note = 2'-O-methyluridine-3'-phosphate
  modified_base 4: mod_base = OTHER; note = 2'-fluoroadenosine-3'-phosphate
  modified_base 5: mod_base = OTHER; note = 2'-O-methyluridine-3'-phosphate
  modified_base 6: mod_base = OTHER; note = 2'-fluorouridine-3'-phosphate
  modified_base 7: mod_base = OTHER; note = 2'-O-methyluridine-3'-phosphate
  modified_base 8: mod_base = OTHER; note = 2'-fluorocytidine-3'-phosphate
  modified_base 9: mod_base = OTHER; note = 2'-O-methylcytidine-3'-phosphate
  modified_base 10: mod_base = OTHER; note = 2'-fluoroadenosine-3'-phosphate
  modified_base 11: mod_base = OTHER; note = 2'-O-methylguanosine-3'-phosphate
  modified_base 12: mod_base = OTHER; note = 2'-O-methylguanosine-3'-phosphate
  modified_base 13: mod_base = OTHER; note = 2'-O-methyladenosine-3'-phosphate
  modified_base 14: mod_base = OTHER; note = 2'-fluorouridine-3'-phosphate
  modified_base 15: mod_base = OTHER; note = 2'-O-methylguanosine-3'-phosphate
  modified_base 16: mod_base = OTHER; note = 2'-fluoroadenosine-3'-phosphate
  modified_base 17: mod_base = OTHER; note = 2'-O-methyladenosine-3'-phosphate
  modified_base 18: mod_base = OTHER; note = 2'-fluoroadenosine-3'-phosphate
  modified_base 19: mod_base = OTHER; note = 2'-O-methylguanosine-3'-phosphate
  modified_base 20: mod_base = OTHER; note = 2'-fluorouridine-3'-phosphate
  modified_base 21: mod_base = OTHER; note = 2'-O-methylcytidine-3'- phosphorothioate
  modified_base 22: mod_base = OTHER; note = 2'-O-methylcytidine-3'- phosphorothioate
  modified_base 23: mod_base = OTHER; note = 2'-O-methyladenosine-3'-phosphate
tatatttccaggatgaaagtcca

SEQ ID NO: 338 - RNA, 23 nt, synthetic construct
  source 1..23: mol_type = other RNA
  modified_base 1: mod_base = OTHER; note = 2'-O-methyluridine-3'-phosphorothioate
  modified_base 2: mod_base = OTHER; note = 2'-fluoroadenosine-3'-phosphorothioate
  modified_base 3: mod_base = OTHER; note = 2'-O-methyluridine-3'-phosphate
  modified_base 4: mod_base = OTHER; note = 2'-fluoroadenosine-3'-phosphate
  modified_base 5: mod_base = OTHER; note = 2'-O-methyluridine-3'-phosphate
  modified_base 6: mod_base = OTHER; note = 2'-fluorouridine-3'-phosphate
  modified_base 7: mod_base = OTHER; note = 2'-O-methyluridine-3'-phosphate
  modified_base 8: mod_base = OTHER; note = 2'-fluorocytidine-3'-phosphate
  modified_base 9: mod_base = OTHER; note = 2'-O-methylcytidine-3'-phosphate
  modified_base 10: mod_base = OTHER; note = 2'-fluoroadenosine-3'-phosphate
  modified_base 11: mod_base = OTHER; note = 2'-O-methylguanosine-3'-phosphate
  modified_base 12: mod_base = OTHER; note = 2'-O-methylguanosine-3'-phosphate
  modified_base 13: mod_base = OTHER; note = 2'-O-methyladenosine-3'-phosphate
  modified_base 14: mod_base = OTHER; note = 2'-fluorouridine-3'-phosphate
  modified_base 15: mod_base = OTHER; note = 2'-O-methylguanosine-3'-phosphate
  modified_base 16: mod_base = OTHER; note = 2'-fluoroadenosine-3'-phosphate
  modified_base 17: mod_base = OTHER; note = 2'-O-methyladenosine-3'-phosphate
  modified_base 18: mod_base = OTHER; note = 2'-fluoroadenosine-3'-phosphate
  modified_base 19: mod_base = OTHER; note = 2'-O-methylguanosine-3'-phosphate
  modified_base 20: mod_base = OTHER; note = 2'-fluorouridine-3'-phosphate
  modified_base 21: mod_base = OTHER; note = 2'-O-methylcytidine-3'- phosphorothioate
  modified_base 22: mod_base = OTHER; note = 2'-O-methylcytidine-3'- phosphorothioate
  modified_base 23: mod_base = OTHER; note = 2'-O-methyladenosine-3'-phosphate
tatatttccaggatgaaagtcca

SEQ ID NO: 339 - RNA, 23 nt, synthetic construct
  source 1..23: mol_type = other RNA
  modified_base 1: mod_base = OTHER; note = 2'-O-methyluridine-3'-phosphorothioate
  modified_base 2: mod_base = OTHER; note = 2'-fluoroadenosine-3'-phosphorothioate
  modified_base 3: mod_base = OTHER; note = 2'-O-methyluridine-3'-phosphate
  modified_base 4: mod_base = OTHER; note = 2'-fluoroadenosine-3'-phosphate
  modified_base 5: mod_base = OTHER; note = 2'-O-methyluridine-3'-phosphate
  modified_base 6: mod_base = OTHER; note = 2'-fluorouridine-3'-phosphate
  modified_base 7: mod_base = OTHER; note = 2'-O-methyluridine-3'-phosphate
  modified_base 8: mod_base = OTHER; note = 2'-fluorocytidine-3'-phosphate
  modified_base 9: mod_base = OTHER; note = 2'-O-methylcytidine-3'-phosphate
  modified_base 10: mod_base = OTHER; note = 2'-fluoroadenosine-3'-phosphate
  modified_base 11: mod_base = OTHER; note = 2'-O-methylguanosine-3'-phosphate
  modified_base 12: mod_base = OTHER; note = 2'-O-methylguanosine-3'-phosphate
  modified_base 13: mod_base = OTHER; note = 2'-O-methyladenosine-3'-phosphate
  modified_base 14: mod_base = OTHER; note = 2'-fluorouridine-3'-phosphate
  modified_base 15: mod_base = OTHER; note = 2'-O-methylguanosine-3'-phosphate
  modified_base 16: mod_base = OTHER; note = 2'-fluoroadenosine-3'-phosphate
  modified_base 17: mod_base = OTHER; note = 2'-O-methyladenosine-3'-phosphate
  modified_base 18: mod_base = OTHER; note = 2'-fluoroadenosine-3'-phosphate
  modified_base 19: mod_base = OTHER; note = 2'-O-methylguanosine-3'-phosphate
  modified_base 20: mod_base = OTHER; note = 2'-fluorouridine-3'-phosphate
  modified_base 21: mod_base = OTHER; note = 2'-O-methylcytidine-3'- phosphorothioate
  modified_base 22: mod_base = OTHER; note = 2'-O-methylcytidine-3'- phosphorothioate
  modified_base 23: mod_base = OTHER; note = 2'-O-methyladenosine-3'-phosphate
tatatttccaggatgaaagtcca

SEQ ID NO: 340 - RNA, 23 nt, synthetic construct
  source 1..23: mol_type = other RNA
  modified_base 1: mod_base = OTHER; note = 2'-O-methyluridine-3'-phosphorothioate
  modified_base 2: mod_base = OTHER; note = 2'-fluoroadenosine-3'-phosphorothioate
  modified_base 3: mod_base = OTHER; note = 2'-O-methyluridine-3'-phosphate
  modified_base 4: mod_base = OTHER; note = 2'-fluoroadenosine-3'-phosphate
  modified_base 5: mod_base = OTHER; note = 2'-O-methyluridine-3'-phosphate
  modified_base 6: mod_base = OTHER; note = 2'-fluorouridine-3'-phosphate
  modified_base 7: mod_base = OTHER; note = 2'-O-methyluridine-3'-phosphate
  modified_base 8: mod_base = OTHER; note = 2'-fluorocytidine-3'-phosphate
  modified_base 9: mod_base = OTHER; note = 2'-O-methylcytidine-3'-phosphate
  modified_base 10: mod_base = OTHER; note = 2'-fluoroadenosine-3'-phosphate
  modified_base 11: mod_base = OTHER; note = 2'-O-methylguanosine-3'-phosphate
  modified_base 12: mod_base = OTHER; note = 2'-O-methylguanosine-3'-phosphate
  modified_base 13: mod_base = OTHER; note = 2'-O-methyladenosine-3'-phosphate
  modified_base 14: mod_base = OTHER; note = 2'-fluorouridine-3'-phosphate
  modified_base 15: mod_base = OTHER; note = 2'-O-methylguanosine-3'-phosphate
  modified_base 16: mod_base = OTHER; note = 2'-fluoroadenosine-3'-phosphate
  modified_base 17: mod_base = OTHER; note = 2'-O-methyladenosine-3'-phosphate
  modified_base 18: mod_base = OTHER; note = 2'-fluoroadenosine-3'-phosphate
  modified_base 19: mod_base = OTHER; note = 2'-O-methylguanosine-3'-phosphate
  modified_base 20: mod_base = OTHER; note = 2'-fluorouridine-3'-phosphate
  modified_base 21: mod_base = OTHER; note = 2'-O-methylcytidine-3'- phosphorothioate
  modified_base 22: mod_base = OTHER; note = 2'-O-methylcytidine-3'- phosphorothioate
  modified_base 23: mod_base = OTHER; note = 2'-O-methyladenosine-3'-phosphate
tatatttccaggatgaaagtcca

SEQ ID NO: 341 - RNA, 23 nt, synthetic construct
  source 1..23: mol_type = other RNA
  modified_base 1: mod_base = OTHER; note = 2'-O-methyluridine-3'-phosphorothioate
  modified_base 2: mod_base = OTHER; note = 2'-fluoroadenosine-3'-phosphorothioate
  modified_base 3: mod_base = OTHER; note = 2'-O-methyluridine-3'-phosphate
  modified_base 4: mod_base = OTHER; note = 2'-fluoroadenosine-3'-phosphate
  modified_base 5: mod_base = OTHER; note = 2'-O-methyluridine-3'-phosphate
  modified_base 6: mod_base = OTHER; note = 2'-fluorouridine-3'-phosphate
  modified_base 7: mod_base = OTHER; note = 2'-O-methyluridine-3'-phosphate
  modified_base 8: mod_base = OTHER; note = 2'-fluorocytidine-3'-phosphate
  modified_base 9: mod_base = OTHER; note = 2'-O-methylcytidine-3'-phosphate
  modified_base 10: mod_base = OTHER; note = 2'-fluoroadenosine-3'-phosphate
  modified_base 11: mod_base = OTHER; note = 2'-O-methylguanosine-3'-phosphate
  modified_base 12: mod_base = OTHER; note = 2'-O-methylguanosine-3'-phosphate
  modified_base 13: mod_base = OTHER; note = 2'-O-methyladenosine-3'-phosphate
  modified_base 14: mod_base = OTHER; note = 2'-fluorouridine-3'-phosphate
  modified_base 15: mod_base = OTHER; note = 2'-O-methylguanosine-3'-phosphate
  modified_base 16: mod_base = OTHER; note = 2'-fluoroadenosine-3'-phosphate
  modified_base 17: mod_base = OTHER; note = 2'-O-methyladenosine-3'-phosphate
  modified_base 18: mod_base = OTHER; note = 2'-fluoroadenosine-3'-phosphate
  modified_base 19: mod_base = OTHER; note = 2'-O-methylguanosine-3'-phosphate
  modified_base 20: mod_base = OTHER; note = 2'-fluorouridine-3'-phosphate
  modified_base 21: mod_base = OTHER; note = 2'-O-methylcytidine-3'- phosphorothioate
  modified_base 22: mod_base = OTHER; note = 2'-O-methylcytidine-3'- phosphorothioate
  modified_base 23: mod_base = OTHER; note = 2'-O-methyladenosine-3'-phosphate
tatatttccaggatgaaagtcca

SEQ ID NO: 342 - RNA, 23 nt, synthetic construct
  source 1..23: mol_type = other RNA
  modified_base 1: mod_base = OTHER; note = 2'-O-methyluridine-3'-phosphorothioate
  modified_base 2: mod_base = OTHER; note = 2'-fluoroadenosine-3'-phosphorothioate
  modified_base 3: mod_base = OTHER; note = 2'-O-methyluridine-3'-phosphate
  modified_base 4: mod_base = OTHER; note = 2'-fluoroadenosine-3'-phosphate
  modified_base 5: mod_base = OTHER; note = 2'-O-methyluridine-3'-phosphate
  modified_base 6: mod_base = OTHER; note = 2'-fluorouridine-3'-phosphate
  modified_base 7: mod_base = OTHER; note = 2'-O-methyluridine-3'-phosphate
  modified_base 8: mod_base = OTHER; note = 2'-fluorocytidine-3'-phosphate
  modified_base 9: mod_base = OTHER; note = 2'-O-methylcytidine-3'-phosphate
  modified_base 10: mod_base = OTHER; note = 2'-fluoroadenosine-3'-phosphate
  modified_base 11: mod_base = OTHER; note = 2'-O-methylguanosine-3'-phosphate
  modified_base 12: mod_base = OTHER; note = 2'-O-methylguanosine-3'-phosphate
  modified_base 13: mod_base = OTHER; note = 2'-O-methyladenosine-3'-phosphate
  modified_base 14: mod_base = OTHER; note = 2'-fluorouridine-3'-phosphate
  modified_base 15: mod_base = OTHER; note = 2'-O-methylguanosine-3'-phosphate
  modified_base 16: mod_base = OTHER; note = 2'-fluoroadenosine-3'-phosphate
  modified_base 17: mod_base = OTHER; note = 2'-O-methyladenosine-3'-phosphate
  modified_base 18: mod_base = OTHER; note = 2'-fluoroadenosine-3'-phosphate
  modified_base 19: mod_base = OTHER; note = 2'-O-methylguanosine-3'-phosphate
  modified_base 20: mod_base = OTHER; note = 2'-fluorouridine-3'-phosphate
  modified_base 21: mod_base = OTHER; note = 2'-O-methylcytidine-3'- phosphorothioate
  modified_base 22: mod_base = OTHER; note = 2'-O-methylcytidine-3'- phosphorothioate
  modified_base 23: mod_base = OTHER; note = 2'-O-methyladenosine-3'-phosphate
tatatttccaggatgaaagtcca

SEQ ID NO: 343 - RNA, 23 nt, synthetic construct
  source 1..23: mol_type = other RNA
  modified_base 1: mod_base = OTHER; note = 2'-O-methyluridine-3'-phosphorothioate
  modified_base 2: mod_base = OTHER; note = 2'-fluoroadenosine-3'-phosphorothioate
  modified_base 3: mod_base = OTHER; note = 2'-O-methyluridine-3'-phosphate
  modified_base 4: mod_base = OTHER; note = 2'-fluoroadenosine-3'-phosphate
  modified_base 5: mod_base = OTHER; note = 2'-O-methyluridine-3'-phosphate
  modified_base 6: mod_base = OTHER; note = 2'-fluorouridine-3'-phosphate
  modified_base 7: mod_base = OTHER; note = 2'-O-methyluridine-3'-phosphate
  modified_base 8: mod_base = OTHER; note = 2'-fluorocytidine-3'-phosphate
  modified_base 9: mod_base = OTHER; note = 2'-O-methylcytidine-3'-phosphate
  modified_base 10: mod_base = OTHER; note = 2'-fluoroadenosine-3'-phosphate
  modified_base 11: mod_base = OTHER; note = 2'-O-methylguanosine-3'-phosphate
  modified_base 12: mod_base = OTHER; note = 2'-O-methylguanosine-3'-phosphate
  modified_base 13: mod_base = OTHER; note = 2'-O-methyladenosine-3'-phosphate
  modified_base 14: mod_base = OTHER; note = 2'-fluorouridine-3'-phosphate
  modified_base 15: mod_base = OTHER; note = 2'-O-methylguanosine-3'-phosphate
  modified_base 16: mod_base = OTHER; note = 2'-fluoroadenosine-3'-phosphate
  modified_base 17: mod_base = OTHER; note = 2'-O-methyladenosine-3'-phosphate
  modified_base 18: mod_base = OTHER; note = 2'-fluoroadenosine-3'-phosphate
  modified_base 19: mod_base = OTHER; note = 2'-O-methylguanosine-3'-phosphate
  modified_base 20: mod_base = OTHER; note = 2'-fluorouridine-3'-phosphate
  modified_base 21: mod_base = OTHER; note = 2'-O-methylcytidine-3'- phosphorothioate
  modified_base 22: mod_base = OTHER; note = 2'-O-methylcytidine-3'- phosphorothioate
  modified_base 23: mod_base = OTHER; note = 2'-O-methyladenosine-3'-phosphate
tatatttccaggatgaaagtcca

SEQ ID NO: 344 - RNA, 23 nt, synthetic construct
  source 1..23: mol_type = other RNA
  modified_base 1: mod_base = OTHER; note = 2'-O-methyluridine-3'-phosphorothioate
  modified_base 2: mod_base = OTHER; note = 2'-fluoroadenosine-3'-phosphorothioate
  modified_base 3: mod_base = OTHER; note = 2'-O-methyluridine-3'-phosphate
  modified_base 4: mod_base = OTHER; note = 2'-fluoroadenosine-3'-phosphate
  modified_base 5: mod_base = OTHER; note = 2'-O-methyluridine-3'-phosphate
  modified_base 6: mod_base = OTHER; note = 2'-fluorouridine-3'-phosphate
  modified_base 7: mod_base = OTHER; note = 2'-O-methyluridine-3'-phosphate
  modified_base 8: mod_base = OTHER; note = 2'-fluorocytidine-3'-phosphate
  modified_base 9: mod_base = OTHER; note = 2'-O-methylcytidine-3'-phosphate
  modified_base 10: mod_base = OTHER; note = 2'-fluoroadenosine-3'-phosphate
  modified_base 11: mod_base = OTHER; note = 2'-O-methylguanosine-3'-phosphate
  modified_base 12: mod_base = OTHER; note = 2'-O-methylguanosine-3'-phosphate
  modified_base 13: mod_base = OTHER; note = 2'-O-methyladenosine-3'-phosphate
  modified_base 14: mod_base = OTHER; note = 2'-fluorouridine-3'-phosphate
  modified_base 15: mod_base = OTHER; note = 2'-O-methylguanosine-3'-phosphate
  modified_base 16: mod_base = OTHER; note = 2'-fluoroadenosine-3'-phosphate
  modified_base 17: mod_base = OTHER; note = 2'-O-methyladenosine-3'-phosphate
  modified_base 18: mod_base = OTHER; note = 2'-fluoroadenosine-3'-phosphate
  modified_base 19: mod_base = OTHER; note = 2'-O-methylguanosine-3'-phosphate
  modified_base 20: mod_base = OTHER; note = 2'-fluorouridine-3'-phosphate
  modified_base 21: mod_base = OTHER; note = 2'-O-methylcytidine-3'- phosphorothioate
  modified_base 22: mod_base = OTHER; note = 2'-O-methylcytidine-3'- phosphorothioate
  modified_base 23: mod_base = OTHER; note = 2'-O-methyladenosine-3'-phosphate
tatatttccaggatgaaagtcca

SEQ ID NO: 345 - RNA, 23 nt, synthetic construct
  source 1..23: mol_type = other RNA
  modified_base 1: mod_base = OTHER; note = 2'-O-methyluridine-3'-phosphorothioate
  modified_base 2: mod_base = OTHER; note = 2'-fluoroadenosine-3'-phosphorothioate
  modified_base 3: mod_base = OTHER; note = 2'-O-methyluridine-3'-phosphate
  modified_base 4: mod_base = OTHER; note = 2'-fluoroadenosine-3'-phosphate
  modified_base 5: mod_base = OTHER; note = 2'-O-methyluridine-3'-phosphate
  modified_base 6: mod_base = OTHER; note = 2'-fluorouridine-3'-phosphate
  modified_base 7: mod_base = OTHER; note = 2'-O-methyluridine-3'-phosphate
  modified_base 8: mod_base = OTHER; note = 2'-fluorocytidine-3'-phosphate
  modified_base 9: mod_base = OTHER; note = 2'-O-methylcytidine-3'-phosphate
  modified_base 10: mod_base = OTHER; note = 2'-fluoroadenosine-3'-phosphate
  modified_base 11: mod_base = OTHER; note = 2'-O-methylguanosine-3'-phosphate
  modified_base 12: mod_base = OTHER; note = 2'-O-methylguanosine-3'-phosphate
  modified_base 13: mod_base = OTHER; note = 2'-O-methyladenosine-3'-phosphate
  modified_base 14: mod_base = OTHER; note = 2'-fluorouridine-3'-phosphate
  modified_base 15: mod_base = OTHER; note = 2'-O-methylguanosine-3'-phosphate
  modified_base 16: mod_base = OTHER; note = 2'-fluoroadenosine-3'-phosphate
  modified_base 17: mod_base = OTHER; note = 2'-O-methyladenosine-3'-phosphate
  modified_base 18: mod_base = OTHER; note = 2'-fluoroadenosine-3'-phosphate
  modified_base 19: mod_base = OTHER; note = 2'-O-methylguanosine-3'-phosphate
  modified_base 20: mod_base = OTHER; note = 2'-fluorouridine-3'-phosphate
  modified_base 21: mod_base = OTHER; note = 2'-O-methylcytidine-3'- phosphorothioate
  modified_base 22: mod_base = OTHER; note = 2'-O-methylcytidine-3'- phosphorothioate
  modified_base 23: mod_base = OTHER; note = 2'-O-methyladenosine-3'-phosphate
tatatttccaggatgaaagtcca

SEQ ID NO: 346 - RNA, 23 nt, synthetic construct
  source 1..23: mol_type = other RNA
  modified_base 1: mod_base = OTHER; note = 2'-O-methyluridine-3'-phosphorothioate
  modified_base 2: mod_base = OTHER; note = 2'-fluoroadenosine-3'-phosphorothioate
  modified_base 3: mod_base = OTHER; note = 2'-O-methyluridine-3'-phosphate
  modified_base 4: mod_base = OTHER; note = 2'-fluoroadenosine-3'-phosphate
  modified_base 5: mod_base = OTHER; note = 2'-O-methyluridine-3'-phosphate
  modified_base 6: mod_base = OTHER; note = 2'-fluorouridine-3'-phosphate
  modified_base 7: mod_base = OTHER; note = 2'-O-methyluridine-3'-phosphate
  modified_base 8: mod_base = OTHER; note = 2'-fluorocytidine-3'-phosphate
  modified_base 9: mod_base = OTHER; note = 2'-O-methylcytidine-3'-phosphate
  modified_base 10: mod_base = OTHER; note = 2'-fluoroadenosine-3'-phosphate
  modified_base 11: mod_base = OTHER; note = 2'-O-methylguanosine-3'-phosphate
  modified_base 12: mod_base = OTHER; note = 2'-O-methylguanosine-3'-phosphate
  modified_base 13: mod_base = OTHER; note = 2'-O-methyladenosine-3'-phosphate
  modified_base 14: mod_base = OTHER; note = 2'-fluorouridine-3'-phosphate
  modified_base 15: mod_base = OTHER; note = 2'-O-methylguanosine-3'-phosphate
  modified_base 16: mod_base = OTHER; note = 2'-fluoroadenosine-3'-phosphate
  modified_base 17: mod_base = OTHER; note = 2'-O-methyladenosine-3'-phosphate
  modified_base 18: mod_base = OTHER; note = 2'-fluoroadenosine-3'-phosphate
  modified_base 19: mod_base = OTHER; note = 2'-O-methylguanosine-3'-phosphate
  modified_base 20: mod_base = OTHER; note = 2'-fluorouridine-3'-phosphate
  modified_base 21: mod_base = OTHER; note = 2'-O-methylcytidine-3'- phosphorothioate
  modified_base 22: mod_base = OTHER; note = 2'-O-methylcytidine-3'- phosphorothioate
  modified_base 23: mod_base = OTHER; note = 2'-O-methyladenosine-3'-phosphate
tatatttccaggatgaaagtcca

SEQ ID NO: 347 - DNA, 23 bp, synthetic construct
  source 1..23: mol_type = other DNA
  modified_base 1: mod_base = OTHER; note = 2'-O-methyluridine-3'-phosphorothioate
  modified_base 2: mod_base = OTHER; note = 2'-deoxyadenosine-3'-phosphorothioate
  modified_base 3: mod_base = OTHER; note = 2'-O-methyluridine-3'-phosphate
  modified_base 4: mod_base = OTHER; note = 2'-O-methyladenosine-3'-phosphate
  modified_base 5: mod_base = OTHER; note = 2'-O-methyluridine-3'-phosphate
  modified_base 6: mod_base = OTHER; note = 2'-O-methyluridine-3'-phosphate
  modified_base 7: mod_base = OTHER; note = 2'-O-methyluridine-3'-phosphate
  modified_base 8: mod_base = OTHER; note = 2'-O-methylcytidine-3'-phosphate
  modified_base 9: mod_base = OTHER; note = 2'-O-methylcytidine-3'-phosphate
  modified_base 11: mod_base = OTHER; note = 2'-O-methylguanosine-3'-phosphate
  modified_base 12: mod_base = OTHER; note = 2'-O-methylguanosine-3'-phosphate
  modified_base 13: mod_base = OTHER; note = 2'-O-methyladenosine-3'-phosphate
  modified_base 15: mod_base = OTHER; note = 2'-O-methylguanosine-3'-phosphate
  modified_base 16: mod_base = OTHER; note = 2'-O-methyladenosine-3'-phosphate
  modified_base 17: mod_base = OTHER; note = 2'-O-methyladenosine-3'-phosphate
  modified_base 18: mod_base = OTHER; note = 2'-O-methyladenosine-3'-phosphate
  modified_base 19: mod_base = OTHER; note = 2'-O-methylguanosine-3'-phosphate
  modified_base 20: mod_base = OTHER; note = 2'-O-methyluridine-3'-phosphate
  modified_base 21: mod_base = OTHER; note = 2'-O-methylcytidine-3'- phosphorothioate
  modified_base 22: mod_base = OTHER; note = 2'-O-methylcytidine-3'- phosphorothioate
  modified_base 23: mod_base = OTHER; note = 2'-O-methyladenosine-3'-phosphate
  misc_feature 1: note = RNA
  misc_feature 2: note = DNA
  misc_feature 3..9: note = RNA
  misc_feature 10: note = DNA
  misc_feature 11..13: note = RNA
  misc_feature 14: note = DNA
  misc_feature 15..23: note = RNA
tatatttccaggatgaaagtcca

SEQ ID NO: 348 - DNA, 23 bp, synthetic construct
  source 1..23: mol_type = other DNA
  modified_base 1: mod_base = OTHER; note = 2'-O-methyluridine-3'-phosphorothioate
  modified_base 2: mod_base = OTHER; note = 2'-deoxyadenosine-3'-phosphorothioate
  modified_base 3: mod_base = OTHER; note = 2'-O-methyluridine-3'-phosphate
  modified_base 4: mod_base = OTHER; note = 2'-O-methyladenosine-3'-phosphate
  modified_base 5: mod_base = OTHER; note = 2'-O-methyluridine-3'-phosphate
  modified_base 6: mod_base = OTHER; note = 2'-O-methyluridine-3'-phosphate
  modified_base 7: mod_base = OTHER; note = 2'-O-methyluridine-3'-phosphate
  modified_base 8: mod_base = OTHER; note = 2'-O-methylcytidine-3'-phosphate
  modified_base 9: mod_base = OTHER; note = 2'-O-methylcytidine-3'-phosphate
  modified_base 10: mod_base = OTHER; note = 2'-O-methyladenosine-3'-phosphate
  modified_base 11: mod_base = OTHER; note = 2'-O-methylguanosine-3'-phosphate
  modified_base 12: mod_base = OTHER; note = 2'-O-methylguanosine-3'-phosphate
  modified_base 13: mod_base = OTHER; note = 2'-O-methyladenosine-3'-phosphate
  modified_base 15: mod_base = OTHER; note = 2'-O-methylguanosine-3'-phosphate
  modified_base 16: mod_base = OTHER; note = 2'-O-methyladenosine-3'-phosphate
  modified_base 17: mod_base = OTHER; note = 2'-O-methyladenosine-3'-phosphate
  modified_base 18: mod_base = OTHER; note = 2'-O-methyladenosine-3'-phosphate
  modified_base 19: mod_base = OTHER; note = 2'-O-methylguanosine-3'-phosphate
  modified_base 20: mod_base = OTHER; note = 2'-O-methyluridine-3'-phosphate
  modified_base 21: mod_base = OTHER; note = 2'-O-methylcytidine-3'- phosphorothioate
  modified_base 22: mod_base = OTHER; note = 2'-O-methylcytidine-3'- phosphorothioate
  modified_base 23: mod_base = OTHER; note = 2'-O-methyladenosine-3'-phosphate
  misc_feature 1: note = RNA
  misc_feature 2: note = DNA
  misc_feature 3..13: note = RNA
  misc_feature 14: note = DNA
  misc_feature 15..23: note = RNA
tatatttccaggatgaaagtcca

SEQ ID NO: 349 - DNA, 23 bp, synthetic construct
  source 1..23: mol_type = other DNA
  modified_base 1: mod_base = OTHER; note = 2'-O-methyluridine-3'-phosphorothioate
  modified_base 2: mod_base = OTHER; note = adenosine-3'-phosphorothioate
  modified_base 3: mod_base = OTHER; note = 2'-O-methyluridine-3'-phosphate
  modified_base 4: mod_base = OTHER; note = 2'-O-methyladenosine-3'-phosphate
  modified_base 5: mod_base = OTHER; note = 2'-O-methyluridine-3'-phosphate
  modified_base 6: mod_base = OTHER; note = 2'-O-methyluridine-3'-phosphate
  modified_base 7: mod_base = OTHER; note = 2'-O-methyluridine-3'-phosphate
  modified_base 8: mod_base = OTHER; note = 2'-O-methylcytidine-3'-phosphate
  modified_base 9: mod_base = OTHER; note = 2'-O-methylcytidine-3'-phosphate
  modified_base 10: mod_base = OTHER; note = 2'-O-methyladenosine-3'-phosphate
  modified_base 11: mod_base = OTHER; note = 2'-O-methylguanosine-3'-phosphate
  modified_base 12: mod_base = OTHER; note = 2'-O-methylguanosine-3'-phosphate
  modified_base 13: mod_base = OTHER; note = 2'-O-methyladenosine-3'-phosphate
  modified_base 15: mod_base = OTHER; note = 2'-O-methylguanosine-3'-phosphate
  modified_base 16: mod_base = OTHER; note = 2'-O-methyladenosine-3'-phosphate
  modified_base 17: mod_base = OTHER; note = 2'-O-methyladenosine-3'-phosphate
  modified_base 18: mod_base = OTHER; note = 2'-O-methyladenosine-3'-phosphate
  modified_base 19: mod_base = OTHER; note = 2'-O-methylguanosine-3'-phosphate
  modified_base 20: mod_base = OTHER; note = 2'-O-methyluridine-3'-phosphate
  modified_base 21: mod_base = OTHER; note = 2'-O-methylcytidine-3'- phosphorothioate
  modified_base 22: mod_base = OTHER; note = 2'-O-methylcytidine-3'- phosphorothioate
  modified_base 23: mod_base = OTHER; note = 2'-O-methyladenosine-3'-phosphate
  misc_feature 1..13: note = RNA
  misc_feature 14: note = DNA
  misc_feature 15..23: note = RNA
tatatttccaggatgaaagtcca

SEQ ID NO: 350 - DNA, 23 bp, synthetic construct
  source 1..23: mol_type = other DNA
  modified_base 1: mod_base = OTHER; note = 2'-O-methyluridine-3'-phosphorothioate
  modified_base 2: mod_base = OTHER; note = 2'-deoxyadenosine-3'-phosphorothioate
  modified_base 3: mod_base = OTHER; note = 2'-O-methyluridine-3'-phosphate
  modified_base 4: mod_base = OTHER; note = 2'-O-methyladenosine-3'-phosphate
  modified_base 5: mod_base = OTHER; note = 2'-O-methyluridine-3'-phosphate
  modified_base 7: mod_base = OTHER; note = 2'-O-methyluridine-3'-phosphate
  modified_base 8: mod_base = OTHER; note = 2'-O-methylcytidine-3'-phosphate
  modified_base 9: mod_base = OTHER; note = 2'-O-methylcytidine-3'-phosphate
  modified_base 10: mod_base = OTHER; note = 2'-O-methyladenosine-3'-phosphate
  modified_base 11: mod_base = OTHER; note = 2'-O-methylguanosine-3'-phosphate
  modified_base 12: mod_base = OTHER; note = 2'-O-methylguanosine-3'-phosphate
  modified_base 13: mod_base = OTHER; note = 2'-O-methyladenosine-3'-phosphate
  modified_base 15: mod_base = OTHER; note = 2'-O-methylguanosine-3'-phosphate
  modified_base 16: mod_base = OTHER; note = 2'-O-methyladenosine-3'-phosphate
  modified_base 17: mod_base = OTHER; note = 2'-O-methyladenosine-3'-phosphate
  modified_base 18: mod_base = OTHER; note = 2'-O-methyladenosine-3'-phosphate
  modified_base 19: mod_base = OTHER; note = 2'-O-methylguanosine-3'-phosphate
  modified_base 20: mod_base = OTHER; note = 2'-O-methyluridine-3'-phosphate
  modified_base 21: mod_base = OTHER; note = 2'-O-methylcytidine-3'- phosphorothioate
  modified_base 22: mod_base = OTHER; note = 2'-O-methylcytidine-3'- phosphorothioate
  modified_base 23: mod_base = OTHER; note = 2'-O-methyladenosine-3'-phosphate
  misc_feature 1: note = RNA
  misc_feature 2: note = DNA
  misc_feature 3..5: note = RNA
  misc_feature 6: note = DNA
  misc_feature 7..13: note = RNA
  misc_feature 14: note = DNA
  misc_feature 15..23: note = RNA
tatatttccaggatgaaagtcca

SEQ ID NO: 351 - DNA, 23 bp, synthetic construct
  source 1..23: mol_type = other DNA
  modified_base 1: mod_base = OTHER; note = 2'-O-methyluridine-3'-phosphorothioate
  modified_base 2: mod_base = OTHER; note = adenosine-3'-phosphorothioate
  modified_base 3: mod_base = OTHER; note = 2'-O-methyluridine-3'-phosphate
  modified_base 4: mod_base = OTHER; note = 2'-O-methyladenosine-3'-phosphate
  modified_base 5: mod_base = OTHER; note = 2'-O-methyluridine-3'-phosphate
  modified_base 7: mod_base = OTHER; note = 2'-O-methyluridine-3'-phosphate
  modified_base 8: mod_base = OTHER; note = 2'-O-methylcytidine-3'-phosphate
  modified_base 9: mod_base = OTHER; note = 2'-O-methylcytidine-3'-phosphate
  modified_base 10: mod_base = OTHER; note = 2'-O-methyladenosine-3'-phosphate
  modified_base 11: mod_base = OTHER; note = 2'-O-methylguanosine-3'-phosphate
  modified_base 12: mod_base = OTHER; note = 2'-O-methylguanosine-3'-phosphate
  modified_base 13: mod_base = OTHER; note = 2'-O-methyladenosine-3'-phosphate
  modified_base 15: mod_base = OTHER; note = 2'-O-methylguanosine-3'-phosphate
  modified_base 16: mod_base = OTHER; note = 2'-O-methyladenosine-3'-phosphate
  modified_base 17: mod_base = OTHER; note = 2'-O-methyladenosine-3'-phosphate
  modified_base 18: mod_base = OTHER; note = 2'-O-methyladenosine-3'-phosphate
  modified_base 19: mod_base = OTHER; note = 2'-O-methylguanosine-3'-phosphate
  modified_base 20: mod_base = OTHER; note = 2'-O-methyluridine-3'-phosphate
  modified_base 21: mod_base = OTHER; note = 2'-O-methylcytidine-3'- phosphorothioate
  modified_base 22: mod_base = OTHER; note = 2'-O-methylcytidine-3'- phosphorothioate
  modified_base 23: mod_base = OTHER; note = 2'-O-methyladenosine-3'-phosphate
  misc_feature 1..5: note = RNA
  misc_feature 6: note = DNA
  misc_feature 7..13: note = RNA
  misc_feature 14: note = DNA
  misc_feature 15..23: note = RNA
tatatttccaggatgaaagtcca

SEQ ID NO: 352 - DNA, 23 bp, synthetic construct
  source 1..23: mol_type = other DNA
  modified_base 1: mod_base = OTHER; note = 2'-O-methyluridine-3'-phosphorothioate
  modified_base 2: mod_base = OTHER; note = 2'-deoxyadenosine-3'-phosphorothioate
  modified_base 3: mod_base = OTHER; note = 2'-O-methyluridine-3'-phosphate
  modified_base 4: mod_base = OTHER; note = 2'-O-methyladenosine-3'-phosphate
  modified_base 5: mod_base = OTHER; note = 2'-O-methyluridine-3'-phosphate
  modified_base 6: mod_base = OTHER; note = 2'-O-methyluridine-3'-phosphate
  modified_base 7: mod_base = OTHER; note = 2'-O-methyluridine-3'-phosphate
  modified_base 8: mod_base = OTHER; note = 2'-O-methylcytidine-3'-phosphate
  modified_base 9: mod_base = OTHER; note = 2'-O-methylcytidine-3'-phosphate
  modified_base 10: mod_base = OTHER; note = 2'-O-methyladenosine-3'-phosphate
  modified_base 11: mod_base = OTHER; note = 2'-O-methylguanosine-3'-phosphate
  modified_base 12: mod_base = OTHER; note = 2'-O-methylguanosine-3'-phosphate
  modified_base 13: mod_base = OTHER; note = 2'-O-methyladenosine-3'-phosphate
  modified_base 15: mod_base = OTHER; note = 2'-O-methylguanosine-3'-phosphate
  modified_base 17: mod_base = OTHER; note = 2'-O-methyladenosine-3'-phosphate
  modified_base 18: mod_base = OTHER; note = 2'-O-methyladenosine-3'-phosphate
  modified_base 19: mod_base = OTHER; note = 2'-O-methylguanosine-3'-phosphate
  modified_base 20: mod_base = OTHER; note = 2'-O-methyluridine-3'-phosphate
  modified_base 21: mod_base = OTHER; note = 2'-O-methylcytidine-3'- phosphorothioate
  modified_base 22: mod_base = OTHER; note = 2'-O-methylcytidine-3'- phosphorothioate
  modified_base 23: mod_base = OTHER; note = 2'-O-methyladenosine-3'-phosphate
  misc_feature 1: note = RNA
  misc_feature 2: note = DNA
  misc_feature 3..13: note = RNA
  misc_feature 14: note = DNA
  misc_feature 15: note = RNA
  misc_feature 16: note = DNA
  misc_feature 17..23: note = RNA
tatatttccaggatgaaagtcca

SEQ ID NO: 353 - DNA, 23 bp, synthetic construct
  source 1..23: mol_type = other DNA
  modified_base 1: mod_base = OTHER; note = 2'-O-methyluridine-3'-phosphorothioate
  modified_base 2: mod_base = OTHER; note = 2'-deoxyadenosine-3'-phosphorothioate
  modified_base 3: mod_base = OTHER; note = 2'-O-methyluridine-3'-phosphate
  modified_base 4: mod_base = OTHER; note = 2'-O-methyladenosine-3'-phosphate
  modified_base 5: mod_base = OTHER; note = 2'-O-methyluridine-3'-phosphate
  modified_base 7: mod_base = OTHER; note = 2'-O-methyluridine-3'-phosphate
  modified_base 8: mod_base = OTHER; note = 2'-O-methylcytidine-3'-phosphate
  modified_base 9: mod_base = OTHER; note = 2'-O-methylcytidine-3'-phosphate
  modified_base 10: mod_base = OTHER; note = 2'-O-methyladenosine-3'-phosphate
  modified_base 11: mod_base = OTHER; note = 2'-O-methylguanosine-3'-phosphate
  modified_base 12: mod_base = OTHER; note = 2'-O-methylguanosine-3'-phosphate
  modified_base 13: mod_base = OTHER; note = 2'-O-methyladenosine-3'-phosphate
  modified_base 15: mod_base = OTHER; note = 2'-O-methylguanosine-3'-phosphate
  modified_base 17: mod_base = OTHER; note = 2'-O-methyladenosine-3'-phosphate
  modified_base 18: mod_base = OTHER; note = 2'-O-methyladenosine-3'-phosphate
  modified_base 19: mod_base = OTHER; note = 2'-O-methylguanosine-3'-phosphate
  modified_base 20: mod_base = OTHER; note = 2'-O-methyluridine-3'-phosphate
  modified_base 21: mod_base = OTHER; note = 2'-O-methylcytidine-3'- phosphorothioate
  modified_base 22: mod_base = OTHER; note = 2'-O-methylcytidine-3'- phosphorothioate
  modified_base 23: mod_base = OTHER; note = 2'-O-methyladenosine-3'-phosphate
  misc_feature 1: note = RNA
  misc_feature 2: note = DNA
  misc_feature 3..5: note = RNA
  misc_feature 6: note = DNA
  misc_feature 7..13: note = RNA
  misc_feature 14: note = DNA
  misc_feature 15: note = RNA
  misc_feature 16: note = DNA
  misc_feature 17..23: note = RNA
tatatttccaggatgaaagtcca

SEQ ID NO: 354 - DNA, 23 bp, synthetic construct
  source 1..23: mol_type = other DNA
  modified_base 1: mod_base = OTHER; note = 2'-O-methyluridine-3'-phosphorothioate
  modified_base 2: mod_base = OTHER; note = 2'-deoxyadenosine-3'-phosphorothioate
  modified_base 3: mod_base = OTHER; note = 2'-O-methyluridine-3'-phosphate
  modified_base 4: mod_base = OTHER; note = 2'-O-methyladenosine-3'-phosphate
  modified_base 5: mod_base = OTHER; note = 2'-O-methyluridine-3'-phosphate
  modified_base 6: mod_base = OTHER; note = 2'-O-methyluridine-3'-phosphate
  modified_base 7: mod_base = OTHER; note = 2'-O-methyluridine-3'-phosphate
  modified_base 8: mod_base = OTHER; note = 2'-O-methylcytidine-3'-phosphate
  modified_base 9: mod_base = OTHER; note = 2'-O-methylcytidine-3'-phosphate
  modified_base 11: mod_base = OTHER; note = 2'-O-methylguanosine-3'-phosphate
  modified_base 12: mod_base = OTHER; note = 2'-O-methylguanosine-3'-phosphate
  modified_base 13: mod_base = OTHER; note = 2'-O-methyladenosine-3'-phosphate
  modified_base 15: mod_base = OTHER; note = 2'-O-methylguanosine-3'-phosphate
  modified_base 16: mod_base = OTHER; note = 2'-O-methyladenosine-3'-phosphate
  modified_base 17: mod_base = OTHER; note = 2'-O-methyladenosine-3'-phosphate
  modified_base 18: mod_base = OTHER; note = 2'-O-methyladenosine-3'-phosphate
  modified_base 19: mod_base = OTHER; note = 2'-O-methylguanosine-3'-phosphate
  modified_base 20: mod_base = OTHER; note = 2'-O-methyluridine-3'-phosphate
  modified_base 21: mod_base = OTHER; note = 2'-O-methylcytidine-3'- phosphorothioate
  modified_base 22: mod_base = OTHER; note = 2'-O-methylcytidine-3'- phosphorothioate
  modified_base 23: mod_base = OTHER; note = 2'-O-methyladenosine-3'-phosphate
  misc_feature 1: note = RNA
  misc_feature 2: note = DNA
  misc_feature 3..9: note = RNA
  misc_feature 10: note = DNA
  misc_feature 11..13: note = RNA
  misc_feature 14: note = DNA
  misc_feature 15..23: note = RNA
tatatttccaggatgaaagtcca

SEQ ID NO: 355 - RNA, 23 nt, synthetic construct
  source 1..23: mol_type = other RNA
  modified_base 1: mod_base = OTHER; note = 2'-O-methyluridine-3'-phosphorothioate
  modified_base 2: mod_base = OTHER; note = 2'-fluoroguanosine-3'-phosphorothioate
  modified_base 3: mod_base = OTHER; note = 2'-O-methyladenosine-3'-phosphate
  modified_base 4: mod_base = OTHER; note = 2'-O-methylcytidine-3'-phosphate
  modified_base 5: mod_base = OTHER; note = 2'-O-methyladenosine-3'-phosphate
  modified_base 6: mod_base = OTHER; note = 2'-fluorouridine-3'-phosphate
  modified_base 7: mod_base = OTHER; note = 2'-O-methylcytidine-3'-phosphate
  modified_base 8: mod_base = OTHER; note = 2'-fluorouridine-3'-phosphate
  modified_base 9: mod_base = OTHER; note = 2'-fluorouridine-3'-phosphate
  modified_base 10: mod_base = OTHER; note = 2'-O-methylguanosine-3'-phosphate
  modified_base 11: mod_base = OTHER; note = 2'-O-methyladenosine-3'-phosphate
  modified_base 12: mod_base = OTHER; note = 2'-O-methyladenosine-3'-phosphate
  modified_base 13: mod_base = OTHER; note = 2'-O-methylcytidine-3'-phosphate
  modified_base 14: mod_base = OTHER; note = 2'-fluoroadenosine-3'-phosphate
  modified_base 15: mod_base = OTHER; note = 2'-O-methylcytidine-3'-phosphate
  modified_base 16: mod_base = OTHER; note = 2'-fluorocytidine-3'-phosphate
  modified_base 17: mod_base = OTHER; note = 2'-O-methyluridine-3'-phosphate
  modified_base 18: mod_base = OTHER; note = 2'-O-methyluridine-3'-phosphate
  modified_base 19: mod_base = OTHER; note = 2'-O-methyluridine-3'-phosphate
  modified_base 20: mod_base = OTHER; note = 2'-O-methylcytidine-3'-phosphate
  modified_base 21: mod_base = OTHER; note = 2'-O-methyluridine-3'-phosphorothioate
  modified_base 22: mod_base = OTHER; note = 2'-O-methylcytidine-3'- phosphorothioate
  modified_base 23: mod_base = OTHER; note = 2'-O-methylcytidine-3'-phosphate
tgacatcttgaacacctttctcc

SEQ ID NO: 356 - RNA, 23 nt, synthetic construct
  source 1..23: mol_type = other RNA
  modified_base 1: mod_base = OTHER; note = 2'-O-methyladenosine-3'- phosphorothioate
  modified_base 2: mod_base = OTHER; note = 2'-fluoroguanosine-3'-phosphorothioate
  modified_base 3: mod_base = OTHER; note = 2'-O-methyluridine-3'-phosphate
  modified_base 4: mod_base = OTHER; note = 2'-O-methyluridine-3'-phosphate
  modified_base 5: mod_base = OTHER; note = 2'-O-methyladenosine-3'-phosphate
  modified_base 6: mod_base = OTHER; note = 2'-fluoroadenosine-3'-phosphate
  modified_base 7: mod_base = OTHER; note = 2'-O-methyluridine-3'-phosphate
  modified_base 8: mod_base = OTHER; note = 2'-fluoroadenosine-3'-phosphate
  modified_base 9: mod_base = OTHER; note = 2'-fluorouridine-3'-phosphate
  modified_base 10: mod_base = OTHER; note = 2'-O-methyladenosine-3'-phosphate
  modified_base 11: mod_base = OTHER; note = 2'-O-methyluridine-3'-phosphate
  modified_base 12: mod_base = OTHER; note = 2'-O-methyluridine-3'-phosphate
  modified_base 13: mod_base = OTHER; note = 2'-O-methyluridine-3'-phosphate
  modified_base 14: mod_base = OTHER; note = 2'-fluorocytidine-3'-phosphate
  modified_base 15: mod_base = OTHER; note = 2'-O-methylcytidine-3'-phosphate
  modified_base 16: mod_base = OTHER; note = 2'-fluoroadenosine-3'-phosphate
  modified_base 17: mod_base = OTHER; note = 2'-O-methylguanosine-3'-phosphate
  modified_base 18: mod_base = OTHER; note = 2'-O-methylguanosine-3'-phosphate
  modified_base 19: mod_base = OTHER; note = 2'-O-methyladenosine-3'-phosphate
  modified_base 20: mod_base = OTHER; note = 2'-O-methyluridine-3'-phosphate
  modified_base 21: mod_base = OTHER; note = 2'-O-methylguanosine-3'- phosphorothioate
  modified_base 22: mod_base = OTHER; note = 2'-O-methyladenosine-3'- phosphorothioate
  modified_base 23: mod_base = OTHER; note = 2'-O-methyladenosine-3'-phosphate
agttaatatatttccaggatgaa

SEQ ID NO: 357 - RNA, 23 nt, synthetic construct
  source 1..23: mol_type = other RNA
  modified_base 1: mod_base = OTHER; note = 2'-O-methyluridine-3'-phosphorothioate
  modified_base 2: mod_base = OTHER; note = 2'-fluorouridine -3'-phosphorothioate
  modified_base 3: mod_base = OTHER; note = 2'-O-methylguanosine-3'-phosphate
  modified_base 4: mod_base = OTHER; note = 2'-O-methyluridine-3'-phosphate
  modified_base 5: mod_base = OTHER; note = 2'-O-methylcytidine-3'-phosphate
  modified_base 6: mod_base = OTHER; note = 2'-fluoroguanosine-3'-phosphate
  modified_base 7: mod_base = OTHER; note = 2'-O-methyladenosine-3'-phosphate
  modified_base 8: mod_base = OTHER; note = 2'-fluorouridine-3'-phosphate
  modified_base 9: mod_base = OTHER; note = 2'-fluoroguanosine-3'-phosphate
  modified_base 10: mod_base = OTHER; note = 2'-O-methyladenosine-3'-phosphate
  modified_base 11: mod_base = OTHER; note = 2'-O-methylcytidine-3'-phosphate
  modified_base 12: mod_base = OTHER; note = 2'-O-methyluridine-3'-phosphate
  modified_base 13: mod_base = OTHER; note = 2'-O-methyluridine-3'-phosphate
  modified_base 14: mod_base = OTHER; note = 2'-fluorouridine-3'-phosphate
  modified_base 15: mod_base = OTHER; note = 2'-O-methylcytidine-3'-phosphate
  modified_base 16: mod_base = OTHER; note = 2'-fluoroadenosine-3'-phosphate
  modified_base 17: mod_base = OTHER; note = 2'-O-methylcytidine-3'-phosphate
  modified_base 18: mod_base = OTHER; note = 2'-O-methyladenosine-3'-phosphate
  modified_base 19: mod_base = OTHER; note = 2'-O-methyluridine-3'-phosphate
  modified_base 20: mod_base = OTHER; note = 2'-O-methyluridine-3'-phosphate
  modified_base 21: mod_base = OTHER; note = 2'-O-methylcytidine-3'- phosphorothioate
  modified_base 22: mod_base = OTHER; note = 2'-O-methyluridine-3'-phosphorothioate
  modified_base 23: mod_base = OTHER; note = 2'-O-methylguanosine-3'-phosphate
ttgtcgatgactttcacattctg

SEQ ID NO: 358 - RNA, 23 nt, synthetic construct
  source 1..23: mol_type = other RNA
  modified_base 1: mod_base = OTHER; note = 2'-O-methyluridine-3'-phosphorothioate
  modified_base 2: mod_base = OTHER; note = 2'-fluoroadenosine-3'-phosphorothioate
  modified_base 3: mod_base = OTHER; note = 2'-O-methyluridine-3'-phosphate
  modified_base 4: mod_base = OTHER; note = 2'-O-methylguanosine-3'-phosphate
  modified_base 5: mod_base = OTHER; note = 2'-O-methylguanosine-3'-phosphate
  modified_base 6: mod_base = OTHER; note = 2'-fluoroguanosine-3'-phosphate
  modified_base 7: mod_base = OTHER; note = 2'-O-methyladenosine-3'-phosphate
  modified_base 8: mod_base = OTHER; note = 2'-fluoroadenosine-3'-phosphate
  modified_base 9: mod_base = OTHER; note = 2'-fluoroadenosine-3'-phosphate
  modified_base 10: mod_base = OTHER; note = 2'-O-methyladenosine-3'-phosphate
  modified_base 11: mod_base = OTHER; note = 2'-O-methyluridine-3'-phosphate
  modified_base 12: mod_base = OTHER; note = 2'-O-methyladenosine-3'-phosphate
  modified_base 13: mod_base = OTHER; note = 2'-O-methyluridine-3'-phosphate
  modified_base 14: mod_base = OTHER; note = 2'-fluorouridine-3'-phosphate
  modified_base 15: mod_base = OTHER; note = 2'-O-methylguanosine-3'-phosphate
  modified_base 16: mod_base = OTHER; note = 2'-fluorouridine-3'-phosphate
  modified_base 17: mod_base = OTHER; note = 2'-O-methylguanosine-3'-phosphate
  modified_base 18: mod_base = OTHER; note = 2'-O-methylcytidine-3'-phosphate
  modified_base 19: mod_base = OTHER; note = 2'-O-methyladenosine-3'-phosphate
  modified_base 20: mod_base = OTHER; note = 2'-O-methylcytidine-3'-phosphate
  modified_base 21: mod_base = OTHER; note = 2'-O-methyluridine-3'-phosphorothioate
  modified_base 22: mod_base = OTHER; note = 2'-O-methylguanosine-3'- phosphorothioate
  modified_base 23: mod_base = OTHER; note = 2'-O-methyluridine-3'-phosphate
tatgggaaaatattgtgcactgt

SEQ ID NO: 359 - RNA, 23 nt, synthetic construct
  source 1..23: mol_type = other RNA
  modified_base 1: mod_base = OTHER; note = 2'-O-methyladenosine-3'- phosphorothioate
  modified_base 2: mod_base = OTHER; note = 2'-fluoroadenosine-3'-phosphorothioate
  modified_base 3: mod_base = OTHER; note = 2'-O-methyluridine-3'-phosphate
  modified_base 4: mod_base = OTHER; note = 2'-O-methylguanosine-3'-phosphate
  modified_base 5: mod_base = OTHER; note = 2'-O-methyluridine-3'-phosphate
  modified_base 6: mod_base = OTHER; note = 2'-fluorocytidine-3'-phosphate
  modified_base 7: mod_base = OTHER; note = 2'-O-methyluridine-3'-phosphate
  modified_base 8: mod_base = OTHER; note = 2'-fluorouridine-3'-phosphate
  modified_base 9: mod_base = OTHER; note = 2'-fluoroguanosine-3'-phosphate
  modified_base 10: mod_base = OTHER; note = 2'-O-methyluridine-3'-phosphate
  modified_base 11: mod_base = OTHER; note = 2'-O-methylcytidine-3'-phosphate
  modified_base 12: mod_base = OTHER; note = 2'-O-methylguanosine-3'-phosphate
  modified_base 13: mod_base = OTHER; note = 2'-O-methyladenosine-3'-phosphate
  modified_base 14: mod_base = OTHER; note = 2'-fluorouridine-3'-phosphate
  modified_base 15: mod_base = OTHER; note = 2'-O-methylguanosine-3'-phosphate
  modified_base 16: mod_base = OTHER; note = 2'-fluoroadenosine-3'-phosphate
  modified_base 17: mod_base = OTHER; note = 2'-O-methylcytidine-3'-phosphate
  modified_base 18: mod_base = OTHER; note = 2'-O-methyluridine-3'-phosphate
  modified_base 19: mod_base = OTHER; note = 2'-O-methyluridine-3'-phosphate
  modified_base 20: mod_base = OTHER; note = 2'-O-methyluridine-3'-phosphate
  modified_base 21: mod_base = OTHER; note = 2'-O-methylcytidine-3'- phosphorothioate
  modified_base 22: mod_base = OTHER; note = 2'-O-methyladenosine-3'- phosphorothioate
  modified_base 23: mod_base = OTHER; note = 2'-O-methylcytidine-3'-phosphate
aatgtcttgtcgatgactttcac

SEQ ID NO: 360 - RNA, 23 nt, synthetic construct
  source 1..23: mol_type = other RNA
  modified_base 1: mod_base = OTHER; note = 2'-O-methyluridine-3'-phosphorothioate
  modified_base 2: mod_base = OTHER; note = 2'-fluorouridine -3'-phosphorothioate
  modified_base 3: mod_base = OTHER; note = 2'-O-methyluridine-3'-phosphate
  modified_base 4: mod_base = OTHER; note = 2'-O-methylguanosine-3'-phosphate
  modified_base 5: mod_base = OTHER; note = 2'-O-methyluridine-3'-phosphate
  modified_base 6: mod_base = OTHER; note = 2'-fluorocytidine-3'-phosphate
  modified_base 7: mod_base = OTHER; note = 2'-O-methylguanosine-3'-phosphate
  modified_base 8: mod_base = OTHER; note = 2'-fluoroadenosine-3'-phosphate
  modified_base 9: mod_base = OTHER; note = 2'-fluorouridine-3'-phosphate
  modified_base 10: mod_base = OTHER; note = 2'-O-methylguanosine-3'-phosphate
  modified_base 11: mod_base = OTHER; note = 2'-O-methyladenosine-3'-phosphate
  modified_base 12: mod_base = OTHER; note = 2'-O-methylcytidine-3'-phosphate
  modified_base 13: mod_base = OTHER; note = 2'-O-methyluridine-3'-phosphate
  modified_base 14: mod_base = OTHER; note = 2'-fluorouridine-3'-phosphate
  modified_base 15: mod_base = OTHER; note = 2'-O-methyluridine-3'-phosphate
  modified_base 16: mod_base = OTHER; note = 2'-fluorocytidine-3'-phosphate
  modified_base 17: mod_base = OTHER; note = 2'-O-methyladenosine-3'-phosphate
  modified_base 18: mod_base = OTHER; note = 2'-O-methylcytidine-3'-phosphate
  modified_base 19: mod_base = OTHER; note = 2'-O-methyladenosine-3'-phosphate
  modified_base 20: mod_base = OTHER; note = 2'-O-methyluridine-3'-phosphate
  modified_base 21: mod_base = OTHER; note = 2'-O-methyluridine-3'-phosphorothioate
  modified_base 22: mod_base = OTHER; note = 2'-O-methylcytidine-3'- phosphorothioate
  modified_base 23: mod_base = OTHER; note = 2'-O-methyluridine-3'-phosphate
tttgtcgatgactttcacattct

SEQ ID NO: 361 - RNA, 23 nt, synthetic construct
  source 1..23: mol_type = other RNA
  modified_base 1: mod_base = OTHER; note = 2'-O-methyluridine-3'-phosphorothioate
  modified_base 2: mod_base = OTHER; note = 2'-fluoroadenosine-3'-phosphorothioate
  modified_base 3: mod_base = OTHER; note = 2'-O-methyladenosine-3'-phosphate
  modified_base 4: mod_base = OTHER; note = 2'-O-methylcytidine-3'-phosphate
  modified_base 5: mod_base = OTHER; note = 2'-O-methyladenosine-3'-phosphate
  modified_base 6: mod_base = OTHER; note = 2'-fluoroguanosine-3'-phosphate
  modified_base 7: mod_base = OTHER; note = 2'-O-methyluridine-3'-phosphate
  modified_base 8: mod_base = OTHER; note = 2'-fluorouridine-3'-phosphate
  modified_base 9: mod_base = OTHER; note = 2'-fluoroadenosine-3'-phosphate
  modified_base 10: mod_base = OTHER; note = 2'-O-methyladenosine-3'-phosphate
  modified_base 11: mod_base = OTHER; note = 2'-O-methyluridine-3'-phosphate
  modified_base 12: mod_base = OTHER; note = 2'-O-methyladenosine-3'-phosphate
  modified_base 13: mod_base = OTHER; note = 2'-O-methyluridine-3'-phosphate
  modified_base 14: mod_base = OTHER; note = 2'-fluoroadenosine-3'-phosphate
  modified_base 15: mod_base = OTHER; note = 2'-O-methyluridine-3'-phosphate
  modified_base 16: mod_base = OTHER; note = 2'-fluorouridine-3'-phosphate
  modified_base 17: mod_base = OTHER; note = 2'-O-methyluridine-3'-phosphate
  modified_base 18: mod_base = OTHER; note = 2'-O-methylcytidine-3'-phosphate
  modified_base 19: mod_base = OTHER; note = 2'-O-methylcytidine-3'-phosphate
  modified_base 20: mod_base = OTHER; note = 2'-O-methyladenosine-3'-phosphate
  modified_base 21: mod_base = OTHER; note = 2'-O-methylguanosine-3'- phosphorothioate
  modified_base 22: mod_base = OTHER; note = 2'-O-methylguanosine-3'- phosphorothioate
  modified_base 23: mod_base = OTHER; note = 2'-O-methyladenosine-3'-phosphate
taacagttaatatatttccagga

SEQ ID NO: 362 - RNA, 23 nt, synthetic construct
  source 1..23: mol_type = other RNA
  modified_base 1: mod_base = OTHER; note = 2'-O-methyladenosine-3'- phosphorothioate
  modified_base 2: mod_base = OTHER; note = 2'-fluoroadenosine-3'-phosphorothioate
  modified_base 3: mod_base = OTHER; note = 2'-O-methyladenosine-3'-phosphate
  modified_base 4: mod_base = OTHER; note = 2'-O-methyluridine-3'-phosphate
  modified_base 5: mod_base = OTHER; note = 2'-O-methyladenosine-3'-phosphate
  modified_base 6: mod_base = OTHER; note = 2'-fluoroadenosine-3'-phosphate
  modified_base 7: mod_base = OTHER; note = 2'-O-methyluridine-3'-phosphate
  modified_base 8: mod_base = OTHER; note = 2'-fluoroadenosine-3'-phosphate
  modified_base 9: mod_base = OTHER; note = 2'-fluorocytidine-3'-phosphate
  modified_base 10: mod_base = OTHER; note = 2'-O-methyladenosine-3'-phosphate
  modified_base 11: mod_base = OTHER; note = 2'-O-methylguanosine-3'-phosphate
  modified_base 12: mod_base = OTHER; note = 2'-O-methyladenosine-3'-phosphate
  modified_base 13: mod_base = OTHER; note = 2'-O-methyluridine-3'-phosphate
  modified_base 14: mod_base = OTHER; note = 2'-fluoroguanosine-3'-phosphate
  modified_base 15: mod_base = OTHER; note = 2'-O-methylguanosine-3'-phosphate
  modified_base 16: mod_base = OTHER; note = 2'-fluoroguanosine-3'-phosphate
  modified_base 17: mod_base = OTHER; note = 2'-O-methyladenosine-3'-phosphate
  modified_base 18: mod_base = OTHER; note = 2'-O-methyladenosine-3'-phosphate
  modified_base 19: mod_base = OTHER; note = 2'-O-methyladenosine-3'-phosphate
  modified_base 20: mod_base = OTHER; note = 2'-O-methyladenosine-3'-phosphate
  modified_base 21: mod_base = OTHER; note = 2'-O-methyluridine-3'-phosphorothioate
  modified_base 22: mod_base = OTHER; note = 2'-O-methyladenosine-3'- phosphorothioate
  modified_base 23: mod_base = OTHER; note = 2'-O-methyluridine-3'-phosphate
aaataatacagatgggaaaatat

SEQ ID NO: 363 - RNA, 23 nt, synthetic construct
  source 1..23: mol_type = other RNA
  modified_base 1: mod_base = OTHER; note = 2'-O-methyluridine-3'-phosphorothioate
  modified_base 2: mod_base = OTHER; note = 2'-fluorouridine -3'-phosphorothioate
  modified_base 3: mod_base = OTHER; note = 2'-O-methyluridine-3'-phosphate
  modified_base 4: mod_base = OTHER; note = 2'-O-methyluridine-3'-phosphate
  modified_base 5: mod_base = OTHER; note = 2'-O-methylguanosine-3'-phosphate
  modified_base 6: mod_base = OTHER; note = 2'-fluorouridine-3'-phosphate
  modified_base 7: mod_base = OTHER; note = 2'-O-methyluridine-3'-phosphate
  modified_base 8: mod_base = OTHER; note = 2'-fluoroguanosine-3'-phosphate
  modified_base 9: mod_base = OTHER; note = 2'-fluoroguanosine-3'-phosphate
  modified_base 10: mod_base = OTHER; note = 2'-O-methyladenosine-3'-phosphate
  modified_base 11: mod_base = OTHER; note = 2'-O-methyladenosine-3'-phosphate
  modified_base 12: mod_base = OTHER; note = 2'-O-methyladenosine-3'-phosphate
  modified_base 13: mod_base = OTHER; note = 2'-O-methyladenosine-3'-phosphate
  modified_base 14: mod_base = OTHER; note = 2'-fluoroguanosine-3'-phosphate
  modified_base 15: mod_base = OTHER; note = 2'-O-methyladenosine-3'-phosphate
  modified_base 16: mod_base = OTHER; note = 2'-fluoroadenosine-3'-phosphate
  modified_base 17: mod_base = OTHER; note = 2'-O-methylcytidine-3'-phosphate
  modified_base 18: mod_base = OTHER; note = 2'-O-methylguanosine-3'-phosphate
  modified_base 19: mod_base = OTHER; note = 2'-O-methyladenosine-3'-phosphate
  modified_base 20: mod_base = OTHER; note = 2'-O-methylcytidine-3'-phosphate
  modified_base 21: mod_base = OTHER; note = 2'-O-methyladenosine-3'- phosphorothioate
  modified_base 22: mod_base = OTHER; note = 2'-O-methylcytidine-3'- phosphorothioate
  modified_base 23: mod_base = OTHER; note = 2'-O-methylcytidine-3'-phosphate
ttttgttggaaaagaacgacacc

SEQ ID NO: 364 - RNA, 23 nt, synthetic construct
  source 1..23: mol_type = other RNA
  modified_base 1: mod_base = OTHER; note = 2'-O-methyluridine-3'-phosphorothioate
  modified_base 2: mod_base = OTHER; note = 2'-fluoroadenosine-3'-phosphorothioate
  modified_base 3: mod_base = OTHER; note = 2'-O-methylguanosine-3'-phosphate
  modified_base 4: mod_base = OTHER; note = 2'-O-methyluridine-3'-phosphate
  modified_base 5: mod_base = OTHER; note = 2'-O-methyluridine-3'-phosphate
  modified_base 6: mod_base = OTHER; note = 2'-fluoroadenosine-3'-phosphate
  modified_base 7: mod_base = OTHER; note = 2'-O-methyladenosine-3'-phosphate
  modified_base 8: mod_base = OTHER; note = 2'-fluorouridine-3'-phosphate
  modified_base 9: mod_base = OTHER; note = 2'-fluoroadenosine-3'-phosphate
  modified_base 10: mod_base = OTHER; note = 2'-O-methyluridine-3'-phosphate
  modified_base 11: mod_base = OTHER; note = 2'-O-methyladenosine-3'-phosphate
  modified_base 12: mod_base = OTHER; note = 2'-O-methyluridine-3'-phosphate
  modified_base 13: mod_base = OTHER; note = 2'-O-methyluridine-3'-phosphate
  modified_base 14: mod_base = OTHER; note = 2'-fluorouridine-3'-phosphate
  modified_base 15: mod_base = OTHER; note = 2'-O-methylcytidine-3'-phosphate
  modified_base 16: mod_base = OTHER; note = 2'-fluorocytidine-3'-phosphate
  modified_base 17: mod_base = OTHER; note = 2'-O-methyladenosine-3'-phosphate
  modified_base 18: mod_base = OTHER; note = 2'-O-methylguanosine-3'-phosphate
  modified_base 19: mod_base = OTHER; note = 2'-O-methylguanosine-3'-phosphate
  modified_base 20: mod_base = OTHER; note = 2'-O-methyladenosine-3'-phosphate
  modified_base 21: mod_base = OTHER; note = 2'-O-methyluridine-3'-phosphorothioate
  modified_base 22: mod_base = OTHER; note = 2'-O-methylguanosine-3'- phosphorothioate
  modified_base 23: mod_base = OTHER; note = 2'-O-methyladenosine-3'-phosphate
tagttaatatatttccaggatga

SEQ ID NO: 365 - RNA, 23 nt, synthetic construct
  source 1..23: mol_type = other RNA
  modified_base 1: mod_base = OTHER; note = 2'-O-methyluridine-3'-phosphorothioate
  modified_base 2: mod_base = OTHER; note = 2'-fluoroadenosine-3'-phosphorothioate
  modified_base 3: mod_base = OTHER; note = 2'-O-methyluridine-3'-phosphate
  modified_base 4: mod_base = OTHER; note = 2'-O-methylcytidine-3'-phosphate
  modified_base 5: mod_base = OTHER; note = 2'-O-methyladenosine-3'-phosphate
  modified_base 6: mod_base = OTHER; note = 2'-fluorouridine-3'-phosphate
  modified_base 7: mod_base = OTHER; note = 2'-O-methylcytidine-3'-phosphate
  modified_base 8: mod_base = OTHER; note = 2'-fluoroadenosine-3'-phosphate
  modified_base 9: mod_base = OTHER; note = 2'-fluorocytidine-3'-phosphate
  modified_base 10: mod_base = OTHER; note = 2'-O-methylcytidine-3'-phosphate
  modified_base 11: mod_base = OTHER; note = 2'-O-methyluridine-3'-phosphate
  modified_base 12: mod_base = OTHER; note = 2'-O-methylcytidine-3'-phosphate
  modified_base 13: mod_base = OTHER; note = 2'-O-methyluridine-3'-phosphate
  modified_base 14: mod_base = OTHER; note = 2'-fluorocytidine-3'-phosphate
  modified_base 15: mod_base = OTHER; note = 2'-O-methyladenosine-3'-phosphate
  modified_base 16: mod_base = OTHER; note = 2'-fluoroadenosine-3'-phosphate
  modified_base 17: mod_base = OTHER; note = 2'-O-methyladenosine-3'-phosphate
  modified_base 18: mod_base = OTHER; note = 2'-O-methyladenosine-3'-phosphate
  modified_base 19: mod_base = OTHER; note = 2'-O-methyluridine-3'-phosphate
  modified_base 20: mod_base = OTHER; note = 2'-O-methylguanosine-3'-phosphate
  modified_base 21: mod_base = OTHER; note = 2'-O-methylcytidine-3'- phosphorothioate
  modified_base 22: mod_base = OTHER; note = 2'-O-methylcytidine-3'- phosphorothioate
  modified_base 23: mod_base = OTHER; note = 2'-O-methylcytidine-3'-phosphate
tatcatcacctctcaaaatgccc

SEQ ID NO: 366 - RNA, 23 nt, synthetic construct
  source 1..23: mol_type = other RNA
  modified_base 1: mod_base = OTHER; note = 2'-O-methyluridine-3'-phosphorothioate
  modified_base 2: mod_base = OTHER; note = 2'-fluorouridine -3'-phosphorothioate
  modified_base 3: mod_base = OTHER; note = 2'-O-methylguanosine-3'-phosphate
  modified_base 4: mod_base = OTHER; note = 2'-O-methyladenosine-3'-phosphate
  modified_base 5: mod_base = OTHER; note = 2'-O-methyladenosine-3'-phosphate
  modified_base 6: mod_base = OTHER; note = 2'-fluorocytidine-3'-phosphate
  modified_base 7: mod_base = OTHER; note = 2'-O-methyladenosine-3'-phosphate
  modified_base 8: mod_base = OTHER; note = 2'-fluorocytidine-3'-phosphate
  modified_base 9: mod_base = OTHER; note = 2'-fluorocytidine-3'-phosphate
  modified_base 10: mod_base = OTHER; note = 2'-O-methyluridine-3'-phosphate
  modified_base 11: mod_base = OTHER; note = 2'-O-methyluridine-3'-phosphate
  modified_base 12: mod_base = OTHER; note = 2'-O-methyluridine-3'-phosphate
  modified_base 13: mod_base = OTHER; note = 2'-O-methylcytidine-3'-phosphate
  modified_base 14: mod_base = OTHER; note = 2'-fluorouridine-3'-phosphate
  modified_base 15: mod_base = OTHER; note = 2'-O-methylcytidine-3'-phosphate
  modified_base 16: mod_base = OTHER; note = 2'-fluorocytidine-3'-phosphate
  modified_base 17: mod_base = OTHER; note = 2'-O-methylcytidine-3'-phosphate
  modified_base 18: mod_base = OTHER; note = 2'-O-methylcytidine-3'-phosphate
  modified_base 19: mod_base = OTHER; note = 2'-O-methylcytidine-3'-phosphate
  modified_base 20: mod_base = OTHER; note = 2'-O-methyluridine-3'-phosphate
  modified_base 21: mod_base = OTHER; note = 2'-O-methylguanosine-3'- phosphorothioate
  modified_base 22: mod_base = OTHER; note = 2'-O-methylguanosine-3'- phosphorothioate
  modified_base 23: mod_base = OTHER; note = 2'-O-methyladenosine-3'-phosphate
ttgaacacctttctccccctgga

SEQ ID NO: 367 - RNA, 23 nt, synthetic construct
  source 1..23: mol_type = other RNA
  modified_base 1: mod_base = OTHER; note = 2'-O-methyluridine-3'-phosphorothioate
  modified_base 2: mod_base = OTHER; note = 2'-fluorouridine -3'-phosphorothioate
  modified_base 3: mod_base = OTHER; note = 2'-O-methyluridine-3'-phosphate
  modified_base 4: mod_base = OTHER; note = 2'-O-methyladenosine-3'-phosphate
  modified_base 5: mod_base = OTHER; note = 2'-O-methyladenosine-3'-phosphate
  modified_base 6: mod_base = OTHER; note = 2'-fluorocytidine-3'-phosphate
  modified_base 7: mod_base = OTHER; note = 2'-O-methyladenosine-3'-phosphate
  modified_base 8: mod_base = OTHER; note = 2'-fluoroguanosine-3'-phosphate
  modified_base 9: mod_base = OTHER; note = 2'-fluorouridine-3'-phosphate
  modified_base 10: mod_base = OTHER; note = 2'-O-methyluridine-3'-phosphate
  modified_base 11: mod_base = OTHER; note = 2'-O-methyladenosine-3'-phosphate
  modified_base 12: mod_base = OTHER; note = 2'-O-methyladenosine-3'-phosphate
  modified_base 13: mod_base = OTHER; note = 2'-O-methyluridine-3'-phosphate
  modified_base 14: mod_base = OTHER; note = 2'-fluoroadenosine-3'-phosphate
  modified_base 15: mod_base = OTHER; note = 2'-O-methyluridine-3'-phosphate
  modified_base 16: mod_base = OTHER; note = 2'-fluoroadenosine-3'-phosphate
  modified_base 17: mod_base = OTHER; note = 2'-O-methyluridine-3'-phosphate
  modified_base 18: mod_base = OTHER; note = 2'-O-methyluridine-3'-phosphate
  modified_base 19: mod_base = OTHER; note = 2'-O-methyluridine-3'-phosphate
  modified_base 20: mod_base = OTHER; note = 2'-O-methylcytidine-3'-phosphate
  modified_base 21: mod_base = OTHER; note = 2'-O-methylcytidine-3'- phosphorothioate
  modified_base 22: mod_base = OTHER; note = 2'-O-methyladenosine-3'- phosphorothioate
  modified_base 23: mod_base = OTHER; note = 2'-O-methylguanosine-3'-phosphate
tttaacagttaatatatttccag

SEQ ID NO: 368 - RNA, 23 nt, synthetic construct
  source 1..23: mol_type = other RNA
  modified_base 1: mod_base = OTHER; note = 2'-O-methyladenosine-3'- phosphorothioate
  modified_base 2: mod_base = OTHER; note = 2'-fluoroadenosine-3'-phosphorothioate
  modified_base 3: mod_base = OTHER; note = 2'-O-methylguanosine-3'-phosphate
  modified_base 4: mod_base = OTHER; note = 2'-O-methylguanosine-3'-phosphate
  modified_base 5: mod_base = OTHER; note = 2'-O-methyladenosine-3'-phosphate
  modified_base 6: mod_base = OTHER; note = 2'-fluorouridine-3'-phosphate
  modified_base 7: mod_base = OTHER; note = 2'-O-methyluridine-3'-phosphate
  modified_base 8: mod_base = OTHER; note = 2'-fluorouridine-3'-phosphate
  modified_base 9: mod_base = OTHER; note = 2'-fluorouridine-3'-phosphate
  modified_base 10: mod_base = OTHER; note = 2'-O-methyluridine-3'-phosphate
  modified_base 11: mod_base = OTHER; note = 2'-O-methylcytidine-3'-phosphate
  modified_base 12: mod_base = OTHER; note = 2'-O-methylcytidine-3'-phosphate
  modified_base 13: mod_base = OTHER; note = 2'-O-methyluridine-3'-phosphate
  modified_base 14: mod_base = OTHER; note = 2'-fluorocytidine-3'-phosphate
  modified_base 15: mod_base = OTHER; note = 2'-O-methyladenosine-3'-phosphate
  modified_base 16: mod_base = OTHER; note = 2'-fluorocytidine-3'-phosphate
  modified_base 17: mod_base = OTHER; note = 2'-O-methylcytidine-3'-phosphate
  modified_base 18: mod_base = OTHER; note = 2'-O-methyladenosine-3'-phosphate
  modified_base 19: mod_base = OTHER; note = 2'-O-methyladenosine-3'-phosphate
  modified_base 20: mod_base = OTHER; note = 2'-O-methyluridine-3'-phosphate
  modified_base 21: mod_base = OTHER; note = 2'-O-methylguanosine-3'- phosphorothioate
  modified_base 22: mod_base = OTHER; note = 2'-O-methyluridine-3'-phosphorothioate
  modified_base 23: mod_base = OTHER; note = 2'-O-methylcytidine-3'-phosphate
aaggatttttcctcaccaatgtc

SEQ ID NO: 369 - RNA, 23 nt, synthetic construct
  source 1..23: mol_type = other RNA
  modified_base 1: mod_base = OTHER; note = 2'-O-methyluridine-3'-phosphorothioate
  modified_base 2: mod_base = OTHER; note = 2'-fluoroadenosine-3'-phosphorothioate
  modified_base 3: mod_base = OTHER; note = 2'-O-methyluridine-3'-phosphate
  modified_base 4: mod_base = OTHER; note = 2'-O-methylcytidine-3'-phosphate
  modified_base 5: mod_base = OTHER; note = 2'-O-methyluridine-3'-phosphate
  modified_base 6: mod_base = OTHER; note = 2'-fluorouridine-3'-phosphate
  modified_base 7: mod_base = OTHER; note = 2'-O-methylguanosine-3'-phosphate
  modified_base 8: mod_base = OTHER; note = 2'-fluoroadenosine-3'-phosphate
  modified_base 9: mod_base = OTHER; note = 2'-fluoroadenosine-3'-phosphate
  modified_base 10: mod_base = OTHER; note = 2'-O-methylcytidine-3'-phosphate
  modified_base 11: mod_base = OTHER; note = 2'-O-methyladenosine-3'-phosphate
  modified_base 12: mod_base = OTHER; note = 2'-O-methylcytidine-3'-phosphate
  modified_base 13: mod_base = OTHER; note = 2'-O-methylcytidine-3'-phosphate
  modified_base 14: mod_base = OTHER; note = 2'-fluorouridine-3'-phosphate
  modified_base 15: mod_base = OTHER; note = 2'-O-methyluridine-3'-phosphate
  modified_base 16: mod_base = OTHER; note = 2'-fluorouridine-3'-phosphate
  modified_base 17: mod_base = OTHER; note = 2'-O-methylcytidine-3'-phosphate
  modified_base 18: mod_base = OTHER; note = 2'-O-methyluridine-3'-phosphate
  modified_base 19: mod_base = OTHER; note = 2'-O-methylcytidine-3'-phosphate
  modified_base 20: mod_base = OTHER; note = 2'-O-methylcytidine-3'-phosphate
  modified_base 21: mod_base = OTHER; note = 2'-O-methylcytidine-3'- phosphorothioate
  modified_base 22: mod_base = OTHER; note = 2'-O-methylcytidine-3'- phosphorothioate
  modified_base 23: mod_base = OTHER; note = 2'-O-methylcytidine-3'-phosphate
tatcttgaacacctttctccccc

SEQ ID NO: 370 - RNA, 23 nt, synthetic construct
  source 1..23: mol_type = other RNA
  modified_base 1: mod_base = OTHER; note = 2'-O-methyladenosine-3'- phosphorothioate
  modified_base 2: mod_base = OTHER; note = 2'-fluorouridine -3'-phosphorothioate
  modified_base 3: mod_base = OTHER; note = 2'-O-methylcytidine-3'-phosphate
  modified_base 4: mod_base = OTHER; note = 2'-O-methyladenosine-3'-phosphate
  modified_base 5: mod_base = OTHER; note = 2'-O-methyluridine-3'-phosphate
  modified_base 6: mod_base = OTHER; note = 2'-fluorocytidine-3'-phosphate
  modified_base 7: mod_base = OTHER; note = 2'-O-methyladenosine-3'-phosphate
  modified_base 8: mod_base = OTHER; note = 2'-fluorocytidine-3'-phosphate
  modified_base 9: mod_base = OTHER; note = 2'-fluorocytidine-3'-phosphate
  modified_base 10: mod_base = OTHER; note = 2'-O-methyluridine-3'-phosphate
  modified_base 11: mod_base = OTHER; note = 2'-O-methylcytidine-3'-phosphate
  modified_base 12: mod_base = OTHER; note = 2'-O-methyluridine-3'-phosphate
  modified_base 13: mod_base = OTHER; note = 2'-O-methylcytidine-3'-phosphate
  modified_base 14: mod_base = OTHER; note = 2'-fluoroadenosine-3'-phosphate
  modified_base 15: mod_base = OTHER; note = 2'-O-methyladenosine-3'-phosphate
  modified_base 16: mod_base = OTHER; note = 2'-fluoroadenosine-3'-phosphate
  modified_base 17: mod_base = OTHER; note = 2'-O-methyladenosine-3'-phosphate
  modified_base 18: mod_base = OTHER; note = 2'-O-methyluridine-3'-phosphate
  modified_base 19: mod_base = OTHER; note = 2'-O-methylguanosine-3'-phosphate
  modified_base 20: mod_base = OTHER; note = 2'-O-methylcytidine-3'-phosphate
  modified_base 21: mod_base = OTHER; note = 2'-O-methylcytidine-3'- phosphorothioate
  modified_base 22: mod_base = OTHER; note = 2'-O-methylcytidine-3'- phosphorothioate
  modified_base 23: mod_base = OTHER; note = 2'-O-methyluridine-3'-phosphate
atcatcacctctcaaaatgccct

SEQ ID NO: 371 - RNA, 23 nt, synthetic construct
  source 1..23: mol_type = other RNA
  modified_base 1: mod_base = OTHER; note = 2'-O-methyladenosine-3'- phosphorothioate
  modified_base 2: mod_base = OTHER; note = 2'-fluoroadenosine-3'-phosphorothioate
  modified_base 3: mod_base = OTHER; note = 2'-O-methyladenosine-3'-phosphate
  modified_base 4: mod_base = OTHER; note = 2'-O-methyladenosine-3'-phosphate
  modified_base 5: mod_base = OTHER; note = 2'-O-methylguanosine-3'-phosphate
  modified_base 6: mod_base = OTHER; note = 2'-fluoroadenosine-3'-phosphate
  modified_base 7: mod_base = OTHER; note = 2'-O-methyladenosine-3'-phosphate
  modified_base 8: mod_base = OTHER; note = 2'-fluorocytidine-3'-phosphate
  modified_base 9: mod_base = OTHER; note = 2'-fluoroguanosine-3'-phosphate
  modified_base 10: mod_base = OTHER; note = 2'-O-methyladenosine-3'-phosphate
  modified_base 11: mod_base = OTHER; note = 2'-O-methylcytidine-3'-phosphate
  modified_base 12: mod_base = OTHER; note = 2'-O-methyladenosine-3'-phosphate
  modified_base 13: mod_base = OTHER; note = 2'-O-methylcytidine-3'-phosphate
  modified_base 14: mod_base = OTHER; note = 2'-fluorocytidine-3'-phosphate
  modified_base 15: mod_base = OTHER; note = 2'-O-methylcytidine-3'-phosphate
  modified_base 16: mod_base = OTHER; note = 2'-fluorouridine-3'-phosphate
  modified_base 17: mod_base = OTHER; note = 2'-O-methyluridine-3'-phosphate
  modified_base 18: mod_base = OTHER; note = 2'-O-methyluridine-3'-phosphate
  modified_base 19: mod_base = OTHER; note = 2'-O-methylguanosine-3'-phosphate
  modified_base 20: mod_base = OTHER; note = 2'-O-methyluridine-3'-phosphate
  modified_base 21: mod_base = OTHER; note = 2'-O-methyladenosine-3'- phosphorothioate
  modified_base 22: mod_base = OTHER; note = 2'-O-methyluridine-3'-phosphorothioate
  modified_base 23: mod_base = OTHER; note = 2'-O-methyluridine-3'-phosphate
aaaagaacgacaccctttgtatt

SEQ ID NO: 372 - RNA, 23 nt, synthetic construct
  source 1..23: mol_type = other RNA
  modified_base 1: mod_base = OTHER; note = 2'-O-methyluridine-3'-phosphorothioate
  modified_base 2: mod_base = OTHER; note = 2'-fluoroguanosine-3'-phosphorothioate
  modified_base 3: mod_base = OTHER; note = 2'-O-methyladenosine-3'-phosphate
  modified_base 4: mod_base = OTHER; note = 2'-O-methyluridine-3'-phosphate
  modified_base 5: mod_base = OTHER; note = 2'-O-methyluridine-3'-phosphate
  modified_base 6: mod_base = OTHER; note = 2'-fluorocytidine-3'-phosphate
  modified_base 7: mod_base = OTHER; note = 2'-O-methylguanosine-3'-phosphate
  modified_base 8: mod_base = OTHER; note = 2'-fluoroadenosine-3'-phosphate
  modified_base 9: mod_base = OTHER; note = 2'-fluorocytidine-3'-phosphate
  modified_base 10: mod_base = OTHER; note = 2'-O-methyladenosine-3'-phosphate
  modified_base 11: mod_base = OTHER; note = 2'-O-methylcytidine-3'-phosphate
  modified_base 12: mod_base = OTHER; note = 2'-O-methylcytidine-3'-phosphate
  modified_base 13: mod_base = OTHER; note = 2'-O-methyladenosine-3'-phosphate
  modified_base 14: mod_base = OTHER; note = 2'-fluoroadenosine-3'-phosphate
  modified_base 15: mod_base = OTHER; note = 2'-O-methylguanosine-3'-phosphate
  modified_base 16: mod_base = OTHER; note = 2'-fluoroadenosine-3'-phosphate
  modified_base 17: mod_base = OTHER; note = 2'-O-methyluridine-3'-phosphate
  modified_base 18: mod_base = OTHER; note = 2'-O-methylcytidine-3'-phosphate
  modified_base 19: mod_base = OTHER; note = 2'-O-methylcytidine-3'-phosphate
  modified_base 20: mod_base = OTHER; note = 2'-O-methylcytidine-3'-phosphate
  modified_base 21: mod_base = OTHER; note = 2'-O-methyladenosine-3'- phosphorothioate
  modified_base 22: mod_base = OTHER; note = 2'-O-methyluridine-3'-phosphorothioate
  modified_base 23: mod_base = OTHER; note = 2'-O-methyluridine-3'-phosphate
tgattcgacaccaagatcccatt

SEQ ID NO: 373 - RNA, 23 nt, synthetic construct
  source 1..23: mol_type = other RNA
  modified_base 1: mod_base = OTHER; note = 2'-O-methyluridine-3'-phosphorothioate
  modified_base 2: mod_base = OTHER; note = 2'-fluoroadenosine-3'-phosphorothioate
  modified_base 3: mod_base = OTHER; note = 2'-O-methyladenosine-3'-phosphate
  modified_base 4: mod_base = OTHER; note = 2'-O-methyladenosine-3'-phosphate
  modified_base 5: mod_base = OTHER; note = 2'-O-methyladenosine-3'-phosphate
  modified_base 6: mod_base = OTHER; note = 2'-fluorouridine-3'-phosphate
  modified_base 7: mod_base = OTHER; note = 2'-O-methyladenosine-3'-phosphate
  modified_base 8: mod_base = OTHER; note = 2'-fluorouridine-3'-phosphate
  modified_base 9: mod_base = OTHER; note = 2'-fluorouridine-3'-phosphate
  modified_base 10: mod_base = OTHER; note = 2'-O-methylguanosine-3'-phosphate
  modified_base 11: mod_base = OTHER; note = 2'-O-methyluridine-3'-phosphate
  modified_base 12: mod_base = OTHER; note = 2'-O-methylguanosine-3'-phosphate
  modified_base 13: mod_base = OTHER; note = 2'-O-methylcytidine-3'-phosphate
  modified_base 14: mod_base = OTHER; note = 2'-fluoroadenosine-3'-phosphate
  modified_base 15: mod_base = OTHER; note = 2'-O-methylcytidine-3'-phosphate
  modified_base 16: mod_base = OTHER; note = 2'-fluorouridine-3'-phosphate
  modified_base 17: mod_base = OTHER; note = 2'-O-methylguanosine-3'-phosphate
  modified_base 18: mod_base = OTHER; note = 2'-O-methyluridine-3'-phosphate
  modified_base 19: mod_base = OTHER; note = 2'-O-methylcytidine-3'-phosphate
  modified_base 20: mod_base = OTHER; note = 2'-O-methyladenosine-3'-phosphate
  modified_base 21: mod_base = OTHER; note = 2'-O-methylguanosine-3'- phosphorothioate
  modified_base 22: mod_base = OTHER; note = 2'-O-methyladenosine-3'- phosphorothioate
  modified_base 23: mod_base = OTHER; note = 2'-O-methyluridine-3'-phosphate
taaaatattgtgcactgtcagat

SEQ ID NO: 374 - RNA, 23 nt, synthetic construct
  source 1..23: mol_type = other RNA
  modified_base 1: mod_base = OTHER; note = 2'-O-methyladenosine-3'- phosphorothioate
  modified_base 2: mod_base = OTHER; note = 2'-fluorouridine -3'-phosphorothioate
  modified_base 3: mod_base = OTHER; note = 2'-O-methylguanosine-3'-phosphate
  modified_base 4: mod_base = OTHER; note = 2'-O-methylguanosine-3'-phosphate
  modified_base 5: mod_base = OTHER; note = 2'-O-methylguanosine-3'-phosphate
  modified_base 6: mod_base = OTHER; note = 2'-fluoroadenosine-3'-phosphate
  modified_base 7: mod_base = OTHER; note = 2'-O-methyladenosine-3'-phosphate
  modified_base 8: mod_base = OTHER; note = 2'-fluoroadenosine-3'-phosphate
  modified_base 9: mod_base = OTHER; note = 2'-fluoroadenosine-3'-phosphate
  modified_base 10: mod_base = OTHER; note = 2'-O-methyluridine-3'-phosphate
  modified_base 11: mod_base = OTHER; note = 2'-O-methyladenosine-3'-phosphate
  modified_base 12: mod_base = OTHER; note = 2'-O-methyluridine-3'-phosphate
  modified_base 13: mod_base = OTHER; note = 2'-O-methyluridine-3'-phosphate
  modified_base 14: mod_base = OTHER; note = 2'-fluoroguanosine-3'-phosphate
  modified_base 15: mod_base = OTHER; note = 2'-O-methyluridine-3'-phosphate
  modified_base 16: mod_base = OTHER; note = 2'-fluoroguanosine-3'-phosphate
  modified_base 17: mod_base = OTHER; note = 2'-O-methylcytidine-3'-phosphate
  modified_base 18: mod_base = OTHER; note = 2'-O-methyladenosine-3'-phosphate
  modified_base 19: mod_base = OTHER; note = 2'-O-methylcytidine-3'-phosphate
  modified_base 20: mod_base = OTHER; note = 2'-O-methyluridine-3'-phosphate
  modified_base 21: mod_base = OTHER; note = 2'-O-methylguanosine-3'- phosphorothioate
  modified_base 22: mod_base = OTHER; note = 2'-O-methyluridine-3'-phosphorothioate
  modified_base 23: mod_base = OTHER; note = 2'-O-methylcytidine-3'-phosphate
atgggaaaatattgtgcactgtc

SEQ ID NO: 375 - RNA, 23 nt, synthetic construct
  source 1..23: mol_type = other RNA
  modified_base 1: mod_base = OTHER; note = 2'-O-methyluridine-3'-phosphorothioate
  modified_base 2: mod_base = OTHER; note = 2'-fluorouridine -3'-phosphorothioate
  modified_base 3: mod_base = OTHER; note = 2'-O-methyladenosine-3'-phosphate
  modified_base 4: mod_base = OTHER; note = 2'-O-methylguanosine-3'-phosphate
  modified_base 5: mod_base = OTHER; note = 2'-O-methylguanosine-3'-phosphate
  modified_base 6: mod_base = OTHER; note = 2'-fluoroadenosine-3'-phosphate
  modified_base 7: mod_base = OTHER; note = 2'-O-methylcytidine-3'-phosphate
  modified_base 8: mod_base = OTHER; note = 2'-fluoroadenosine-3'-phosphate
  modified_base 9: mod_base = OTHER; note = 2'-fluorocytidine-3'-phosphate
  modified_base 10: mod_base = OTHER; note = 2'-O-methylcytidine-3'-phosphate
  modified_base 11: mod_base = OTHER; note = 2'-O-methylcytidine-3'-phosphate
  modified_base 12: mod_base = OTHER; note = 2'-O-methyladenosine-3'-phosphate
  modified_base 13: mod_base = OTHER; note = 2'-O-methyluridine-3'-phosphate
  modified_base 14: mod_base = OTHER; note = 2'-fluorouridine-3'-phosphate
  modified_base 15: mod_base = OTHER; note = 2'-O-methylguanosine-3'-phosphate
  modified_base 16: mod_base = OTHER; note = 2'-fluoroadenosine-3'-phosphate
  modified_base 17: mod_base = OTHER; note = 2'-O-methyladenosine-3'-phosphate
  modified_base 18: mod_base = OTHER; note = 2'-O-methyladenosine-3'-phosphate
  modified_base 19: mod_base = OTHER; note = 2'-O-methyladenosine-3'-phosphate
  modified_base 20: mod_base = OTHER; note = 2'-O-methylguanosine-3'-phosphate
  modified_base 21: mod_base = OTHER; note = 2'-O-methyluridine-3'-phosphorothioate
  modified_base 22: mod_base = OTHER; note = 2'-O-methylcytidine-3'- phosphorothioate
  modified_base 23: mod_base = OTHER; note = 2'-O-methyladenosine-3'-phosphate
ttaggacacccattgaaaagtca

SEQ ID NO: 376 - RNA, 23 nt, synthetic construct
  source 1..23: mol_type = other RNA
  modified_base 1: mod_base = OTHER; note = 2'-O-methyladenosine-3'- phosphorothioate
  modified_base 2: mod_base = OTHER; note = 2'-fluoroguanosine-3'-phosphorothioate
  modified_base 3: mod_base = OTHER; note = 2'-O-methylguanosine-3'-phosphate
  modified_base 4: mod_base = OTHER; note = 2'-O-methyladenosine-3'-phosphate
  modified_base 5: mod_base = OTHER; note = 2'-O-methyluridine-3'-phosphate
  modified_base 6: mod_base = OTHER; note = 2'-fluorouridine-3'-phosphate
  modified_base 7: mod_base = OTHER; note = 2'-O-methyluridine-3'-phosphate
  modified_base 8: mod_base = OTHER; note = 2'-fluorouridine-3'-phosphate
  modified_base 9: mod_base = OTHER; note = 2'-fluorouridine-3'-phosphate
  modified_base 10: mod_base = OTHER; note = 2'-O-methylcytidine-3'-phosphate
  modified_base 11: mod_base = OTHER; note = 2'-O-methylcytidine-3'-phosphate
  modified_base 12: mod_base = OTHER; note = 2'-O-methyluridine-3'-phosphate
  modified_base 13: mod_base = OTHER; note = 2'-O-methylcytidine-3'-phosphate
  modified_base 14: mod_base = OTHER; note = 2'-fluoroadenosine-3'-phosphate
  modified_base 15: mod_base = OTHER; note = 2'-O-methylcytidine-3'-phosphate
  modified_base 16: mod_base = OTHER; note = 2'-fluorocytidine-3'-phosphate
  modified_base 17: mod_base = OTHER; note = 2'-O-methyladenosine-3'-phosphate
  modified_base 18: mod_base = OTHER; note = 2'-O-methyladenosine-3'-phosphate
  modified_base 19: mod_base = OTHER; note = 2'-O-methyluridine-3'-phosphate
  modified_base 20: mod_base = OTHER; note = 2'-O-methylguanosine-3'-phosphate
  modified_base 21: mod_base = OTHER; note = 2'-O-methyluridine-3'-phosphorothioate
  modified_base 22: mod_base = OTHER; note = 2'-O-methylcytidine-3'- phosphorothioate
  modified_base 23: mod_base = OTHER; note = 2'-O-methyluridine-3'-phosphate
aggatttttcctcaccaatgtct

SEQ ID NO: 377 - RNA, 23 nt, synthetic construct
  source 1..23: mol_type = other RNA
  modified_base 1: mod_base = OTHER; note = 2'-O-methyluridine-3'-phosphorothioate
  modified_base 2: mod_base = OTHER; note = 2'-fluorocytidine-3'-phosphorothioate
  modified_base 3: mod_base = OTHER; note = 2'-O-methyladenosine-3'-phosphate
  modified_base 4: mod_base = OTHER; note = 2'-O-methyluridine-3'-phosphate
  modified_base 5: mod_base = OTHER; note = 2'-O-methyluridine-3'-phosphate
  modified_base 6: mod_base = OTHER; note = 2'-fluoroguanosine-3'-phosphate
  modified_base 7: mod_base = OTHER; note = 2'-O-methyladenosine-3'-phosphate
  modified_base 8: mod_base = OTHER; note = 2'-fluoroadenosine-3'-phosphate
  modified_base 9: mod_base = OTHER; note = 2'-fluoroadenosine-3'-phosphate
  modified_base 10: mod_base = OTHER; note = 2'-O-methyladenosine-3'-phosphate
  modified_base 11: mod_base = OTHER; note = 2'-O-methylguanosine-3'-phosphate
  modified_base 12: mod_base = OTHER; note = 2'-O-methyluridine-3'-phosphate
  modified_base 13: mod_base = OTHER; note = 2'-O-methylcytidine-3'-phosphate
  modified_base 14: mod_base = OTHER; note = 2'-fluoroadenosine-3'-phosphate
  modified_base 15: mod_base = OTHER; note = 2'-O-methyladenosine-3'-phosphate
  modified_base 16: mod_base = OTHER; note = 2'-fluoroadenosine-3'-phosphate
  modified_base 17: mod_base = OTHER; note = 2'-O-methyladenosine-3'-phosphate
  modified_base 18: mod_base = OTHER; note = 2'-O-methylguanosine-3'-phosphate
  modified_base 19: mod_base = OTHER; note = 2'-O-methylcytidine-3'-phosphate
  modified_base 20: mod_base = OTHER; note = 2'-O-methyladenosine-3'-phosphate
  modified_base 21: mod_base = OTHER; note = 2'-O-methyladenosine-3'- phosphorothioate
  modified_base 22: mod_base = OTHER; note = 2'-O-methyluridine-3'-phosphorothioate
  modified_base 23: mod_base = OTHER; note = 2'-O-methylguanosine-3'-phosphate
tcattgaaaagtcaaaagcaatg

SEQ ID NO: 378 - RNA, 23 nt, synthetic construct
  source 1..23: mol_type = other RNA
  modified_base 1: mod_base = OTHER; note = 2'-O-methyluridine-3'-phosphorothioate
  modified_base 2: mod_base = OTHER; note = 2'-fluorocytidine-3'-phosphorothioate
  modified_base 3: mod_base = OTHER; note = 2'-O-methyladenosine-3'-phosphate
  modified_base 4: mod_base = OTHER; note = 2'-O-methyluridine-3'-phosphate
  modified_base 5: mod_base = OTHER; note = 2'-O-methylcytidine-3'-phosphate
  modified_base 6: mod_base = OTHER; note = 2'-fluoroadenosine-3'-phosphate
  modified_base 7: mod_base = OTHER; note = 2'-O-methyluridine-3'-phosphate
  modified_base 8: mod_base = OTHER; note = 2'-fluorocytidine-3'-phosphate
  modified_base 9: mod_base = OTHER; note = 2'-fluoroadenosine-3'-phosphate
  modified_base 10: mod_base = OTHER; note = 2'-O-methylcytidine-3'-phosphate
  modified_base 11: mod_base = OTHER; note = 2'-O-methylcytidine-3'-phosphate
  modified_base 12: mod_base = OTHER; note = 2'-O-methyluridine-3'-phosphate
  modified_base 13: mod_base = OTHER; note = 2'-O-methylcytidine-3'-phosphate
  modified_base 14: mod_base = OTHER; note = 2'-fluorouridine-3'-phosphate
  modified_base 15: mod_base = OTHER; note = 2'-O-methylcytidine-3'-phosphate
  modified_base 16: mod_base = OTHER; note = 2'-fluoroadenosine-3'-phosphate
  modified_base 17: mod_base = OTHER; note = 2'-O-methyladenosine-3'-phosphate
  modified_base 18: mod_base = OTHER; note = 2'-O-methyladenosine-3'-phosphate
  modified_base 19: mod_base = OTHER; note = 2'-O-methyladenosine-3'-phosphate
  modified_base 20: mod_base = OTHER; note = 2'-O-methyluridine-3'-phosphate
  modified_base 21: mod_base = OTHER; note = 2'-O-methylguanosine-3'- phosphorothioate
  modified_base 22: mod_base = OTHER; note = 2'-O-methylcytidine-3'- phosphorothioate
  modified_base 23: mod_base = OTHER; note = 2'-O-methylcytidine-3'-phosphate
tcatcatcacctctcaaaatgcc

SEQ ID NO: 379 - RNA, 23 nt, synthetic construct
  source 1..23: mol_type = other RNA
  modified_base 1: mod_base = OTHER; note = 2'-O-methyluridine-3'-phosphorothioate
  modified_base 2: mod_base = OTHER; note = 2'-fluoroguanosine-3'-phosphorothioate
  modified_base 3: mod_base = OTHER; note = 2'-O-methyladenosine-3'-phosphate
  modified_base 4: mod_base = OTHER; note = 2'-O-methylcytidine-3'-phosphate
  modified_base 5: mod_base = OTHER; note = 2'-O-methyladenosine-3'-phosphate
  modified_base 6: mod_base = OTHER; note = 2'-fluorocytidine-3'-phosphate
  modified_base 7: mod_base = OTHER; note = 2'-O-methylcytidine-3'-phosphate
  modified_base 8: mod_base = OTHER; note = 2'-fluorocytidine-3'-phosphate
  modified_base 9: mod_base = OTHER; note = 2'-fluoroadenosine-3'-phosphate
  modified_base 10: mod_base = OTHER; note = 2'-O-methyluridine-3'-phosphate
  modified_base 11: mod_base = OTHER; note = 2'-O-methyluridine-3'-phosphate
  modified_base 12: mod_base = OTHER; note = 2'-O-methylguanosine-3'-phosphate
  modified_base 13: mod_base = OTHER; note = 2'-O-methyladenosine-3'-phosphate
  modified_base 14: mod_base = OTHER; note = 2'-fluoroadenosine-3'-phosphate
  modified_base 15: mod_base = OTHER; note = 2'-O-methyladenosine-3'-phosphate
  modified_base 16: mod_base = OTHER; note = 2'-fluoroadenosine-3'-phosphate
  modified_base 17: mod_base = OTHER; note = 2'-O-methylguanosine-3'-phosphate
  modified_base 18: mod_base = OTHER; note = 2'-O-methyluridine-3'-phosphate
  modified_base 19: mod_base = OTHER; note = 2'-O-methylcytidine-3'-phosphate
  modified_base 20: mod_base = OTHER; note = 2'-O-methyladenosine-3'-phosphate
  modified_base 21: mod_base = OTHER; note = 2'-O-methyladenosine-3'- phosphorothioate
  modified_base 22: mod_base = OTHER; note = 2'-O-methyladenosine-3'- phosphorothioate
  modified_base 23: mod_base = OTHER; note = 2'-O-methyladenosine-3'-phosphate
tgacacccattgaaaagtcaaaa

SEQ ID NO: 380 - RNA, 23 nt, synthetic construct
  source 1..23: mol_type = other RNA
  modified_base 1: mod_base = OTHER; note = 2'-O-methyluridine-3'-phosphorothioate
  modified_base 2: mod_base = OTHER; note = 2'-fluorocytidine-3'-phosphorothioate
  modified_base 3: mod_base = OTHER; note = 2'-O-methyluridine-3'-phosphate
  modified_base 4: mod_base = OTHER; note = 2'-O-methylguanosine-3'-phosphate
  modified_base 5: mod_base = OTHER; note = 2'-O-methyluridine-3'-phosphate
  modified_base 6: mod_base = OTHER; note = 2'-fluorocytidine-3'-phosphate
  modified_base 7: mod_base = OTHER; note = 2'-O-methylcytidine-3'-phosphate
  modified_base 8: mod_base = OTHER; note = 2'-fluorouridine-3'-phosphate
  modified_base 9: mod_base = OTHER; note = 2'-fluoroadenosine-3'-phosphate
  modified_base 10: mod_base = OTHER; note = 2'-O-methyladenosine-3'-phosphate
  modified_base 11: mod_base = OTHER; note = 2'-O-methyladenosine-3'-phosphate
  modified_base 12: mod_base = OTHER; note = 2'-O-methyladenosine-3'-phosphate
  modified_base 13: mod_base = OTHER; note = 2'-O-methylcytidine-3'-phosphate
  modified_base 14: mod_base = OTHER; note = 2'-fluoroadenosine-3'-phosphate
  modified_base 15: mod_base = OTHER; note = 2'-O-methylguanosine-3'-phosphate
  modified_base 16: mod_base = OTHER; note = 2'-fluoroadenosine-3'-phosphate
  modified_base 17: mod_base = OTHER; note = 2'-O-methyladenosine-3'-phosphate
  modified_base 18: mod_base = OTHER; note = 2'-O-methylguanosine-3'-phosphate
  modified_base 19: mod_base = OTHER; note = 2'-O-methyluridine-3'-phosphate
  modified_base 20: mod_base = OTHER; note = 2'-O-methylcytidine-3'-phosphate
  modified_base 21: mod_base = OTHER; note = 2'-O-methylguanosine-3'- phosphorothioate
  modified_base 22: mod_base = OTHER; note = 2'-O-methyladenosine-3'- phosphorothioate
  modified_base 23: mod_base = OTHER; note = 2'-O-methylcytidine-3'-phosphate
tctgtcctaaaacagaagtcgac

SEQ ID NO: 381 - RNA, 23 nt, synthetic construct
  source 1..23: mol_type = other RNA
  modified_base 1: mod_base = OTHER; note = 2'-O-methyluridine-3'-phosphorothioate
  modified_base 2: mod_base = OTHER; note = 2'-fluoroadenosine-3'-phosphorothioate
  modified_base 3: mod_base = OTHER; note = 2'-O-methyluridine-3'-phosphate
  modified_base 4: mod_base = OTHER; note = 2'-O-methyluridine-3'-phosphate
  modified_base 5: mod_base = OTHER; note = 2'-O-methylcytidine-3'-phosphate
  modified_base 6: mod_base = OTHER; note = 2'-fluorouridine-3'-phosphate
  modified_base 7: mod_base = OTHER; note = 2'-O-methylguanosine-3'-phosphate
  modified_base 8: mod_base = OTHER; note = 2'-fluoroguanosine-3'-phosphate
  modified_base 9: mod_base = OTHER; note = 2'-fluorocytidine-3'-phosphate
  modified_base 10: mod_base = OTHER; note = 2'-O-methyladenosine-3'-phosphate
  modified_base 11: mod_base = OTHER; note = 2'-O-methylcytidine-3'-phosphate
  modified_base 12: mod_base = OTHER; note = 2'-O-methylcytidine-3'-phosphate
  modified_base 13: mod_base = OTHER; note = 2'-O-methylcytidine-3'-phosphate
  modified_base 14: mod_base = OTHER; note = 2'-fluoroadenosine-3'-phosphate
  modified_base 15: mod_base = OTHER; note = 2'-O-methylcytidine-3'-phosphate
  modified_base 16: mod_base = OTHER; note = 2'-fluorouridine-3'-phosphate
  modified_base 17: mod_base = OTHER; note = 2'-O-methylcytidine-3'-phosphate
  modified_base 18: mod_base = OTHER; note = 2'-O-methyladenosine-3'-phosphate
  modified_base 19: mod_base = OTHER; note = 2'-O-methylguanosine-3'-phosphate
  modified_base 20: mod_base = OTHER; note = 2'-O-methyladenosine-3'-phosphate
  modified_base 21: mod_base = OTHER; note = 2'-O-methylguanosine-3'- phosphorothioate
  modified_base 22: mod_base = OTHER; note = 2'-O-methylcytidine-3'- phosphorothioate
  modified_base 23: mod_base = OTHER; note = 2'-O-methylcytidine-3'-phosphate
tattctggcacccactcagagcc

SEQ ID NO: 382 - RNA, 23 nt, synthetic construct
  source 1..23: mol_type = other RNA
  modified_base 1: mod_base = OTHER; note = 2'-O-methyluridine-3'-phosphorothioate
  modified_base 2: mod_base = OTHER; note = 2'-fluoroadenosine-3'-phosphorothioate
  modified_base 3: mod_base = OTHER; note = 2'-O-methylcytidine-3'-phosphate
  modified_base 4: mod_base = OTHER; note = 2'-O-methyluridine-3'-phosphate
  modified_base 5: mod_base = OTHER; note = 2'-O-methyluridine-3'-phosphate
  modified_base 6: mod_base = OTHER; note = 2'-fluorouridine-3'-phosphate
  modified_base 7: mod_base = OTHER; note = 2'-O-methylcytidine-3'-phosphate
  modified_base 8: mod_base = OTHER; note = 2'-fluoroadenosine-3'-phosphate
  modified_base 9: mod_base = OTHER; note = 2'-fluorocytidine-3'-phosphate
  modified_base 10: mod_base = OTHER; note = 2'-O-methyladenosine-3'-phosphate
  modified_base 11: mod_base = OTHER; note = 2'-O-methyluridine-3'-phosphate
  modified_base 12: mod_base = OTHER; note = 2'-O-methyluridine-3'-phosphate
  modified_base 13: mod_base = OTHER; note = 2'-O-methylcytidine-3'-phosphate
  modified_base 14: mod_base = OTHER; note = 2'-fluorouridine-3'-phosphate
  modified_base 15: mod_base = OTHER; note = 2'-O-methylguanosine-3'-phosphate
  modified_base 16: mod_base = OTHER; note = 2'-fluoroguanosine-3'-phosphate
  modified_base 17: mod_base = OTHER; note = 2'-O-methylcytidine-3'-phosphate
  modified_base 18: mod_base = OTHER; note = 2'-O-methyladenosine-3'-phosphate
  modified_base 19: mod_base = OTHER; note = 2'-O-methylcytidine-3'-phosphate
  modified_base 20: mod_base = OTHER; note = 2'-O-methylcytidine-3'-phosphate
  modified_base 21: mod_base = OTHER; note = 2'-O-methylcytidine-3'- phosphorothioate
  modified_base 22: mod_base = OTHER; note = 2'-O-methyladenosine-3'- phosphorothioate
  modified_base 23: mod_base = OTHER; note = 2'-O-methylcytidine-3'-phosphate
tactttcacattctggcacccac

SEQ ID NO: 383 - RNA, 23 nt, synthetic construct
  source 1..23: mol_type = other RNA
  modified_base 1: mod_base = OTHER; note = 2'-O-methyluridine-3'-phosphorothioate
  modified_base 2: mod_base = OTHER; note = 2'-fluoroguanosine-3'-phosphorothioate
  modified_base 3: mod_base = OTHER; note = 2'-O-methyluridine-3'-phosphate
  modified_base 4: mod_base = OTHER; note = 2'-O-methyluridine-3'-phosphate
  modified_base 5: mod_base = OTHER; note = 2'-O-methylcytidine-3'-phosphate
  modified_base 6: mod_base = OTHER; note = 2'-fluorocytidine-3'-phosphate
  modified_base 7: mod_base = OTHER; note = 2'-O-methyluridine-3'-phosphate
  modified_base 8: mod_base = OTHER; note = 2'-fluoroadenosine-3'-phosphate
  modified_base 9: mod_base = OTHER; note = 2'-fluoroguanosine-3'-phosphate
  modified_base 10: mod_base = OTHER; note = 2'-O-methylguanosine-3'-phosphate
  modified_base 11: mod_base = OTHER; note = 2'-O-methyladenosine-3'-phosphate
  modified_base 12: mod_base = OTHER; note = 2'-O-methylcytidine-3'-phosphate
  modified_base 13: mod_base = OTHER; note = 2'-O-methyladenosine-3'-phosphate
  modified_base 14: mod_base = OTHER; note = 2'-fluorocytidine-3'-phosphate
  modified_base 15: mod_base = OTHER; note = 2'-O-methylcytidine-3'-phosphate
  modified_base 16: mod_base = OTHER; note = 2'-fluorocytidine-3'-phosphate
  modified_base 17: mod_base = OTHER; note = 2'-O-methyladenosine-3'-phosphate
  modified_base 18: mod_base = OTHER; note = 2'-O-methyluridine-3'-phosphate
  modified_base 19: mod_base = OTHER; note = 2'-O-methyluridine-3'-phosphate
  modified_base 20: mod_base = OTHER; note = 2'-O-methylguanosine-3'-phosphate
  modified_base 21: mod_base = OTHER; note = 2'-O-methyladenosine-3'- phosphorothioate
  modified_base 22: mod_base = OTHER; note = 2'-O-methyladenosine-3'- phosphorothioate
  modified_base 23: mod_base = OTHER; note = 2'-O-methyladenosine-3'-phosphate
tgttcctaggacacccattgaaa

SEQ ID NO: 384 - RNA, 23 nt, synthetic construct
  source 1..23: mol_type = other RNA
  modified_base 1: mod_base = OTHER; note = 2'-O-methyluridine-3'-phosphorothioate
  modified_base 2: mod_base = OTHER; note = 2'-fluoroadenosine-3'-phosphorothioate
  modified_base 3: mod_base = OTHER; note = 2'-O-methyladenosine-3'-phosphate
  modified_base 4: mod_base = OTHER; note = 2'-O-methyluridine-3'-phosphate
  modified_base 5: mod_base = OTHER; note = 2'-O-methylguanosine-3'-phosphate
  modified_base 6: mod_base = OTHER; note = 2'-fluorouridine-3'-phosphate
  modified_base 7: mod_base = OTHER; note = 2'-O-methylcytidine-3'-phosphate
  modified_base 8: mod_base = OTHER; note = 2'-fluorouridine-3'-phosphate
  modified_base 9: mod_base = OTHER; note = 2'-fluorouridine-3'-phosphate
  modified_base 10: mod_base = OTHER; note = 2'-O-methylguanosine-3'-phosphate
  modified_base 11: mod_base = OTHER; note = 2'-O-methyluridine-3'-phosphate
  modified_base 12: mod_base = OTHER; note = 2'-O-methylcytidine-3'-phosphate
  modified_base 13: mod_base = OTHER; note = 2'-O-methylguanosine-3'-phosphate
  modified_base 14: mod_base = OTHER; note = 2'-fluoroadenosine-3'-phosphate
  modified_base 15: mod_base = OTHER; note = 2'-O-methyluridine-3'-phosphate
  modified_base 16: mod_base = OTHER; note = 2'-fluoroguanosine-3'-phosphate
  modified_base 17: mod_base = OTHER; note = 2'-O-methyladenosine-3'-phosphate
  modified_base 18: mod_base = OTHER; note = 2'-O-methylcytidine-3'-phosphate
  modified_base 19: mod_base = OTHER; note = 2'-O-methyluridine-3'-phosphate
  modified_base 20: mod_base = OTHER; note = 2'-O-methyluridine-3'-phosphate
  modified_base 21: mod_base = OTHER; note = 2'-O-methyluridine-3'-phosphorothioate
  modified_base 22: mod_base = OTHER; note = 2'-O-methylcytidine-3'- phosphorothioate
  modified_base 23: mod_base = OTHER; note = 2'-O-methyladenosine-3'-phosphate
taatgtcttgtcgatgactttca

SEQ ID NO: 385 - RNA, 23 nt, synthetic construct
  source 1..23: mol_type = other RNA
  modified_base 1: mod_base = OTHER; note = 2'-O-methyluridine-3'-phosphorothioate
  modified_base 2: mod_base = OTHER; note = 2'-fluoroguanosine-3'-phosphorothioate
  modified_base 3: mod_base = OTHER; note = 2'-O-methylcytidine-3'-phosphate
  modified_base 4: mod_base = OTHER; note = 2'-O-methyladenosine-3'-phosphate
  modified_base 5: mod_base = OTHER; note = 2'-O-methyluridine-3'-phosphate
  modified_base 6: mod_base = OTHER; note = 2'-fluorocytidine-3'-phosphate
  modified_base 7: mod_base = OTHER; note = 2'-O-methyladenosine-3'-phosphate
  modified_base 8: mod_base = OTHER; note = 2'-fluorouridine-3'-phosphate
  modified_base 9: mod_base = OTHER; note = 2'-fluorocytidine-3'-phosphate
  modified_base 10: mod_base = OTHER; note = 2'-O-methyladenosine-3'-phosphate
  modified_base 11: mod_base = OTHER; note = 2'-O-methylcytidine-3'-phosphate
  modified_base 12: mod_base = OTHER; note = 2'-O-methylcytidine-3'-phosphate
  modified_base 13: mod_base = OTHER; note = 2'-O-methyluridine-3'-phosphate
  modified_base 14: mod_base = OTHER; note = 2'-fluorocytidine-3'-phosphate
  modified_base 15: mod_base = OTHER; note = 2'-O-methyluridine-3'-phosphate
  modified_base 16: mod_base = OTHER; note = 2'-fluorocytidine-3'-phosphate
  modified_base 17: mod_base = OTHER; note = 2'-O-methyladenosine-3'-phosphate
  modified_base 18: mod_base = OTHER; note = 2'-O-methyladenosine-3'-phosphate
  modified_base 19: mod_base = OTHER; note = 2'-O-methyladenosine-3'-phosphate
  modified_base 20: mod_base = OTHER; note = 2'-O-methyladenosine-3'-phosphate
  modified_base 21: mod_base = OTHER; note = 2'-O-methyluridine-3'-phosphorothioate
  modified_base 22: mod_base = OTHER; note = 2'-O-methylguanosine-3'- phosphorothioate
  modified_base 23: mod_base = OTHER; note = 2'-O-methylcytidine-3'-phosphate
tgcatcatcacctctcaaaatgc

SEQ ID NO: 386 - RNA, 23 nt, synthetic construct
  source 1..23: mol_type = other RNA
  modified_base 1: mod_base = OTHER; note = 2'-O-methyluridine-3'-phosphorothioate
  modified_base 2: mod_base = OTHER; note = 2'-fluorocytidine-3'-phosphorothioate
  modified_base 3: mod_base = OTHER; note = 2'-O-methyluridine-3'-phosphate
  modified_base 4: mod_base = OTHER; note = 2'-O-methylcytidine-3'-phosphate
  modified_base 5: mod_base = OTHER; note = 2'-O-methyladenosine-3'-phosphate
  modified_base 6: mod_base = OTHER; note = 2'-fluorocytidine-3'-phosphate
  modified_base 7: mod_base = OTHER; note = 2'-O-methylcytidine-3'-phosphate
  modified_base 8: mod_base = OTHER; note = 2'-fluoroadenosine-3'-phosphate
  modified_base 9: mod_base = OTHER; note = 2'-fluoroadenosine-3'-phosphate
  modified_base 10: mod_base = OTHER; note = 2'-O-methyluridine-3'-phosphate
  modified_base 11: mod_base = OTHER; note = 2'-O-methylguanosine-3'-phosphate
  modified_base 12: mod_base = OTHER; note = 2'-O-methyluridine-3'-phosphate
  modified_base 13: mod_base = OTHER; note = 2'-O-methylcytidine-3'-phosphate
  modified_base 14: mod_base = OTHER; note = 2'-fluorouridine-3'-phosphate
  modified_base 15: mod_base = OTHER; note = 2'-O-methyluridine-3'-phosphate
  modified_base 16: mod_base = OTHER; note = 2'-fluoroguanosine-3'-phosphate
  modified_base 17: mod_base = OTHER; note = 2'-O-methyluridine-3'-phosphate
  modified_base 18: mod_base = OTHER; note = 2'-O-methylcytidine-3'-phosphate
  modified_base 19: mod_base = OTHER; note = 2'-O-methylguanosine-3'-phosphate
  modified_base 20: mod_base = OTHER; note = 2'-O-methyladenosine-3'-phosphate
  modified_base 21: mod_base = OTHER; note = 2'-O-methyluridine-3'-phosphorothioate
  modified_base 22: mod_base = OTHER; note = 2'-O-methylguanosine-3'- phosphorothioate
  modified_base 23: mod_base = OTHER; note = 2'-O-methyladenosine-3'-phosphate
tctcaccaatgtcttgtcgatga

SEQ ID NO: 387 - RNA, 23 nt, synthetic construct
  source 1..23: mol_type = other RNA
  modified_base 1: mod_base = OTHER; note = 2'-O-methyluridine-3'-phosphorothioate
  modified_base 2: mod_base = OTHER; note = 2'-fluoroguanosine-3'-phosphorothioate
  modified_base 3: mod_base = OTHER; note = 2'-O-methyladenosine-3'-phosphate
  modified_base 4: mod_base = OTHER; note = 2'-O-methylcytidine-3'-phosphate
  modified_base 5: mod_base = OTHER; note = 2'-O-methyluridine-3'-phosphate
  modified_base 6: mod_base = OTHER; note = 2'-fluorouridine-3'-phosphate
  modified_base 7: mod_base = OTHER; note = 2'-O-methyluridine-3'-phosphate
  modified_base 8: mod_base = OTHER; note = 2'-fluorocytidine-3'-phosphate
  modified_base 9: mod_base = OTHER; note = 2'-fluoroadenosine-3'-phosphate
  modified_base 10: mod_base = OTHER; note = 2'-O-methylcytidine-3'-phosphate
  modified_base 11: mod_base = OTHER; note = 2'-O-methyladenosine-3'-phosphate
  modified_base 12: mod_base = OTHER; note = 2'-O-methyluridine-3'-phosphate
  modified_base 13: mod_base = OTHER; note = 2'-O-methyluridine-3'-phosphate
  modified_base 14: mod_base = OTHER; note = 2'-fluorocytidine-3'-phosphate
  modified_base 15: mod_base = OTHER; note = 2'-O-methyluridine-3'-phosphate
  modified_base 16: mod_base = OTHER; note = 2'-fluoroguanosine-3'-phosphate
  modified_base 17: mod_base = OTHER; note = 2'-O-methylguanosine-3'-phosphate
  modified_base 18: mod_base = OTHER; note = 2'-O-methylcytidine-3'-phosphate
  modified_base 19: mod_base = OTHER; note = 2'-O-methyladenosine-3'-phosphate
  modified_base 20: mod_base = OTHER; note = 2'-O-methylcytidine-3'-phosphate
  modified_base 21: mod_base = OTHER; note = 2'-O-methylcytidine-3'- phosphorothioate
  modified_base 22: mod_base = OTHER; note = 2'-O-methylcytidine-3'- phosphorothioate
  modified_base 23: mod_base = OTHER; note = 2'-O-methyladenosine-3'-phosphate
tgactttcacattctggcaccca

SEQ ID NO: 388 - RNA, 23 nt, synthetic construct
  source 1..23: mol_type = other RNA
  modified_base 1: mod_base = OTHER; note = 2'-O-methyluridine-3'-phosphorothioate
  modified_base 2: mod_base = OTHER; note = 2'-fluoroguanosine-3'-phosphorothioate
  modified_base 3: mod_base = OTHER; note = 2'-O-methylguanosine-3'-phosphate
  modified_base 4: mod_base = OTHER; note = 2'-O-methyladenosine-3'-phosphate
  modified_base 5: mod_base = OTHER; note = 2'-O-methyladenosine-3'-phosphate
  modified_base 6: mod_base = OTHER; note = 2'-fluoroadenosine-3'-phosphate
  modified_base 7: mod_base = OTHER; note = 2'-O-methyladenosine-3'-phosphate
  modified_base 8: mod_base = OTHER; note = 2'-fluorouridine-3'-phosphate
  modified_base 9: mod_base = OTHER; note = 2'-fluoroadenosine-3'-phosphate
  modified_base 10: mod_base = OTHER; note = 2'-O-methyluridine-3'-phosphate
  modified_base 11: mod_base = OTHER; note = 2'-O-methyluridine-3'-phosphate
  modified_base 12: mod_base = OTHER; note = 2'-O-methylguanosine-3'-phosphate
  modified_base 13: mod_base = OTHER; note = 2'-O-methyluridine-3'-phosphate
  modified_base 14: mod_base = OTHER; note = 2'-fluoroguanosine-3'-phosphate
  modified_base 15: mod_base = OTHER; note = 2'-O-methylcytidine-3'-phosphate
  modified_base 16: mod_base = OTHER; note = 2'-fluoroadenosine-3'-phosphate
  modified_base 17: mod_base = OTHER; note = 2'-O-methylcytidine-3'-phosphate
  modified_base 18: mod_base = OTHER; note = 2'-O-methyluridine-3'-phosphate
  modified_base 19: mod_base = OTHER; note = 2'-O-methylguanosine-3'-phosphate
  modified_base 20: mod_base = OTHER; note = 2'-O-methyluridine-3'-phosphate
  modified_base 21: mod_base = OTHER; note = 2'-O-methylcytidine-3'- phosphorothioate
  modified_base 22: mod_base = OTHER; note = 2'-O-methyladenosine-3'- phosphorothioate
  modified_base 23: mod_base = OTHER; note = 2'-O-methylguanosine-3'-phosphate
tggaaaatattgtgcactgtcag

SEQ ID NO: 389 - RNA, 23 nt, synthetic construct
  source 1..23: mol_type = other RNA
  modified_base 1: mod_base = OTHER; note = 2'-O-methyluridine-3'-phosphorothioate
  modified_base 2: mod_base = OTHER; note = 2'-fluorouridine -3'-phosphorothioate
  modified_base 3: mod_base = OTHER; note = 2'-O-methylcytidine-3'-phosphate
  modified_base 4: mod_base = OTHER; note = 2'-O-methyluridine-3'-phosphate
  modified_base 5: mod_base = OTHER; note = 2'-O-methylguanosine-3'-phosphate
  modified_base 6: mod_base = OTHER; note = 2'-fluorocytidine-3'-phosphate
  modified_base 7: mod_base = OTHER; note = 2'-O-methyladenosine-3'-phosphate
  modified_base 8: mod_base = OTHER; note = 2'-fluorocytidine-3'-phosphate
  modified_base 9: mod_base = OTHER; note = 2'-fluoroadenosine-3'-phosphate
  modified_base 10: mod_base = OTHER; note = 2'-O-methylguanosine-3'-phosphate
  modified_base 11: mod_base = OTHER; note = 2'-O-methyluridine-3'-phosphate
  modified_base 12: mod_base = OTHER; note = 2'-O-methylguanosine-3'-phosphate
  modified_base 13: mod_base = OTHER; note = 2'-O-methyluridine-3'-phosphate
  modified_base 14: mod_base = OTHER; note = 2'-fluorocytidine-3'-phosphate
  modified_base 15: mod_base = OTHER; note = 2'-O-methyluridine-3'-phosphate
  modified_base 16: mod_base = OTHER; note = 2'-fluorocytidine-3'-phosphate
  modified_base 17: mod_base = OTHER; note = 2'-O-methyluridine-3'-phosphate
  modified_base 18: mod_base = OTHER; note = 2'-O-methyluridine-3'-phosphate
  modified_base 19: mod_base = OTHER; note = 2'-O-methyluridine-3'-phosphate
  modified_base 20: mod_base = OTHER; note = 2'-O-methylguanosine-3'-phosphate
  modified_base 21: mod_base = OTHER; note = 2'-O-methyluridine-3'-phosphorothioate
  modified_base 22: mod_base = OTHER; note = 2'-O-methylcytidine-3'- phosphorothioate
  modified_base 23: mod_base = OTHER; note = 2'-O-methyladenosine-3'-phosphate
ttctgcacagtgtctctttgtca

SEQ ID NO: 390 - RNA, 23 nt, synthetic construct
  source 1..23: mol_type = other RNA
  modified_base 1: mod_base = OTHER; note = 2'-O-methyluridine-3'-phosphorothioate
  modified_base 2: mod_base = OTHER; note = 2'-fluorocytidine-3'-phosphorothioate
  modified_base 3: mod_base = OTHER; note = 2'-O-methylcytidine-3'-phosphate
  modified_base 4: mod_base = OTHER; note = 2'-O-methyluridine-3'-phosphate
  modified_base 5: mod_base = OTHER; note = 2'-O-methyladenosine-3'-phosphate
  modified_base 6: mod_base = OTHER; note = 2'-fluoroguanosine-3'-phosphate
  modified_base 7: mod_base = OTHER; note = 2'-O-methylguanosine-3'-phosphate
  modified_base 8: mod_base = OTHER; note = 2'-fluoroadenosine-3'-phosphate
  modified_base 9: mod_base = OTHER; note = 2'-fluorocytidine-3'-phosphate
  modified_base 10: mod_base = OTHER; note = 2'-O-methyladenosine-3'-phosphate
  modified_base 11: mod_base = OTHER; note = 2'-O-methylcytidine-3'-phosphate
  modified_base 12: mod_base = OTHER; note = 2'-O-methylcytidine-3'-phosphate
  modified_base 13: mod_base = OTHER; note = 2'-O-methylcytidine-3'-phosphate
  modified_base 14: mod_base = OTHER; note = 2'-fluoroadenosine-3'-phosphate
  modified_base 15: mod_base = OTHER; note = 2'-O-methyluridine-3'-phosphate
  modified_base 16: mod_base = OTHER; note = 2'-fluorouridine-3'-phosphate
  modified_base 17: mod_base = OTHER; note = 2'-O-methylguanosine-3'-phosphate
  modified_base 18: mod_base = OTHER; note = 2'-O-methyladenosine-3'-phosphate
  modified_base 19: mod_base = OTHER; note = 2'-O-methyladenosine-3'-phosphate
  modified_base 20: mod_base = OTHER; note = 2'-O-methyladenosine-3'-phosphate
  modified_base 21: mod_base = OTHER; note = 2'-O-methyladenosine-3'- phosphorothioate
  modified_base 22: mod_base = OTHER; note = 2'-O-methylguanosine-3'- phosphorothioate
  modified_base 23: mod_base = OTHER; note = 2'-O-methyluridine-3'-phosphate
tcctaggacacccattgaaaagt

SEQ ID NO: 391 - RNA, 23 nt, synthetic construct
  source 1..23: mol_type = other RNA
  modified_base 1: mod_base = OTHER; note = 2'-O-methyladenosine-3'- phosphorothioate
  modified_base 2: mod_base = OTHER; note = 2'-fluorocytidine-3'-phosphorothioate
  modified_base 3: mod_base = OTHER; note = 2'-O-methyluridine-3'-phosphate
  modified_base 4: mod_base = OTHER; note = 2'-O-methylguanosine-3'-phosphate
  modified_base 5: mod_base = OTHER; note = 2'-O-methyluridine-3'-phosphate
  modified_base 6: mod_base = OTHER; note = 2'-fluorocytidine-3'-phosphate
  modified_base 7: mod_base = OTHER; note = 2'-O-methyladenosine-3'-phosphate
  modified_base 8: mod_base = OTHER; note = 2'-fluoroguanosine-3'-phosphate
  modified_base 9: mod_base = OTHER; note = 2'-fluoroadenosine-3'-phosphate
  modified_base 10: mod_base = OTHER; note = 2'-O-methyluridine-3'-phosphate
  modified_base 11: mod_base = OTHER; note = 2'-O-methylcytidine-3'-phosphate
  modified_base 12: mod_base = OTHER; note = 2'-O-methyluridine-3'-phosphate
  modified_base 13: mod_base = OTHER; note = 2'-O-methyluridine-3'-phosphate
  modified_base 14: mod_base = OTHER; note = 2'-fluoroguanosine-3'-phosphate
  modified_base 15: mod_base = OTHER; note = 2'-O-methylguanosine-3'-phosphate
  modified_base 16: mod_base = OTHER; note = 2'-fluoroadenosine-3'-phosphate
  modified_base 17: mod_base = OTHER; note = 2'-O-methyladenosine-3'-phosphate
  modified_base 18: mod_base = OTHER; note = 2'-O-methyladenosine-3'-phosphate
  modified_base 19: mod_base = OTHER; note = 2'-O-methylcytidine-3'-phosphate
  modified_base 20: mod_base = OTHER; note = 2'-O-methylguanosine-3'-phosphate
  modified_base 21: mod_base = OTHER; note = 2'-O-methylguanosine-3'- phosphorothioate
  modified_base 22: mod_base = OTHER; note = 2'-O-methylcytidine-3'- phosphorothioate
  modified_base 23: mod_base = OTHER; note = 2'-O-methylcytidine-3'-phosphate
actgtcagatcttggaaacggcc

SEQ ID NO: 392 - RNA, 23 nt, synthetic construct
  source 1..23: mol_type = other RNA
  modified_base 1: mod_base = OTHER; note = 2'-O-methyluridine-3'-phosphorothioate
  modified_base 2: mod_base = OTHER; note = 2'-fluorouridine -3'-phosphorothioate
  modified_base 3: mod_base = OTHER; note = 2'-O-methyluridine-3'-phosphate
  modified_base 4: mod_base = OTHER; note = 2'-O-methylguanosine-3'-phosphate
  modified_base 5: mod_base = OTHER; note = 2'-O-methyladenosine-3'-phosphate
  modified_base 6: mod_base = OTHER; note = 2'-fluoroadenosine-3'-phosphate
  modified_base 7: mod_base = OTHER; note = 2'-O-methylcytidine-3'-phosphate
  modified_base 8: mod_base = OTHER; note = 2'-fluoroadenosine-3'-phosphate
  modified_base 9: mod_base = OTHER; note = 2'-fluorocytidine-3'-phosphate
  modified_base 10: mod_base = OTHER; note = 2'-O-methylcytidine-3'-phosphate
  modified_base 11: mod_base = OTHER; note = 2'-O-methyluridine-3'-phosphate
  modified_base 12: mod_base = OTHER; note = 2'-O-methyluridine-3'-phosphate
  modified_base 13: mod_base = OTHER; note = 2'-O-methyluridine-3'-phosphate
  modified_base 14: mod_base = OTHER; note = 2'-fluorocytidine-3'-phosphate
  modified_base 15: mod_base = OTHER; note = 2'-O-methyluridine-3'-phosphate
  modified_base 16: mod_base = OTHER; note = 2'-fluorocytidine-3'-phosphate
  modified_base 17: mod_base = OTHER; note = 2'-O-methylcytidine-3'-phosphate
  modified_base 18: mod_base = OTHER; note = 2'-O-methylcytidine-3'-phosphate
  modified_base 19: mod_base = OTHER; note = 2'-O-methylcytidine-3'-phosphate
  modified_base 20: mod_base = OTHER; note = 2'-O-methylcytidine-3'-phosphate
  modified_base 21: mod_base = OTHER; note = 2'-O-methyluridine-3'-phosphorothioate
  modified_base 22: mod_base = OTHER; note = 2'-O-methylguanosine-3'- phosphorothioate
  modified_base 23: mod_base = OTHER; note = 2'-O-methylguanosine-3'-phosphate
tttgaacacctttctccccctgg

SEQ ID NO: 393 - RNA, 23 nt, synthetic construct
  source 1..23: mol_type = other RNA
  modified_base 1: mod_base = OTHER; note = 2'-O-methyladenosine-3'- phosphorothioate
  modified_base 2: mod_base = OTHER; note = 2'-fluorocytidine-3'-phosphorothioate
  modified_base 3: mod_base = OTHER; note = 2'-O-methylcytidine-3'-phosphate
  modified_base 4: mod_base = OTHER; note = 2'-O-methyladenosine-3'-phosphate
  modified_base 5: mod_base = OTHER; note = 2'-O-methyladenosine-3'-phosphate
  modified_base 6: mod_base = OTHER; note = 2'-fluorouridine-3'-phosphate
  modified_base 7: mod_base = OTHER; note = 2'-O-methylguanosine-3'-phosphate
  modified_base 8: mod_base = OTHER; note = 2'-fluorouridine-3'-phosphate
  modified_base 9: mod_base = OTHER; note = 2'-fluorocytidine-3'-phosphate
  modified_base 10: mod_base = OTHER; note = 2'-O-methyluridine-3'-phosphate
  modified_base 11: mod_base = OTHER; note = 2'-O-methyluridine-3'-phosphate
  modified_base 12: mod_base = OTHER; note = 2'-O-methylguanosine-3'-phosphate
  modified_base 13: mod_base = OTHER; note = 2'-O-methyluridine-3'-phosphate
  modified_base 14: mod_base = OTHER; note = 2'-fluorocytidine-3'-phosphate
  modified_base 15: mod_base = OTHER; note = 2'-O-methylguanosine-3'-phosphate
  modified_base 16: mod_base = OTHER; note = 2'-fluoroadenosine-3'-phosphate
  modified_base 17: mod_base = OTHER; note = 2'-O-methyluridine-3'-phosphate
  modified_base 18: mod_base = OTHER; note = 2'-O-methylguanosine-3'-phosphate
  modified_base 19: mod_base = OTHER; note = 2'-O-methyladenosine-3'-phosphate
  modified_base 20: mod_base = OTHER; note = 2'-O-methylcytidine-3'-phosphate
  modified_base 21: mod_base = OTHER; note = 2'-O-methyluridine-3'-phosphorothioate
  modified_base 22: mod_base = OTHER; note = 2'-O-methyluridine-3'-phosphorothioate
  modified_base 23: mod_base = OTHER; note = 2'-O-methyluridine-3'-phosphate
accaatgtcttgtcgatgacttt

SEQ ID NO: 394 - RNA, 21 nt, synthetic construct
  source 1..21: mol_type = other RNA
gaatgtgaaagtcatcgacaa

SEQ ID NO: 395 - RNA, 21 nt, synthetic construct
  source 1..21: mol_type = other RNA
ttttcaatgggtgtcctagga

SEQ ID NO: 396 - RNA, 21 nt, synthetic construct
  source 1..21: mol_type = other RNA
gaaagtcatcgacaagacatt

SEQ ID NO: 397 - RNA, 21 nt, synthetic construct
  source 1..21: mol_type = other RNA
tcatcgacaagacattggtga

SEQ ID NO: 398 - RNA, 21 nt, synthetic construct
  source 1..21: mol_type = other RNA
tttcaatgggtgtcctaggaa

SEQ ID NO: 399 - RNA, 21 nt, synthetic construct
  source 1..21: mol_type = other RNA
aatgggtgtcctaggaacctt

SEQ ID NO: 400 - RNA, 21 nt, synthetic construct
  source 1..21: mol_type = other RNA
gacagtgcacaatattttcca

SEQ ID NO: 401 - RNA, 21 nt, synthetic construct
  source 1..21: mol_type = other RNA
acttttcaatgggtgtcctaa

SEQ ID NO: 402 - RNA, 21 nt, synthetic construct
  source 1..21: mol_type = other RNA
aagtcatcgacaagacattga

SEQ ID NO: 403 - RNA, 21 nt, synthetic construct
  source 1..21: mol_type = other RNA
atcgacaagacattggtgaga

SEQ ID NO: 404 - RNA, 21 nt, synthetic construct
  source 1..21: mol_type = other RNA
gggagaaaggtgttcaagata

SEQ ID NO: 405 - RNA, 21 nt, synthetic construct
  source 1..21: mol_type = other RNA
cttttcaatgggtgtcctaga

SEQ ID NO: 406 - RNA, 21 nt, synthetic construct
  source 1..21: mol_type = other RNA
tcaatgggtgtcctaggaaca

SEQ ID NO: 407 - RNA, 21 nt, synthetic construct
  source 1..21: mol_type = other RNA
ttgacttttcaatgggtgtca

SEQ ID NO: 408 - RNA, 21 nt, synthetic construct
  source 1..21: mol_type = other RNA
aaagtcatcgacaagacatta

SEQ ID NO: 409 - RNA, 21 nt, synthetic construct
  source 1..21: mol_type = other RNA
cagggggagaaaggtgttcaa

SEQ ID NO: 410 - RNA, 21 nt, synthetic construct
  source 1..21: mol_type = other RNA
cattggtgaggaaaaatcctt

SEQ ID NO: 411 - RNA, 21 nt, synthetic construct
  source 1..21: mol_type = other RNA
acattggtgaggaaaaatcct

SEQ ID NO: 412 - RNA, 21 nt, synthetic construct
  source 1..21: mol_type = other RNA
agggggagaaaggtgttcaaa

SEQ ID NO: 413 - RNA, 21 nt, synthetic construct
  source 1..21: mol_type = other RNA
ctcaggatgaaaaattttgaa

SEQ ID NO: 414 - RNA, 21 nt, synthetic construct
  source 1..21: mol_type = other RNA
cagcatgtattacttgacaaa

SEQ ID NO: 415 - RNA, 21 nt, synthetic construct
  source 1..21: mol_type = other RNA
tatgaacaacatgctaaatca

SEQ ID NO: 416 - RNA, 21 nt, synthetic construct
  source 1..21: mol_type = other RNA
atatatccaaatgttttagga

SEQ ID NO: 417 - RNA, 21 nt, synthetic construct
  source 1..21: mol_type = other RNA
ccagatggaagctgtatccaa

SEQ ID NO: 418 - RNA, 21 nt, synthetic construct
  source 1..21: mol_type = other RNA
gactttcatcctggaaatata

SEQ ID NO: 419 - RNA, 21 nt, synthetic construct
  source 1..21: mol_type = other RNA
ccccggctaatttgtatcaat

SEQ ID NO: 420 - RNA, 21 nt, synthetic construct
  source 1..21: mol_type = other RNA
ttaaacatggcttgaatggga

SEQ ID NO: 421 - RNA, 21 nt, synthetic construct
  source 1..21: mol_type = other RNA
aatgtgtttagacaacgtcat

SEQ ID NO: 422 - RNA, 21 nt, synthetic construct
  source 1..21: mol_type = other RNA
actaaaggaagaattccggtt

SEQ ID NO: 423 - RNA, 21 nt, synthetic construct
  source 1..21: mol_type = other RNA
tatatccaaatgttttaggat

SEQ ID NO: 424 - RNA, 21 nt, synthetic construct
  source 1..21: mol_type = other RNA
gtgcggaaaggcactgatgtt

SEQ ID NO: 425 - RNA, 21 nt, synthetic construct
  source 1..21: mol_type = other RNA
taaaacagtggttcttaaatt

SEQ ID NO: 426 - RNA, 21 nt, synthetic construct
  source 1..21: mol_type = other RNA
atgaaaaattttgaaaccagt

SEQ ID NO: 427 - RNA, 21 nt, synthetic construct
  source 1..21: mol_type = other RNA
aacaaaatagcaatccctttt

SEQ ID NO: 428 - RNA, 21 nt, synthetic construct
  source 1..21: mol_type = other RNA
ctgaaacagatctgtcgactt

SEQ ID NO: 429 - RNA, 21 nt, synthetic construct
  source 1..21: mol_type = other RNA
ttgttgcaaagggcattttga

SEQ ID NO: 430 - RNA, 21 nt, synthetic construct
  source 1..21: mol_type = other RNA
ctcattgtttattaacctgta

SEQ ID NO: 431 - RNA, 21 nt, synthetic construct
  source 1..21: mol_type = other RNA
caacaaaatagcaatcccttt

SEQ ID NO: 432 - RNA, 21 nt, synthetic construct
  source 1..21: mol_type = other RNA
cattgtttattaacctgtatt

SEQ ID NO: 433 - RNA, 21 nt, synthetic construct
  source 1..21: mol_type = other RNA
tatcagctgggaagatatcaa

SEQ ID NO: 434 - RNA, 21 nt, synthetic construct
  source 1..21: mol_type = other RNA
tgtcctaggaaccttttagaa

SEQ ID NO: 435 - RNA, 21 nt, synthetic construct
  source 1..21: mol_type = other RNA
tccaacaaaatagcaatccct

SEQ ID NO: 436 - RNA, 21 nt, synthetic construct
  source 1..21: mol_type = other RNA
ggtgtgcggaaaggcactgat

SEQ ID NO: 437 - RNA, 21 nt, synthetic construct
  source 1..21: mol_type = other RNA
ttgaaaccagtactttatcat

SEQ ID NO: 438 - RNA, 21 nt, synthetic construct
  source 1..21: mol_type = other RNA
tacttccaaagtctatatata

SEQ ID NO: 439 - RNA, 21 nt, synthetic construct
  source 1..21: mol_type = other RNA
tcctaggaaccttttagaaat

SEQ ID NO: 440 - RNA, 21 nt, synthetic construct
  source 1..21: mol_type = other RNA
ctcctgaggaaaattttggaa

SEQ ID NO: 441 - RNA, 21 nt, synthetic construct
  source 1..21: mol_type = other RNA
gctccggaatgttgctgaaat

SEQ ID NO: 442 - RNA, 21 nt, synthetic construct
  source 1..21: mol_type = other RNA
gtgtttgtggggagaccaata

SEQ ID NO: 443 - RNA, 23 nt, synthetic construct
  source 1..23: mol_type = other RNA
ttgtcgatgactttcacattctg

SEQ ID NO: 444 - RNA, 23 nt, synthetic construct
  source 1..23: mol_type = other RNA
tcctaggacacccattgaaaagt

SEQ ID NO: 445 - RNA, 23 nt, synthetic construct
  source 1..23: mol_type = other RNA
aatgtcttgtcgatgactttcac

SEQ ID NO: 446 - RNA, 23 nt, synthetic construct
  source 1..23: mol_type = other RNA
tcaccaatgtcttgtcgatgact

SEQ ID NO: 447 - RNA, 23 nt, synthetic construct
  source 1..23: mol_type = other RNA
ttcctaggacacccattgaaaag

SEQ ID NO: 448 - RNA, 23 nt, synthetic construct
  source 1..23: mol_type = other RNA
aaggttcctaggacacccattga

SEQ ID NO: 449 - RNA, 23 nt, synthetic construct
  source 1..23: mol_type = other RNA
tggaaaatattgtgcactgtcag

SEQ ID NO: 450 - RNA, 23 nt, synthetic construct
  source 1..23: mol_type = other RNA
ttaggacacccattgaaaagtca

SEQ ID NO: 451 - RNA, 23 nt, synthetic construct
  source 1..23: mol_type = other RNA
tcaatgtcttgtcgatgactttc

SEQ ID NO: 452 - RNA, 23 nt, synthetic construct
  source 1..23: mol_type = other RNA
tctcaccaatgtcttgtcgatga

SEQ ID NO: 453 - RNA, 23 nt, synthetic construct
  source 1..23: mol_type = other RNA
tatcttgaacacctttctccccc

SEQ ID NO: 454 - RNA, 23 nt, synthetic construct
  source 1..23: mol_type = other RNA
tctaggacacccattgaaaagtc

SEQ ID NO: 455 - RNA, 23 nt, synthetic construct
  source 1..23: mol_type = other RNA
tgttcctaggacacccattgaaa

SEQ ID NO: 456 - RNA, 23 nt, synthetic construct
  source 1..23: mol_type = other RNA
tgacacccattgaaaagtcaaaa

SEQ ID NO: 457 - RNA, 23 nt, synthetic construct
  source 1..23: mol_type = other RNA
taatgtcttgtcgatgactttca

SEQ ID NO: 458 - RNA, 23 nt, synthetic construct
  source 1..23: mol_type = other RNA
ttgaacacctttctccccctgga

SEQ ID NO: 459 - RNA, 23 nt, synthetic construct
  source 1..23: mol_type = other RNA
aaggatttttcctcaccaatgtc

SEQ ID NO: 460 - RNA, 23 nt, synthetic construct
  source 1..23: mol_type = other RNA
aggatttttcctcaccaatgtct

SEQ ID NO: 461 - RNA, 23 nt, synthetic construct
  source 1..23: mol_type = other RNA
tttgaacacctttctccccctgg

SEQ ID NO: 462 - RNA, 23 nt, synthetic construct
  source 1..23: mol_type = other RNA
ttcaaaatttttcatcctgagtt

SEQ ID NO: 463 - RNA, 23 nt, synthetic construct
  source 1..23: mol_type = other RNA
tttgtcaagtaatacatgctgaa

SEQ ID NO: 464 - RNA, 23 nt, synthetic construct
  source 1..23: mol_type = other RNA
tgatttagcatgttgttcataat

SEQ ID NO: 465 - RNA, 23 nt, synthetic construct
  source 1..23: mol_type = other RNA
tcctaaaacatttggatatattc

SEQ ID NO: 466 - RNA, 23 nt, synthetic construct
  source 1..23: mol_type = other RNA
ttggatacagcttccatctggaa

SEQ ID NO: 467 - RNA, 23 nt, synthetic construct
  source 1..23: mol_type = other RNA
tatatttccaggatgaaagtcca

SEQ ID NO: 468 - RNA, 23 nt, synthetic construct
  source 1..23: mol_type = other RNA
attgatacaaattagccggggga

SEQ ID NO: 469 - RNA, 23 nt, synthetic construct
  source 1..23: mol_type = other RNA
tcccattcaagccatgtttaaca

SEQ ID NO: 470 - RNA, 23 nt, synthetic construct
  source 1..23: mol_type = other RNA
atgacgttgtctaaacacatttt

SEQ ID NO: 471 - RNA, 23 nt, synthetic construct
  source 1..23: mol_type = other RNA
aaccggaattcttcctttagtat

SEQ ID NO: 472 - RNA, 23 nt, synthetic construct
  source 1..23: mol_type = other RNA
atcctaaaacatttggatatatt

SEQ ID NO: 473 - RNA, 23 nt, synthetic construct
  source 1..23: mol_type = other RNA
aacatcagtgcctttccgcacac

SEQ ID NO: 474 - RNA, 23 nt, synthetic construct
  source 1..23: mol_type = other RNA
aatttaagaaccactgttttaaa

SEQ ID NO: 475 - RNA, 23 nt, synthetic construct
  source 1..23: mol_type = other RNA
actggtttcaaaatttttcatcc

SEQ ID NO: 476 - RNA, 23 nt, synthetic construct
  source 1..23: mol_type = other RNA
aaaagggattgctattttgttgg

SEQ ID NO: 477 - RNA, 23 nt, synthetic construct
  source 1..23: mol_type = other RNA
aagtcgacagatctgtttcagca

SEQ ID NO: 478 - RNA, 23 nt, synthetic construct
  source 1..23: mol_type = other RNA
tcaaaatgccctttgcaacaatt

SEQ ID NO: 479 - RNA, 23 nt, synthetic construct
  source 1..23: mol_type = other RNA
tacaggttaataaacaatgagat

SEQ ID NO: 480 - RNA, 23 nt, synthetic construct
  source 1..23: mol_type = other RNA
aaagggattgctattttgttgga

SEQ ID NO: 481 - RNA, 23 nt, synthetic construct
  source 1..23: mol_type = other RNA
aatacaggttaataaacaatgag

SEQ ID NO: 482 - RNA, 23 nt, synthetic construct
  source 1..23: mol_type = other RNA
ttgatatcttcccagctgataga

SEQ ID NO: 483 - RNA, 23 nt, synthetic construct
  source 1..23: mol_type = other RNA
ttctaaaaggttcctaggacacc

SEQ ID NO: 484 - RNA, 23 nt, synthetic construct
  source 1..23: mol_type = other RNA
agggattgctattttgttggaaa

SEQ ID NO: 485 - RNA, 23 nt, synthetic construct
  source 1..23: mol_type = other RNA
atcagtgcctttccgcacacccc

SEQ ID NO: 486 - RNA, 23 nt, synthetic construct
  source 1..23: mol_type = other RNA
atgataaagtactggtttcaaaa

SEQ ID NO: 487 - RNA, 23 nt, synthetic construct
  source 1..23: mol_type = other RNA
tatatatagactttggaagtact

SEQ ID NO: 488 - RNA, 23 nt, synthetic construct
  source 1..23: mol_type = other RNA
atttctaaaaggttcctaggaca

SEQ ID NO: 489 - RNA, 23 nt, synthetic construct
  source 1..23: mol_type = other RNA
ttccaaaattttcctcaggagaa

SEQ ID NO: 490 - RNA, 23 nt, synthetic construct
  source 1..23: mol_type = other RNA
atttcagcaacattccggagcat

SEQ ID NO: 491 - RNA, 23 nt, synthetic construct
  source 1..23: mol_type = other RNA
tattggtctccccacaaacacag

SEQ ID NO: 492 - RNA, 21 nt, synthetic construct
  source 1..21: mol_type = other RNA
atggtggtaatttgtgatttt

SEQ ID NO: 493 - RNA, 21 nt, synthetic construct
  source 1..21: mol_type = other RNA
gacttgcatcctggaaatata

SEQ ID NO: 494 - RNA, 21 nt, synthetic construct
  source 1..21: mol_type = other RNA
ggaagggaaggtagaagtctt

SEQ ID NO: 495 - RNA, 21 nt, synthetic construct
  source 1..21: mol_type = other RNA
tgtcttctgtttagatttcct

SEQ ID NO: 496 - RNA, 21 nt, synthetic construct
  source 1..21: mol_type = other RNA
ctttggctgtttccaagatct

SEQ ID NO: 497 - RNA, 21 nt, synthetic construct
  source 1..21: mol_type = other RNA
aatgtgtttgggcaacgtcat

SEQ ID NO: 498 - RNA, 21 nt, synthetic construct
  source 1..21: mol_type = other RNA
tgtgactgtggacacccctta

SEQ ID NO: 499 - RNA, 21 nt, synthetic construct
  source 1..21: mol_type = other RNA
gatggggtgccagctactatt

SEQ ID NO: 500 - RNA, 21 nt, synthetic construct
  source 1..21: mol_type = other RNA
gaaaatgtgtttgggcaacgt

SEQ ID NO: 501 - RNA, 21 nt, synthetic construct
  source 1..21: mol_type = other RNA
ggctgtttccaagatctgaca

SEQ ID NO: 502 - RNA, 21 nt, synthetic construct
  source 1..21: mol_type = other RNA
tccaacaaaatagccacccct

SEQ ID NO: 503 - RNA, 21 nt, synthetic construct
  source 1..21: mol_type = other RNA
gtcttctgtttagatttcctt

SEQ ID NO: 504 - RNA, 21 nt, synthetic construct
  source 1..21: mol_type = other RNA
tggaagggaaggtagaagtct

SEQ ID NO: 505 - RNA, 21 nt, synthetic construct
  source 1..21: mol_type = other RNA
tcctttggctgtttccaagat

SEQ ID NO: 506 - RNA, 21 nt, synthetic construct
  source 1..21: mol_type = other RNA
catctctcagctgggatgata

SEQ ID NO: 507 - RNA, 21 nt, synthetic construct
  source 1..21: mol_type = other RNA
ggggtgccagctactattgat

SEQ ID NO: 508 - RNA, 21 nt, synthetic construct
  source 1..21: mol_type = other RNA
atgtgtttgggcaacgtcata

SEQ ID NO: 509 - RNA, 21 nt, synthetic construct
  source 1..21: mol_type = other RNA
ctgtttagatttccttaagaa

SEQ ID NO: 510 - RNA, 21 nt, synthetic construct
  source 1..21: mol_type = other RNA
agaaagaaatggacttgcata

SEQ ID NO: 511 - RNA, 21 nt, synthetic construct
  source 1..21: mol_type = other RNA
gcatcctggaaatatattaaa

SEQ ID NO: 512 - RNA, 21 nt, synthetic construct
  source 1..21: mol_type = other RNA
cctgtcagaccatgggaacta

SEQ ID NO: 513 - RNA, 21 nt, synthetic construct
  source 1..21: mol_type = other RNA
aaacatggtgtggatgggata

SEQ ID NO: 514 - RNA, 23 nt, synthetic construct
  source 1..23: mol_type = other RNA
aaaatcacaaattaccaccatcc

SEQ ID NO: 515 - RNA, 23 nt, synthetic construct
  source 1..23: mol_type = other RNA
tatatttccaggatgcaagtcca

SEQ ID NO: 516 - RNA, 23 nt, synthetic construct
  source 1..23: mol_type = other RNA
aagacttctaccttcccttccac

SEQ ID NO: 517 - RNA, 23 nt, synthetic construct
  source 1..23: mol_type = other RNA
aggaaatctaaacagaagacagg

SEQ ID NO: 518 - RNA, 23 nt, synthetic construct
  source 1..23: mol_type = other RNA
agatcttggaaacagccaaagga

SEQ ID NO: 519 - RNA, 23 nt, synthetic construct
  source 1..23: mol_type = other RNA
atgacgttgcccaaacacatttt

SEQ ID NO: 520 - RNA, 23 nt, synthetic construct
  source 1..23: mol_type = other RNA
taaggggtgtccacagtcacaaa

SEQ ID NO: 521 - RNA, 23 nt, synthetic construct
  source 1..23: mol_type = other RNA
aatagtagctggcaccccatcca

SEQ ID NO: 522 - RNA, 23 nt, synthetic construct
  source 1..23: mol_type = other RNA
acgttgcccaaacacattttcaa

SEQ ID NO: 523 - RNA, 23 nt, synthetic construct
  source 1..23: mol_type = other RNA
tgtcagatcttggaaacagccaa

SEQ ID NO: 524 - RNA, 23 nt, synthetic construct
  source 1..23: mol_type = other RNA
aggggtggctattttgttggaaa

SEQ ID NO: 525 - RNA, 23 nt, synthetic construct
  source 1..23: mol_type = other RNA
aaggaaatctaaacagaagacag

SEQ ID NO: 526 - RNA, 23 nt, synthetic construct
  source 1..23: mol_type = other RNA
agacttctaccttcccttccaca

SEQ ID NO: 527 - RNA, 23 nt, synthetic construct
  source 1..23: mol_type = other RNA
atcttggaaacagccaaaggatt

SEQ ID NO: 528 - RNA, 23 nt, synthetic construct
  source 1..23: mol_type = other RNA
tatcatcccagctgagagatggg

SEQ ID NO: 529 - RNA, 23 nt, synthetic construct
  source 1..23: mol_type = other RNA
atcaatagtagctggcaccccat

SEQ ID NO: 530 - RNA, 23 nt, synthetic construct
  source 1..23: mol_type = other RNA
tatgacgttgcccaaacacattt

SEQ ID NO: 531 - RNA, 23 nt, synthetic construct
  source 1..23: mol_type = other RNA
ttcttaaggaaatctaaacagaa

SEQ ID NO: 532 - RNA, 23 nt, synthetic construct
  source 1..23: mol_type = other RNA
tatgcaagtccatttctttctag

SEQ ID NO: 533 - RNA, 23 nt, synthetic construct
  source 1..23: mol_type = other RNA
tttaatatatttccaggatgcaa

SEQ ID NO: 534 - RNA, 23 nt, synthetic construct
  source 1..23: mol_type = other RNA
tagttcccatggtctgacaggct

SEQ ID NO: 535 - RNA, 23 nt, synthetic construct
  source 1..23: mol_type = other RNA
tatcccatccacaccatgtttaa

SEQ ID NO: 536 - RNA, 21 nt, synthetic construct
  source 1..21: mol_type = other RNA
gaatgtgaaagtcatcgacaa

SEQ ID NO: 537 - RNA, 21 nt, synthetic construct
  source 1..21: mol_type = other RNA
gaatgtgaaagtcatcgacaa

SEQ ID NO: 538 - RNA, 21 nt, synthetic construct
  source 1..21: mol_type = other RNA
gaatgtgaaagtcatcgacaa

SEQ ID NO: 539 - RNA, 21 nt, synthetic construct
  source 1..21: mol_type = other RNA
gaatgtgaaagtcatcgacaa

SEQ ID NO: 540 - RNA, 21 nt, synthetic construct
  source 1..21: mol_type = other RNA
gaatgtgaaagtcatcgacaa

SEQ ID NO: 541 - RNA, 21 nt, synthetic construct
  source 1..21: mol_type = other RNA
gaatgtgaaagtcatcgacaa

SEQ ID NO: 542 - RNA, 21 nt, synthetic construct
  source 1..21: mol_type = other RNA
gaatgtgaaagtcatcgacaa

SEQ ID NO: 543 - RNA, 21 nt, synthetic construct
  source 1..21: mol_type = other RNA
gaatgtgaaagtcatcgacaa

SEQ ID NO: 544 - RNA, 19 nt, synthetic construct
  source 1..19: mol_type = other RNA
atgtgaaagtcatcgacaa

SEQ ID NO: 545 - RNA, 19 nt, synthetic construct
  source 1..19: mol_type = other RNA
atgtgaaagtcatcgacaa

SEQ ID NO: 546 - RNA, 21 nt, synthetic construct
  source 1..21: mol_type = other RNA
gaatgtgaaagtcatcgacaa

SEQ ID NO: 547 - RNA, 21 nt, synthetic construct
  source 1..21: mol_type = other RNA
gaatgtgaaagtcatcgacaa

SEQ ID NO: 548 - RNA, 21 nt, synthetic construct
  source 1..21: mol_type = other RNA
gaatgtgaaagtcatcgacaa

SEQ ID NO: 549 - RNA, 21 nt, synthetic construct
  source 1..21: mol_type = other RNA
gaatgtgaaagtcatcgacaa

SEQ ID NO: 550 - RNA, 21 nt, synthetic construct
  source 1..21: mol_type = other RNA
gaatgtgaaagtcatcgacaa

SEQ ID NO: 551 - RNA, 21 nt, synthetic construct
  source 1..21: mol_type = other RNA
gaatgtgaaagtcatcgacaa

SEQ ID NO: 552 - RNA, 21 nt, synthetic construct
  source 1..21: mol_type = other RNA
gaatgtgaaagtcatcgacaa

SEQ ID NO: 553 - RNA, 21 nt, synthetic construct
  source 1..21: mol_type = other RNA
gaatgtgaaagtcatcgacaa

SEQ ID NO: 554 - RNA, 21 nt, synthetic construct
  source 1..21: mol_type = other RNA
gaatgtgaaagtcatcgacaa

SEQ ID NO: 555 - RNA, 21 nt, synthetic construct
  source 1..21: mol_type = other RNA
gaatgtgaaagtcatcgacaa

SEQ ID NO: 556 - RNA, 21 nt, synthetic construct
  source 1..21: mol_type = other RNA
gaatgtgaaagtcatcgacaa

SEQ ID NO: 557 - RNA, 21 nt, synthetic construct
  source 1..21: mol_type = other RNA
  modified_base 6: mod_base = OTHER; note = Thymine
gaatgtgaaagtcatcgacaa

SEQ ID NO: 558 - RNA, 21 nt, synthetic construct
  source 1..21: mol_type = other RNA
gaatgtgaaagtcatcgacaa

SEQ ID NO: 559 - RNA, 21 nt, synthetic construct
  source 1..21: mol_type = other RNA
  modified_base 6: mod_base = OTHER; note = Thymine
gaatgtgaaagtcatcgacaa

SEQ ID NO: 560 - RNA, 21 nt, synthetic construct
  source 1..21: mol_type = other RNA
gaatgtgaaagtcatcgacaa

SEQ ID NO: 561 - RNA, 21 nt, synthetic construct
  source 1..21: mol_type = other RNA
gaatgtgaaagtcatcgacaa

SEQ ID NO: 562 - RNA, 21 nt, synthetic construct
  source 1..21: mol_type = other RNA
  modified_base 17: mod_base = OTHER; note = Thymine
gaatgtgaaagtcatctacaa

SEQ ID NO: 563 - RNA, 20 nt, synthetic construct
  source 1..20: mol_type = other RNA
gaatgtgaaagtcatcacaa

SEQ ID NO: 564 - RNA, 21 nt, synthetic construct
  source 1..21: mol_type = other RNA
  modified_base 15: mod_base = OTHER; note = Thymine
  modified_base 17: mod_base = OTHER; note = Thymine
gaatgtgaaagtcatctacaa

SEQ ID NO: 565 - RNA, 21 nt, synthetic construct
  source 1..21: mol_type = other RNA
gaatgtgaaagtcatcgacaa

SEQ ID NO: 566 - RNA, 21 nt, synthetic construct
  source 1..21: mol_type = other RNA
  modified_base 17: mod_base = OTHER; note = Thymine
gaatgtgaaagtcatctacaa

SEQ ID NO: 567 - RNA, 20 nt, synthetic construct
  source 1..20: mol_type = other RNA
gaatgtgaaagtcatcacaa

SEQ ID NO: 568 - RNA, 21 nt, synthetic construct
  source 1..21: mol_type = other RNA
gaatgtgaaagtcatcgacaa

SEQ ID NO: 569 - RNA, 21 nt, synthetic construct
  source 1..21: mol_type = other RNA
gaatgtgaaagtcatcgacaa

SEQ ID NO: 570 - RNA, 21 nt, synthetic construct
  source 1..21: mol_type = other RNA
gaatgtgaaagtcatcgacaa

SEQ ID NO: 571 - RNA, 21 nt, synthetic construct
  source 1..21: mol_type = other RNA
gaatgtgaaagtcatcgacaa

SEQ ID NO: 572 - RNA, 21 nt, synthetic construct
  source 1..21: mol_type = other RNA
gaatgtgaaagtcatcgacaa

SEQ ID NO: 573 - RNA, 21 nt, synthetic construct
  source 1..21: mol_type = other RNA
gaatgtgaaagtcatcgacaa

SEQ ID NO: 574 - RNA, 21 nt, synthetic construct
  source 1..21: mol_type = other RNA
gaatgtgaaagtcatcgacaa

SEQ ID NO: 575 - RNA, 21 nt, synthetic construct
  source 1..21: mol_type = other RNA
gactttcatcctggaaatata

SEQ ID NO: 576 - RNA, 21 nt, synthetic construct
  source 1..21: mol_type = other RNA
gactttcatcctggaaatata

SEQ ID NO: 577 - RNA, 21 nt, synthetic construct
  source 1..21: mol_type = other RNA
gactttcatcctggaaatata

SEQ ID NO: 578 - RNA, 21 nt, synthetic construct
  source 1..21: mol_type = other RNA
gactttcatcctggaaatata

SEQ ID NO: 579 - RNA, 21 nt, synthetic construct
  source 1..21: mol_type = other RNA
gactttcatcctggaaatata

SEQ ID NO: 580 - RNA, 21 nt, synthetic construct
  source 1..21: mol_type = other RNA
gactttcatcctggaaatata

SEQ ID NO: 581 - RNA, 19 nt, synthetic construct
  source 1..19: mol_type = other RNA
ctttcatcctggaaatata

SEQ ID NO: 582 - RNA, 19 nt, synthetic construct
  source 1..19: mol_type = other RNA
ctttcatcctggaaatata

SEQ ID NO: 583 - RNA, 21 nt, synthetic construct
  source 1..21: mol_type = other RNA
gactttcatcctggaaatata

SEQ ID NO: 584 - RNA, 21 nt, synthetic construct
  source 1..21: mol_type = other RNA
gactttcatcctggaaatata

SEQ ID NO: 585 - RNA, 21 nt, synthetic construct
  source 1..21: mol_type = other RNA
gactttcatcctggaaatata

SEQ ID NO: 586 - RNA, 21 nt, synthetic construct
  source 1..21: mol_type = other RNA
gactttcatcctggaaatata

SEQ ID NO: 587 - RNA, 21 nt, synthetic construct
  source 1..21: mol_type = other RNA
gactttcatcctggaaatata

SEQ ID NO: 588 - RNA, 21 nt, synthetic construct
  source 1..21: mol_type = other RNA
gactttcatcctggaaatata

SEQ ID NO: 589 - RNA, 21 nt, synthetic construct
  source 1..21: mol_type = other RNA
gactttcatcctggaaatata

SEQ ID NO: 590 - RNA, 21 nt, synthetic construct
  source 1..21: mol_type = other RNA
gactttcatcctggaaatata

SEQ ID NO: 591 - RNA, 21 nt, synthetic construct
  source 1..21: mol_type = other RNA
gactttcatcctggaaatata

SEQ ID NO: 592 - RNA, 21 nt, synthetic construct
  source 1..21: mol_type = other RNA
gactttcatcctggaaatata

SEQ ID NO: 593 - RNA, 21 nt, synthetic construct
  source 1..21: mol_type = other RNA
gactttcatcctggaaatata

SEQ ID NO: 594 - RNA, 21 nt, synthetic construct
  source 1..21: mol_type = other RNA
gactttcatcctggaaatata

SEQ ID NO: 595 - RNA, 21 nt, synthetic construct
  source 1..21: mol_type = other RNA
gactttcatcctggaaatata

SEQ ID NO: 596 - RNA, 21 nt, synthetic construct
  source 1..21: mol_type = other RNA
  modified_base 5: mod_base = OTHER; note = Thymine
gactttcatcctggaaatata

SEQ ID NO: 597 - RNA, 21 nt, synthetic construct
  source 1..21: mol_type = other RNA
  modified_base 6: mod_base = OTHER; note = Thymine
gactttcatcctggaaatata

SEQ ID NO: 598 - RNA, 21 nt, synthetic construct
  source 1..21: mol_type = other RNA
gactttcatcctggaaatata

SEQ ID NO: 599 - RNA, 21 nt, synthetic construct
  source 1..21: mol_type = other RNA
gactttcatcctggaaatata

SEQ ID NO: 600 - RNA, 21 nt, synthetic construct
  source 1..21: mol_type = other RNA
  modified_base 17: mod_base = OTHER; note = Thymine
gactttcatcctggaattata

SEQ ID NO: 601 - RNA, 20 nt, synthetic construct
  source 1..20: mol_type = other RNA
gactttcatcctggaatata

SEQ ID NO: 602 - RNA, 21 nt, synthetic construct
  source 1..21: mol_type = other RNA
  modified_base 17: mod_base = OTHER; note = Thymine
gactttcatcctggaattata

SEQ ID NO: 603 - RNA, 21 nt, synthetic construct
  source 1..21: mol_type = other RNA
  modified_base 17: mod_base = OTHER; note = Thymine
gactttcatcctggaattata

SEQ ID NO: 604 - RNA, 21 nt, synthetic construct
  source 1..21: mol_type = other RNA
gactttcatcctggaaatata

SEQ ID NO: 605 - RNA, 21 nt, synthetic construct
  source 1..21: mol_type = other RNA
  modified_base 6: mod_base = OTHER; note = Thymine
gactttcatcctggaaatata

SEQ ID NO: 606 - RNA, 21 nt, synthetic construct
  source 1..21: mol_type = other RNA
gactttcatcctggaaatata

SEQ ID NO: 607 - RNA, 21 nt, synthetic construct
  source 1..21: mol_type = other RNA
gactttcatcctggaaatata

SEQ ID NO: 608 - RNA, 21 nt, synthetic construct
  source 1..21: mol_type = other RNA
gactttcatcctggaaatata

SEQ ID NO: 609 - RNA, 21 nt, synthetic construct
  source 1..21: mol_type = other RNA
gactttcatcctggaaatata

SEQ ID NO: 610 - RNA, 21 nt, synthetic construct
  source 1..21: mol_type = other RNA
gactttcatcctggaaatata

SEQ ID NO: 611 - RNA, 21 nt, synthetic construct
  source 1..21: mol_type = other RNA
gactttcatcctggaaatata

SEQ ID NO: 612 - RNA, 21 nt, synthetic construct
  source 1..21: mol_type = other RNA
gactttcatcctggaaatata

SEQ ID NO: 613 - RNA, 21 nt, synthetic construct
  source 1..21: mol_type = other RNA
gactttcatcctggaaatata

SEQ ID NO: 614 - RNA, 21 nt, synthetic construct
  source 1..21: mol_type = other RNA
agaaaggtgttcaagatgtca

SEQ ID NO: 615 - RNA, 21 nt, synthetic construct
  source 1..21: mol_type = other RNA
catcctggaaatatattaact

SEQ ID NO: 616 - RNA, 21 nt, synthetic construct
  source 1..21: mol_type = other RNA
gaatgtgaaagtcatcgacaa

SEQ ID NO: 617 - RNA, 21 nt, synthetic construct
  source 1..21: mol_type = other RNA
agtgcacaatattttcccata

SEQ ID NO: 618 - RNA, 21 nt, synthetic construct
  source 1..21: mol_type = other RNA
gaaagtcatcgacaagacatt

SEQ ID NO: 619 - RNA, 21 nt, synthetic construct
  source 1..21: mol_type = other RNA
aatgtgaaagtcatcgacaaa

SEQ ID NO: 620 - RNA, 21 nt, synthetic construct
  source 1..21: mol_type = other RNA
ctggaaatatattaactgtta

SEQ ID NO: 621 - RNA, 21 nt, synthetic construct
  source 1..21: mol_type = other RNA
attttcccatctgtattattt

SEQ ID NO: 622 - RNA, 21 nt, synthetic construct
  source 1..21: mol_type = other RNA
tgtcgttcttttccaacaaaa

SEQ ID NO: 623 - RNA, 21 nt, synthetic construct
  source 1..21: mol_type = other RNA
atcctggaaatatattaacta

SEQ ID NO: 624 - RNA, 21 nt, synthetic construct
  source 1..21: mol_type = other RNA
gcattttgagaggtgatgata

SEQ ID NO: 625 - RNA, 21 nt, synthetic construct
  source 1..21: mol_type = other RNA
cagggggagaaaggtgttcaa

SEQ ID NO: 626 - RNA, 21 nt, synthetic construct
  source 1..21: mol_type = other RNA
ggaaatatattaactgttaaa

SEQ ID NO: 627 - RNA, 21 nt, synthetic construct
  source 1..21: mol_type = other RNA
cattggtgaggaaaaatcctt

SEQ ID NO: 628 - RNA, 21 nt, synthetic construct
  source 1..21: mol_type = other RNA
gggagaaaggtgttcaagata

SEQ ID NO: 629 - RNA, 21 nt, synthetic construct
  source 1..21: mol_type = other RNA
ggcattttgagaggtgatgat

SEQ ID NO: 630 - RNA, 21 nt, synthetic construct
  source 1..21: mol_type = other RNA
tacaaagggtgtcgttctttt

SEQ ID NO: 631 - RNA, 21 nt, synthetic construct
  source 1..21: mol_type = other RNA
tgggatcttggtgtcgaatca

SEQ ID NO: 632 - RNA, 21 nt, synthetic construct
  source 1..21: mol_type = other RNA
ctgacagtgcacaatatttta

SEQ ID NO: 633 - RNA, 21 nt, synthetic construct
  source 1..21: mol_type = other RNA
cagtgcacaatattttcccat

SEQ ID NO: 634 - RNA, 21 nt, synthetic construct
  source 1..21: mol_type = other RNA
acttttcaatgggtgtcctaa

SEQ ID NO: 635 - RNA, 21 nt, synthetic construct
  source 1..21: mol_type = other RNA
acattggtgaggaaaaatcct

SEQ ID NO: 636 - RNA, 21 nt, synthetic construct
  source 1..21: mol_type = other RNA
ttgcttttgacttttcaatga

SEQ ID NO: 637 - RNA, 21 nt, synthetic construct
  source 1..21: mol_type = other RNA
cattttgagaggtgatgatga

SEQ ID NO: 638 - RNA, 21 nt, synthetic construct
  source 1..21: mol_type = other RNA
ttgacttttcaatgggtgtca

SEQ ID NO: 639 - RNA, 21 nt, synthetic construct
  source 1..21: mol_type = other RNA
cgacttctgttttaggacaga

SEQ ID NO: 640 - RNA, 21 nt, synthetic construct
  source 1..21: mol_type = other RNA
ctctgagtgggtgccagaata

SEQ ID NO: 641 - RNA, 21 nt, synthetic construct
  source 1..21: mol_type = other RNA
gggtgccagaatgtgaaagta

SEQ ID NO: 642 - RNA, 21 nt, synthetic construct
  source 1..21: mol_type = other RNA
tcaatgggtgtcctaggaaca

SEQ ID NO: 643 - RNA, 21 nt, synthetic construct
  source 1..21: mol_type = other RNA
aaagtcatcgacaagacatta

SEQ ID NO: 644 - RNA, 21 nt, synthetic construct
  source 1..21: mol_type = other RNA
attttgagaggtgatgatgca

SEQ ID NO: 645 - RNA, 21 nt, synthetic construct
  source 1..21: mol_type = other RNA
atcgacaagacattggtgaga

SEQ ID NO: 646 - RNA, 21 nt, synthetic construct
  source 1..21: mol_type = other RNA
ggtgccagaatgtgaaagtca

SEQ ID NO: 647 - RNA, 21 nt, synthetic construct
  source 1..21: mol_type = other RNA
gacagtgcacaatattttcca

SEQ ID NO: 648 - RNA, 21 nt, synthetic construct
  source 1..21: mol_type = other RNA
acaaagagacactgtgcagaa

SEQ ID NO: 649 - RNA, 21 nt, synthetic construct
  source 1..21: mol_type = other RNA
ttttcaatgggtgtcctagga

SEQ ID NO: 650 - RNA, 21 nt, synthetic construct
  source 1..21: mol_type = other RNA
ccgtttccaagatctgacagt

SEQ ID NO: 651 - RNA, 21 nt, synthetic construct
  source 1..21: mol_type = other RNA
agggggagaaaggtgttcaaa

SEQ ID NO: 652 - RNA, 21 nt, synthetic construct
  source 1..21: mol_type = other RNA
agtcatcgacaagacattggt

SEQ ID NO: 653 - RNA, 23 nt, synthetic construct
  source 1..23: mol_type = other RNA
ttgtcgatgactttcacattctg

SEQ ID NO: 654 - RNA, 23 nt, synthetic construct
  source 1..23: mol_type = other RNA
ttgtcgatgactttcacattctg

SEQ ID NO: 655 - RNA, 23 nt, synthetic construct
  source 1..23: mol_type = other RNA
ttgtcgatgactttcacattctg

SEQ ID NO: 656 - RNA, 23 nt, synthetic construct
  source 1..23: mol_type = other RNA
ttgtcgatgactttcacattctg

SEQ ID NO: 657 - RNA, 23 nt, synthetic construct
  source 1..23: mol_type = other RNA
ttgtcgatgactttcacattctg

SEQ ID NO: 658 - RNA, 23 nt, synthetic construct
  source 1..23: mol_type = other RNA
ttgtcgatgactttcacattctg

SEQ ID NO: 659 - RNA, 23 nt, synthetic construct
  source 1..23: mol_type = other RNA
ttgtcgatgactttcacattctg

SEQ ID NO: 660 - RNA, 23 nt, synthetic construct
  source 1..23: mol_type = other RNA
ttgtcgatgactttcacattctg

SEQ ID NO: 661 - RNA, 21 nt, synthetic construct
  source 1..21: mol_type = other RNA
ttgtcgatgactttcacattc

SEQ ID NO: 662 - RNA, 21 nt, synthetic construct
  source 1..21: mol_type = other RNA
ttgtcgatgactttcacattc

SEQ ID NO: 663 - RNA, 23 nt, synthetic construct
  source 1..23: mol_type = other RNA
ttgtcgatgactttcacattctg

SEQ ID NO: 664 - RNA, 23 nt, synthetic construct
  source 1..23: mol_type = other RNA
ttgtcgatgactttcacattctg

SEQ ID NO: 665 - RNA, 23 nt, synthetic construct
  source 1..23: mol_type = other RNA
ttgtcgatgactttcacattctg

SEQ ID NO: 666 - RNA, 23 nt, synthetic construct
  source 1..23: mol_type = other RNA
ttgtcgatgactttcacattctg

SEQ ID NO: 667 - RNA, 23 nt, synthetic construct
  source 1..23: mol_type = other RNA
ttgtcgatgactttcacattctg

SEQ ID NO: 668 - RNA, 23 nt, synthetic construct
  source 1..23: mol_type = other RNA
ttgtcgatgactttcacattctg

SEQ ID NO: 669 - RNA, 23 nt, synthetic construct
  source 1..23: mol_type = other RNA
ttgtcgatgactttcacattctg

SEQ ID NO: 670 - RNA, 23 nt, synthetic construct
  source 1..23: mol_type = other RNA
ttgtcgatgactttcacattctg

SEQ ID NO: 671 - RNA, 23 nt, synthetic construct
  source 1..23: mol_type = other RNA
ttgtcgatgactttcacattctg

SEQ ID NO: 672 - RNA, 23 nt, synthetic construct
  source 1..23: mol_type = other RNA
ttgtcgatgactttcacattctg

SEQ ID NO: 673 - RNA, 23 nt, synthetic construct
  source 1..23: mol_type = other RNA
ttgtcgatgactttcacattctg

SEQ ID NO: 674 - RNA, 23 nt, synthetic construct
  source 1..23: mol_type = other RNA
ttgtcgatgactttcacattctg

SEQ ID NO: 675 - RNA, 23 nt, synthetic construct
  source 1..23: mol_type = other RNA
ttgtcgatgactttcacattctg

SEQ ID NO: 676 - RNA, 23 nt, synthetic construct
  source 1..23: mol_type = other RNA
ttgtcgatgactttcacattctg

SEQ ID NO: 677 - RNA, 23 nt, synthetic construct
  source 1..23: mol_type = other RNA
ttgtcgatgactttcacattctg

SEQ ID NO: 678 - RNA, 23 nt, synthetic construct
  source 1..23: mol_type = other RNA
ttgtcgatgactttcacattctg

SEQ ID NO: 679 - RNA, 23 nt, synthetic construct
  source 1..23: mol_type = other RNA
ttgtcgatgactttcacattctg

SEQ ID NO: 680 - RNA, 23 nt, synthetic construct
  source 1..23: mol_type = other RNA
ttgtcgatgactttcacattctg

SEQ ID NO: 681 - RNA, 23 nt, synthetic construct
  source 1..23: mol_type = other RNA
ttgtcgatgactttcacattctg

SEQ ID NO: 682 - RNA, 23 nt, synthetic construct
  source 1..23: mol_type = other RNA
ttgtcgatgactttcacattctg

SEQ ID NO: 683 - RNA, 23 nt, synthetic construct
  source 1..23: mol_type = other RNA
ttgtcgatgactttcacattctg

SEQ ID NO: 684 - RNA, 23 nt, synthetic construct
  source 1..23: mol_type = other RNA
ttgtcgatgactttcacattctg

SEQ ID NO: 685 - RNA, 23 nt, synthetic construct
  source 1..23: mol_type = other RNA
  modified_base 2: mod_base = OTHER; note = Thymine
  modified_base 14: mod_base = OTHER; note = Thymine
ttgtcgatgactttcacattctg

SEQ ID NO: 686 - RNA, 23 nt, synthetic construct
  source 1..23: mol_type = other RNA
  modified_base 14: mod_base = OTHER; note = Thymine
ttgtcgatgactttcacattctg

SEQ ID NO: 687 - RNA, 23 nt, synthetic construct
  source 1..23: mol_type = other RNA
  modified_base 2: mod_base = OTHER; note = Thymine
  modified_base 14: mod_base = OTHER; note = Thymine
ttgtcgatgactttcacattctg

SEQ ID NO: 688 - RNA, 23 nt, synthetic construct
  source 1..23: mol_type = other RNA
  modified_base 14: mod_base = OTHER; note = Thymine
ttgtcgatgactttcacattctg

SEQ ID NO: 689 - RNA, 23 nt, synthetic construct
  source 1..23: mol_type = other RNA
  modified_base 2: mod_base = OTHER; note = Thymine
  modified_base 14: mod_base = OTHER; note = Thymine
ttgtcgatgactttcacattctg

SEQ ID NO: 690 - RNA, 23 nt, synthetic construct
  source 1..23: mol_type = other RNA
  modified_base 2: mod_base = OTHER; note = Thymine
  modified_base 14: mod_base = OTHER; note = Thymine
ttgtcgatgactttcacattctg

SEQ ID NO: 691 - RNA, 23 nt, synthetic construct
  source 1..23: mol_type = other RNA
  modified_base 2: mod_base = OTHER; note = Thymine
  modified_base 14: mod_base = OTHER; note = Thymine
ttgtcgatgactttcacattctg

SEQ ID NO: 692 - RNA, 23 nt, synthetic construct
  source 1..23: mol_type = other RNA
tatatttccaggatgaaagtcca

SEQ ID NO: 693 - RNA, 23 nt, synthetic construct
  source 1..23: mol_type = other RNA
tatatttccaggatgaaagtcca

SEQ ID NO: 694 - RNA, 23 nt, synthetic construct
  source 1..23: mol_type = other RNA
tatatttccaggatgaaagtcca

SEQ ID NO: 695 - RNA, 23 nt, synthetic construct
  source 1..23: mol_type = other RNA
tatatttccaggatgaaagtcca

SEQ ID NO: 696 - RNA, 23 nt, synthetic construct
  source 1..23: mol_type = other RNA
tatatttccaggatgaaagtcca

SEQ ID NO: 697 - RNA, 23 nt, synthetic construct
  source 1..23: mol_type = other RNA
tatatttccaggatgaaagtcca

SEQ ID NO: 698 - RNA, 21 nt, synthetic construct
  source 1..21: mol_type = other RNA
tatatttccaggatgaaagtc

SEQ ID NO: 699 - RNA, 21 nt, synthetic construct
  source 1..21: mol_type = other RNA
tatatttccaggatgaaagtc

SEQ ID NO: 700 - RNA, 23 nt, synthetic construct
  source 1..23: mol_type = other RNA
tatatttccaggatgaaagtcca

SEQ ID NO: 701 - RNA, 23 nt, synthetic construct
  source 1..23: mol_type = other RNA
tatatttccaggatgaaagtcca

SEQ ID NO: 702 - RNA, 23 nt, synthetic construct
  source 1..23: mol_type = other RNA
tatatttccaggatgaaagtcca

SEQ ID NO: 703 - RNA, 23 nt, synthetic construct
  source 1..23: mol_type = other RNA
tatatttccaggatgaaagtcca

SEQ ID NO: 704 - RNA, 23 nt, synthetic construct
  source 1..23: mol_type = other RNA
tatatttccaggatgaaagtcca

SEQ ID NO: 705 - RNA, 23 nt, synthetic construct
  source 1..23: mol_type = other RNA
tatatttccaggatgaaagtcca

SEQ ID NO: 706 - RNA, 23 nt, synthetic construct
  source 1..23: mol_type = other RNA
tatatttccaggatgaaagtcca

SEQ ID NO: 707 - RNA, 23 nt, synthetic construct
  source 1..23: mol_type = other RNA
tatatttccaggatgaaagtcca

SEQ ID NO: 708 - RNA, 23 nt, synthetic construct
  source 1..23: mol_type = other RNA
tatatttccaggatgaaagtcca

SEQ ID NO: 709 - RNA, 23 nt, synthetic construct
  source 1..23: mol_type = other RNA
tatatttccaggatgaaagtcca

SEQ ID NO: 710 - RNA, 23 nt, synthetic construct
  source 1..23: mol_type = other RNA
tatatttccaggatgaaagtcca

SEQ ID NO: 711 - RNA, 23 nt, synthetic construct
  source 1..23: mol_type = other RNA
tatatttccaggatgaaagtcca

SEQ ID NO: 712 - RNA, 23 nt, synthetic construct
  source 1..23: mol_type = other RNA
tatatttccaggatgaaagtcca

SEQ ID NO: 713 - RNA, 23 nt, synthetic construct
  source 1..23: mol_type = other RNA
tatatttccaggatgaaagtcca

SEQ ID NO: 714 - RNA, 23 nt, synthetic construct
  source 1..23: mol_type = other RNA
tatatttccaggatgaaagtcca

SEQ ID NO: 715 - RNA, 23 nt, synthetic construct
  source 1..23: mol_type = other RNA
tatatttccaggatgaaagtcca

SEQ ID NO: 716 - RNA, 23 nt, synthetic construct
  source 1..23: mol_type = other RNA
tatatttccaggatgaaagtcca

SEQ ID NO: 717 - RNA, 23 nt, synthetic construct
  source 1..23: mol_type = other RNA
tatatttccaggatgaaagtcca

SEQ ID NO: 718 - RNA, 23 nt, synthetic construct
  source 1..23: mol_type = other RNA
tatatttccaggatgaaagtcca

SEQ ID NO: 719 - RNA, 23 nt, synthetic construct
  source 1..23: mol_type = other RNA
tatatttccaggatgaaagtcca

SEQ ID NO: 720 - RNA, 23 nt, synthetic construct
  source 1..23: mol_type = other RNA
tatatttccaggatgaaagtcca

SEQ ID NO: 721 - RNA, 23 nt, synthetic construct
  source 1..23: mol_type = other RNA
tatatttccaggatgaaagtcca

SEQ ID NO: 722 - RNA, 23 nt, synthetic construct
  source 1..23: mol_type = other RNA
tatatttccaggatgaaagtcca

SEQ ID NO: 723 - RNA, 23 nt, synthetic construct
  source 1..23: mol_type = other RNA
  modified_base 14: mod_base = OTHER; note = Thymine
tatatttccaggatgaaagtcca

SEQ ID NO: 724 - RNA, 23 nt, synthetic construct
  source 1..23: mol_type = other RNA
  modified_base 14: mod_base = OTHER; note = Thymine
tatatttccaggatgaaagtcca

SEQ ID NO: 725 - RNA, 23 nt, synthetic construct
  source 1..23: mol_type = other RNA
  modified_base 14: mod_base = OTHER; note = Thymine
tatatttccaggatgaaagtcca

SEQ ID NO: 726 - RNA, 23 nt, synthetic construct
  source 1..23: mol_type = other RNA
  modified_base 6: mod_base = OTHER; note = Thymine
  modified_base 14: mod_base = OTHER; note = Thymine
tatatttccaggatgaaagtcca

SEQ ID NO: 727 - RNA, 23 nt, synthetic construct
  source 1..23: mol_type = other RNA
  modified_base 6: mod_base = OTHER; note = Thymine
  modified_base 14: mod_base = OTHER; note = Thymine
tatatttccaggatgaaagtcca

SEQ ID NO: 728 - RNA, 23 nt, synthetic construct
  source 1..23: mol_type = other RNA
  modified_base 14: mod_base = OTHER; note = Thymine
tatatttccaggatgaaagtcca

SEQ ID NO: 729 - RNA, 23 nt, synthetic construct
  source 1..23: mol_type = other RNA
  modified_base 6: mod_base = OTHER; note = Thymine
  modified_base 14: mod_base = OTHER; note = Thymine
tatatttccaggatgaaagtcca

SEQ ID NO: 730 - RNA, 23 nt, synthetic construct
  source 1..23: mol_type = other RNA
  modified_base 14: mod_base = OTHER; note = Thymine
tatatttccaggatgaaagtcca

SEQ ID NO: 731 - RNA, 23 nt, synthetic construct
  source 1..23: mol_type = other RNA
tgacatcttgaacacctttctcc

SEQ ID NO: 732 - RNA, 23 nt, synthetic construct
  source 1..23: mol_type = other RNA
agttaatatatttccaggatgaa

SEQ ID NO: 733 - RNA, 23 nt, synthetic construct
  source 1..23: mol_type = other RNA
ttgtcgatgactttcacattctg

SEQ ID NO: 734 - RNA, 23 nt, synthetic construct
  source 1..23: mol_type = other RNA
tatgggaaaatattgtgcactgt

SEQ ID NO: 735 - RNA, 23 nt, synthetic construct
  source 1..23: mol_type = other RNA
aatgtcttgtcgatgactttcac

SEQ ID NO: 736 - RNA, 23 nt, synthetic construct
  source 1..23: mol_type = other RNA
tttgtcgatgactttcacattct

SEQ ID NO: 737 - RNA, 23 nt, synthetic construct
  source 1..23: mol_type = other RNA
taacagttaatatatttccagga

SEQ ID NO: 738 - RNA, 23 nt, synthetic construct
  source 1..23: mol_type = other RNA
aaataatacagatgggaaaatat

SEQ ID NO: 739 - RNA, 23 nt, synthetic construct
  source 1..23: mol_type = other RNA
ttttgttggaaaagaacgacacc

SEQ ID NO: 740 - RNA, 23 nt, synthetic construct
  source 1..23: mol_type = other RNA
tagttaatatatttccaggatga

SEQ ID NO: 741 - RNA, 23 nt, synthetic construct
  source 1..23: mol_type = other RNA
tatcatcacctctcaaaatgccc

SEQ ID NO: 742 - RNA, 23 nt, synthetic construct
  source 1..23: mol_type = other RNA
ttgaacacctttctccccctgga

SEQ ID NO: 743 - RNA, 23 nt, synthetic construct
  source 1..23: mol_type = other RNA
tttaacagttaatatatttccag

SEQ ID NO: 744 - RNA, 23 nt, synthetic construct
  source 1..23: mol_type = other RNA
aaggatttttcctcaccaatgtc

SEQ ID NO: 745 - RNA, 23 nt, synthetic construct
  source 1..23: mol_type = other RNA
tatcttgaacacctttctccccc

SEQ ID NO: 746 - RNA, 23 nt, synthetic construct
  source 1..23: mol_type = other RNA
atcatcacctctcaaaatgccct

SEQ ID NO: 747 - RNA, 23 nt, synthetic construct
  source 1..23: mol_type = other RNA
aaaagaacgacaccctttgtatt

SEQ ID NO: 748 - RNA, 23 nt, synthetic construct
  source 1..23: mol_type = other RNA
tgattcgacaccaagatcccatt

SEQ ID NO: 749 - RNA, 23 nt, synthetic construct
  source 1..23: mol_type = other RNA
taaaatattgtgcactgtcagat

SEQ ID NO: 750 - RNA, 23 nt, synthetic construct
  source 1..23: mol_type = other RNA
atgggaaaatattgtgcactgtc

SEQ ID NO: 751 - RNA, 23 nt, synthetic construct
  source 1..23: mol_type = other RNA
ttaggacacccattgaaaagtca

SEQ ID NO: 752 - RNA, 23 nt, synthetic construct
  source 1..23: mol_type = other RNA
aggatttttcctcaccaatgtct

SEQ ID NO: 753 - RNA, 23 nt, synthetic construct
  source 1..23: mol_type = other RNA
tcattgaaaagtcaaaagcaatg

SEQ ID NO: 754 - RNA, 23 nt, synthetic construct
  source 1..23: mol_type = other RNA
tcatcatcacctctcaaaatgcc

SEQ ID NO: 755 - RNA, 23 nt, synthetic construct
  source 1..23: mol_type = other RNA
tgacacccattgaaaagtcaaaa

SEQ ID NO: 756 - RNA, 23 nt, synthetic construct
  source 1..23: mol_type = other RNA
tctgtcctaaaacagaagtcgac

SEQ ID NO: 757 - RNA, 23 nt, synthetic construct
  source 1..23: mol_type = other RNA
tattctggcacccactcagagcc

SEQ ID NO: 758 - RNA, 23 nt, synthetic construct
  source 1..23: mol_type = other RNA
tactttcacattctggcacccac

SEQ ID NO: 759 - RNA, 23 nt, synthetic construct
  source 1..23: mol_type = other RNA
tgttcctaggacacccattgaaa

SEQ ID NO: 760 - RNA, 23 nt, synthetic construct
  source 1..23: mol_type = other RNA
taatgtcttgtcgatgactttca

SEQ ID NO: 761 - RNA, 23 nt, synthetic construct
  source 1..23: mol_type = other RNA
tgcatcatcacctctcaaaatgc

SEQ ID NO: 762 - RNA, 23 nt, synthetic construct
  source 1..23: mol_type = other RNA
tctcaccaatgtcttgtcgatga

SEQ ID NO: 763 - RNA, 23 nt, synthetic construct
  source 1..23: mol_type = other RNA
tgactttcacattctggcaccca

SEQ ID NO: 764 - RNA, 23 nt, synthetic construct
  source 1..23: mol_type = other RNA
tggaaaatattgtgcactgtcag

SEQ ID NO: 765 - RNA, 23 nt, synthetic construct
  source 1..23: mol_type = other RNA
ttctgcacagtgtctctttgtca

SEQ ID NO: 766 - RNA, 23 nt, synthetic construct
  source 1..23: mol_type = other RNA
tcctaggacacccattgaaaagt

SEQ ID NO: 767 - RNA, 23 nt, synthetic construct
  source 1..23: mol_type = other RNA
actgtcagatcttggaaacggcc

SEQ ID NO: 768 - RNA, 23 nt, synthetic construct
  source 1..23: mol_type = other RNA
tttgaacacctttctccccctgg

SEQ ID NO: 769 - RNA, 23 nt, synthetic construct
  source 1..23: mol_type = other RNA
accaatgtcttgtcgatgacttt

SEQ ID NO: 770 - DNA, 21 bp, synthetic construct
  source 1..21: mol_type = other DNA
  modified_base 1: mod_base = OTHER; note = 2'-O-methyluridine-3'-phosphate
  modified_base 2: mod_base = OTHER; note = 2'-O-methyluridine-3'-phosphate
  modified_base 3: mod_base = OTHER; note = 2'-O-methylcytidine-3'-phosphate
  modified_base 6: mod_base = OTHER; note = 2'-O-methyluridine-3'-phosphate
  modified_base 10: mod_base = OTHER; note = 2'-O-methyluridine-3'-phosphate
  modified_base 12: mod_base = OTHER; note = 2'-O-methyluridine-3'-phosphate
  modified_base 13: mod_base = OTHER; note = 2'-O-methylcytidine-3'-phosphate
  modified_base 14: mod_base = OTHER; note = 2'-O-methylcytidine-3'-phosphate
  modified_base 15: mod_base = OTHER; note = 2'-O-methyluridine-3'-phosphate
  modified_base 20: mod_base = OTHER; note = 2'-deoxythymidine-3'-phosphorothioate
  misc_feature 1..19: note = RNA
  misc_feature 20..21: note = DNA
ttcaatgggtgtcctaggatt

SEQ ID NO: 771 - RNA, 19 nt, synthetic construct
  source 1..19: mol_type = other RNA
ttcaatgggtgtcctagga

SEQ ID NO: 772 - DNA, 21 bp, synthetic construct
  source 1..21: mol_type = other DNA
  modified_base 2: mod_base = OTHER; note = 2'-O-methylcytidine-3'-phosphate
  modified_base 5: mod_base = OTHER; note = 2'-O-methylcytidine-3'-phosphate
  modified_base 6: mod_base = OTHER; note = 2'-O-methyluridine-3'-phosphate
  modified_base 14: mod_base = OTHER; note = 2'-O-methylcytidine-3'-phosphate
  modified_base 16: mod_base = OTHER; note = 2'-O-methyluridine-3'-phosphate
  modified_base 17: mod_base = OTHER; note = 2'-O-methylcytidine-3'-phosphate
  modified_base 19: mod_base = OTHER; note = 2'-O-methyluridine-3'-phosphate
  modified_base 20: mod_base = OTHER; note = 2'-deoxythymidine-3'-phosphorothioate
  misc_feature 1..19: note = RNA
  misc_feature 20..21: note = DNA
acaactggagggacatcgttt

SEQ ID NO: 773 - RNA, 19 nt, synthetic construct
  source 1..19: mol_type = other RNA
acaactggagggacatcgt

SEQ ID NO: 774 - DNA, 21 bp, synthetic construct
  source 1..21: mol_type = other DNA
  modified_base 4: mod_base = OTHER; note = 2'-O-methyluridine-3'-phosphate
  modified_base 9: mod_base = OTHER; note = 2'-O-methylcytidine-3'-phosphate
  modified_base 13: mod_base = OTHER; note = 2'-O-methylcytidine-3'-phosphate
  modified_base 20: mod_base = OTHER; note = 2'-deoxythymidine-3'-phosphorothioate
  misc_feature 1..19: note = RNA
  misc_feature 20..21: note = DNA
tcctaggacacccattgaatt

SEQ ID NO: 775 - RNA, 19 nt, synthetic construct
  source 1..19: mol_type = other RNA
tcctaggacacccattgaa

SEQ ID NO: 776 - DNA, 21 bp, synthetic construct
  source 1..21: mol_type = other DNA
  modified_base 13: mod_base = OTHER; note = 2'-O-methylcytidine-3'-phosphate
  modified_base 20: mod_base = OTHER; note = 2'-deoxythymidine-3'-phosphorothioate
  misc_feature 1..19: note = RNA
  misc_feature 20..21: note = DNA
acgatgtccctccagttgttt

SEQ ID NO: 777 - RNA, 19 nt, synthetic construct
  source 1..19: mol_type = other RNA
acgatgtccctccagttgt

SEQ ID NO: 778 - RNA, 21 nt, synthetic construct
  source 1..21: mol_type = other RNA
  modified_base 1: mod_base = OTHER; note = 2'-fluorouridine -3'-phosphorothioate
  modified_base 2: mod_base = OTHER; note = 2'-O-methylcytidine-3'- phosphorothioate
  modified_base 3: mod_base = OTHER; note = 2'-fluorocytidine-3'-phosphate
  modified_base 4: mod_base = OTHER; note = 2'-O-methyluridine-3'-phosphate
  modified_base 5: mod_base = OTHER; note = 2'-fluoroadenosine-3'-phosphate
  modified_base 6: mod_base = OTHER; note = 2'-O-methylguanosine-3'-phosphate
  modified_base 7: mod_base = OTHER; note = 2'-fluoroguanosine-3'-phosphate
  modified_base 8: mod_base = OTHER; note = 2'-O-methyladenosine-3'-phosphate
  modified_base 9: mod_base = OTHER; note = 2'-fluoroadenosine-3'-phosphate
  modified_base 10: mod_base = OTHER; note = 2'-fluorocytidine-3'-phosphate
  modified_base 11: mod_base = OTHER; note = 2'-fluorocytidine-3'-phosphate
  modified_base 12: mod_base = OTHER; note = 2'-O-methyluridine-3'-phosphate
  modified_base 13: mod_base = OTHER; note = 2'-fluorouridine-3'-phosphate
  modified_base 14: mod_base = OTHER; note = 2'-O-methyluridine-3'-phosphate
  modified_base 15: mod_base = OTHER; note = 2'-fluorouridine-3'-phosphate
  modified_base 16: mod_base = OTHER; note = 2'-O-methyladenosine-3'-phosphate
  modified_base 17: mod_base = OTHER; note = 2'-fluoroguanosine-3'-phosphate
  modified_base 18: mod_base = OTHER; note = 2'-O-methyladenosine-3'-phosphate
  modified_base 19: mod_base = OTHER; note = 2'-fluoroadenosine-3'-phosphate
  modified_base 20: mod_base = OTHER; note = 2'-O-methyladenosine-3'-phosphate
  modified_base 21: mod_base = OTHER; note 2'-fluorouridine-3'-phosphate-N-[tris(GalNAc-alkyl)-amidode canoyl)]-4-hydroxyprolinol (Hyp-(GalNAc-alkyl)3)
tcctaggaaccttttagaaat

SEQ ID NO: 779 - RNA, 21 nt, synthetic construct
  source 1..21: mol_type = other RNA
  modified_base 1: mod_base = OTHER; note = 2'-fluoroguanosine-3'-phosphorothioate
  modified_base 2: mod_base = OTHER; note = 2'-O-methyladenosine-3'- phosphorothioate
  modified_base 3: mod_base = OTHER; note = 2'-fluorocytidine-3'-phosphate
  modified_base 4: mod_base = OTHER; note = 2'-O-methyluridine-3'-phosphate
  modified_base 5: mod_base = OTHER; note = 2'-fluorouridine-3'-phosphate
  modified_base 6: mod_base = OTHER; note = 2'-O-methyluridine-3'-phosphate
  modified_base 7: mod_base = OTHER; note = 2'-fluorocytidine-3'-phosphate
  modified_base 8: mod_base = OTHER; note = 2'-O-methyladenosine-3'-phosphate
  modified_base 9: mod_base = OTHER; note = 2'-fluorouridine-3'-phosphate
  modified_base 10: mod_base = OTHER; note = 2'-fluorocytidine-3'-phosphate
  modified_base 11: mod_base = OTHER; note = 2'-fluorocytidine-3'-phosphate
  modified_base 12: mod_base = OTHER; note = 2'-O-methyluridine-3'-phosphate
  modified_base 13: mod_base = OTHER; note = 2'-fluoroguanosine-3'-phosphate
  modified_base 14: mod_base = OTHER; note = 2'-O-methylguanosine-3'-phosphate
  modified_base 15: mod_base = OTHER; note = 2'-fluoroadenosine-3'-phosphate
  modified_base 16: mod_base = OTHER; note = 2'-O-methyladenosine-3'-phosphate
  modified_base 17: mod_base = OTHER; note = 2'-fluoroadenosine-3'-phosphate
  modified_base 18: mod_base = OTHER; note = 2'-O-methyluridine-3'-phosphate
  modified_base 19: mod_base = OTHER; note = 2'-fluoroadenosine-3'-phosphate
  modified_base 20: mod_base = OTHER; note = 2'-O-methyluridine-3'-phosphate
  modified_base 21: mod_base = OTHER; note 2'-fluoroadenosine-3'-phosphate-N-[tris(GalNAc-alkyl)-amido decanoyl)]-4-hydroxyprolinol (Hyp-(GalNAc-alkyl)3)
gactttcatcctggaaatata

SEQ ID NO: 780 - RNA, 21 nt, synthetic construct
  source 1..21: mol_type = other RNA
  modified_base 1: mod_base = OTHER; note = 2'-fluoroguanosine-3'-phosphorothioate
  modified_base 2: mod_base = OTHER; note = 2'-O-methyladenosine-3'- phosphorothioate
  modified_base 3: mod_base = OTHER; note = 2'-fluoroadenosine-3'-phosphate
  modified_base 4: mod_base = OTHER; note = 2'-O-methyluridine-3'-phosphate
  modified_base 5: mod_base = OTHER; note = 2'-fluoroguanosine-3'-phosphate
  modified_base 6: mod_base = OTHER; note = 2'-O-methyluridine-3'-phosphate
  modified_base 7: mod_base = OTHER; note = 2'-fluoroguanosine-3'-phosphate
  modified_base 8: mod_base = OTHER; note = 2'-O-methyladenosine-3'-phosphate
  modified_base 9: mod_base = OTHER; note = 2'-fluoroadenosine-3'-phosphate
  modified_base 10: mod_base = OTHER; note = 2'-fluoroadenosine-3'-phosphate
  modified_base 11: mod_base = OTHER; note = 2'-fluoroguanosine-3'-phosphate
  modified_base 12: mod_base = OTHER; note = 2'-O-methyluridine-3'-phosphate
  modified_base 13: mod_base = OTHER; note = 2'-fluorocytidine-3'-phosphate
  modified_base 14: mod_base = OTHER; note = 2'-O-methyladenosine-3'-phosphate
  modified_base 15: mod_base = OTHER; note = 2'-fluorouridine-3'-phosphate
  modified_base 16: mod_base = OTHER; note = 2'-O-methylcytidine-3'-phosphate
  modified_base 17: mod_base = OTHER; note = 2'-fluoroguanosine-3'-phosphate
  modified_base 18: mod_base = OTHER; note = 2'-O-methyladenosine-3'-phosphate
  modified_base 19: mod_base = OTHER; note = 2'-fluorocytidine-3'-phosphate
  modified_base 20: mod_base = OTHER; note = 2'-O-methyladenosine-3'-phosphate
  modified_base 21: mod_base = OTHER; note 2'-fluoroadenosine-3'-phosphate-N-[tris(GalNAc-alkyl)-amido decanoyl)]-4-hydroxyprolinol (Hyp-(GalNAc-alkyl)3)
gaatgtgaaagtcatcgacaa

SEQ ID NO: 781 - RNA, 21 nt, synthetic construct
  source 1..21: mol_type = other RNA
  modified_base 1: mod_base = OTHER; note = 2'-fluorocytidine-3'-phosphorothioate
  modified_base 2: mod_base = OTHER; note = 2'-O-methyladenosine-3'- phosphorothioate
  modified_base 3: mod_base = OTHER; note = 2'-fluorouridine-3'-phosphate
  modified_base 4: mod_base = OTHER; note = 2'-O-methyluridine-3'-phosphate
  modified_base 5: mod_base = OTHER; note = 2'-fluoroguanosine-3'-phosphate
  modified_base 6: mod_base = OTHER; note = 2'-O-methylguanosine-3'-phosphate
  modified_base 7: mod_base = OTHER; note = 2'-fluorouridine-3'-phosphate
  modified_base 8: mod_base = OTHER; note = 2'-O-methylguanosine-3'-phosphate
  modified_base 9: mod_base = OTHER; note = 2'-fluoroadenosine-3'-phosphate
  modified_base 10: mod_base = OTHER; note = 2'-fluoroguanosine-3'-phosphate
  modified_base 11: mod_base = OTHER; note = 2'-fluoroguanosine-3'-phosphate
  modified_base 12: mod_base = OTHER; note = 2'-O-methyladenosine-3'-phosphate
  modified_base 13: mod_base = OTHER; note = 2'-fluoroadenosine-3'-phosphate
  modified_base 14: mod_base = OTHER; note = 2'-O-methyladenosine-3'-phosphate
  modified_base 15: mod_base = OTHER; note = 2'-fluoroadenosine-3'-phosphate
  modified_base 16: mod_base = OTHER; note = 2'-O-methyladenosine-3'-phosphate
  modified_base 17: mod_base = OTHER; note = 2'-fluorouridine-3'-phosphate
  modified_base 18: mod_base = OTHER; note = 2'-O-methylcytidine-3'-phosphate
  modified_base 19: mod_base = OTHER; note = 2'-fluorocytidine-3'-phosphate
  modified_base 20: mod_base = OTHER; note = 2'-O-methyluridine-3'-phosphate
  modified_base 21: mod_base = OTHER; note 2'-fluorouridine-3'-phosphate-N-[tris(GalNAc-alkyl)-amidode canoyl)]-4-hydroxyprolinol (Hyp-(GalNAc-alkyl)3)
cattggtgaggaaaaatcctt

SEQ ID NO: 782 - RNA, 21 nt, synthetic construct
  source 1..21: mol_type = other RNA
  modified_base 1: mod_base = OTHER; note = 2'-fluoroadenosine-3'-phosphorothioate
  modified_base 2: mod_base = OTHER; note = 2'-O-methyluridine-3'-phosphorothioate
  modified_base 3: mod_base = OTHER; note = 2'-fluorocytidine-3'-phosphate
  modified_base 4: mod_base = OTHER; note = 2'-O-methylguanosine-3'-phosphate
  modified_base 5: mod_base = OTHER; note = 2'-fluoroadenosine-3'-phosphate
  modified_base 6: mod_base = OTHER; note = 2'-O-methylcytidine-3'-phosphate
  modified_base 7: mod_base = OTHER; note = 2'-fluoroadenosine-3'-phosphate
  modified_base 8: mod_base = OTHER; note = 2'-O-methyladenosine-3'-phosphate
  modified_base 9: mod_base = OTHER; note = 2'-fluoroguanosine-3'-phosphate
  modified_base 10: mod_base = OTHER; note = 2'-fluoroadenosine-3'-phosphate
  modified_base 11: mod_base = OTHER; note = 2'-fluorocytidine-3'-phosphate
  modified_base 12: mod_base = OTHER; note = 2'-O-methyladenosine-3'-phosphate
  modified_base 13: mod_base = OTHER; note = 2'-fluorouridine-3'-phosphate
  modified_base 14: mod_base = OTHER; note = 2'-O-methyluridine-3'-phosphate
  modified_base 15: mod_base = OTHER; note = 2'-fluoroguanosine-3'-phosphate
  modified_base 16: mod_base = OTHER; note = 2'-O-methylguanosine-3'-phosphate
  modified_base 17: mod_base = OTHER; note = 2'-fluorouridine-3'-phosphate
  modified_base 18: mod_base = OTHER; note = 2'-O-methylguanosine-3'-phosphate
  modified_base 19: mod_base = OTHER; note = 2'-fluoroadenosine-3'-phosphate
  modified_base 20: mod_base = OTHER; note = 2'-O-methylguanosine-3'-phosphate
  modified_base 21: mod_base = OTHER; note 2'-fluoroadenosine-3'-phosphate-N-[tris(GalNAc-alkyl)-amido decanoyl)]-4-hydroxyprolinol (Hyp-(GalNAc-alkyl)3)
atcgacaagacattggtgaga

SEQ ID NO: 783 - RNA, 21 nt, synthetic construct
  source 1..21: mol_type = other RNA
  modified_base 1: mod_base = OTHER; note = 2'-fluoroadenosine-3'-phosphorothioate
  modified_base 2: mod_base = OTHER; note = 2'-O-methylcytidine-3'- phosphorothioate
  modified_base 3: mod_base = OTHER; note = 2'-fluoroadenosine-3'-phosphate
  modified_base 4: mod_base = OTHER; note = 2'-O-methyluridine-3'-phosphate
  modified_base 5: mod_base = OTHER; note = 2'-fluorouridine-3'-phosphate
  modified_base 6: mod_base = OTHER; note = 2'-O-methylguanosine-3'-phosphate
  modified_base 7: mod_base = OTHER; note = 2'-fluoroguanosine-3'-phosphate
  modified_base 8: mod_base = OTHER; note = 2'-O-methyluridine-3'-phosphate
  modified_base 9: mod_base = OTHER; note = 2'-fluoroguanosine-3'-phosphate
  modified_base 10: mod_base = OTHER; note = 2'-fluoroadenosine-3'-phosphate
  modified_base 11: mod_base = OTHER; note = 2'-fluoroguanosine-3'-phosphate
  modified_base 12: mod_base = OTHER; note = 2'-O-methylguanosine-3'-phosphate
  modified_base 13: mod_base = OTHER; note = 2'-fluoroadenosine-3'-phosphate
  modified_base 14: mod_base = OTHER; note = 2'-O-methyladenosine-3'-phosphate
  modified_base 15: mod_base = OTHER; note = 2'-fluoroadenosine-3'-phosphate
  modified_base 16: mod_base = OTHER; note = 2'-O-methyladenosine-3'-phosphate
  modified_base 17: mod_base = OTHER; note = 2'-fluoroadenosine-3'-phosphate
  modified_base 18: mod_base = OTHER; note = 2'-O-methyluridine-3'-phosphate
  modified_base 19: mod_base = OTHER; note = 2'-fluorocytidine-3'-phosphate
  modified_base 20: mod_base = OTHER; note = 2'-O-methylcytidine-3'-phosphate
  modified_base 21: mod_base = OTHER; note 2'-fluorouridine-3'-phosphate-N-[tris(GalNAc-alkyl)-amidode canoyl)]-4-hydroxyprolinol (Hyp-(GalNAc-alkyl)3)
acattggtgaggaaaaatcct

SEQ ID NO: 784 - RNA, 21 nt, synthetic construct
  source 1..21: mol_type = other RNA
  modified_base 1: mod_base = OTHER; note = 2'-fluoroguanosine-3'-phosphorothioate
  modified_base 2: mod_base = OTHER; note = 2'-O-methyladenosine-3'- phosphorothioate
  modified_base 3: mod_base = OTHER; note = 2'-fluoroadenosine-3'-phosphate
  modified_base 4: mod_base = OTHER; note = 2'-O-methyladenosine-3'-phosphate
  modified_base 5: mod_base = OTHER; note = 2'-fluoroguanosine-3'-phosphate
  modified_base 6: mod_base = OTHER; note = 2'-O-methyluridine-3'-phosphate
  modified_base 7: mod_base = OTHER; note = 2'-fluorocytidine-3'-phosphate
  modified_base 8: mod_base = OTHER; note = 2'-O-methyladenosine-3'-phosphate
  modified_base 9: mod_base = OTHER; note = 2'-fluorouridine-3'-phosphate
  modified_base 10: mod_base = OTHER; note = 2'-fluorocytidine-3'-phosphate
  modified_base 11: mod_base = OTHER; note = 2'-fluoroguanosine-3'-phosphate
  modified_base 12: mod_base = OTHER; note = 2'-O-methyladenosine-3'-phosphate
  modified_base 13: mod_base = OTHER; note = 2'-fluorocytidine-3'-phosphate
  modified_base 14: mod_base = OTHER; note = 2'-O-methyladenosine-3'-phosphate
  modified_base 15: mod_base = OTHER; note = 2'-fluoroadenosine-3'-phosphate
  modified_base 16: mod_base = OTHER; note = 2'-O-methylguanosine-3'-phosphate
  modified_base 17: mod_base = OTHER; note = 2'-fluoroadenosine-3'-phosphate
  modified_base 18: mod_base = OTHER; note = 2'-O-methylcytidine-3'-phosphate
  modified_base 19: mod_base = OTHER; note = 2'-fluoroadenosine-3'-phosphate
  modified_base 20: mod_base = OTHER; note = 2'-O-methyluridine-3'-phosphate
  modified_base 21: mod_base = OTHER; note 2'-fluorouridine-3'-phosphate-N-[tris(GalNAc-alkyl)-amidode canoyl)]-4-hydroxyprolinol (Hyp-(GalNAc-alkyl)3)
gaaagtcatcgacaagacatt

SEQ ID NO: 785 - RNA, 21 nt, synthetic construct
  source 1..21: mol_type = other RNA
  modified_base 1: mod_base = OTHER; note = 2'-fluoroadenosine-3'-phosphorothioate
  modified_base 2: mod_base = OTHER; note = 2'-O-methyladenosine-3'- phosphorothioate
  modified_base 3: mod_base = OTHER; note = 2'-fluoroadenosine-3'-phosphate
  modified_base 4: mod_base = OTHER; note = 2'-O-methylguanosine-3'-phosphate
  modified_base 5: mod_base = OTHER; note = 2'-fluorouridine-3'-phosphate
  modified_base 6: mod_base = OTHER; note = 2'-O-methylcytidine-3'-phosphate
  modified_base 7: mod_base = OTHER; note = 2'-fluoroadenosine-3'-phosphate
  modified_base 8: mod_base = OTHER; note = 2'-O-methyluridine-3'-phosphate
  modified_base 9: mod_base = OTHER; note = 2'-fluorocytidine-3'-phosphate
  modified_base 10: mod_base = OTHER; note = 2'-fluoroguanosine-3'-phosphate
  modified_base 11: mod_base = OTHER; note = 2'-fluoroadenosine-3'-phosphate
  modified_base 12: mod_base = OTHER; note = 2'-O-methylcytidine-3'-phosphate
  modified_base 13: mod_base = OTHER; note = 2'-fluoroadenosine-3'-phosphate
  modified_base 14: mod_base = OTHER; note = 2'-O-methyladenosine-3'-phosphate
  modified_base 15: mod_base = OTHER; note = 2'-fluoroguanosine-3'-phosphate
  modified_base 16: mod_base = OTHER; note = 2'-O-methyladenosine-3'-phosphate
  modified_base 17: mod_base = OTHER; note = 2'-fluorocytidine-3'-phosphate
  modified_base 18: mod_base = OTHER; note = 2'-O-methyladenosine-3'-phosphate
  modified_base 19: mod_base = OTHER; note = 2'-fluorouridine-3'-phosphate
  modified_base 20: mod_base = OTHER; note = 2'-O-methyluridine-3'-phosphate
  modified_base 21: mod_base = OTHER; note 2'-fluoroadenosine-3'-phosphate-N-[tris(GalNAc-alkyl)-amido decanoyl)]-4-hydroxyprolinol (Hyp-(GalNAc-alkyl)3)
aaagtcatcgacaagacatta

SEQ ID NO: 786 - RNA, 23 nt, synthetic construct
  source 1..23: mol_type = other RNA
  modified_base 1: mod_base = OTHER; note = 2'-O-methyladenosine-3'- phosphorothioate
  modified_base 2: mod_base = OTHER; note = 2'-fluorouridine -3'-phosphorothioate
  modified_base 3: mod_base = OTHER; note = 2'-O-methyluridine-3'-phosphate
  modified_base 4: mod_base = OTHER; note = 2'-fluorouridine-3'-phosphate
  modified_base 5: mod_base = OTHER; note = 2'-O-methylcytidine-3'-phosphate
  modified_base 6: mod_base = OTHER; note = 2'-fluorouridine-3'-phosphate
  modified_base 7: mod_base = OTHER; note = 2'-O-methyladenosine-3'-phosphate
  modified_base 8: mod_base = OTHER; note = 2'-fluoroadenosine-3'-phosphate
  modified_base 9: mod_base = OTHER; note = 2'-O-methyladenosine-3'-phosphate
  modified_base 10: mod_base = OTHER; note = 2'-fluoroadenosine-3'-phosphate
  modified_base 11: mod_base = OTHER; note = 2'-O-methylguanosine-3'-phosphate
  modified_base 12: mod_base = OTHER; note = 2'-O-methylguanosine-3'-phosphate
  modified_base 13: mod_base = OTHER; note = 2'-O-methyluridine-3'-phosphate
  modified_base 14: mod_base = OTHER; note = 2'-fluorouridine-3'-phosphate
  modified_base 15: mod_base = OTHER; note = 2'-O-methylcytidine-3'-phosphate
  modified_base 16: mod_base = OTHER; note = 2'-fluorocytidine-3'-phosphate
  modified_base 17: mod_base = OTHER; note = 2'-O-methyluridine-3'-phosphate
  modified_base 18: mod_base = OTHER; note = 2'-fluoroadenosine-3'-phosphate
  modified_base 19: mod_base = OTHER; note = 2'-O-methylguanosine-3'-phosphate
  modified_base 20: mod_base = OTHER; note = 2'-fluoroguanosine-3'-phosphate
  modified_base 21: mod_base = OTHER; note = 2'-O-methyladenosine-3'- phosphorothioate
  modified_base 22: mod_base = OTHER; note = 2'-O-methylcytidine-3'- phosphorothioate
  modified_base 23: mod_base = OTHER; note = 2'-O-methyladenosine-3'-phosphate
atttctaaaaggttcctaggaca

SEQ ID NO: 787 - RNA, 23 nt, synthetic construct
  source 1..23: mol_type = other RNA
  modified_base 1: mod_base = OTHER; note = 2'-O-methyluridine-3'-phosphorothioate
  modified_base 2: mod_base = OTHER; note = 2'-fluoroadenosine-3'-phosphorothioate
  modified_base 3: mod_base = OTHER; note = 2'-O-methyluridine-3'-phosphate
  modified_base 4: mod_base = OTHER; note = 2'-fluoroadenosine-3'-phosphate
  modified_base 5: mod_base = OTHER; note = 2'-O-methyluridine-3'-phosphate
  modified_base 6: mod_base = OTHER; note = 2'-fluorouridine-3'-phosphate
  modified_base 7: mod_base = OTHER; note = 2'-O-methyluridine-3'-phosphate
  modified_base 8: mod_base = OTHER; note = 2'-fluorocytidine-3'-phosphate
  modified_base 9: mod_base = OTHER; note = 2'-O-methylcytidine-3'-phosphate
  modified_base 10: mod_base = OTHER; note = 2'-fluoroadenosine-3'-phosphate
  modified_base 11: mod_base = OTHER; note = 2'-O-methylguanosine-3'-phosphate
  modified_base 12: mod_base = OTHER; note = 2'-O-methylguanosine-3'-phosphate
  modified_base 13: mod_base = OTHER; note = 2'-O-methyladenosine-3'-phosphate
  modified_base 14: mod_base = OTHER; note = 2'-fluorouridine-3'-phosphate
  modified_base 15: mod_base = OTHER; note = 2'-O-methylguanosine-3'-phosphate
  modified_base 16: mod_base = OTHER; note = 2'-fluoroadenosine-3'-phosphate
  modified_base 17: mod_base = OTHER; note = 2'-O-methyladenosine-3'-phosphate
  modified_base 18: mod_base = OTHER; note = 2'-fluoroadenosine-3'-phosphate
  modified_base 19: mod_base = OTHER; note = 2'-O-methylguanosine-3'-phosphate
  modified_base 20: mod_base = OTHER; note = 2'-fluorouridine-3'-phosphate
  modified_base 21: mod_base = OTHER; note = 2'-O-methylcytidine-3'- phosphorothioate
  modified_base 22: mod_base = OTHER; note = 2'-O-methylcytidine-3'- phosphorothioate
  modified_base 23: mod_base = OTHER; note = 2'-O-methyladenosine-3'-phosphate
tatatttccaggatgaaagtcca

SEQ ID NO: 788 - RNA, 23 nt, synthetic construct
  source 1..23: mol_type = other RNA
  modified_base 1: mod_base = OTHER; note = 2'-O-methyluridine-3'-phosphorothioate
  modified_base 2: mod_base = OTHER; note = 2'-fluorouridine -3'-phosphorothioate
  modified_base 3: mod_base = OTHER; note = 2'-O-methylguanosine-3'-phosphate
  modified_base 4: mod_base = OTHER; note = 2'-fluorouridine-3'-phosphate
  modified_base 5: mod_base = OTHER; note = 2'-O-methylcytidine-3'-phosphate
  modified_base 6: mod_base = OTHER; note = 2'-fluoroguanosine-3'-phosphate
  modified_base 7: mod_base = OTHER; note = 2'-O-methyladenosine-3'-phosphate
  modified_base 8: mod_base = OTHER; note = 2'-fluorouridine-3'-phosphate
  modified_base 9: mod_base = OTHER; note = 2'-O-methylguanosine-3'-phosphate
  modified_base 10: mod_base = OTHER; note = 2'-fluoroadenosine-3'-phosphate
  modified_base 11: mod_base = OTHER; note = 2'-O-methylcytidine-3'-phosphate
  modified_base 12: mod_base = OTHER; note = 2'-O-methyluridine-3'-phosphate
  modified_base 13: mod_base = OTHER; note = 2'-O-methyluridine-3'-phosphate
  modified_base 14: mod_base = OTHER; note = 2'-fluorouridine-3'-phosphate
  modified_base 15: mod_base = OTHER; note = 2'-O-methylcytidine-3'-phosphate
  modified_base 16: mod_base = OTHER; note = 2'-fluoroadenosine-3'-phosphate
  modified_base 17: mod_base = OTHER; note = 2'-O-methylcytidine-3'-phosphate
  modified_base 18: mod_base = OTHER; note = 2'-fluoroadenosine-3'-phosphate
  modified_base 19: mod_base = OTHER; note = 2'-O-methyluridine-3'-phosphate
  modified_base 20: mod_base = OTHER; note = 2'-fluorouridine-3'-phosphate
  modified_base 21: mod_base = OTHER; note = 2'-O-methylcytidine-3'- phosphorothioate
  modified_base 22: mod_base = OTHER; note = 2'-O-methyluridine-3'-phosphorothioate
  modified_base 23: mod_base = OTHER; note = 2'-O-methylguanosine-3'-phosphate
ttgtcgatgactttcacattctg

SEQ ID NO: 789 - RNA, 23 nt, synthetic construct
  source 1..23: mol_type = other RNA
  modified_base 1: mod_base = OTHER; note = 2'-O-methyladenosine-3'- phosphorothioate
  modified_base 2: mod_base = OTHER; note = 2'-fluoroadenosine-3'-phosphorothioate
  modified_base 3: mod_base = OTHER; note = 2'-O-methylguanosine-3'-phosphate
  modified_base 4: mod_base = OTHER; note = 2'-fluoroguanosine-3'-phosphate
  modified_base 5: mod_base = OTHER; note = 2'-O-methyladenosine-3'-phosphate
  modified_base 6: mod_base = OTHER; note = 2'-fluorouridine-3'-phosphate
  modified_base 7: mod_base = OTHER; note = 2'-O-methyluridine-3'-phosphate
  modified_base 8: mod_base = OTHER; note = 2'-fluorouridine-3'-phosphate
  modified_base 9: mod_base = OTHER; note = 2'-O-methyluridine-3'-phosphate
  modified_base 10: mod_base = OTHER; note = 2'-fluorouridine-3'-phosphate
  modified_base 11: mod_base = OTHER; note = 2'-O-methylcytidine-3'-phosphate
  modified_base 12: mod_base = OTHER; note = 2'-O-methylcytidine-3'-phosphate
  modified_base 13: mod_base = OTHER; note = 2'-O-methyluridine-3'-phosphate
  modified_base 14: mod_base = OTHER; note = 2'-fluorocytidine-3'-phosphate
  modified_base 15: mod_base = OTHER; note = 2'-O-methyladenosine-3'-phosphate
  modified_base 16: mod_base = OTHER; note = 2'-fluorocytidine-3'-phosphate
  modified_base 17: mod_base = OTHER; note = 2'-O-methylcytidine-3'-phosphate
  modified_base 18: mod_base = OTHER; note = 2'-fluoroadenosine-3'-phosphate
  modified_base 19: mod_base = OTHER; note = 2'-O-methyladenosine-3'-phosphate
  modified_base 20: mod_base = OTHER; note = 2'-fluorouridine-3'-phosphate
  modified_base 21: mod_base = OTHER; note = 2'-O-methylguanosine-3'- phosphorothioate
  modified_base 22: mod_base = OTHER; note = 2'-O-methyluridine-3'-phosphorothioate
  modified_base 23: mod_base = OTHER; note = 2'-O-methylcytidine-3'-phosphate
aaggatttttcctcaccaatgtc

SEQ ID NO: 790 - RNA, 23 nt, synthetic construct
  source 1..23: mol_type = other RNA
  modified_base 1: mod_base = OTHER; note = 2'-O-methyluridine-3'-phosphorothioate
  modified_base 2: mod_base = OTHER; note = 2'-fluorocytidine-3'-phosphorothioate
  modified_base 3: mod_base = OTHER; note = 2'-O-methyluridine-3'-phosphate
  modified_base 4: mod_base = OTHER; note = 2'-fluorocytidine-3'-phosphate
  modified_base 5: mod_base = OTHER; note = 2'-O-methyladenosine-3'-phosphate
  modified_base 6: mod_base = OTHER; note = 2'-fluorocytidine-3'-phosphate
  modified_base 7: mod_base = OTHER; note = 2'-O-methylcytidine-3'-phosphate
  modified_base 8: mod_base = OTHER; note = 2'-fluoroadenosine-3'-phosphate
  modified_base 9: mod_base = OTHER; note = 2'-O-methyladenosine-3'-phosphate
  modified_base 10: mod_base = OTHER; note = 2'-fluorouridine-3'-phosphate
  modified_base 11: mod_base = OTHER; note = 2'-O-methylguanosine-3'-phosphate
  modified_base 12: mod_base = OTHER; note = 2'-O-methyluridine-3'-phosphate
  modified_base 13: mod_base = OTHER; note = 2'-O-methylcytidine-3'-phosphate
  modified_base 14: mod_base = OTHER; note = 2'-fluorouridine-3'-phosphate
  modified_base 15: mod_base = OTHER; note = 2'-O-methyluridine-3'-phosphate
  modified_base 16: mod_base = OTHER; note = 2'-fluoroguanosine-3'-phosphate
  modified_base 17: mod_base = OTHER; note = 2'-O-methyluridine-3'-phosphate
  modified_base 18: mod_base = OTHER; note = 2'-fluorocytidine-3'-phosphate
  modified_base 19: mod_base = OTHER; note = 2'-O-methylguanosine-3'-phosphate
  modified_base 20: mod_base = OTHER; note = 2'-fluoroadenosine-3'-phosphate
  modified_base 21: mod_base = OTHER; note = 2'-O-methyluridine-3'-phosphorothioate
  modified_base 22: mod_base = OTHER; note = 2'-O-methylguanosine-3'- phosphorothioate
  modified_base 23: mod_base = OTHER; note = 2'-O-methyladenosine-3'-phosphate
tctcaccaatgtcttgtcgatga

SEQ ID NO: 791 - RNA, 23 nt, synthetic construct
  source 1..23: mol_type = other RNA
  modified_base 1: mod_base = OTHER; note = 2'-O-methyladenosine-3'- phosphorothioate
  modified_base 2: mod_base = OTHER; note = 2'-fluoroguanosine-3'-phosphorothioate
  modified_base 3: mod_base = OTHER; note = 2'-O-methylguanosine-3'-phosphate
  modified_base 4: mod_base = OTHER; note = 2'-fluoroadenosine-3'-phosphate
  modified_base 5: mod_base = OTHER; note = 2'-O-methyluridine-3'-phosphate
  modified_base 6: mod_base = OTHER; note = 2'-fluorouridine-3'-phosphate
  modified_base 7: mod_base = OTHER; note = 2'-O-methyluridine-3'-phosphate
  modified_base 8: mod_base = OTHER; note = 2'-fluorouridine-3'-phosphate
  modified_base 9: mod_base = OTHER; note = 2'-O-methyluridine-3'-phosphate
  modified_base 10: mod_base = OTHER; note = 2'-fluorocytidine-3'-phosphate
  modified_base 11: mod_base = OTHER; note = 2'-O-methylcytidine-3'-phosphate
  modified_base 12: mod_base = OTHER; note = 2'-O-methyluridine-3'-phosphate
  modified_base 13: mod_base = OTHER; note = 2'-O-methylcytidine-3'-phosphate
  modified_base 14: mod_base = OTHER; note = 2'-fluoroadenosine-3'-phosphate
  modified_base 15: mod_base = OTHER; note = 2'-O-methylcytidine-3'-phosphate
  modified_base 16: mod_base = OTHER; note = 2'-fluorocytidine-3'-phosphate
  modified_base 17: mod_base = OTHER; note = 2'-O-methyladenosine-3'-phosphate
  modified_base 18: mod_base = OTHER; note = 2'-fluoroadenosine-3'-phosphate
  modified_base 19: mod_base = OTHER; note = 2'-O-methyluridine-3'-phosphate
  modified_base 20: mod_base = OTHER; note = 2'-fluoroguanosine-3'-phosphate
  modified_base 21: mod_base = OTHER; note = 2'-O-methyluridine-3'-phosphorothioate
  modified_base 22: mod_base = OTHER; note = 2'-O-methylcytidine-3'- phosphorothioate
  modified_base 23: mod_base = OTHER; note = 2'-O-methyluridine-3'-phosphate
aggatttttcctcaccaatgtct

SEQ ID NO: 792 - RNA, 23 nt, synthetic construct
  source 1..23: mol_type = other RNA
  modified_base 1: mod_base = OTHER; note = 2'-O-methyladenosine-3'- phosphorothioate
  modified_base 2: mod_base = OTHER; note = 2'-fluoroadenosine-3'-phosphorothioate
  modified_base 3: mod_base = OTHER; note = 2'-O-methyluridine-3'-phosphate
  modified_base 4: mod_base = OTHER; note = 2'-fluoroguanosine-3'-phosphate
  modified_base 5: mod_base = OTHER; note = 2'-O-methyluridine-3'-phosphate
  modified_base 6: mod_base = OTHER; note = 2'-fluorocytidine-3'-phosphate
  modified_base 7: mod_base = OTHER; note = 2'-O-methyluridine-3'-phosphate
  modified_base 8: mod_base = OTHER; note = 2'-fluorouridine-3'-phosphate
  modified_base 9: mod_base = OTHER; note = 2'-O-methylguanosine-3'-phosphate
  modified_base 10: mod_base = OTHER; note = 2'-fluorouridine-3'-phosphate
  modified_base 11: mod_base = OTHER; note = 2'-O-methylcytidine-3'-phosphate
  modified_base 12: mod_base = OTHER; note = 2'-O-methylguanosine-3'-phosphate
  modified_base 13: mod_base = OTHER; note = 2'-O-methyladenosine-3'-phosphate
  modified_base 14: mod_base = OTHER; note = 2'-fluorouridine-3'-phosphate
  modified_base 15: mod_base = OTHER; note = 2'-O-methylguanosine-3'-phosphate
  modified_base 16: mod_base = OTHER; note = 2'-fluoroadenosine-3'-phosphate
  modified_base 17: mod_base = OTHER; note = 2'-O-methylcytidine-3'-phosphate
  modified_base 18: mod_base = OTHER; note = 2'-fluorouridine-3'-phosphate
  modified_base 19: mod_base = OTHER; note = 2'-O-methyluridine-3'-phosphate
  modified_base 20: mod_base = OTHER; note = 2'-fluorouridine-3'-phosphate
  modified_base 21: mod_base = OTHER; note = 2'-O-methylcytidine-3'- phosphorothioate
  modified_base 22: mod_base = OTHER; note = 2'-O-methyladenosine-3'- phosphorothioate
  modified_base 23: mod_base = OTHER; note = 2'-O-methylcytidine-3'-phosphate
aatgtcttgtcgatgactttcac

SEQ ID NO: 793 - RNA, 23 nt, synthetic construct
  source 1..23: mol_type = other RNA
  modified_base 1: mod_base = OTHER; note = 2'-O-methyluridine-3'-phosphorothioate
  modified_base 2: mod_base = OTHER; note = 2'-fluoroadenosine-3'-phosphorothioate
  modified_base 3: mod_base = OTHER; note = 2'-O-methyladenosine-3'-phosphate
  modified_base 4: mod_base = OTHER; note = 2'-fluorouridine-3'-phosphate
  modified_base 5: mod_base = OTHER; note = 2'-O-methylguanosine-3'-phosphate
  modified_base 6: mod_base = OTHER; note = 2'-fluorouridine-3'-phosphate
  modified_base 7: mod_base = OTHER; note = 2'-O-methylcytidine-3'-phosphate
  modified_base 8: mod_base = OTHER; note = 2'-fluorouridine-3'-phosphate
  modified_base 9: mod_base = OTHER; note = 2'-O-methyluridine-3'-phosphate
  modified_base 10: mod_base = OTHER; note = 2'-fluoroguanosine-3'-phosphate
  modified_base 11: mod_base = OTHER; note = 2'-O-methyluridine-3'-phosphate
  modified_base 12: mod_base = OTHER; note = 2'-O-methylcytidine-3'-phosphate
  modified_base 13: mod_base = OTHER; note = 2'-O-methylguanosine-3'-phosphate
  modified_base 14: mod_base = OTHER; note = 2'-fluoroadenosine-3'-phosphate
  modified_base 15: mod_base = OTHER; note = 2'-O-methyluridine-3'-phosphate
  modified_base 16: mod_base = OTHER; note = 2'-fluoroguanosine-3'-phosphate
  modified_base 17: mod_base = OTHER; note = 2'-O-methyladenosine-3'-phosphate
  modified_base 18: mod_base = OTHER; note = 2'-fluorocytidine-3'-phosphate
  modified_base 19: mod_base = OTHER; note = 2'-O-methyluridine-3'-phosphate
  modified_base 20: mod_base = OTHER; note = 2'-fluorouridine-3'-phosphate
  modified_base 21: mod_base = OTHER; note = 2'-O-methyluridine-3'-phosphorothioate
  modified_base 22: mod_base = OTHER; note = 2'-O-methylcytidine-3'- phosphorothioate
  modified_base 23: mod_base = OTHER; note = 2'-O-methyladenosine-3'-phosphate
taatgtcttgtcgatgactttca

SEQ ID NO: 794 - RNA, 21 nt, synthetic construct
  source 1..21: mol_type = other RNA
atgtatgttacttcttagaga

SEQ ID NO: 795 - RNA, 23 nt, synthetic construct
  source 1..23: mol_type = other RNA
tctctaagaagtaacatacatcc

SEQ ID NO: 796 - RNA, 21 nt, synthetic construct
  source 1..21: mol_type = other RNA
tgtatgttacttcttagagag

SEQ ID NO: 797 - RNA, 23 nt, synthetic construct
  source 1..23: mol_type = other RNA
ctctctaagaagtaacatacatc

SEQ ID NO: 798 - RNA, 21 nt, synthetic construct
  source 1..21: mol_type = other RNA
taggatgtatgttacttctta

SEQ ID NO: 799 - RNA, 23 nt, synthetic construct
  source 1..23: mol_type = other RNA
taagaagtaacatacatcctaaa

SEQ ID NO: 800 - RNA, 21 nt, synthetic construct
  source 1..21: mol_type = other RNA
ttaggatgtatgttacttctt

SEQ ID NO: 801 - RNA, 23 nt, synthetic construct
  source 1..23: mol_type = other RNA
aagaagtaacatacatcctaaaa

SEQ ID NO: 802 - RNA, 21 nt, synthetic construct
  source 1..21: mol_type = other RNA
agaaaggtgttcaagatgtcc

SEQ ID NO: 803 - RNA, 23 nt, synthetic construct
  source 1..23: mol_type = other RNA
ggacatcttgaacacctttctcc

SEQ ID NO: 804 - RNA, 21 nt, synthetic construct
  source 1..21: mol_type = other RNA
gaaaggtgttcaagatgtcct

SEQ ID NO: 805 - RNA, 23 nt, synthetic construct
  source 1..23: mol_type = other RNA
aggacatcttgaacacctttctc

SEQ ID NO: 806 - RNA, 21 nt, synthetic construct
  source 1..21: mol_type = other RNA
ggggagaaaggtgttcaagat

SEQ ID NO: 807 - RNA, 23 nt, synthetic construct
  source 1..23: mol_type = other RNA
atcttgaacacctttctccccct

SEQ ID NO: 808 - RNA, 21 nt, synthetic construct
  source 1..21: mol_type = other RNA
gggggagaaaggtgttcaaga

SEQ ID NO: 809 - RNA, 23 nt, synthetic construct
  source 1..23: mol_type = other RNA
tcttgaacacctttctccccctg

SEQ ID NO: 810 - RNA, 21 nt, synthetic construct
  source 1..21: mol_type = other RNA
agaaactttggctgataatat

SEQ ID NO: 811 - RNA, 23 nt, synthetic construct
  source 1..23: mol_type = other RNA
atattatcagccaaagtttcttc

SEQ ID NO: 812 - RNA, 21 nt, synthetic construct
  source 1..21: mol_type = other RNA
gaaactttggctgataatatt

SEQ ID NO: 813 - RNA, 23 nt, synthetic construct
  source 1..23: mol_type = other RNA
aatattatcagccaaagtttctt

SEQ ID NO: 814 - RNA, 21 nt, synthetic construct
  source 1..21: mol_type = other RNA
atgaagaaactttggctgata

SEQ ID NO: 815 - RNA, 23 nt, synthetic construct
  source 1..23: mol_type = other RNA
tatcagccaaagtttcttcatca

SEQ ID NO: 816 - RNA, 21 nt, synthetic construct
  source 1..21: mol_type = other RNA
gatgaagaaactttggctgat

SEQ ID NO: 817 - RNA, 23 nt, synthetic construct
  source 1..23: mol_type = other RNA
atcagccaaagtttcttcatcat

SEQ ID NO: 818 - RNA, 21 nt, synthetic construct
  source 1..21: mol_type = other RNA
aaggcactgatgttctgaaag

SEQ ID NO: 819 - RNA, 23 nt, synthetic construct
  source 1..23: mol_type = other RNA
ctttcagaacatcagtgcctttc

SEQ ID NO: 820 - RNA, 21 nt, synthetic construct
  source 1..21: mol_type = other RNA
aggcactgatgttctgaaagc

SEQ ID NO: 821 - RNA, 23 nt, synthetic construct
  source 1..23: mol_type = other RNA
gctttcagaacatcagtgccttt

SEQ ID NO: 822 - RNA, 21 nt, synthetic construct
  source 1..21: mol_type = other RNA
cggaaaggcactgatgttctg

SEQ ID NO: 823 - RNA, 23 nt, synthetic construct
  source 1..23: mol_type = other RNA
cagaacatcagtgcctttccgca

SEQ ID NO: 824 - RNA, 21 nt, synthetic construct
  source 1..21: mol_type = other RNA
gcggaaaggcactgatgttct

SEQ ID NO: 825 - RNA, 23 nt, synthetic construct
  source 1..23: mol_type = other RNA
agaacatcagtgcctttccgcac

SEQ ID NO: 826 - RNA, 21 nt, synthetic construct
  source 1..21: mol_type = other RNA
agaagactgacatcattgcca

SEQ ID NO: 827 - RNA, 23 nt, synthetic construct
  source 1..23: mol_type = other RNA
tggcaatgatgtcagtcttctca

SEQ ID NO: 828 - RNA, 21 nt, synthetic construct
  source 1..21: mol_type = other RNA
gaagactgacatcattgccaa

SEQ ID NO: 829 - RNA, 23 nt, synthetic construct
  source 1..23: mol_type = other RNA
ttggcaatgatgtcagtcttctc

SEQ ID NO: 830 - RNA, 21 nt, synthetic construct
  source 1..21: mol_type = other RNA
gctgagaagactgacatcatt

SEQ ID NO: 831 - RNA, 23 nt, synthetic construct
  source 1..23: mol_type = other RNA
aatgatgtcagtcttctcagcca

SEQ ID NO: 832 - RNA, 21 nt, synthetic construct
  source 1..21: mol_type = other RNA
ggctgagaagactgacatcat

SEQ ID NO: 833 - RNA, 23 nt, synthetic construct
  source 1..23: mol_type = other RNA
atgatgtcagtcttctcagccat

SEQ ID NO: 834 - RNA, 21 nt, synthetic construct
  source 1..21: mol_type = other RNA
taatgcctgattcacaacttt

SEQ ID NO: 835 - RNA, 23 nt, synthetic construct
  source 1..23: mol_type = other RNA
aaagttgtgaatcaggcattacc

SEQ ID NO: 836 - RNA, 21 nt, synthetic construct
  source 1..21: mol_type = other RNA
aatgcctgattcacaactttg

SEQ ID NO: 837 - RNA, 23 nt, synthetic construct
  source 1..23: mol_type = other RNA
caaagttgtgaatcaggcattac

SEQ ID NO: 838 - RNA, 21 nt, synthetic construct
  source 1..21: mol_type = other RNA
ttggtaatgcctgattcacaa

SEQ ID NO: 839 - RNA, 23 nt, synthetic construct
  source 1..23: mol_type = other RNA
ttgtgaatcaggcattaccaaca

SEQ ID NO: 840 - RNA, 21 nt, synthetic construct
  source 1..21: mol_type = other RNA
gttggtaatgcctgattcaca

SEQ ID NO: 841 - RNA, 23 nt, synthetic construct
  source 1..23: mol_type = other RNA
tgtgaatcaggcattaccaacac

SEQ ID NO: 842 - RNA, 21 nt, synthetic construct
  source 1..21: mol_type = other RNA
tatcaaatggctgagaagact

SEQ ID NO: 843 - RNA, 23 nt, synthetic construct
  source 1..23: mol_type = other RNA
agtcttctcagccatttgatatc

SEQ ID NO: 844 - RNA, 21 nt, synthetic construct
  source 1..21: mol_type = other RNA
atcaaatggctgagaagactg

SEQ ID NO: 845 - RNA, 23 nt, synthetic construct
  source 1..23: mol_type = other RNA
cagtcttctcagccatttgatat

SEQ ID NO: 846 - RNA, 21 nt, synthetic construct
  source 1..21: mol_type = other RNA
aagatatcaaatggctgagaa

SEQ ID NO: 847 - RNA, 23 nt, synthetic construct
  source 1..23: mol_type = other RNA
ttctcagccatttgatatcttcc

SEQ ID NO: 848 - RNA, 21 nt, synthetic construct
  source 1..21: mol_type = other RNA
gaagatatcaaatggctgaga

SEQ ID NO: 849 - RNA, 23 nt, synthetic construct
  source 1..23: mol_type = other RNA
tctcagccatttgatatcttccc

SEQ ID NO: 850 - RNA, 21 nt, synthetic construct
  source 1..21: mol_type = other RNA
tctgacagtgcacaatatttt

SEQ ID NO: 851 - RNA, 23 nt, synthetic construct
  source 1..23: mol_type = other RNA
aaaatattgtgcactgtcagatc

SEQ ID NO: 852 - RNA, 21 nt, synthetic construct
  source 1..21: mol_type = other RNA
ctgacagtgcacaatattttc

SEQ ID NO: 853 - RNA, 23 nt, synthetic construct
  source 1..23: mol_type = other RNA
gaaaatattgtgcactgtcagat

SEQ ID NO: 854 - RNA, 21 nt, synthetic construct
  source 1..21: mol_type = other RNA
aagatctgacagtgcacaata

SEQ ID NO: 855 - RNA, 23 nt, synthetic construct
  source 1..23: mol_type = other RNA
tattgtgcactgtcagatcttgg

SEQ ID NO: 856 - RNA, 21 nt, synthetic construct
  source 1..21: mol_type = other RNA
caagatctgacagtgcacaat

SEQ ID NO: 857 - RNA, 23 nt, synthetic construct
  source 1..23: mol_type = other RNA
attgtgcactgtcagatcttgga

SEQ ID NO: 858 - RNA, 21 nt, synthetic construct
  source 1..21: mol_type = other RNA
actgatgttctgaaagctctg

SEQ ID NO: 859 - RNA, 23 nt, synthetic construct
  source 1..23: mol_type = other RNA
cagagctttcagaacatcagtgc

SEQ ID NO: 860 - RNA, 21 nt, synthetic construct
  source 1..21: mol_type = other RNA
ctgatgttctgaaagctctgg

SEQ ID NO: 861 - RNA, 23 nt, synthetic construct
  source 1..23: mol_type = other RNA
ccagagctttcagaacatcagtg

SEQ ID NO: 862 - RNA, 21 nt, synthetic construct
  source 1..21: mol_type = other RNA
aggcactgatgttctgaaagc

SEQ ID NO: 863 - RNA, 23 nt, synthetic construct
  source 1..23: mol_type = other RNA
gctttcagaacatcagtgccttt

SEQ ID NO: 864 - RNA, 21 nt, synthetic construct
  source 1..21: mol_type = other RNA
aaggcactgatgttctgaaag

SEQ ID NO: 865 - RNA, 23 nt, synthetic construct
  source 1..23: mol_type = other RNA
ctttcagaacatcagtgcctttc

SEQ ID NO: 866 - RNA, 21 nt, synthetic construct
  source 1..21: mol_type = other RNA
aacaacatgctaaatcagtac

SEQ ID NO: 867 - RNA, 23 nt, synthetic construct
  source 1..23: mol_type = other RNA
gtactgatttagcatgttgttca

SEQ ID NO: 868 - RNA, 21 nt, synthetic construct
  source 1..21: mol_type = other RNA
acaacatgctaaatcagtact

SEQ ID NO: 869 - RNA, 23 nt, synthetic construct
  source 1..23: mol_type = other RNA
agtactgatttagcatgttgttc

SEQ ID NO: 870 - RNA, 21 nt, synthetic construct
  source 1..21: mol_type = other RNA
tatgaacaacatgctaaatca

SEQ ID NO: 871 - RNA, 23 nt, synthetic construct
  source 1..23: mol_type = other RNA
tgatttagcatgttgttcataat

SEQ ID NO: 872 - RNA, 21 nt, synthetic construct
  source 1..21: mol_type = other RNA
ttatgaacaacatgctaaatc

SEQ ID NO: 873 - RNA, 23 nt, synthetic construct
  source 1..23: mol_type = other RNA
gatttagcatgttgttcataatc

SEQ ID NO: 874 - RNA, 21 nt, synthetic construct
  source 1..21: mol_type = other RNA
tctttagtgtctgaatatatc

SEQ ID NO: 875 - RNA, 23 nt, synthetic construct
  source 1..23: mol_type = other RNA
gatatattcagacactaaagatg

SEQ ID NO: 876 - RNA, 21 nt, synthetic construct
  source 1..21: mol_type = other RNA
ctttagtgtctgaatatatcc

SEQ ID NO: 877 - RNA, 23 nt, synthetic construct
  source 1..23: mol_type = other RNA
ggatatattcagacactaaagat

SEQ ID NO: 878 - RNA, 21 nt, synthetic construct
  source 1..21: mol_type = other RNA
cacatctttagtgtctgaata

SEQ ID NO: 879 - RNA, 23 nt, synthetic construct
  source 1..23: mol_type = other RNA
tattcagacactaaagatgtgat

SEQ ID NO: 880 - RNA, 21 nt, synthetic construct
  source 1..21: mol_type = other RNA
tcacatctttagtgtctgaat

SEQ ID NO: 881 - RNA, 23 nt, synthetic construct
  source 1..23: mol_type = other RNA
attcagacactaaagatgtgatt

SEQ ID NO: 882 - RNA, 21 nt, synthetic construct
  source 1..21: mol_type = other RNA
tgatacttctttgaatgtaga

SEQ ID NO: 883 - RNA, 23 nt, synthetic construct
  source 1..23: mol_type = other RNA
tctacattcaaagaagtatcacc

SEQ ID NO: 884 - RNA, 21 nt, synthetic construct
  source 1..21: mol_type = other RNA
gatacttctttgaatgtagat

SEQ ID NO: 885 - RNA, 23 nt, synthetic construct
  source 1..23: mol_type = other RNA
atctacattcaaagaagtatcac

SEQ ID NO: 886 - RNA, 21 nt, synthetic construct
  source 1..21: mol_type = other RNA
ttggtgatacttctttgaatg

SEQ ID NO: 887 - RNA, 23 nt, synthetic construct
  source 1..23: mol_type = other RNA
cattcaaagaagtatcaccaatt

SEQ ID NO: 888 - RNA, 21 nt, synthetic construct
  source 1..21: mol_type = other RNA
attggtgatacttctttgaat

SEQ ID NO: 889 - RNA, 23 nt, synthetic construct
  source 1..23: mol_type = other RNA
attcaaagaagtatcaccaatta

SEQ ID NO: 890 - RNA, 21 nt, synthetic construct
  source 1..21: mol_type = other RNA
aataacctgtgaaaatgctcc

SEQ ID NO: 891 - RNA, 23 nt, synthetic construct
  source 1..23: mol_type = other RNA
ggagcattttcacaggttattgc

SEQ ID NO: 892 - RNA, 21 nt, synthetic construct
  source 1..21: mol_type = other RNA
ataacctgtgaaaatgctccc

SEQ ID NO: 893 - RNA, 23 nt, synthetic construct
  source 1..23: mol_type = other RNA
gggagcattttcacaggttattg

SEQ ID NO: 894 - RNA, 21 nt, synthetic construct
  source 1..21: mol_type = other RNA
tagcaataacctgtgaaaatg

SEQ ID NO: 895 - RNA, 23 nt, synthetic construct
  source 1..23: mol_type = other RNA
cattttcacaggttattgctatc

SEQ ID NO: 896 - RNA, 21 nt, synthetic construct
  source 1..21: mol_type = other RNA
atagcaataacctgtgaaaat

SEQ ID NO: 897 - RNA, 23 nt, synthetic construct
  source 1..23: mol_type = other RNA
attttcacaggttattgctatcc

SEQ ID NO: 898 - RNA, 21 nt, synthetic construct
  source 1..21: mol_type = other RNA
aatcacatctttagtgtctga

SEQ ID NO: 899 - RNA, 23 nt, synthetic construct
  source 1..23: mol_type = other RNA
tcagacactaaagatgtgattgg

SEQ ID NO: 900 - RNA, 21 nt, synthetic construct
  source 1..21: mol_type = other RNA
atcacatctttagtgtctgaa

SEQ ID NO: 901 - RNA, 23 nt, synthetic construct
  source 1..23: mol_type = other RNA
ttcagacactaaagatgtgattg

SEQ ID NO: 902 - RNA, 21 nt, synthetic construct
  source 1..21: mol_type = other RNA
ttccaatcacatctttagtgt

SEQ ID NO: 903 - RNA, 23 nt, synthetic construct
  source 1..23: mol_type = other RNA
acactaaagatgtgattggaaat

SEQ ID NO: 904 - RNA, 21 nt, synthetic construct
  source 1..21: mol_type = other RNA
tttccaatcacatctttagtg

SEQ ID NO: 905 - RNA, 23 nt, synthetic construct
  source 1..23: mol_type = other RNA
cactaaagatgtgattggaaatc

SEQ ID NO: 906 - RNA, 21 nt, synthetic construct
  source 1..21: mol_type = other RNA
acgggcatgatgttgagttcc

SEQ ID NO: 907 - RNA, 23 nt, synthetic construct
  source 1..23: mol_type = other RNA
ggaactcaacatcatgcccgttc

SEQ ID NO: 908 - RNA, 21 nt, synthetic construct
  source 1..21: mol_type = other RNA
cgggcatgatgttgagttcct

SEQ ID NO: 909 - RNA, 23 nt, synthetic construct
  source 1..23: mol_type = other RNA
aggaactcaacatcatgcccgtt

SEQ ID NO: 910 - RNA, 21 nt, synthetic construct
  source 1..21: mol_type = other RNA
gggaacgggcatgatgttgag

SEQ ID NO: 911 - RNA, 23 nt, synthetic construct
  source 1..23: mol_type = other RNA
ctcaacatcatgcccgttcccag

SEQ ID NO: 912 - RNA, 21 nt, synthetic construct
  source 1..21: mol_type = other RNA
tgggaacgggcatgatgttga

SEQ ID NO: 913 - RNA, 23 nt, synthetic construct
  source 1..23: mol_type = other RNA
tcaacatcatgcccgttcccagg

SEQ ID NO: 914 - RNA, 21 nt, synthetic construct
  source 1..21: mol_type = other RNA
actaaggtgaaaagataatga

SEQ ID NO: 915 - RNA, 23 nt, synthetic construct
  source 1..23: mol_type = other RNA
tcattatcttttcaccttagtgt

SEQ ID NO: 916 - RNA, 21 nt, synthetic construct
  source 1..21: mol_type = other RNA
ctaaggtgaaaagataatgat

SEQ ID NO: 917 - RNA, 23 nt, synthetic construct
  source 1..23: mol_type = other RNA
atcattatcttttcaccttagtg

SEQ ID NO: 918 - RNA, 21 nt, synthetic construct
  source 1..21: mol_type = other RNA
aaacactaaggtgaaaagata

SEQ ID NO: 919 - RNA, 23 nt, synthetic construct
  source 1..23: mol_type = other RNA
tatcttttcaccttagtgtttgc

SEQ ID NO: 920 - RNA, 21 nt, synthetic construct
  source 1..21: mol_type = other RNA
caaacactaaggtgaaaagat

SEQ ID NO: 921 - RNA, 23 nt, synthetic construct
  source 1..23: mol_type = other RNA
atcttttcaccttagtgtttgct

SEQ ID NO: 922 - RNA, 21 nt, synthetic construct
  source 1..21: mol_type = other RNA
aggtagcactggagagaattg

SEQ ID NO: 923 - RNA, 23 nt, synthetic construct
  source 1..23: mol_type = other RNA
caattctctccagtgctaccttc

SEQ ID NO: 924 - RNA, 21 nt, synthetic construct
  source 1..21: mol_type = other RNA
ggtagcactggagagaattgg

SEQ ID NO: 925 - RNA, 23 nt, synthetic construct
  source 1..23: mol_type = other RNA
ccaattctctccagtgctacctt

SEQ ID NO: 926 - RNA, 21 nt, synthetic construct
  source 1..21: mol_type = other RNA
gagaaggtagcactggagaga

SEQ ID NO: 927 - RNA, 23 nt, synthetic construct
  source 1..23: mol_type = other RNA
tctctccagtgctaccttctcaa

SEQ ID NO: 928 - RNA, 21 nt, synthetic construct
  source 1..21: mol_type = other RNA
tgagaaggtagcactggagag

SEQ ID NO: 929 - RNA, 23 nt, synthetic construct
  source 1..23: mol_type = other RNA
ctctccagtgctaccttctcaaa

SEQ ID NO: 930 - RNA, 21 nt, synthetic construct
  source 1..21: mol_type = other RNA
agtggacttgctgcatatgtg

SEQ ID NO: 931 - RNA, 23 nt, synthetic construct
  source 1..23: mol_type = other RNA
cacatatgcagcaagtccactgt

SEQ ID NO: 932 - RNA, 21 nt, synthetic construct
  source 1..21: mol_type = other RNA
gtggacttgctgcatatgtgg

SEQ ID NO: 933 - RNA, 23 nt, synthetic construct
  source 1..23: mol_type = other RNA
ccacatatgcagcaagtccactg

SEQ ID NO: 934 - RNA, 21 nt, synthetic construct
  source 1..21: mol_type = other RNA
cgacagtggacttgctgcata

SEQ ID NO: 935 - RNA, 23 nt, synthetic construct
  source 1..23: mol_type = other RNA
tatgcagcaagtccactgtcgtc

SEQ ID NO: 936 - RNA, 21 nt, synthetic construct
  source 1..21: mol_type = other RNA
acgacagtggacttgctgcat

SEQ ID NO: 937 - RNA, 23 nt, synthetic construct
  source 1..23: mol_type = other RNA
atgcagcaagtccactgtcgtct

SEQ ID NO: 938 - RNA, 21 nt, synthetic construct
  source 1..21: mol_type = other RNA
aaggtgttcaagatgtcctcg

SEQ ID NO: 939 - RNA, 23 nt, synthetic construct
  source 1..23: mol_type = other RNA
cgaggacatcttgaacacctttc

SEQ ID NO: 940 - RNA, 21 nt, synthetic construct
  source 1..21: mol_type = other RNA
aggtgttcaagatgtcctcga

SEQ ID NO: 941 - RNA, 23 nt, synthetic construct
  source 1..23: mol_type = other RNA
tcgaggacatcttgaacaccttt

SEQ ID NO: 942 - RNA, 21 nt, synthetic construct
  source 1..21: mol_type = other RNA
gagaaaggtgttcaagatgtc

SEQ ID NO: 943 - RNA, 23 nt, synthetic construct
  source 1..23: mol_type = other RNA
gacatcttgaacacctttctccc

SEQ ID NO: 944 - RNA, 21 nt, synthetic construct
  source 1..21: mol_type = other RNA
ggagaaaggtgttcaagatgt

SEQ ID NO: 945 - RNA, 23 nt, synthetic construct
  source 1..23: mol_type = other RNA
acatcttgaacacctttctcccc

SEQ ID NO: 946 - RNA, 21 nt, synthetic construct
  source 1..21: mol_type = other RNA
aaccgtctggatgatgtgcgt

SEQ ID NO: 947 - RNA, 23 nt, synthetic construct
  source 1..23: mol_type = other RNA
acgcacatcatccagacggttgc

SEQ ID NO: 948 - RNA, 21 nt, synthetic construct
  source 1..21: mol_type = other RNA
accgtctggatgatgtgcgta

SEQ ID NO: 949 - RNA, 23 nt, synthetic construct
  source 1..23: mol_type = other RNA
tacgcacatcatccagacggttg

SEQ ID NO: 950 - RNA, 21 nt, synthetic construct
  source 1..21: mol_type = other RNA
gggcaaccgtctggatgatgt

SEQ ID NO: 951 - RNA, 23 nt, synthetic construct
  source 1..23: mol_type = other RNA
acatcatccagacggttgcccag

SEQ ID NO: 952 - RNA, 21 nt, synthetic construct
  source 1..21: mol_type = other RNA
tgggcaaccgtctggatgatg

SEQ ID NO: 953 - RNA, 23 nt, synthetic construct
  source 1..23: mol_type = other RNA
catcatccagacggttgcccagg

SEQ ID NO: 954 - RNA, 21 nt, synthetic construct
  source 1..21: mol_type = other RNA
gaaactttggctgataatatt

SEQ ID NO: 955 - RNA, 23 nt, synthetic construct
  source 1..23: mol_type = other RNA
aatattatcagccaaagtttctt

SEQ ID NO: 956 - RNA, 21 nt, synthetic construct
  source 1..21: mol_type = other RNA
aaactttggctgataatattg

SEQ ID NO: 957 - RNA, 23 nt, synthetic construct
  source 1..23: mol_type = other RNA
caatattatcagccaaagtttct

SEQ ID NO: 958 - RNA, 21 nt, synthetic construct
  source 1..21: mol_type = other RNA
tgaagaaactttggctgataa

SEQ ID NO: 959 - RNA, 23 nt, synthetic construct
  source 1..23: mol_type = other RNA
ttatcagccaaagtttcttcatc

SEQ ID NO: 960 - RNA, 21 nt, synthetic construct
  source 1..21: mol_type = other RNA
atgaagaaactttggctgata

SEQ ID NO: 961 - RNA, 23 nt, synthetic construct
  source 1..23: mol_type = other RNA
tatcagccaaagtttcttcatca

SEQ ID NO: 962 - RNA, 21 nt, synthetic construct
  source 1..21: mol_type = other RNA
aaaggtgttcaagatgtcctc

SEQ ID NO: 963 - RNA, 23 nt, synthetic construct
  source 1..23: mol_type = other RNA
gaggacatcttgaacacctttct

SEQ ID NO: 964 - RNA, 21 nt, synthetic construct
  source 1..21: mol_type = other RNA
aaggtgttcaagatgtcctcg

SEQ ID NO: 965 - RNA, 23 nt, synthetic construct
  source 1..23: mol_type = other RNA
cgaggacatcttgaacacctttc

SEQ ID NO: 966 - RNA, 21 nt, synthetic construct
  source 1..21: mol_type = other RNA
ggagaaaggtgttcaagatgt

SEQ ID NO: 967 - RNA, 23 nt, synthetic construct
  source 1..23: mol_type = other RNA
acatcttgaacacctttctcccc

SEQ ID NO: 968 - RNA, 21 nt, synthetic construct
  source 1..21: mol_type = other RNA
gggagaaaggtgttcaagatg

SEQ ID NO: 969 - RNA, 23 nt, synthetic construct
  source 1..23: mol_type = other RNA
catcttgaacacctttctccccc

SEQ ID NO: 970 - RNA, 21 nt, synthetic construct
  source 1..21: mol_type = other RNA
aaatcagtacttccaaagtct

SEQ ID NO: 971 - RNA, 23 nt, synthetic construct
  source 1..23: mol_type = other RNA
agactttggaagtactgatttag

SEQ ID NO: 972 - RNA, 21 nt, synthetic construct
  source 1..21: mol_type = other RNA
aatcagtacttccaaagtcta

SEQ ID NO: 973 - RNA, 23 nt, synthetic construct
  source 1..23: mol_type = other RNA
tagactttggaagtactgattta

SEQ ID NO: 974 - RNA, 21 nt, synthetic construct
  source 1..21: mol_type = other RNA
tgctaaatcagtacttccaaa

SEQ ID NO: 975 - RNA, 23 nt, synthetic construct
  source 1..23: mol_type = other RNA
tttggaagtactgatttagcatg

SEQ ID NO: 976 - RNA, 21 nt, synthetic construct
  source 1..21: mol_type = other RNA
atgctaaatcagtacttccaa

SEQ ID NO: 977 - RNA, 23 nt, synthetic construct
  source 1..23: mol_type = other RNA
ttggaagtactgatttagcatgt

SEQ ID NO: 978 - RNA, 21 nt, synthetic construct
  source 1..21: mol_type = other RNA
acatctttagtgtctgaatat

SEQ ID NO: 979 - RNA, 23 nt, synthetic construct
  source 1..23: mol_type = other RNA
atattcagacactaaagatgtga

SEQ ID NO: 980 - RNA, 21 nt, synthetic construct
  source 1..21: mol_type = other RNA
catctttagtgtctgaatata

SEQ ID NO: 981 - RNA, 23 nt, synthetic construct
  source 1..23: mol_type = other RNA
tatattcagacactaaagatgtg

SEQ ID NO: 982 - RNA, 21 nt, synthetic construct
  source 1..21: mol_type = other RNA
aatcacatctttagtgtctga

SEQ ID NO: 983 - RNA, 23 nt, synthetic construct
  source 1..23: mol_type = other RNA
tcagacactaaagatgtgattgg

SEQ ID NO: 984 - RNA, 21 nt, synthetic construct
  source 1..21: mol_type = other RNA
caatcacatctttagtgtctg

SEQ ID NO: 985 - RNA, 23 nt, synthetic construct
  source 1..23: mol_type = other RNA
cagacactaaagatgtgattgga

SEQ ID NO: 986 - RNA, 21 nt, synthetic construct
  source 1..21: mol_type = other RNA
gcatgtattacttgacaaaga

SEQ ID NO: 987 - RNA, 23 nt, synthetic construct
  source 1..23: mol_type = other RNA
tctttgtcaagtaatacatgctg

SEQ ID NO: 988 - RNA, 21 nt, synthetic construct
  source 1..21: mol_type = other RNA
catgtattacttgacaaagag

SEQ ID NO: 989 - RNA, 23 nt, synthetic construct
  source 1..23: mol_type = other RNA
ctctttgtcaagtaatacatgct

SEQ ID NO: 990 - RNA, 21 nt, synthetic construct
  source 1..21: mol_type = other RNA
ttcagcatgtattacttgaca

SEQ ID NO: 991 - RNA, 23 nt, synthetic construct
  source 1..23: mol_type = other RNA
tgtcaagtaatacatgctgaaaa

SEQ ID NO: 992 - RNA, 21 nt, synthetic construct
  source 1..21: mol_type = other RNA
tttcagcatgtattacttgac

SEQ ID NO: 993 - RNA, 23 nt, synthetic construct
  source 1..23: mol_type = other RNA
gtcaagtaatacatgctgaaaaa

SEQ ID NO: 994 - RNA, 21 nt, synthetic construct
  source 1..21: mol_type = other RNA
atgttacttcttagagagaaa

SEQ ID NO: 995 - RNA, 23 nt, synthetic construct
  source 1..23: mol_type = other RNA
tttctctctaagaagtaacatac

SEQ ID NO: 996 - RNA, 21 nt, synthetic construct
  source 1..21: mol_type = other RNA
tgttacttcttagagagaaat

SEQ ID NO: 997 - RNA, 23 nt, synthetic construct
  source 1..23: mol_type = other RNA
atttctctctaagaagtaacata

SEQ ID NO: 998 - RNA, 21 nt, synthetic construct
  source 1..21: mol_type = other RNA
atgtatgttacttcttagaga

SEQ ID NO: 999 - RNA, 23 nt, synthetic construct
  source 1..23: mol_type = other RNA
tctctaagaagtaacatacatcc

SEQ ID NO: 1000 - RNA, 21 nt, synthetic construct
  source 1..21: mol_type = other RNA
gatgtatgttacttcttagag

SEQ ID NO: 1001 - RNA, 23 nt, synthetic construct
  source 1..23: mol_type = other RNA
ctctaagaagtaacatacatcct

SEQ ID NO: 1002 - RNA, 21 nt, synthetic construct
  source 1..21: mol_type = other RNA
acaactttgagaaggtagcac

SEQ ID NO: 1003 - RNA, 23 nt, synthetic construct
  source 1..23: mol_type = other RNA
gtgctaccttctcaaagttgtga

SEQ ID NO: 1004 - RNA, 21 nt, synthetic construct
  source 1..21: mol_type = other RNA
caactttgagaaggtagcact

SEQ ID NO: 1005 - RNA, 23 nt, synthetic construct
  source 1..23: mol_type = other RNA
agtgctaccttctcaaagttgtg

SEQ ID NO: 1006 - RNA, 21 nt, synthetic construct
  source 1..21: mol_type = other RNA
attcacaactttgagaaggta

SEQ ID NO: 1007 - RNA, 23 nt, synthetic construct
  source 1..23: mol_type = other RNA
taccttctcaaagttgtgaatca

SEQ ID NO: 1008 - RNA, 21 nt, synthetic construct
  source 1..21: mol_type = other RNA
gattcacaactttgagaaggt

SEQ ID NO: 1009 - RNA, 23 nt, synthetic construct
  source 1..23: mol_type = other RNA
accttctcaaagttgtgaatcag

SEQ ID NO: 1010 - RNA, 21 nt, synthetic construct
  source 1..21: mol_type = other RNA
aacatgctaaatcagtacttc

SEQ ID NO: 1011 - RNA, 23 nt, synthetic construct
  source 1..23: mol_type = other RNA
gaagtactgatttagcatgttgt

SEQ ID NO: 1012 - RNA, 21 nt, synthetic construct
  source 1..21: mol_type = other RNA
acatgctaaatcagtacttcc

SEQ ID NO: 1013 - RNA, 23 nt, synthetic construct
  source 1..23: mol_type = other RNA
ggaagtactgatttagcatgttg

SEQ ID NO: 1014 - RNA, 21 nt, synthetic construct
  source 1..21: mol_type = other RNA
gaacaacatgctaaatcagta

SEQ ID NO: 1015 - RNA, 23 nt, synthetic construct
  source 1..23: mol_type = other RNA
tactgatttagcatgttgttcat

SEQ ID NO: 1016 - RNA, 21 nt, synthetic construct
  source 1..21: mol_type = other RNA
tgaacaacatgctaaatcagt

SEQ ID NO: 1017 - RNA, 23 nt, synthetic construct
  source 1..23: mol_type = other RNA
actgatttagcatgttgttcata

SEQ ID NO: 1018 - RNA, 21 nt, synthetic construct
  source 1..21: mol_type = other RNA
aaaccagtactttatcatttt

SEQ ID NO: 1019 - RNA, 23 nt, synthetic construct
  source 1..23: mol_type = other RNA
aaaatgataaagtactggtttca

SEQ ID NO: 1020 - RNA, 21 nt, synthetic construct
  source 1..21: mol_type = other RNA
aaccagtactttatcattttc

SEQ ID NO: 1021 - RNA, 23 nt, synthetic construct
  source 1..23: mol_type = other RNA
gaaaatgataaagtactggtttc

SEQ ID NO: 1022 - RNA, 21 nt, synthetic construct
  source 1..21: mol_type = other RNA
tttgaaaccagtactttatca

SEQ ID NO: 1023 - RNA, 23 nt, synthetic construct
  source 1..23: mol_type = other RNA
tgataaagtactggtttcaaaat

SEQ ID NO: 1024 - RNA, 21 nt, synthetic construct
  source 1..21: mol_type = other RNA
ttttgaaaccagtactttatc

SEQ ID NO: 1025 - RNA, 23 nt, synthetic construct
  source 1..23: mol_type = other RNA
gataaagtactggtttcaaaatt

SEQ ID NO: 1026 - RNA, 21 nt, synthetic construct
  source 1..21: mol_type = other RNA
gagaagatgggctacaaggcc

SEQ ID NO: 1027 - RNA, 23 nt, synthetic construct
  source 1..23: mol_type = other RNA
ggccttgtagcccatcttctctg

SEQ ID NO: 1028 - RNA, 21 nt, synthetic construct
  source 1..21: mol_type = other RNA
agaagatgggctacaaggcca

SEQ ID NO: 1029 - RNA, 23 nt, synthetic construct
  source 1..23: mol_type = other RNA
tggccttgtagcccatcttctct

SEQ ID NO: 1030 - RNA, 21 nt, synthetic construct
  source 1..21: mol_type = other RNA
ggcagagaagatgggctacaa

SEQ ID NO: 1031 - RNA, 23 nt, synthetic construct
  source 1..23: mol_type = other RNA
ttgtagcccatcttctctgcctg

SEQ ID NO: 1032 - RNA, 21 nt, synthetic construct
  source 1..21: mol_type = other RNA
aggcagagaagatgggctaca

SEQ ID NO: 1033 - RNA, 23 nt, synthetic construct
  source 1..23: mol_type = other RNA
tgtagcccatcttctctgcctgc

SEQ ID NO: 1034 - RNA, 21 nt, synthetic construct
  source 1..21: mol_type = other RNA
aacgggcatgatgttgagttc

SEQ ID NO: 1035 - RNA, 23 nt, synthetic construct
  source 1..23: mol_type = other RNA
gaactcaacatcatgcccgttcc

SEQ ID NO: 1036 - RNA, 21 nt, synthetic construct
  source 1..21: mol_type = other RNA
acgggcatgatgttgagttcc

SEQ ID NO: 1037 - RNA, 23 nt, synthetic construct
  source 1..23: mol_type = other RNA
ggaactcaacatcatgcccgttc

SEQ ID NO: 1038 - RNA, 21 nt, synthetic construct
  source 1..21: mol_type = other RNA
tgggaacgggcatgatgttga

SEQ ID NO: 1039 - RNA, 23 nt, synthetic construct
  source 1..23: mol_type = other RNA
tcaacatcatgcccgttcccagg

SEQ ID NO: 1040 - RNA, 21 nt, synthetic construct
  source 1..21: mol_type = other RNA
ctgggaacgggcatgatgttg

SEQ ID NO: 1041 - RNA, 23 nt, synthetic construct
  source 1..23: mol_type = other RNA
caacatcatgcccgttcccaggg

SEQ ID NO: 1042 - RNA, 21 nt, synthetic construct
  source 1..21: mol_type = other RNA
atgtggctaaagcaatagacc

SEQ ID NO: 1043 - RNA, 23 nt, synthetic construct
  source 1..23: mol_type = other RNA
ggtctattgctttagccacatat

SEQ ID NO: 1044 - RNA, 21 nt, synthetic construct
  source 1..21: mol_type = other RNA
tgtggctaaagcaatagaccc

SEQ ID NO: 1045 - RNA, 23 nt, synthetic construct
  source 1..23: mol_type = other RNA
gggtctattgctttagccacata

SEQ ID NO: 1046 - RNA, 21 nt, synthetic construct
  source 1..21: mol_type = other RNA
gcatatgtggctaaagcaata

SEQ ID NO: 1047 - RNA, 23 nt, synthetic construct
  source 1..23: mol_type = other RNA
tattgctttagccacatatgcag

SEQ ID NO: 1048 - RNA, 21 nt, synthetic construct
  source 1..21: mol_type = other RNA
tgcatatgtggctaaagcaat

SEQ ID NO: 1049 - RNA, 23 nt, synthetic construct
  source 1..23: mol_type = other RNA
attgctttagccacatatgcagc

SEQ ID NO: 1050 - RNA, 21 nt, synthetic construct
  source 1..21: mol_type = other RNA
aggatgctccggaatgttgct

SEQ ID NO: 1051 - RNA, 23 nt, synthetic construct
  source 1..23: mol_type = other RNA
agcaacattccggagcatccttg

SEQ ID NO: 1052 - RNA, 21 nt, synthetic construct
  source 1..21: mol_type = other RNA
ggatgctccggaatgttgctg

SEQ ID NO: 1053 - RNA, 23 nt, synthetic construct
  source 1..23: mol_type = other RNA
cagcaacattccggagcatcctt

SEQ ID NO: 1054 - RNA, 21 nt, synthetic construct
  source 1..21: mol_type = other RNA
tccaaggatgctccggaatgt

SEQ ID NO: 1055 - RNA, 23 nt, synthetic construct
  source 1..23: mol_type = other RNA
acattccggagcatccttggata

SEQ ID NO: 1056 - RNA, 21 nt, synthetic construct
  source 1..21: mol_type = other RNA
atccaaggatgctccggaatg

SEQ ID NO: 1057 - RNA, 23 nt, synthetic construct
  source 1..23: mol_type = other RNA
cattccggagcatccttggatac

SEQ ID NO: 1058 - RNA, 21 nt, synthetic construct
  source 1..21: mol_type = other RNA
tcacatctttagtgtctgaat

SEQ ID NO: 1059 - RNA, 23 nt, synthetic construct
  source 1..23: mol_type = other RNA
attcagacactaaagatgtgatt

SEQ ID NO: 1060 - RNA, 21 nt, synthetic construct
  source 1..21: mol_type = other RNA
cacatctttagtgtctgaata

SEQ ID NO: 1061 - RNA, 23 nt, synthetic construct
  source 1..23: mol_type = other RNA
tattcagacactaaagatgtgat

SEQ ID NO: 1062 - RNA, 21 nt, synthetic construct
  source 1..21: mol_type = other RNA
ccaatcacatctttagtgtct

SEQ ID NO: 1063 - RNA, 23 nt, synthetic construct
  source 1..23: mol_type = other RNA
agacactaaagatgtgattggaa

SEQ ID NO: 1064 - RNA, 21 nt, synthetic construct
  source 1..21: mol_type = other RNA
tccaatcacatctttagtgtc

SEQ ID NO: 1065 - RNA, 23 nt, synthetic construct
  source 1..23: mol_type = other RNA
gacactaaagatgtgattggaaa

SEQ ID NO: 1066 - RNA, 21 nt, synthetic construct
  source 1..21: mol_type = other RNA
aaatgtgtttagacaacgtca

SEQ ID NO: 1067 - RNA, 23 nt, synthetic construct
  source 1..23: mol_type = other RNA
tgacgttgtctaaacacattttc

SEQ ID NO: 1068 - RNA, 21 nt, synthetic construct
  source 1..21: mol_type = other RNA
aatgtgtttagacaacgtcat

SEQ ID NO: 1069 - RNA, 23 nt, synthetic construct
  source 1..23: mol_type = other RNA
atgacgttgtctaaacacatttt

SEQ ID NO: 1070 - RNA, 21 nt, synthetic construct
  source 1..21: mol_type = other RNA
ttgaaaatgtgtttagacaac

SEQ ID NO: 1071 - RNA, 23 nt, synthetic construct
  source 1..23: mol_type = other RNA
gttgtctaaacacattttcaatg

SEQ ID NO: 1072 - RNA, 21 nt, synthetic construct
  source 1..21: mol_type = other RNA
attgaaaatgtgtttagacaa

SEQ ID NO: 1073 - RNA, 23 nt, synthetic construct
  source 1..23: mol_type = other RNA
ttgtctaaacacattttcaatgt

SEQ ID NO: 1074 - RNA, 21 nt, synthetic construct
  source 1..21: mol_type = other RNA
tactaaaggaagaattccggt

SEQ ID NO: 1075 - RNA, 23 nt, synthetic construct
  source 1..23: mol_type = other RNA
accggaattcttcctttagtatc

SEQ ID NO: 1076 - RNA, 21 nt, synthetic construct
  source 1..21: mol_type = other RNA
actaaaggaagaattccggtt

SEQ ID NO: 1077 - RNA, 23 nt, synthetic construct
  source 1..23: mol_type = other RNA
aaccggaattcttcctttagtat

SEQ ID NO: 1078 - RNA, 21 nt, synthetic construct
  source 1..21: mol_type = other RNA
gagatactaaaggaagaattc

SEQ ID NO: 1079 - RNA, 23 nt, synthetic construct
  source 1..23: mol_type = other RNA
gaattcttcctttagtatctcga

SEQ ID NO: 1080 - RNA, 21 nt, synthetic construct
  source 1..21: mol_type = other RNA
cgagatactaaaggaagaatt

SEQ ID NO: 1081 - RNA, 23 nt, synthetic construct
  source 1..23: mol_type = other RNA
aattcttcctttagtatctcgag

SEQ ID NO: 1082 - RNA, 21 nt, synthetic construct
  source 1..21: mol_type = other RNA
aactttggctgataatattgc

SEQ ID NO: 1083 - RNA, 23 nt, synthetic construct
  source 1..23: mol_type = other RNA
gcaatattatcagccaaagtttc

SEQ ID NO: 1084 - RNA, 21 nt, synthetic construct
  source 1..21: mol_type = other RNA
actttggctgataatattgca

SEQ ID NO: 1085 - RNA, 23 nt, synthetic construct
  source 1..23: mol_type = other RNA
tgcaatattatcagccaaagttt

SEQ ID NO: 1086 - RNA, 21 nt, synthetic construct
  source 1..21: mol_type = other RNA
aagaaactttggctgataata

SEQ ID NO: 1087 - RNA, 23 nt, synthetic construct
  source 1..23: mol_type = other RNA
tattatcagccaaagtttcttca

SEQ ID NO: 1088 - RNA, 21 nt, synthetic construct
  source 1..21: mol_type = other RNA
gaagaaactttggctgataat

SEQ ID NO: 1089 - RNA, 23 nt, synthetic construct
  source 1..23: mol_type = other RNA
attatcagccaaagtttcttcat

SEQ ID NO: 1090 - RNA, 21 nt, synthetic construct
  source 1..21: mol_type = other RNA
aaatggctgagaagactgaca

SEQ ID NO: 1091 - RNA, 23 nt, synthetic construct
  source 1..23: mol_type = other RNA
tgtcagtcttctcagccatttga

SEQ ID NO: 1092 - RNA, 21 nt, synthetic construct
  source 1..21: mol_type = other RNA
aatggctgagaagactgacat

SEQ ID NO: 1093 - RNA, 23 nt, synthetic construct
  source 1..23: mol_type = other RNA
atgtcagtcttctcagccatttg

SEQ ID NO: 1094 - RNA, 21 nt, synthetic construct
  source 1..21: mol_type = other RNA
tatcaaatggctgagaagact

SEQ ID NO: 1095 - RNA, 23 nt, synthetic construct
  source 1..23: mol_type = other RNA
agtcttctcagccatttgatatc

SEQ ID NO: 1096 - RNA, 21 nt, synthetic construct
  source 1..21: mol_type = other RNA
atatcaaatggctgagaagac

SEQ ID NO: 1097 - RNA, 23 nt, synthetic construct
  source 1..23: mol_type = other RNA
gtcttctcagccatttgatatct

SEQ ID NO: 1098 - RNA, 21 nt, synthetic construct
  source 1..21: mol_type = other RNA
gtggttcttaaattgtaagct

SEQ ID NO: 1099 - RNA, 23 nt, synthetic construct
  source 1..23: mol_type = other RNA
agcttacaatttaagaaccactg

SEQ ID NO: 1100 - RNA, 21 nt, synthetic construct
  source 1..21: mol_type = other RNA
tggttcttaaattgtaagctc

SEQ ID NO: 1101 - RNA, 23 nt, synthetic construct
  source 1..23: mol_type = other RNA
gagcttacaatttaagaaccact

SEQ ID NO: 1102 - RNA, 21 nt, synthetic construct
  source 1..21: mol_type = other RNA
aacagtggttcttaaattgta

SEQ ID NO: 1103 - RNA, 23 nt, synthetic construct
  source 1..23: mol_type = other RNA
tacaatttaagaaccactgtttt

SEQ ID NO: 1104 - RNA, 21 nt, synthetic construct
  source 1..21: mol_type = other RNA
aaacagtggttcttaaattgt

SEQ ID NO: 1105 - RNA, 23 nt, synthetic construct
  source 1..23: mol_type = other RNA
acaatttaagaaccactgtttta

SEQ ID NO: 1106 - RNA, 21 nt, synthetic construct
  source 1..21: mol_type = other RNA
aagtcatcgacaagacattgg

SEQ ID NO: 1107 - RNA, 23 nt, synthetic construct
  source 1..23: mol_type = other RNA
ccaatgtcttgtcgatgactttc

SEQ ID NO: 1108 - RNA, 21 nt, synthetic construct
  source 1..21: mol_type = other RNA
agtcatcgacaagacattggt

SEQ ID NO: 1109 - RNA, 23 nt, synthetic construct
  source 1..23: mol_type = other RNA
accaatgtcttgtcgatgacttt

SEQ ID NO: 1110 - RNA, 21 nt, synthetic construct
  source 1..21: mol_type = other RNA
gtgaaagtcatcgacaagaca

SEQ ID NO: 1111 - RNA, 23 nt, synthetic construct
  source 1..23: mol_type = other RNA
tgtcttgtcgatgactttcacat

SEQ ID NO: 1112 - RNA, 21 nt, synthetic construct
  source 1..21: mol_type = other RNA
tgtgaaagtcatcgacaagac

SEQ ID NO: 1113 - RNA, 23 nt, synthetic construct
  source 1..23: mol_type = other RNA
gtcttgtcgatgactttcacatt

SEQ ID NO: 1114 - RNA, 21 nt, synthetic construct
  source 1..21: mol_type = other RNA
gataatattgcagcattttcc

SEQ ID NO: 1115 - RNA, 23 nt, synthetic construct
  source 1..23: mol_type = other RNA
ggaaaatgctgcaatattatcag

SEQ ID NO: 1116 - RNA, 21 nt, synthetic construct
  source 1..21: mol_type = other RNA
ataatattgcagcattttcca

SEQ ID NO: 1117 - RNA, 23 nt, synthetic construct
  source 1..23: mol_type = other RNA
tggaaaatgctgcaatattatca

SEQ ID NO: 1118 - RNA, 21 nt, synthetic construct
  source 1..21: mol_type = other RNA
ggctgataatattgcagcatt

SEQ ID NO: 1119 - RNA, 23 nt, synthetic construct
  source 1..23: mol_type = other RNA
aatgctgcaatattatcagccaa

SEQ ID NO: 1120 - RNA, 21 nt, synthetic construct
  source 1..21: mol_type = other RNA
tggctgataatattgcagcat

SEQ ID NO: 1121 - RNA, 23 nt, synthetic construct
  source 1..23: mol_type = other RNA
atgctgcaatattatcagccaaa

SEQ ID NO: 1122 - RNA, 21 nt, synthetic construct
  source 1..21: mol_type = other RNA
gctaatttgtatcaatgatta

SEQ ID NO: 1123 - RNA, 23 nt, synthetic construct
  source 1..23: mol_type = other RNA
taatcattgatacaaattagccg

SEQ ID NO: 1124 - RNA, 21 nt, synthetic construct
  source 1..21: mol_type = other RNA
ctaatttgtatcaatgattat

SEQ ID NO: 1125 - RNA, 23 nt, synthetic construct
  source 1..23: mol_type = other RNA
ataatcattgatacaaattagcc

SEQ ID NO: 1126 - RNA, 21 nt, synthetic construct
  source 1..21: mol_type = other RNA
cccggctaatttgtatcaatg

SEQ ID NO: 1127 - RNA, 23 nt, synthetic construct
  source 1..23: mol_type = other RNA
cattgatacaaattagccggggg

SEQ ID NO: 1128 - RNA, 21 nt, synthetic construct
  source 1..21: mol_type = other RNA
ccccggctaatttgtatcaat

SEQ ID NO: 1129 - RNA, 23 nt, synthetic construct
  source 1..23: mol_type = other RNA
attgatacaaattagccggggga

SEQ ID NO: 1130 - RNA, 21 nt, synthetic construct
  source 1..21: mol_type = other RNA
taattggtgatacttctttga

SEQ ID NO: 1131 - RNA, 23 nt, synthetic construct
  source 1..23: mol_type = other RNA
tcaaagaagtatcaccaattacc

SEQ ID NO: 1132 - RNA, 21 nt, synthetic construct
  source 1..21: mol_type = other RNA
aattggtgatacttctttgaa

SEQ ID NO: 1133 - RNA, 23 nt, synthetic construct
  source 1..23: mol_type = other RNA
ttcaaagaagtatcaccaattac

SEQ ID NO: 1134 - RNA, 21 nt, synthetic construct
  source 1..21: mol_type = other RNA
gcggtaattggtgatacttct

SEQ ID NO: 1135 - RNA, 23 nt, synthetic construct
  source 1..23: mol_type = other RNA
agaagtatcaccaattaccgcca

SEQ ID NO: 1136 - RNA, 21 nt, synthetic construct
  source 1..21: mol_type = other RNA
ggcggtaattggtgatacttc

SEQ ID NO: 1137 - RNA, 23 nt, synthetic construct
  source 1..23: mol_type = other RNA
gaagtatcaccaattaccgccac

SEQ ID NO: 1138 - RNA, 21 nt, synthetic construct
  source 1..21: mol_type = other RNA
cagtggttcttaaattgtaag

SEQ ID NO: 1139 - RNA, 23 nt, synthetic construct
  source 1..23: mol_type = other RNA
cttacaatttaagaaccactgtt

SEQ ID NO: 1140 - RNA, 21 nt, synthetic construct
  source 1..21: mol_type = other RNA
agtggttcttaaattgtaagc

SEQ ID NO: 1141 - RNA, 23 nt, synthetic construct
  source 1..23: mol_type = other RNA
gcttacaatttaagaaccactgt

SEQ ID NO: 1142 - RNA, 21 nt, synthetic construct
  source 1..21: mol_type = other RNA
aaaacagtggttcttaaattg

SEQ ID NO: 1143 - RNA, 23 nt, synthetic construct
  source 1..23: mol_type = other RNA
caatttaagaaccactgttttaa

SEQ ID NO: 1144 - RNA, 21 nt, synthetic construct
  source 1..21: mol_type = other RNA
taaaacagtggttcttaaatt

SEQ ID NO: 1145 - RNA, 23 nt, synthetic construct
  source 1..23: mol_type = other RNA
aatttaagaaccactgttttaaa

SEQ ID NO: 1146 - RNA, 21 nt, synthetic construct
  source 1..21: mol_type = other RNA
acctgtattctgtttacatgt

SEQ ID NO: 1147 - RNA, 23 nt, synthetic construct
  source 1..23: mol_type = other RNA
acatgtaaacagaatacaggtta

SEQ ID NO: 1148 - RNA, 21 nt, synthetic construct
  source 1..21: mol_type = other RNA
cctgtattctgtttacatgtc

SEQ ID NO: 1149 - RNA, 23 nt, synthetic construct
  source 1..23: mol_type = other RNA
gacatgtaaacagaatacaggtt

SEQ ID NO: 1150 - RNA, 21 nt, synthetic construct
  source 1..21: mol_type = other RNA
attaacctgtattctgtttac

SEQ ID NO: 1151 - RNA, 23 nt, synthetic construct
  source 1..23: mol_type = other RNA
gtaaacagaatacaggttaataa

SEQ ID NO: 1152 - RNA, 21 nt, synthetic construct
  source 1..21: mol_type = other RNA
tattaacctgtattctgttta

SEQ ID NO: 1153 - RNA, 23 nt, synthetic construct
  source 1..23: mol_type = other RNA
taaacagaatacaggttaataaa

SEQ ID NO: 1154 - RNA, 21 nt, synthetic construct
  source 1..21: mol_type = other RNA
aagaaactttggctgataata

SEQ ID NO: 1155 - RNA, 23 nt, synthetic construct
  source 1..23: mol_type = other RNA
tattatcagccaaagtttcttca

SEQ ID NO: 1156 - RNA, 21 nt, synthetic construct
  source 1..21: mol_type = other RNA
agaaactttggctgataatat

SEQ ID NO: 1157 - RNA, 23 nt, synthetic construct
  source 1..23: mol_type = other RNA
atattatcagccaaagtttcttc

SEQ ID NO: 1158 - RNA, 21 nt, synthetic construct
  source 1..21: mol_type = other RNA
gatgaagaaactttggctgat

SEQ ID NO: 1159 - RNA, 23 nt, synthetic construct
  source 1..23: mol_type = other RNA
atcagccaaagtttcttcatcat

SEQ ID NO: 1160 - RNA, 21 nt, synthetic construct
  source 1..21: mol_type = other RNA
tgatgaagaaactttggctga

SEQ ID NO: 1161 - RNA, 23 nt, synthetic construct
  source 1..23: mol_type = other RNA
tcagccaaagtttcttcatcatt

SEQ ID NO: 1162 - RNA, 21 nt, synthetic construct
  source 1..21: mol_type = other RNA
gaaaggtgttcaagatgtcct

SEQ ID NO: 1163 - RNA, 23 nt, synthetic construct
  source 1..23: mol_type = other RNA
aggacatcttgaacacctttctc

SEQ ID NO: 1164 - RNA, 21 nt, synthetic construct
  source 1..21: mol_type = other RNA
aaaggtgttcaagatgtcctc

SEQ ID NO: 1165 - RNA, 23 nt, synthetic construct
  source 1..23: mol_type = other RNA
gaggacatcttgaacacctttct

SEQ ID NO: 1166 - RNA, 21 nt, synthetic construct
  source 1..21: mol_type = other RNA
gggagaaaggtgttcaagatg

SEQ ID NO: 1167 - RNA, 23 nt, synthetic construct
  source 1..23: mol_type = other RNA
catcttgaacacctttctccccc

SEQ ID NO: 1168 - RNA, 21 nt, synthetic construct
  source 1..21: mol_type = other RNA
ggggagaaaggtgttcaagat

SEQ ID NO: 1169 - RNA, 23 nt, synthetic construct
  source 1..23: mol_type = other RNA
atcttgaacacctttctccccct

SEQ ID NO: 1170 - RNA, 21 nt, synthetic construct
  source 1..21: mol_type = other RNA
atcttggtgtcgaatcatggg

SEQ ID NO: 1171 - RNA, 23 nt, synthetic construct
  source 1..23: mol_type = other RNA
cccatgattcgacaccaagatcc

SEQ ID NO: 1172 - RNA, 21 nt, synthetic construct
  source 1..21: mol_type = other RNA
tcttggtgtcgaatcatgggg

SEQ ID NO: 1173 - RNA, 23 nt, synthetic construct
  source 1..23: mol_type = other RNA
ccccatgattcgacaccaagatc

SEQ ID NO: 1174 - RNA, 21 nt, synthetic construct
  source 1..21: mol_type = other RNA
tgggatcttggtgtcgaatca

SEQ ID NO: 1175 - RNA, 23 nt, synthetic construct
  source 1..23: mol_type = other RNA
tgattcgacaccaagatcccatt

SEQ ID NO: 1176 - RNA, 21 nt, synthetic construct
  source 1..21: mol_type = other RNA
atgggatcttggtgtcgaatc

SEQ ID NO: 1177 - RNA, 23 nt, synthetic construct
  source 1..23: mol_type = other RNA
gattcgacaccaagatcccattc

SEQ ID NO: 1178 - RNA, 21 nt, synthetic construct
  source 1..21: mol_type = other RNA
gctacaaggccatatttgtga

SEQ ID NO: 1179 - RNA, 23 nt, synthetic construct
  source 1..23: mol_type = other RNA
tcacaaatatggccttgtagccc

SEQ ID NO: 1180 - RNA, 21 nt, synthetic construct
  source 1..21: mol_type = other RNA
ctacaaggccatatttgtgac

SEQ ID NO: 1181 - RNA, 23 nt, synthetic construct
  source 1..23: mol_type = other RNA
gtcacaaatatggccttgtagcc

SEQ ID NO: 1182 - RNA, 21 nt, synthetic construct
  source 1..21: mol_type = other RNA
atgggctacaaggccatattt

SEQ ID NO: 1183 - RNA, 23 nt, synthetic construct
  source 1..23: mol_type = other RNA
aaatatggccttgtagcccatct

SEQ ID NO: 1184 - RNA, 21 nt, synthetic construct
  source 1..21: mol_type = other RNA
gatgggctacaaggccatatt

SEQ ID NO: 1185 - RNA, 23 nt, synthetic construct
  source 1..23: mol_type = other RNA
aatatggccttgtagcccatctt

SEQ ID NO: 1186 - RNA, 21 nt, synthetic construct
  source 1..21: mol_type = other RNA
actggagagaattggaatggg

SEQ ID NO: 1187 - RNA, 23 nt, synthetic construct
  source 1..23: mol_type = other RNA
cccattccaattctctccagtgc

SEQ ID NO: 1188 - RNA, 21 nt, synthetic construct
  source 1..21: mol_type = other RNA
ctggagagaattggaatgggt

SEQ ID NO: 1189 - RNA, 23 nt, synthetic construct
  source 1..23: mol_type = other RNA
acccattccaattctctccagtg

SEQ ID NO: 1190 - RNA, 21 nt, synthetic construct
  source 1..21: mol_type = other RNA
tagcactggagagaattggaa

SEQ ID NO: 1191 - RNA, 23 nt, synthetic construct
  source 1..23: mol_type = other RNA
ttccaattctctccagtgctacc

SEQ ID NO: 1192 - RNA, 21 nt, synthetic construct
  source 1..21: mol_type = other RNA
gtagcactggagagaattgga

SEQ ID NO: 1193 - RNA, 23 nt, synthetic construct
  source 1..23: mol_type = other RNA
tccaattctctccagtgctacct

SEQ ID NO: 1194 - RNA, 21 nt, synthetic construct
  source 1..21: mol_type = other RNA
acagtggacacaccttacctg

SEQ ID NO: 1195 - RNA, 23 nt, synthetic construct
  source 1..23: mol_type = other RNA
caggtaaggtgtgtccactgtca

SEQ ID NO: 1196 - RNA, 21 nt, synthetic construct
  source 1..21: mol_type = other RNA
cagtggacacaccttacctgg

SEQ ID NO: 1197 - RNA, 23 nt, synthetic construct
  source 1..23: mol_type = other RNA
ccaggtaaggtgtgtccactgtc

SEQ ID NO: 1198 - RNA, 21 nt, synthetic construct
  source 1..21: mol_type = other RNA
tgtgacagtggacacacctta

SEQ ID NO: 1199 - RNA, 23 nt, synthetic construct
  source 1..23: mol_type = other RNA
taaggtgtgtccactgtcacaaa

SEQ ID NO: 1200 - RNA, 21 nt, synthetic construct
  source 1..21: mol_type = other RNA
ttgtgacagtggacacacctt

SEQ ID NO: 1201 - RNA, 23 nt, synthetic construct
  source 1..23: mol_type = other RNA
aaggtgtgtccactgtcacaaat

SEQ ID NO: 1202 - RNA, 21 nt, synthetic construct
  source 1..21: mol_type = other RNA
gaagactgacatcattgccaa

SEQ ID NO: 1203 - RNA, 23 nt, synthetic construct
  source 1..23: mol_type = other RNA
ttggcaatgatgtcagtcttctc

SEQ ID NO: 1204 - RNA, 21 nt, synthetic construct
  source 1..21: mol_type = other RNA
aagactgacatcattgccaat

SEQ ID NO: 1205 - RNA, 23 nt, synthetic construct
  source 1..23: mol_type = other RNA
attggcaatgatgtcagtcttct

SEQ ID NO: 1206 - RNA, 21 nt, synthetic construct
  source 1..21: mol_type = other RNA
ctgagaagactgacatcattg

SEQ ID NO: 1207 - RNA, 23 nt, synthetic construct
  source 1..23: mol_type = other RNA
caatgatgtcagtcttctcagcc

SEQ ID NO: 1208 - RNA, 21 nt, synthetic construct
  source 1..21: mol_type = other RNA
gctgagaagactgacatcatt

SEQ ID NO: 1209 - RNA, 23 nt, synthetic construct
  source 1..23: mol_type = other RNA
aatgatgtcagtcttctcagcca

SEQ ID NO: 1210 - RNA, 21 nt, synthetic construct
  source 1..21: mol_type = other RNA
gctcaggttcaaagtgttggt

SEQ ID NO: 1211 - RNA, 23 nt, synthetic construct
  source 1..23: mol_type = other RNA
accaacactttgaacctgagctt

SEQ ID NO: 1212 - RNA, 21 nt, synthetic construct
  source 1..21: mol_type = other RNA
ctcaggttcaaagtgttggta

SEQ ID NO: 1213 - RNA, 23 nt, synthetic construct
  source 1..23: mol_type = other RNA
taccaacactttgaacctgagct

SEQ ID NO: 1214 - RNA, 21 nt, synthetic construct
  source 1..21: mol_type = other RNA
gtaagctcaggttcaaagtgt

SEQ ID NO: 1215 - RNA, 23 nt, synthetic construct
  source 1..23: mol_type = other RNA
acactttgaacctgagcttacaa

SEQ ID NO: 1216 - RNA, 21 nt, synthetic construct
  source 1..21: mol_type = other RNA
tgtaagctcaggttcaaagtg

SEQ ID NO: 1217 - RNA, 23 nt, synthetic construct
  source 1..23: mol_type = other RNA
cactttgaacctgagcttacaat

SEQ ID NO: 1218 - RNA, 21 nt, synthetic construct
  source 1..21: mol_type = other RNA
atgtattacttgacaaagaga

SEQ ID NO: 1219 - RNA, 23 nt, synthetic construct
  source 1..23: mol_type = other RNA
tctctttgtcaagtaatacatgc

SEQ ID NO: 1220 - RNA, 21 nt, synthetic construct
  source 1..21: mol_type = other RNA
tgtattacttgacaaagagac

SEQ ID NO: 1221 - RNA, 23 nt, synthetic construct
  source 1..23: mol_type = other RNA
gtctctttgtcaagtaatacatg

SEQ ID NO: 1222 - RNA, 21 nt, synthetic construct
  source 1..21: mol_type = other RNA
cagcatgtattacttgacaaa

SEQ ID NO: 1223 - RNA, 23 nt, synthetic construct
  source 1..23: mol_type = other RNA
tttgtcaagtaatacatgctgaa

SEQ ID NO: 1224 - RNA, 21 nt, synthetic construct
  source 1..21: mol_type = other RNA
tcagcatgtattacttgacaa

SEQ ID NO: 1225 - RNA, 23 nt, synthetic construct
  source 1..23: mol_type = other RNA
ttgtcaagtaatacatgctgaaa

SEQ ID NO: 1226 - RNA, 21 nt, synthetic construct
  source 1..21: mol_type = other RNA
ctgcaactgtatatctacaag

SEQ ID NO: 1227 - RNA, 23 nt, synthetic construct
  source 1..23: mol_type = other RNA
cttgtagatatacagttgcagcc

SEQ ID NO: 1228 - RNA, 21 nt, synthetic construct
  source 1..21: mol_type = other RNA
tgcaactgtatatctacaagg

SEQ ID NO: 1229 - RNA, 23 nt, synthetic construct
  source 1..23: mol_type = other RNA
ccttgtagatatacagttgcagc

SEQ ID NO: 1230 - RNA, 21 nt, synthetic construct
  source 1..21: mol_type = other RNA
ttggctgcaactgtatatcta

SEQ ID NO: 1231 - RNA, 23 nt, synthetic construct
  source 1..23: mol_type = other RNA
tagatatacagttgcagccaacg

SEQ ID NO: 1232 - RNA, 21 nt, synthetic construct
  source 1..21: mol_type = other RNA
gttggctgcaactgtatatct

SEQ ID NO: 1233 - RNA, 23 nt, synthetic construct
  source 1..23: mol_type = other RNA
agatatacagttgcagccaacga

SEQ ID NO: 1234 - RNA, 21 nt, synthetic construct
  source 1..21: mol_type = other RNA
caaatgatgaagaaactttgg

SEQ ID NO: 1235 - RNA, 23 nt, synthetic construct
  source 1..23: mol_type = other RNA
ccaaagtttcttcatcatttgcc

SEQ ID NO: 1236 - RNA, 21 nt, synthetic construct
  source 1..21: mol_type = other RNA
aaatgatgaagaaactttggc

SEQ ID NO: 1237 - RNA, 23 nt, synthetic construct
  source 1..23: mol_type = other RNA
gccaaagtttcttcatcatttgc

SEQ ID NO: 1238 - RNA, 21 nt, synthetic construct
  source 1..21: mol_type = other RNA
ggggcaaatgatgaagaaact

SEQ ID NO: 1239 - RNA, 23 nt, synthetic construct
  source 1..23: mol_type = other RNA
agtttcttcatcatttgccccag

SEQ ID NO: 1240 - RNA, 21 nt, synthetic construct
  source 1..21: mol_type = other RNA
tggggcaaatgatgaagaaac

SEQ ID NO: 1241 - RNA, 23 nt, synthetic construct
  source 1..23: mol_type = other RNA
gtttcttcatcatttgccccaga

SEQ ID NO: 1242 - RNA, 21 nt, synthetic construct
  source 1..21: mol_type = other RNA
caaagggtgtcgttcttttcc

SEQ ID NO: 1243 - RNA, 23 nt, synthetic construct
  source 1..23: mol_type = other RNA
ggaaaagaacgacaccctttgta

SEQ ID NO: 1244 - RNA, 21 nt, synthetic construct
  source 1..21: mol_type = other RNA
aaagggtgtcgttcttttcca

SEQ ID NO: 1245 - RNA, 23 nt, synthetic construct
  source 1..23: mol_type = other RNA
tggaaaagaacgacaccctttgt

SEQ ID NO: 1246 - RNA, 21 nt, synthetic construct
  source 1..21: mol_type = other RNA
aatacaaagggtgtcgttctt

SEQ ID NO: 1247 - RNA, 23 nt, synthetic construct
  source 1..23: mol_type = other RNA
aagaacgacaccctttgtattga

SEQ ID NO: 1248 - RNA, 21 nt, synthetic construct
  source 1..21: mol_type = other RNA
caatacaaagggtgtcgttct

SEQ ID NO: 1249 - RNA, 23 nt, synthetic construct
  source 1..23: mol_type = other RNA
agaacgacaccctttgtattgaa

SEQ ID NO: 1250 - RNA, 21 nt, synthetic construct
  source 1..21: mol_type = other RNA
aaaggcactgatgttctgaaa

SEQ ID NO: 1251 - RNA, 23 nt, synthetic construct
  source 1..23: mol_type = other RNA
tttcagaacatcagtgcctttcc

SEQ ID NO: 1252 - RNA, 21 nt, synthetic construct
  source 1..21: mol_type = other RNA
aaggcactgatgttctgaaag

SEQ ID NO: 1253 - RNA, 23 nt, synthetic construct
  source 1..23: mol_type = other RNA
ctttcagaacatcagtgcctttc

SEQ ID NO: 1254 - RNA, 21 nt, synthetic construct
  source 1..21: mol_type = other RNA
gcggaaaggcactgatgttct

SEQ ID NO: 1255 - RNA, 23 nt, synthetic construct
  source 1..23: mol_type = other RNA
agaacatcagtgcctttccgcac

SEQ ID NO: 1256 - RNA, 21 nt, synthetic construct
  source 1..21: mol_type = other RNA
tgcggaaaggcactgatgttc

SEQ ID NO: 1257 - RNA, 23 nt, synthetic construct
  source 1..23: mol_type = other RNA
gaacatcagtgcctttccgcaca

SEQ ID NO: 1258 - RNA, 21 nt, synthetic construct
  source 1..21: mol_type = other RNA
aaggatgctccggaatgttgc

SEQ ID NO: 1259 - RNA, 23 nt, synthetic construct
  source 1..23: mol_type = other RNA
gcaacattccggagcatccttgg

SEQ ID NO: 1260 - RNA, 21 nt, synthetic construct
  source 1..21: mol_type = other RNA
aggatgctccggaatgttgct

SEQ ID NO: 1261 - RNA, 23 nt, synthetic construct
  source 1..23: mol_type = other RNA
agcaacattccggagcatccttg

SEQ ID NO: 1262 - RNA, 21 nt, synthetic construct
  source 1..21: mol_type = other RNA
atccaaggatgctccggaatg

SEQ ID NO: 1263 - RNA, 23 nt, synthetic construct
  source 1..23: mol_type = other RNA
cattccggagcatccttggatac

SEQ ID NO: 1264 - RNA, 21 nt, synthetic construct
  source 1..21: mol_type = other RNA
tatccaaggatgctccggaat

SEQ ID NO: 1265 - RNA, 23 nt, synthetic construct
  source 1..23: mol_type = other RNA
attccggagcatccttggataca

SEQ ID NO: 1266 - RNA, 21 nt, synthetic construct
  source 1..21: mol_type = other RNA
aatgggtggcggtaattggtg

SEQ ID NO: 1267 - RNA, 23 nt, synthetic construct
  source 1..23: mol_type = other RNA
caccaattaccgccacccattcc

SEQ ID NO: 1268 - RNA, 21 nt, synthetic construct
  source 1..21: mol_type = other RNA
atgggtggcggtaattggtga

SEQ ID NO: 1269 - RNA, 23 nt, synthetic construct
  source 1..23: mol_type = other RNA
tcaccaattaccgccacccattc

SEQ ID NO: 1270 - RNA, 21 nt, synthetic construct
  source 1..21: mol_type = other RNA
ttggaatgggtggcggtaatt

SEQ ID NO: 1271 - RNA, 23 nt, synthetic construct
  source 1..23: mol_type = other RNA
aattaccgccacccattccaatt

SEQ ID NO: 1272 - RNA, 21 nt, synthetic construct
  source 1..21: mol_type = other RNA
attggaatgggtggcggtaat

SEQ ID NO: 1273 - RNA, 23 nt, synthetic construct
  source 1..23: mol_type = other RNA
attaccgccacccattccaattc

SEQ ID NO: 1274 - RNA, 21 nt, synthetic construct
  source 1..21: mol_type = other RNA
ggaaaggcactgatgttctga

SEQ ID NO: 1275 - RNA, 23 nt, synthetic construct
  source 1..23: mol_type = other RNA
tcagaacatcagtgcctttccgc

SEQ ID NO: 1276 - RNA, 21 nt, synthetic construct
  source 1..21: mol_type = other RNA
gaaaggcactgatgttctgaa

SEQ ID NO: 1277 - RNA, 23 nt, synthetic construct
  source 1..23: mol_type = other RNA
ttcagaacatcagtgcctttccg

SEQ ID NO: 1278 - RNA, 21 nt, synthetic construct
  source 1..21: mol_type = other RNA
gtgcggaaaggcactgatgtt

SEQ ID NO: 1279 - RNA, 23 nt, synthetic construct
  source 1..23: mol_type = other RNA
aacatcagtgcctttccgcacac

SEQ ID NO: 1280 - RNA, 21 nt, synthetic construct
  source 1..21: mol_type = other RNA
tgtgcggaaaggcactgatgt

SEQ ID NO: 1281 - RNA, 23 nt, synthetic construct
  source 1..23: mol_type = other RNA
acatcagtgcctttccgcacacc

SEQ ID NO: 1282 - RNA, 21 nt, synthetic construct
  source 1..21: mol_type = other RNA
aattgtaagctcaggttcaaa

SEQ ID NO: 1283 - RNA, 23 nt, synthetic construct
  source 1..23: mol_type = other RNA
tttgaacctgagcttacaattta

SEQ ID NO: 1284 - RNA, 21 nt, synthetic construct
  source 1..21: mol_type = other RNA
attgtaagctcaggttcaaag

SEQ ID NO: 1285 - RNA, 23 nt, synthetic construct
  source 1..23: mol_type = other RNA
ctttgaacctgagcttacaattt

SEQ ID NO: 1286 - RNA, 21 nt, synthetic construct
  source 1..21: mol_type = other RNA
cttaaattgtaagctcaggtt

SEQ ID NO: 1287 - RNA, 23 nt, synthetic construct
  source 1..23: mol_type = other RNA
aacctgagcttacaatttaagaa

SEQ ID NO: 1288 - RNA, 21 nt, synthetic construct
  source 1..21: mol_type = other RNA
tcttaaattgtaagctcaggt

SEQ ID NO: 1289 - RNA, 23 nt, synthetic construct
  source 1..23: mol_type = other RNA
acctgagcttacaatttaagaac

SEQ ID NO: 1290 - RNA, 21 nt, synthetic construct
  source 1..21: mol_type = other RNA
gcaaacactaaggtgaaaaga

SEQ ID NO: 1291 - RNA, 23 nt, synthetic construct
  source 1..23: mol_type = other RNA
tcttttcaccttagtgtttgcta

SEQ ID NO: 1292 - RNA, 21 nt, synthetic construct
  source 1..21: mol_type = other RNA
caaacactaaggtgaaaagat

SEQ ID NO: 1293 - RNA, 23 nt, synthetic construct
  source 1..23: mol_type = other RNA
atcttttcaccttagtgtttgct

SEQ ID NO: 1294 - RNA, 21 nt, synthetic construct
  source 1..21: mol_type = other RNA
ggtagcaaacactaaggtgaa

SEQ ID NO: 1295 - RNA, 23 nt, synthetic construct
  source 1..23: mol_type = other RNA
ttcaccttagtgtttgctacctc

SEQ ID NO: 1296 - RNA, 21 nt, synthetic construct
  source 1..21: mol_type = other RNA
aggtagcaaacactaaggtga

SEQ ID NO: 1297 - RNA, 23 nt, synthetic construct
  source 1..23: mol_type = other RNA
tcaccttagtgtttgctacctcc

SEQ ID NO: 1298 - RNA, 21 nt, synthetic construct
  source 1..21: mol_type = other RNA
aggtagcaaacactaaggtga

SEQ ID NO: 1299 - RNA, 23 nt, synthetic construct
  source 1..23: mol_type = other RNA
tcaccttagtgtttgctacctcc

SEQ ID NO: 1300 - RNA, 21 nt, synthetic construct
  source 1..21: mol_type = other RNA
ggtagcaaacactaaggtgaa

SEQ ID NO: 1301 - RNA, 23 nt, synthetic construct
  source 1..23: mol_type = other RNA
ttcaccttagtgtttgctacctc

SEQ ID NO: 1302 - RNA, 21 nt, synthetic construct
  source 1..21: mol_type = other RNA
ttggaggtagcaaacactaag

SEQ ID NO: 1303 - RNA, 23 nt, synthetic construct
  source 1..23: mol_type = other RNA
cttagtgtttgctacctccaatt

SEQ ID NO: 1304 - RNA, 21 nt, synthetic construct
  source 1..21: mol_type = other RNA
attggaggtagcaaacactaa

SEQ ID NO: 1305 - RNA, 23 nt, synthetic construct
  source 1..23: mol_type = other RNA
ttagtgtttgctacctccaattt

SEQ ID NO: 1306 - RNA, 21 nt, synthetic construct
  source 1..21: mol_type = other RNA
taaagtgctgtatcctttagt

SEQ ID NO: 1307 - RNA, 23 nt, synthetic construct
  source 1..23: mol_type = other RNA
actaaaggatacagcactttagc

SEQ ID NO: 1308 - RNA, 21 nt, synthetic construct
  source 1..21: mol_type = other RNA
aaagtgctgtatcctttagta

SEQ ID NO: 1309 - RNA, 23 nt, synthetic construct
  source 1..23: mol_type = other RNA
tactaaaggatacagcactttag

SEQ ID NO: 1310 - RNA, 21 nt, synthetic construct
  source 1..21: mol_type = other RNA
aggctaaagtgctgtatcctt

SEQ ID NO: 1311 - RNA, 23 nt, synthetic construct
  source 1..23: mol_type = other RNA
aaggatacagcactttagcctgc

SEQ ID NO: 1312 - RNA, 21 nt, synthetic construct
  source 1..21: mol_type = other RNA
caggctaaagtgctgtatcct

SEQ ID NO: 1313 - RNA, 23 nt, synthetic construct
  source 1..23: mol_type = other RNA
aggatacagcactttagcctgcc

SEQ ID NO: 1314 - RNA, 21 nt, synthetic construct
  source 1..21: mol_type = other RNA
aagacattggtgaggaaaaat

SEQ ID NO: 1315 - RNA, 23 nt, synthetic construct
  source 1..23: mol_type = other RNA
atttttcctcaccaatgtcttgt

SEQ ID NO: 1316 - RNA, 21 nt, synthetic construct
  source 1..21: mol_type = other RNA
agacattggtgaggaaaaatc

SEQ ID NO: 1317 - RNA, 23 nt, synthetic construct
  source 1..23: mol_type = other RNA
gatttttcctcaccaatgtcttg

SEQ ID NO: 1318 - RNA, 21 nt, synthetic construct
  source 1..21: mol_type = other RNA
cgacaagacattggtgaggaa

SEQ ID NO: 1319 - RNA, 23 nt, synthetic construct
  source 1..23: mol_type = other RNA
ttcctcaccaatgtcttgtcgat

SEQ ID NO: 1320 - RNA, 21 nt, synthetic construct
  source 1..21: mol_type = other RNA
tcgacaagacattggtgagga

SEQ ID NO: 1321 - RNA, 23 nt, synthetic construct
  source 1..23: mol_type = other RNA
tcctcaccaatgtcttgtcgatg

SEQ ID NO: 1322 - RNA, 21 nt, synthetic construct
  source 1..21: mol_type = other RNA
aagatgtcctcgagatactaa

SEQ ID NO: 1323 - RNA, 23 nt, synthetic construct
  source 1..23: mol_type = other RNA
ttagtatctcgaggacatcttga

SEQ ID NO: 1324 - RNA, 21 nt, synthetic construct
  source 1..21: mol_type = other RNA
agatgtcctcgagatactaaa

SEQ ID NO: 1325 - RNA, 23 nt, synthetic construct
  source 1..23: mol_type = other RNA
tttagtatctcgaggacatcttg

SEQ ID NO: 1326 - RNA, 21 nt, synthetic construct
  source 1..21: mol_type = other RNA
gttcaagatgtcctcgagata

SEQ ID NO: 1327 - RNA, 23 nt, synthetic construct
  source 1..23: mol_type = other RNA
tatctcgaggacatcttgaacac

SEQ ID NO: 1328 - RNA, 21 nt, synthetic construct
  source 1..21: mol_type = other RNA
tgttcaagatgtcctcgagat

SEQ ID NO: 1329 - RNA, 23 nt, synthetic construct
  source 1..23: mol_type = other RNA
atctcgaggacatcttgaacacc

SEQ ID NO: 1330 - RNA, 21 nt, synthetic construct
  source 1..21: mol_type = other RNA
gagaaaggtgttcaagatgtc

SEQ ID NO: 1331 - RNA, 23 nt, synthetic construct
  source 1..23: mol_type = other RNA
gacatcttgaacacctttctccc

SEQ ID NO: 1332 - RNA, 21 nt, synthetic construct
  source 1..21: mol_type = other RNA
agaaaggtgttcaagatgtcc

SEQ ID NO: 1333 - RNA, 23 nt, synthetic construct
  source 1..23: mol_type = other RNA
ggacatcttgaacacctttctcc

SEQ ID NO: 1334 - RNA, 21 nt, synthetic construct
  source 1..21: mol_type = other RNA
gggggagaaaggtgttcaaga

SEQ ID NO: 1335 - RNA, 23 nt, synthetic construct
  source 1..23: mol_type = other RNA
tcttgaacacctttctccccctg

SEQ ID NO: 1336 - RNA, 21 nt, synthetic construct
  source 1..21: mol_type = other RNA
agggggagaaaggtgttcaag

SEQ ID NO: 1337 - RNA, 23 nt, synthetic construct
  source 1..23: mol_type = other RNA
cttgaacacctttctccccctgg

SEQ ID NO: 1338 - RNA, 21 nt, synthetic construct
  source 1..21: mol_type = other RNA
gctgggaagatatcaaatggc

SEQ ID NO: 1339 - RNA, 23 nt, synthetic construct
  source 1..23: mol_type = other RNA
gccatttgatatcttcccagctg

SEQ ID NO: 1340 - RNA, 21 nt, synthetic construct
  source 1..21: mol_type = other RNA
ctgggaagatatcaaatggct

SEQ ID NO: 1341 - RNA, 23 nt, synthetic construct
  source 1..23: mol_type = other RNA
agccatttgatatcttcccagct

SEQ ID NO: 1342 - RNA, 21 nt, synthetic construct
  source 1..21: mol_type = other RNA
atcagctgggaagatatcaaa

SEQ ID NO: 1343 - RNA, 23 nt, synthetic construct
  source 1..23: mol_type = other RNA
tttgatatcttcccagctgatag

SEQ ID NO: 1344 - RNA, 21 nt, synthetic construct
  source 1..21: mol_type = other RNA
tatcagctgggaagatatcaa

SEQ ID NO: 1345 - RNA, 23 nt, synthetic construct
  source 1..23: mol_type = other RNA
ttgatatcttcccagctgataga

SEQ ID NO: 1346 - RNA, 21 nt, synthetic construct
  source 1..21: mol_type = other RNA
tctgtcgacttctgttttagg

SEQ ID NO: 1347 - RNA, 23 nt, synthetic construct
  source 1..23: mol_type = other RNA
cctaaaacagaagtcgacagatc

SEQ ID NO: 1348 - RNA, 21 nt, synthetic construct
  source 1..21: mol_type = other RNA
ctgtcgacttctgttttagga

SEQ ID NO: 1349 - RNA, 23 nt, synthetic construct
  source 1..23: mol_type = other RNA
tcctaaaacagaagtcgacagat

SEQ ID NO: 1350 - RNA, 21 nt, synthetic construct
  source 1..21: mol_type = other RNA
cagatctgtcgacttctgttt

SEQ ID NO: 1351 - RNA, 23 nt, synthetic construct
  source 1..23: mol_type = other RNA
aaacagaagtcgacagatctgtt

SEQ ID NO: 1352 - RNA, 21 nt, synthetic construct
  source 1..21: mol_type = other RNA
acagatctgtcgacttctgtt

SEQ ID NO: 1353 - RNA, 23 nt, synthetic construct
  source 1..23: mol_type = other RNA
aacagaagtcgacagatctgttt

SEQ ID NO: 1354 - RNA, 21 nt, synthetic construct
  source 1..21: mol_type = other RNA
tacttctttgaatgtagattt

SEQ ID NO: 1355 - RNA, 23 nt, synthetic construct
  source 1..23: mol_type = other RNA
aaatctacattcaaagaagtatc

SEQ ID NO: 1356 - RNA, 21 nt, synthetic construct
  source 1..21: mol_type = other RNA
acttctttgaatgtagatttc

SEQ ID NO: 1357 - RNA, 23 nt, synthetic construct
  source 1..23: mol_type = other RNA
gaaatctacattcaaagaagtat

SEQ ID NO: 1358 - RNA, 21 nt, synthetic construct
  source 1..21: mol_type = other RNA
gtgatacttctttgaatgtag

SEQ ID NO: 1359 - RNA, 23 nt, synthetic construct
  source 1..23: mol_type = other RNA
ctacattcaaagaagtatcacca

SEQ ID NO: 1360 - RNA, 21 nt, synthetic construct
  source 1..21: mol_type = other RNA
ggtgatacttctttgaatgta

SEQ ID NO: 1361 - RNA, 23 nt, synthetic construct
  source 1..23: mol_type = other RNA
tacattcaaagaagtatcaccaa

SEQ ID NO: 1362 - RNA, 21 nt, synthetic construct
  source 1..21: mol_type = other RNA
tgggaagatatcaaatggctg

SEQ ID NO: 1363 - RNA, 23 nt, synthetic construct
  source 1..23: mol_type = other RNA
cagccatttgatatcttcccagc

SEQ ID NO: 1364 - RNA, 21 nt, synthetic construct
  source 1..21: mol_type = other RNA
gggaagatatcaaatggctga

SEQ ID NO: 1365 - RNA, 23 nt, synthetic construct
  source 1..23: mol_type = other RNA
tcagccatttgatatcttcccag

SEQ ID NO: 1366 - RNA, 21 nt, synthetic construct
  source 1..21: mol_type = other RNA
cagctgggaagatatcaaatg

SEQ ID NO: 1367 - RNA, 23 nt, synthetic construct
  source 1..23: mol_type = other RNA
catttgatatcttcccagctgat

SEQ ID NO: 1368 - RNA, 21 nt, synthetic construct
  source 1..21: mol_type = other RNA
tcagctgggaagatatcaaat

SEQ ID NO: 1369 - RNA, 23 nt, synthetic construct
  source 1..23: mol_type = other RNA
atttgatatcttcccagctgata

SEQ ID NO: 1370 - RNA, 21 nt, synthetic construct
  source 1..21: mol_type = other RNA
tccaaagtctatatatgacta

SEQ ID NO: 1371 - RNA, 23 nt, synthetic construct
  source 1..23: mol_type = other RNA
tagtcatatatagactttggaag

SEQ ID NO: 1372 - RNA, 21 nt, synthetic construct
  source 1..21: mol_type = other RNA
ccaaagtctatatatgactat

SEQ ID NO: 1373 - RNA, 23 nt, synthetic construct
  source 1..23: mol_type = other RNA
atagtcatatatagactttggaa

SEQ ID NO: 1374 - RNA, 21 nt, synthetic construct
  source 1..21: mol_type = other RNA
tacttccaaagtctatatatg

SEQ ID NO: 1375 - RNA, 23 nt, synthetic construct
  source 1..23: mol_type = other RNA
catatatagactttggaagtact

SEQ ID NO: 1376 - RNA, 21 nt, synthetic construct
  source 1..21: mol_type = other RNA
gtacttccaaagtctatatat

SEQ ID NO: 1377 - RNA, 23 nt, synthetic construct
  source 1..23: mol_type = other RNA
atatatagactttggaagtactg

SEQ ID NO: 1378 - RNA, 21 nt, synthetic construct
  source 1..21: mol_type = other RNA
ttatgaacaacatgctaaatc

SEQ ID NO: 1379 - RNA, 23 nt, synthetic construct
  source 1..23: mol_type = other RNA
gatttagcatgttgttcataatc

SEQ ID NO: 1380 - RNA, 21 nt, synthetic construct
  source 1..21: mol_type = other RNA
tatgaacaacatgctaaatca

SEQ ID NO: 1381 - RNA, 23 nt, synthetic construct
  source 1..23: mol_type = other RNA
tgatttagcatgttgttcataat

SEQ ID NO: 1382 - RNA, 21 nt, synthetic construct
  source 1..21: mol_type = other RNA
atgattatgaacaacatgcta

SEQ ID NO: 1383 - RNA, 23 nt, synthetic construct
  source 1..23: mol_type = other RNA
tagcatgttgttcataatcattg

SEQ ID NO: 1384 - RNA, 21 nt, synthetic construct
  source 1..21: mol_type = other RNA
aatgattatgaacaacatgct

SEQ ID NO: 1385 - RNA, 23 nt, synthetic construct
  source 1..23: mol_type = other RNA
agcatgttgttcataatcattga

SEQ ID NO: 1386 - RNA, 21 nt, synthetic construct
  source 1..21: mol_type = other RNA
aattccccacttcaatacaaa

SEQ ID NO: 1387 - RNA, 23 nt, synthetic construct
  source 1..23: mol_type = other RNA
tttgtattgaagtggggaattac

SEQ ID NO: 1388 - RNA, 21 nt, synthetic construct
  source 1..21: mol_type = other RNA
attccccacttcaatacaaag

SEQ ID NO: 1389 - RNA, 23 nt, synthetic construct
  source 1..23: mol_type = other RNA
ctttgtattgaagtggggaatta

SEQ ID NO: 1390 - RNA, 21 nt, synthetic construct
  source 1..21: mol_type = other RNA
ctgtaattccccacttcaata

SEQ ID NO: 1391 - RNA, 23 nt, synthetic construct
  source 1..23: mol_type = other RNA
tattgaagtggggaattacagac

SEQ ID NO: 1392 - RNA, 21 nt, synthetic construct
  source 1..21: mol_type = other RNA
tctgtaattccccacttcaat

SEQ ID NO: 1393 - RNA, 23 nt, synthetic construct
  source 1..23: mol_type = other RNA
attgaagtggggaattacagact

SEQ ID NO: 1394 - RNA, 21 nt, synthetic construct
  source 1..21: mol_type = other RNA
tgatgtgcgtaacagattcaa

SEQ ID NO: 1395 - RNA, 23 nt, synthetic construct
  source 1..23: mol_type = other RNA
ttgaatctgttacgcacatcatc

SEQ ID NO: 1396 - RNA, 21 nt, synthetic construct
  source 1..21: mol_type = other RNA
gatgtgcgtaacagattcaaa

SEQ ID NO: 1397 - RNA, 23 nt, synthetic construct
  source 1..23: mol_type = other RNA
tttgaatctgttacgcacatcat

SEQ ID NO: 1398 - RNA, 21 nt, synthetic construct
  source 1..21: mol_type = other RNA
tggatgatgtgcgtaacagat

SEQ ID NO: 1399 - RNA, 23 nt, synthetic construct
  source 1..23: mol_type = other RNA
atctgttacgcacatcatccaga

SEQ ID NO: 1400 - RNA, 21 nt, synthetic construct
  source 1..21: mol_type = other RNA
ctggatgatgtgcgtaacaga

SEQ ID NO: 1401 - RNA, 23 nt, synthetic construct
  source 1..23: mol_type = other RNA
tctgttacgcacatcatccagac

SEQ ID NO: 1402 - RNA, 21 nt, synthetic construct
  source 1..21: mol_type = other RNA
gaatgggtggcggtaattggt

SEQ ID NO: 1403 - RNA, 23 nt, synthetic construct
  source 1..23: mol_type = other RNA
accaattaccgccacccattcca

SEQ ID NO: 1404 - RNA, 21 nt, synthetic construct
  source 1..21: mol_type = other RNA
aatgggtggcggtaattggtg

SEQ ID NO: 1405 - RNA, 23 nt, synthetic construct
  source 1..23: mol_type = other RNA
caccaattaccgccacccattcc

SEQ ID NO: 1406 - RNA, 21 nt, synthetic construct
  source 1..21: mol_type = other RNA
attggaatgggtggcggtaat

SEQ ID NO: 1407 - RNA, 23 nt, synthetic construct
  source 1..23: mol_type = other RNA
attaccgccacccattccaattc

SEQ ID NO: 1408 - RNA, 21 nt, synthetic construct
  source 1..21: mol_type = other RNA
aattggaatgggtggcggtaa

SEQ ID NO: 1409 - RNA, 23 nt, synthetic construct
  source 1..23: mol_type = other RNA
ttaccgccacccattccaattct

SEQ ID NO: 1410 - RNA, 21 nt, synthetic construct
  source 1..21: mol_type = other RNA
tccggaatgttgctgaaacag

SEQ ID NO: 1411 - RNA, 23 nt, synthetic construct
  source 1..23: mol_type = other RNA
ctgtttcagcaacattccggagc

SEQ ID NO: 1412 - RNA, 21 nt, synthetic construct
  source 1..21: mol_type = other RNA
ccggaatgttgctgaaacaga

SEQ ID NO: 1413 - RNA, 23 nt, synthetic construct
  source 1..23: mol_type = other RNA
tctgtttcagcaacattccggag

SEQ ID NO: 1414 - RNA, 21 nt, synthetic construct
  source 1..21: mol_type = other RNA
atgctccggaatgttgctgaa

SEQ ID NO: 1415 - RNA, 23 nt, synthetic construct
  source 1..23: mol_type = other RNA
ttcagcaacattccggagcatcc

SEQ ID NO: 1416 - RNA, 21 nt, synthetic construct
  source 1..21: mol_type = other RNA
gatgctccggaatgttgctga

SEQ ID NO: 1417 - RNA, 23 nt, synthetic construct
  source 1..23: mol_type = other RNA
tcagcaacattccggagcatcct

SEQ ID NO: 1418 - RNA, 21 nt, synthetic construct
  source 1..21: mol_type = other RNA
tgtcctcgagatactaaagga

SEQ ID NO: 1419 - RNA, 23 nt, synthetic construct
  source 1..23: mol_type = other RNA
tcctttagtatctcgaggacatc

SEQ ID NO: 1420 - RNA, 21 nt, synthetic construct
  source 1..21: mol_type = other RNA
gtcctcgagatactaaaggaa

SEQ ID NO: 1421 - RNA, 23 nt, synthetic construct
  source 1..23: mol_type = other RNA
ttcctttagtatctcgaggacat

SEQ ID NO: 1422 - RNA, 21 nt, synthetic construct
  source 1..21: mol_type = other RNA
aagatgtcctcgagatactaa

SEQ ID NO: 1423 - RNA, 23 nt, synthetic construct
  source 1..23: mol_type = other RNA
ttagtatctcgaggacatcttga

SEQ ID NO: 1424 - RNA, 21 nt, synthetic construct
  source 1..21: mol_type = other RNA
caagatgtcctcgagatacta

SEQ ID NO: 1425 - RNA, 23 nt, synthetic construct
  source 1..23: mol_type = other RNA
tagtatctcgaggacatcttgaa

SEQ ID NO: 1426 - RNA, 21 nt, synthetic construct
  source 1..21: mol_type = other RNA
acaacatgctaaatcagtact

SEQ ID NO: 1427 - RNA, 23 nt, synthetic construct
  source 1..23: mol_type = other RNA
agtactgatttagcatgttgttc

SEQ ID NO: 1428 - RNA, 21 nt, synthetic construct
  source 1..21: mol_type = other RNA
caacatgctaaatcagtactt

SEQ ID NO: 1429 - RNA, 23 nt, synthetic construct
  source 1..23: mol_type = other RNA
aagtactgatttagcatgttgtt

SEQ ID NO: 1430 - RNA, 21 nt, synthetic construct
  source 1..21: mol_type = other RNA
atgaacaacatgctaaatcag

SEQ ID NO: 1431 - RNA, 23 nt, synthetic construct
  source 1..23: mol_type = other RNA
ctgatttagcatgttgttcataa

SEQ ID NO: 1432 - RNA, 21 nt, synthetic construct
  source 1..21: mol_type = other RNA
tatgaacaacatgctaaatca

SEQ ID NO: 1433 - RNA, 23 nt, synthetic construct
  source 1..23: mol_type = other RNA
tgatttagcatgttgttcataat

SEQ ID NO: 1434 - RNA, 21 nt, synthetic construct
  source 1..21: mol_type = other RNA
gccaaggctgtgtttgtgggg

SEQ ID NO: 1435 - RNA, 23 nt, synthetic construct
  source 1..23: mol_type = other RNA
ccccacaaacacagccttggcgc

SEQ ID NO: 1436 - RNA, 21 nt, synthetic construct
  source 1..21: mol_type = other RNA
ccaaggctgtgtttgtgggga

SEQ ID NO: 1437 - RNA, 23 nt, synthetic construct
  source 1..23: mol_type = other RNA
tccccacaaacacagccttggcg

SEQ ID NO: 1438 - RNA, 21 nt, synthetic construct
  source 1..21: mol_type = other RNA
tggcgccaaggctgtgtttgt

SEQ ID NO: 1439 - RNA, 23 nt, synthetic construct
  source 1..23: mol_type = other RNA
acaaacacagccttggcgccaag

SEQ ID NO: 1440 - RNA, 21 nt, synthetic construct
  source 1..21: mol_type = other RNA
ttggcgccaaggctgtgtttg

SEQ ID NO: 1441 - RNA, 23 nt, synthetic construct
  source 1..23: mol_type = other RNA
caaacacagccttggcgccaaga

SEQ ID NO: 1442 - RNA, 21 nt, synthetic construct
  source 1..21: mol_type = other RNA
tgaaagctctggctcttggcg

SEQ ID NO: 1443 - RNA, 23 nt, synthetic construct
  source 1..23: mol_type = other RNA
cgccaagagccagagctttcaga

SEQ ID NO: 1444 - RNA, 21 nt, synthetic construct
  source 1..21: mol_type = other RNA
gaaagctctggctcttggcgc

SEQ ID NO: 1445 - RNA, 23 nt, synthetic construct
  source 1..23: mol_type = other RNA
gcgccaagagccagagctttcag

SEQ ID NO: 1446 - RNA, 21 nt, synthetic construct
  source 1..21: mol_type = other RNA
gttctgaaagctctggctctt

SEQ ID NO: 1447 - RNA, 23 nt, synthetic construct
  source 1..23: mol_type = other RNA
aagagccagagctttcagaacat

SEQ ID NO: 1448 - RNA, 21 nt, synthetic construct
  source 1..21: mol_type = other RNA
tgttctgaaagctctggctct

SEQ ID NO: 1449 - RNA, 23 nt, synthetic construct
  source 1..23: mol_type = other RNA
agagccagagctttcagaacatc

SEQ ID NO: 1450 - RNA, 21 nt, synthetic construct
  source 1..21: mol_type = other RNA
cagccactattgatgttctgc

SEQ ID NO: 1451 - RNA, 23 nt, synthetic construct
  source 1..23: mol_type = other RNA
gcagaacatcaatagtggctggc

SEQ ID NO: 1452 - RNA, 21 nt, synthetic construct
  source 1..21: mol_type = other RNA
agccactattgatgttctgcc

SEQ ID NO: 1453 - RNA, 23 nt, synthetic construct
  source 1..23: mol_type = other RNA
ggcagaacatcaatagtggctgg

SEQ ID NO: 1454 - RNA, 21 nt, synthetic construct
  source 1..21: mol_type = other RNA
gtgccagccactattgatgtt

SEQ ID NO: 1455 - RNA, 23 nt, synthetic construct
  source 1..23: mol_type = other RNA
aacatcaatagtggctggcaccc

SEQ ID NO: 1456 - RNA, 21 nt, synthetic construct
  source 1..21: mol_type = other RNA
ggtgccagccactattgatgt

SEQ ID NO: 1457 - RNA, 23 nt, synthetic construct
  source 1..23: mol_type = other RNA
acatcaatagtggctggcacccc

SEQ ID NO: 1458 - RNA, 21 nt, synthetic construct
  source 1..21: mol_type = other RNA
acaaggaccgagaagtcacca

SEQ ID NO: 1459 - RNA, 23 nt, synthetic construct
  source 1..23: mol_type = other RNA
tggtgacttctcggtccttgtag

SEQ ID NO: 1460 - RNA, 21 nt, synthetic construct
  source 1..21: mol_type = other RNA
caaggaccgagaagtcaccaa

SEQ ID NO: 1461 - RNA, 23 nt, synthetic construct
  source 1..23: mol_type = other RNA
ttggtgacttctcggtccttgta

SEQ ID NO: 1462 - RNA, 21 nt, synthetic construct
  source 1..21: mol_type = other RNA
atctacaaggaccgagaagtc

SEQ ID NO: 1463 - RNA, 23 nt, synthetic construct
  source 1..23: mol_type = other RNA
gacttctcggtccttgtagatat

SEQ ID NO: 1464 - RNA, 21 nt, synthetic construct
  source 1..21: mol_type = other RNA
tatctacaaggaccgagaagt

SEQ ID NO: 1465 - RNA, 23 nt, synthetic construct
  source 1..23: mol_type = other RNA
acttctcggtccttgtagatata

SEQ ID NO: 1466 - RNA, 21 nt, synthetic construct
  source 1..21: mol_type = other RNA
cagaatgtgaaagtcatcgac

SEQ ID NO: 1467 - RNA, 23 nt, synthetic construct
  source 1..23: mol_type = other RNA
gtcgatgactttcacattctggc

SEQ ID NO: 1468 - RNA, 21 nt, synthetic construct
  source 1..21: mol_type = other RNA
agaatgtgaaagtcatcgaca

SEQ ID NO: 1469 - RNA, 23 nt, synthetic construct
  source 1..23: mol_type = other RNA
tgtcgatgactttcacattctgg

SEQ ID NO: 1470 - RNA, 21 nt, synthetic construct
  source 1..21: mol_type = other RNA
gtgccagaatgtgaaagtcat

SEQ ID NO: 1471 - RNA, 23 nt, synthetic construct
  source 1..23: mol_type = other RNA
atgactttcacattctggcaccc

SEQ ID NO: 1472 - RNA, 21 nt, synthetic construct
  source 1..21: mol_type = other RNA
ggtgccagaatgtgaaagtca

SEQ ID NO: 1473 - RNA, 23 nt, synthetic construct
  source 1..23: mol_type = other RNA
tgactttcacattctggcaccca

SEQ ID NO: 1474 - RNA, 21 nt, synthetic construct
  source 1..21: mol_type = other RNA
agatgtcctcgagatactaaa

SEQ ID NO: 1475 - RNA, 23 nt, synthetic construct
  source 1..23: mol_type = other RNA
tttagtatctcgaggacatcttg

SEQ ID NO: 1476 - RNA, 21 nt, synthetic construct
  source 1..21: mol_type = other RNA
gatgtcctcgagatactaaag

SEQ ID NO: 1477 - RNA, 23 nt, synthetic construct
  source 1..23: mol_type = other RNA
ctttagtatctcgaggacatctt

SEQ ID NO: 1478 - RNA, 21 nt, synthetic construct
  source 1..21: mol_type = other RNA
ttcaagatgtcctcgagatac

SEQ ID NO: 1479 - RNA, 23 nt, synthetic construct
  source 1..23: mol_type = other RNA
gtatctcgaggacatcttgaaca

SEQ ID NO: 1480 - RNA, 21 nt, synthetic construct
  source 1..21: mol_type = other RNA
gttcaagatgtcctcgagata

SEQ ID NO: 1481 - RNA, 23 nt, synthetic construct
  source 1..23: mol_type = other RNA
tatctcgaggacatcttgaacac

SEQ ID NO: 1482 - RNA, 21 nt, synthetic construct
  source 1..21: mol_type = other RNA
gtggacttgctgcatatgtgg

SEQ ID NO: 1483 - RNA, 23 nt, synthetic construct
  source 1..23: mol_type = other RNA
ccacatatgcagcaagtccactg

SEQ ID NO: 1484 - RNA, 21 nt, synthetic construct
  source 1..21: mol_type = other RNA
tggacttgctgcatatgtggc

SEQ ID NO: 1485 - RNA, 23 nt, synthetic construct
  source 1..23: mol_type = other RNA
gccacatatgcagcaagtccact

SEQ ID NO: 1486 - RNA, 21 nt, synthetic construct
  source 1..21: mol_type = other RNA
gacagtggacttgctgcatat

SEQ ID NO: 1487 - RNA, 23 nt, synthetic construct
  source 1..23: mol_type = other RNA
atatgcagcaagtccactgtcgt

SEQ ID NO: 1488 - RNA, 21 nt, synthetic construct
  source 1..21: mol_type = other RNA
cgacagtggacttgctgcata

SEQ ID NO: 1489 - RNA, 23 nt, synthetic construct
  source 1..23: mol_type = other RNA
tatgcagcaagtccactgtcgtc

SEQ ID NO: 1490 - RNA, 21 nt, synthetic construct
  source 1..21: mol_type = other RNA
aaccagtactttatcattttc

SEQ ID NO: 1491 - RNA, 23 nt, synthetic construct
  source 1..23: mol_type = other RNA
gaaaatgataaagtactggtttc

SEQ ID NO: 1492 - RNA, 21 nt, synthetic construct
  source 1..21: mol_type = other RNA
accagtactttatcattttct

SEQ ID NO: 1493 - RNA, 23 nt, synthetic construct
  source 1..23: mol_type = other RNA
agaaaatgataaagtactggttt

SEQ ID NO: 1494 - RNA, 21 nt, synthetic construct
  source 1..21: mol_type = other RNA
ttgaaaccagtactttatcat

SEQ ID NO: 1495 - RNA, 23 nt, synthetic construct
  source 1..23: mol_type = other RNA
atgataaagtactggtttcaaaa

SEQ ID NO: 1496 - RNA, 21 nt, synthetic construct
  source 1..21: mol_type = other RNA
tttgaaaccagtactttatca

SEQ ID NO: 1497 - RNA, 23 nt, synthetic construct
  source 1..23: mol_type = other RNA
tgataaagtactggtttcaaaat

SEQ ID NO: 1498 - RNA, 21 nt, synthetic construct
  source 1..21: mol_type = other RNA
cgagaagtcaccaagaagcta

SEQ ID NO: 1499 - RNA, 23 nt, synthetic construct
  source 1..23: mol_type = other RNA
tagcttcttggtgacttctcggt

SEQ ID NO: 1500 - RNA, 21 nt, synthetic construct
  source 1..21: mol_type = other RNA
gagaagtcaccaagaagctag

SEQ ID NO: 1501 - RNA, 23 nt, synthetic construct
  source 1..23: mol_type = other RNA
ctagcttcttggtgacttctcgg

SEQ ID NO: 1502 - RNA, 21 nt, synthetic construct
  source 1..21: mol_type = other RNA
ggaccgagaagtcaccaagaa

SEQ ID NO: 1503 - RNA, 23 nt, synthetic construct
  source 1..23: mol_type = other RNA
ttcttggtgacttctcggtcctt

SEQ ID NO: 1504 - RNA, 21 nt, synthetic construct
  source 1..21: mol_type = other RNA
aggaccgagaagtcaccaaga

SEQ ID NO: 1505 - RNA, 23 nt, synthetic construct
  source 1..23: mol_type = other RNA
tcttggtgacttctcggtccttg

SEQ ID NO: 1506 - RNA, 21 nt, synthetic construct
  source 1..21: mol_type = other RNA
tcaaagtgttggtaatgcctg

SEQ ID NO: 1507 - RNA, 23 nt, synthetic construct
  source 1..23: mol_type = other RNA
caggcattaccaacactttgaac

SEQ ID NO: 1508 - RNA, 21 nt, synthetic construct
  source 1..21: mol_type = other RNA
caaagtgttggtaatgcctga

SEQ ID NO: 1509 - RNA, 23 nt, synthetic construct
  source 1..23: mol_type = other RNA
tcaggcattaccaacactttgaa

SEQ ID NO: 1510 - RNA, 21 nt, synthetic construct
  source 1..21: mol_type = other RNA
aggttcaaagtgttggtaatg

SEQ ID NO: 1511 - RNA, 23 nt, synthetic construct
  source 1..23: mol_type = other RNA
cattaccaacactttgaacctga

SEQ ID NO: 1512 - RNA, 21 nt, synthetic construct
  source 1..21: mol_type = other RNA
caggttcaaagtgttggtaat

SEQ ID NO: 1513 - RNA, 23 nt, synthetic construct
  source 1..23: mol_type = other RNA
attaccaacactttgaacctgag

SEQ ID NO: 1514 - RNA, 21 nt, synthetic construct
  source 1..21: mol_type = other RNA
tattacttgacaaagagacac

SEQ ID NO: 1515 - RNA, 23 nt, synthetic construct
  source 1..23: mol_type = other RNA
gtgtctctttgtcaagtaataca

SEQ ID NO: 1516 - RNA, 21 nt, synthetic construct
  source 1..21: mol_type = other RNA
attacttgacaaagagacact

SEQ ID NO: 1517 - RNA, 23 nt, synthetic construct
  source 1..23: mol_type = other RNA
agtgtctctttgtcaagtaatac

SEQ ID NO: 1518 - RNA, 21 nt, synthetic construct
  source 1..21: mol_type = other RNA
catgtattacttgacaaagag

SEQ ID NO: 1519 - RNA, 23 nt, synthetic construct
  source 1..23: mol_type = other RNA
ctctttgtcaagtaatacatgct

SEQ ID NO: 1520 - RNA, 21 nt, synthetic construct
  source 1..21: mol_type = other RNA
gcatgtattacttgacaaaga

SEQ ID NO: 1521 - RNA, 23 nt, synthetic construct
  source 1..23: mol_type = other RNA
tctttgtcaagtaatacatgctg

SEQ ID NO: 1522 - RNA, 21 nt, synthetic construct
  source 1..21: mol_type = other RNA
aaagtcatcgacaagacattg

SEQ ID NO: 1523 - RNA, 23 nt, synthetic construct
  source 1..23: mol_type = other RNA
caatgtcttgtcgatgactttca

SEQ ID NO: 1524 - RNA, 21 nt, synthetic construct
  source 1..21: mol_type = other RNA
aagtcatcgacaagacattgg

SEQ ID NO: 1525 - RNA, 23 nt, synthetic construct
  source 1..23: mol_type = other RNA
ccaatgtcttgtcgatgactttc

SEQ ID NO: 1526 - RNA, 21 nt, synthetic construct
  source 1..21: mol_type = other RNA
tgtgaaagtcatcgacaagac

SEQ ID NO: 1527 - RNA, 23 nt, synthetic construct
  source 1..23: mol_type = other RNA
gtcttgtcgatgactttcacatt

SEQ ID NO: 1528 - RNA, 21 nt, synthetic construct
  source 1..21: mol_type = other RNA
atgtgaaagtcatcgacaaga

SEQ ID NO: 1529 - RNA, 23 nt, synthetic construct
  source 1..23: mol_type = other RNA
tcttgtcgatgactttcacattc

SEQ ID NO: 1530 - RNA, 21 nt, synthetic construct
  source 1..21: mol_type = other RNA
atatgtggctaaagcaataga

SEQ ID NO: 1531 - RNA, 23 nt, synthetic construct
  source 1..23: mol_type = other RNA
tctattgctttagccacatatgc

SEQ ID NO: 1532 - RNA, 21 nt, synthetic construct
  source 1..21: mol_type = other RNA
tatgtggctaaagcaatagac

SEQ ID NO: 1533 - RNA, 23 nt, synthetic construct
  source 1..23: mol_type = other RNA
gtctattgctttagccacatatg

SEQ ID NO: 1534 - RNA, 21 nt, synthetic construct
  source 1..21: mol_type = other RNA
ctgcatatgtggctaaagcaa

SEQ ID NO: 1535 - RNA, 23 nt, synthetic construct
  source 1..23: mol_type = other RNA
ttgctttagccacatatgcagca

SEQ ID NO: 1536 - RNA, 21 nt, synthetic construct
  source 1..21: mol_type = other RNA
gctgcatatgtggctaaagca

SEQ ID NO: 1537 - RNA, 23 nt, synthetic construct
  source 1..23: mol_type = other RNA
tgctttagccacatatgcagcaa

SEQ ID NO: 1538 - RNA, 21 nt, synthetic construct
  source 1..21: mol_type = other RNA
agacgacagtggacttgctgc

SEQ ID NO: 1539 - RNA, 23 nt, synthetic construct
  source 1..23: mol_type = other RNA
gcagcaagtccactgtcgtctcc

SEQ ID NO: 1540 - RNA, 21 nt, synthetic construct
  source 1..21: mol_type = other RNA
gacgacagtggacttgctgca

SEQ ID NO: 1541 - RNA, 23 nt, synthetic construct
  source 1..23: mol_type = other RNA
tgcagcaagtccactgtcgtctc

SEQ ID NO: 1542 - RNA, 21 nt, synthetic construct
  source 1..21: mol_type = other RNA
ttggagacgacagtggacttg

SEQ ID NO: 1543 - RNA, 23 nt, synthetic construct
  source 1..23: mol_type = other RNA
caagtccactgtcgtctccaaaa

SEQ ID NO: 1544 - RNA, 21 nt, synthetic construct
  source 1..21: mol_type = other RNA
tttggagacgacagtggactt

SEQ ID NO: 1545 - RNA, 23 nt, synthetic construct
  source 1..23: mol_type = other RNA
aagtccactgtcgtctccaaaat

SEQ ID NO: 1546 - RNA, 21 nt, synthetic construct
  source 1..21: mol_type = other RNA
ggccacctcctcaattgaaga

SEQ ID NO: 1547 - RNA, 23 nt, synthetic construct
  source 1..23: mol_type = other RNA
tcttcaattgaggaggtggccca

SEQ ID NO: 1548 - RNA, 21 nt, synthetic construct
  source 1..21: mol_type = other RNA
gccacctcctcaattgaagaa

SEQ ID NO: 1549 - RNA, 23 nt, synthetic construct
  source 1..23: mol_type = other RNA
ttcttcaattgaggaggtggccc

SEQ ID NO: 1550 - RNA, 21 nt, synthetic construct
  source 1..21: mol_type = other RNA
cctgggccacctcctcaattg

SEQ ID NO: 1551 - RNA, 23 nt, synthetic construct
  source 1..23: mol_type = other RNA
caattgaggaggtggcccaggaa

SEQ ID NO: 1552 - RNA, 21 nt, synthetic construct
  source 1..21: mol_type = other RNA
tcctgggccacctcctcaatt

SEQ ID NO: 1553 - RNA, 23 nt, synthetic construct
  source 1..23: mol_type = other RNA
aattgaggaggtggcccaggaac

SEQ ID NO: 1554 - RNA, 21 nt, synthetic construct
  source 1..21: mol_type = other RNA
tgtatgttacttcttagagag

SEQ ID NO: 1555 - RNA, 23 nt, synthetic construct
  source 1..23: mol_type = other RNA
ctctctaagaagtaacatacatc

SEQ ID NO: 1556 - RNA, 21 nt, synthetic construct
  source 1..21: mol_type = other RNA
gtatgttacttcttagagaga

SEQ ID NO: 1557 - RNA, 23 nt, synthetic construct
  source 1..23: mol_type = other RNA
tctctctaagaagtaacatacat

SEQ ID NO: 1558 - RNA, 21 nt, synthetic construct
  source 1..21: mol_type = other RNA
aggatgtatgttacttcttag

SEQ ID NO: 1559 - RNA, 23 nt, synthetic construct
  source 1..23: mol_type = other RNA
ctaagaagtaacatacatcctaa

SEQ ID NO: 1560 - RNA, 21 nt, synthetic construct
  source 1..21: mol_type = other RNA
taggatgtatgttacttctta

SEQ ID NO: 1561 - RNA, 23 nt, synthetic construct
  source 1..23: mol_type = other RNA
taagaagtaacatacatcctaaa

SEQ ID NO: 1562 - RNA, 21 nt, synthetic construct
  source 1..21: mol_type = other RNA
aaatgttttaggatgtatgtt

SEQ ID NO: 1563 - RNA, 23 nt, synthetic construct
  source 1..23: mol_type = other RNA
aacatacatcctaaaacatttgg

SEQ ID NO: 1564 - RNA, 21 nt, synthetic construct
  source 1..21: mol_type = other RNA
aatgttttaggatgtatgtta

SEQ ID NO: 1565 - RNA, 23 nt, synthetic construct
  source 1..23: mol_type = other RNA
taacatacatcctaaaacatttg

SEQ ID NO: 1566 - RNA, 21 nt, synthetic construct
  source 1..21: mol_type = other RNA
atccaaatgttttaggatgta

SEQ ID NO: 1567 - RNA, 23 nt, synthetic construct
  source 1..23: mol_type = other RNA
tacatcctaaaacatttggatat

SEQ ID NO: 1568 - RNA, 21 nt, synthetic construct
  source 1..21: mol_type = other RNA
tatccaaatgttttaggatgt

SEQ ID NO: 1569 - RNA, 23 nt, synthetic construct
  source 1..23: mol_type = other RNA
acatcctaaaacatttggatata

SEQ ID NO: 1570 - RNA, 21 nt, synthetic construct
  source 1..21: mol_type = other RNA
atgggtggcggtaattggtga

SEQ ID NO: 1571 - RNA, 23 nt, synthetic construct
  source 1..23: mol_type = other RNA
tcaccaattaccgccacccattc

SEQ ID NO: 1572 - RNA, 21 nt, synthetic construct
  source 1..21: mol_type = other RNA
tgggtggcggtaattggtgat

SEQ ID NO: 1573 - RNA, 23 nt, synthetic construct
  source 1..23: mol_type = other RNA
atcaccaattaccgccacccatt

SEQ ID NO: 1574 - RNA, 21 nt, synthetic construct
  source 1..21: mol_type = other RNA
tggaatgggtggcggtaattg

SEQ ID NO: 1575 - RNA, 23 nt, synthetic construct
  source 1..23: mol_type = other RNA
caattaccgccacccattccaat

SEQ ID NO: 1576 - RNA, 21 nt, synthetic construct
  source 1..21: mol_type = other RNA
ttggaatgggtggcggtaatt

SEQ ID NO: 1577 - RNA, 23 nt, synthetic construct
  source 1..23: mol_type = other RNA
aattaccgccacccattccaatt

SEQ ID NO: 1578 - RNA, 21 nt, synthetic construct
  source 1..21: mol_type = other RNA
ttcaaagtgttggtaatgcct

SEQ ID NO: 1579 - RNA, 23 nt, synthetic construct
  source 1..23: mol_type = other RNA
aggcattaccaacactttgaacc

SEQ ID NO: 1580 - RNA, 21 nt, synthetic construct
  source 1..21: mol_type = other RNA
tcaaagtgttggtaatgcctg

SEQ ID NO: 1581 - RNA, 23 nt, synthetic construct
  source 1..23: mol_type = other RNA
caggcattaccaacactttgaac

SEQ ID NO: 1582 - RNA, 21 nt, synthetic construct
  source 1..21: mol_type = other RNA
caggttcaaagtgttggtaat

SEQ ID NO: 1583 - RNA, 23 nt, synthetic construct
  source 1..23: mol_type = other RNA
attaccaacactttgaacctgag

SEQ ID NO: 1584 - RNA, 21 nt, synthetic construct
  source 1..21: mol_type = other RNA
tcaggttcaaagtgttggtaa

SEQ ID NO: 1585 - RNA, 23 nt, synthetic construct
  source 1..23: mol_type = other RNA
ttaccaacactttgaacctgagc

SEQ ID NO: 1586 - RNA, 21 nt, synthetic construct
  source 1..21: mol_type = other RNA
ccacctcctcaattgaagaag

SEQ ID NO: 1587 - RNA, 23 nt, synthetic construct
  source 1..23: mol_type = other RNA
cttcttcaattgaggaggtggcc

SEQ ID NO: 1588 - RNA, 21 nt, synthetic construct
  source 1..21: mol_type = other RNA
cacctcctcaattgaagaagt

SEQ ID NO: 1589 - RNA, 23 nt, synthetic construct
  source 1..23: mol_type = other RNA
acttcttcaattgaggaggtggc

SEQ ID NO: 1590 - RNA, 21 nt, synthetic construct
  source 1..21: mol_type = other RNA
tgggccacctcctcaattgaa

SEQ ID NO: 1591 - RNA, 23 nt, synthetic construct
  source 1..23: mol_type = other RNA
ttcaattgaggaggtggcccagg

SEQ ID NO: 1592 - RNA, 21 nt, synthetic construct
  source 1..21: mol_type = other RNA
ctgggccacctcctcaattga

SEQ ID NO: 1593 - RNA, 23 nt, synthetic construct
  source 1..23: mol_type = other RNA
tcaattgaggaggtggcccagga

SEQ ID NO: 1594 - RNA, 21 nt, synthetic construct
  source 1..21: mol_type = other RNA
gagtgggtgccagaatgtgaa

SEQ ID NO: 1595 - RNA, 23 nt, synthetic construct
  source 1..23: mol_type = other RNA
ttcacattctggcacccactcag

SEQ ID NO: 1596 - RNA, 21 nt, synthetic construct
  source 1..21: mol_type = other RNA
agtgggtgccagaatgtgaaa

SEQ ID NO: 1597 - RNA, 23 nt, synthetic construct
  source 1..23: mol_type = other RNA
tttcacattctggcacccactca

SEQ ID NO: 1598 - RNA, 21 nt, synthetic construct
  source 1..21: mol_type = other RNA
ctctgagtgggtgccagaatg

SEQ ID NO: 1599 - RNA, 23 nt, synthetic construct
  source 1..23: mol_type = other RNA
cattctggcacccactcagagcc

SEQ ID NO: 1600 - RNA, 21 nt, synthetic construct
  source 1..21: mol_type = other RNA
gctctgagtgggtgccagaat

SEQ ID NO: 1601 - RNA, 23 nt, synthetic construct
  source 1..23: mol_type = other RNA
attctggcacccactcagagcca

SEQ ID NO: 1602 - RNA, 21 nt, synthetic construct
  source 1..21: mol_type = other RNA
gcactgatgttctgaaagctc

SEQ ID NO: 1603 - RNA, 23 nt, synthetic construct
  source 1..23: mol_type = other RNA
gagctttcagaacatcagtgcct

SEQ ID NO: 1604 - RNA, 21 nt, synthetic construct
  source 1..21: mol_type = other RNA
cactgatgttctgaaagctct

SEQ ID NO: 1605 - RNA, 23 nt, synthetic construct
  source 1..23: mol_type = other RNA
agagctttcagaacatcagtgcc

SEQ ID NO: 1606 - RNA, 21 nt, synthetic construct
  source 1..21: mol_type = other RNA
aaaggcactgatgttctgaaa

SEQ ID NO: 1607 - RNA, 23 nt, synthetic construct
  source 1..23: mol_type = other RNA
tttcagaacatcagtgcctttcc

SEQ ID NO: 1608 - RNA, 21 nt, synthetic construct
  source 1..21: mol_type = other RNA
gaaaggcactgatgttctgaa

SEQ ID NO: 1609 - RNA, 23 nt, synthetic construct
  source 1..23: mol_type = other RNA
ttcagaacatcagtgcctttccg

SEQ ID NO: 1610 - RNA, 21 nt, synthetic construct
  source 1..21: mol_type = other RNA
gggaaggtggaagtcttcctg

SEQ ID NO: 1611 - RNA, 23 nt, synthetic construct
  source 1..23: mol_type = other RNA
caggaagacttccaccttccctt

SEQ ID NO: 1612 - RNA, 21 nt, synthetic construct
  source 1..21: mol_type = other RNA
ggaaggtggaagtcttcctgg

SEQ ID NO: 1613 - RNA, 23 nt, synthetic construct
  source 1..23: mol_type = other RNA
ccaggaagacttccaccttccct

SEQ ID NO: 1614 - RNA, 21 nt, synthetic construct
  source 1..21: mol_type = other RNA
ggaagggaaggtggaagtctt

SEQ ID NO: 1615 - RNA, 23 nt, synthetic construct
  source 1..23: mol_type = other RNA
aagacttccaccttcccttccac

SEQ ID NO: 1616 - RNA, 21 nt, synthetic construct
  source 1..21: mol_type = other RNA
tggaagggaaggtggaagtct

SEQ ID NO: 1617 - RNA, 23 nt, synthetic construct
  source 1..23: mol_type = other RNA
agacttccaccttcccttccaca

SEQ ID NO: 1618 - RNA, 21 nt, synthetic construct
  source 1..21: mol_type = other RNA
tgctaaatcagtacttccaaa

SEQ ID NO: 1619 - RNA, 23 nt, synthetic construct
  source 1..23: mol_type = other RNA
tttggaagtactgatttagcatg

SEQ ID NO: 1620 - RNA, 21 nt, synthetic construct
  source 1..21: mol_type = other RNA
gctaaatcagtacttccaaag

SEQ ID NO: 1621 - RNA, 23 nt, synthetic construct
  source 1..23: mol_type = other RNA
ctttggaagtactgatttagcat

SEQ ID NO: 1622 - RNA, 21 nt, synthetic construct
  source 1..21: mol_type = other RNA
aacatgctaaatcagtacttc

SEQ ID NO: 1623 - RNA, 23 nt, synthetic construct
  source 1..23: mol_type = other RNA
gaagtactgatttagcatgttgt

SEQ ID NO: 1624 - RNA, 21 nt, synthetic construct
  source 1..21: mol_type = other RNA
caacatgctaaatcagtactt

SEQ ID NO: 1625 - RNA, 23 nt, synthetic construct
  source 1..23: mol_type = other RNA
aagtactgatttagcatgttgtt

SEQ ID NO: 1626 - RNA, 21 nt, synthetic construct
  source 1..21: mol_type = other RNA
ccacaactcaggatgaaaaat

SEQ ID NO: 1627 - RNA, 23 nt, synthetic construct
  source 1..23: mol_type = other RNA
atttttcatcctgagttgtggcg

SEQ ID NO: 1628 - RNA, 21 nt, synthetic construct
  source 1..21: mol_type = other RNA
cacaactcaggatgaaaaatt

SEQ ID NO: 1629 - RNA, 23 nt, synthetic construct
  source 1..23: mol_type = other RNA
aatttttcatcctgagttgtggc

SEQ ID NO: 1630 - RNA, 21 nt, synthetic construct
  source 1..21: mol_type = other RNA
gccgccacaactcaggatgaa

SEQ ID NO: 1631 - RNA, 23 nt, synthetic construct
  source 1..23: mol_type = other RNA
ttcatcctgagttgtggcggcag

SEQ ID NO: 1632 - RNA, 21 nt, synthetic construct
  source 1..21: mol_type = other RNA
tgccgccacaactcaggatga

SEQ ID NO: 1633 - RNA, 23 nt, synthetic construct
  source 1..23: mol_type = other RNA
tcatcctgagttgtggcggcagt

SEQ ID NO: 1634 - RNA, 21 nt, synthetic construct
  source 1..21: mol_type = other RNA
gcaaccgtctggatgatgtgc

SEQ ID NO: 1635 - RNA, 23 nt, synthetic construct
  source 1..23: mol_type = other RNA
gcacatcatccagacggttgccc

SEQ ID NO: 1636 - RNA, 21 nt, synthetic construct
  source 1..21: mol_type = other RNA
caaccgtctggatgatgtgcg

SEQ ID NO: 1637 - RNA, 23 nt, synthetic construct
  source 1..23: mol_type = other RNA
cgcacatcatccagacggttgcc

SEQ ID NO: 1638 - RNA, 21 nt, synthetic construct
  source 1..21: mol_type = other RNA
ctgggcaaccgtctggatgat

SEQ ID NO: 1639 - RNA, 23 nt, synthetic construct
  source 1..23: mol_type = other RNA
atcatccagacggttgcccaggt

SEQ ID NO: 1640 - RNA, 21 nt, synthetic construct
  source 1..21: mol_type = other RNA
cctgggcaaccgtctggatga

SEQ ID NO: 1641 - RNA, 23 nt, synthetic construct
  source 1..23: mol_type = other RNA
tcatccagacggttgcccaggta

SEQ ID NO: 1642 - RNA, 21 nt, synthetic construct
  source 1..21: mol_type = other RNA
gcaaatgatgaagaaactttg

SEQ ID NO: 1643 - RNA, 23 nt, synthetic construct
  source 1..23: mol_type = other RNA
caaagtttcttcatcatttgccc

SEQ ID NO: 1644 - RNA, 21 nt, synthetic construct
  source 1..21: mol_type = other RNA
caaatgatgaagaaactttgg

SEQ ID NO: 1645 - RNA, 23 nt, synthetic construct
  source 1..23: mol_type = other RNA
ccaaagtttcttcatcatttgcc

SEQ ID NO: 1646 - RNA, 21 nt, synthetic construct
  source 1..21: mol_type = other RNA
tggggcaaatgatgaagaaac

SEQ ID NO: 1647 - RNA, 23 nt, synthetic construct
  source 1..23: mol_type = other RNA
gtttcttcatcatttgccccaga

SEQ ID NO: 1648 - RNA, 21 nt, synthetic construct
  source 1..21: mol_type = other RNA
ctggggcaaatgatgaagaaa

SEQ ID NO: 1649 - RNA, 23 nt, synthetic construct
  source 1..23: mol_type = other RNA
tttcttcatcatttgccccagac

SEQ ID NO: 1650 - RNA, 21 nt, synthetic construct
  source 1..21: mol_type = other RNA
ccaaggctgtgtttgtgggga

SEQ ID NO: 1651 - RNA, 23 nt, synthetic construct
  source 1..23: mol_type = other RNA
tccccacaaacacagccttggcg

SEQ ID NO: 1652 - RNA, 21 nt, synthetic construct
  source 1..21: mol_type = other RNA
caaggctgtgtttgtggggag

SEQ ID NO: 1653 - RNA, 23 nt, synthetic construct
  source 1..23: mol_type = other RNA
ctccccacaaacacagccttggc

SEQ ID NO: 1654 - RNA, 21 nt, synthetic construct
  source 1..21: mol_type = other RNA
ggcgccaaggctgtgtttgtg

SEQ ID NO: 1655 - RNA, 23 nt, synthetic construct
  source 1..23: mol_type = other RNA
cacaaacacagccttggcgccaa

SEQ ID NO: 1656 - RNA, 21 nt, synthetic construct
  source 1..21: mol_type = other RNA
tggcgccaaggctgtgtttgt

SEQ ID NO: 1657 - RNA, 23 nt, synthetic construct
  source 1..23: mol_type = other RNA
acaaacacagccttggcgccaag

SEQ ID NO: 1658 - RNA, 21 nt, synthetic construct
  source 1..21: mol_type = other RNA
actgccgccacaactcaggat

SEQ ID NO: 1659 - RNA, 23 nt, synthetic construct
  source 1..23: mol_type = other RNA
atcctgagttgtggcggcagttt

SEQ ID NO: 1660 - RNA, 21 nt, synthetic construct
  source 1..21: mol_type = other RNA
ctgccgccacaactcaggatg

SEQ ID NO: 1661 - RNA, 23 nt, synthetic construct
  source 1..23: mol_type = other RNA
catcctgagttgtggcggcagtt

SEQ ID NO: 1662 - RNA, 21 nt, synthetic construct
  source 1..21: mol_type = other RNA
tcaaactgccgccacaactca

SEQ ID NO: 1663 - RNA, 23 nt, synthetic construct
  source 1..23: mol_type = other RNA
tgagttgtggcggcagtttgaat

SEQ ID NO: 1664 - RNA, 21 nt, synthetic construct
  source 1..21: mol_type = other RNA
ttcaaactgccgccacaactc

SEQ ID NO: 1665 - RNA, 23 nt, synthetic construct
  source 1..23: mol_type = other RNA
gagttgtggcggcagtttgaatc

SEQ ID NO: 1666 - RNA, 21 nt, synthetic construct
  source 1..21: mol_type = other RNA
gggaagatatcaaatggctga

SEQ ID NO: 1667 - RNA, 23 nt, synthetic construct
  source 1..23: mol_type = other RNA
tcagccatttgatatcttcccag

SEQ ID NO: 1668 - RNA, 21 nt, synthetic construct
  source 1..21: mol_type = other RNA
ggaagatatcaaatggctgag

SEQ ID NO: 1669 - RNA, 23 nt, synthetic construct
  source 1..23: mol_type = other RNA
ctcagccatttgatatcttccca

SEQ ID NO: 1670 - RNA, 21 nt, synthetic construct
  source 1..21: mol_type = other RNA
agctgggaagatatcaaatgg

SEQ ID NO: 1671 - RNA, 23 nt, synthetic construct
  source 1..23: mol_type = other RNA
ccatttgatatcttcccagctga

SEQ ID NO: 1672 - RNA, 21 nt, synthetic construct
  source 1..21: mol_type = other RNA
cagctgggaagatatcaaatg

SEQ ID NO: 1673 - RNA, 23 nt, synthetic construct
  source 1..23: mol_type = other RNA
catttgatatcttcccagctgat

SEQ ID NO: 1674 - RNA, 21 nt, synthetic construct
  source 1..21: mol_type = other RNA
aatcagtacttccaaagtcta

SEQ ID NO: 1675 - RNA, 23 nt, synthetic construct
  source 1..23: mol_type = other RNA
tagactttggaagtactgattta

SEQ ID NO: 1676 - RNA, 21 nt, synthetic construct
  source 1..21: mol_type = other RNA
atcagtacttccaaagtctat

SEQ ID NO: 1677 - RNA, 23 nt, synthetic construct
  source 1..23: mol_type = other RNA
atagactttggaagtactgattt

SEQ ID NO: 1678 - RNA, 21 nt, synthetic construct
  source 1..21: mol_type = other RNA
gctaaatcagtacttccaaag

SEQ ID NO: 1679 - RNA, 23 nt, synthetic construct
  source 1..23: mol_type = other RNA
ctttggaagtactgatttagcat

SEQ ID NO: 1680 - RNA, 21 nt, synthetic construct
  source 1..21: mol_type = other RNA
tgctaaatcagtacttccaaa

SEQ ID NO: 1681 - RNA, 23 nt, synthetic construct
  source 1..23: mol_type = other RNA
tttggaagtactgatttagcatg

SEQ ID NO: 1682 - RNA, 21 nt, synthetic construct
  source 1..21: mol_type = other RNA
tcagcatgccaatatgtgtgg

SEQ ID NO: 1683 - RNA, 23 nt, synthetic construct
  source 1..23: mol_type = other RNA
ccacacatattggcatgctgacc

SEQ ID NO: 1684 - RNA, 21 nt, synthetic construct
  source 1..21: mol_type = other RNA
cagcatgccaatatgtgtggg

SEQ ID NO: 1685 - RNA, 23 nt, synthetic construct
  source 1..23: mol_type = other RNA
cccacacatattggcatgctgac

SEQ ID NO: 1686 - RNA, 21 nt, synthetic construct
  source 1..21: mol_type = other RNA
agggtcagcatgccaatatgt

SEQ ID NO: 1687 - RNA, 23 nt, synthetic construct
  source 1..23: mol_type = other RNA
acatattggcatgctgaccctct

SEQ ID NO: 1688 - RNA, 21 nt, synthetic construct
  source 1..21: mol_type = other RNA
gagggtcagcatgccaatatg

SEQ ID NO: 1689 - RNA, 23 nt, synthetic construct
  source 1..23: mol_type = other RNA
catattggcatgctgaccctctg

SEQ ID NO: 1690 - RNA, 21 nt, synthetic construct
  source 1..21: mol_type = other RNA
gcatatgtggctaaagcaata

SEQ ID NO: 1691 - RNA, 23 nt, synthetic construct
  source 1..23: mol_type = other RNA
tattgctttagccacatatgcag

SEQ ID NO: 1692 - RNA, 21 nt, synthetic construct
  source 1..21: mol_type = other RNA
catatgtggctaaagcaatag

SEQ ID NO: 1693 - RNA, 23 nt, synthetic construct
  source 1..23: mol_type = other RNA
ctattgctttagccacatatgca

SEQ ID NO: 1694 - RNA, 21 nt, synthetic construct
  source 1..21: mol_type = other RNA
tgctgcatatgtggctaaagc

SEQ ID NO: 1695 - RNA, 23 nt, synthetic construct
  source 1..23: mol_type = other RNA
gctttagccacatatgcagcaag

SEQ ID NO: 1696 - RNA, 21 nt, synthetic construct
  source 1..21: mol_type = other RNA
ttgctgcatatgtggctaaag

SEQ ID NO: 1697 - RNA, 23 nt, synthetic construct
  source 1..23: mol_type = other RNA
ctttagccacatatgcagcaagt

SEQ ID NO: 1698 - RNA, 21 nt, synthetic construct
  source 1..21: mol_type = other RNA
aaatgatgaagaaactttggc

SEQ ID NO: 1699 - RNA, 23 nt, synthetic construct
  source 1..23: mol_type = other RNA
gccaaagtttcttcatcatttgc

SEQ ID NO: 1700 - RNA, 21 nt, synthetic construct
  source 1..21: mol_type = other RNA
aatgatgaagaaactttggct

SEQ ID NO: 1701 - RNA, 23 nt, synthetic construct
  source 1..23: mol_type = other RNA
agccaaagtttcttcatcatttg

SEQ ID NO: 1702 - RNA, 21 nt, synthetic construct
  source 1..21: mol_type = other RNA
gggcaaatgatgaagaaactt

SEQ ID NO: 1703 - RNA, 23 nt, synthetic construct
  source 1..23: mol_type = other RNA
aagtttcttcatcatttgcccca

SEQ ID NO: 1704 - RNA, 21 nt, synthetic construct
  source 1..21: mol_type = other RNA
ggggcaaatgatgaagaaact

SEQ ID NO: 1705 - RNA, 23 nt, synthetic construct
  source 1..23: mol_type = other RNA
agtttcttcatcatttgccccag

SEQ ID NO: 1706 - RNA, 21 nt, synthetic construct
  source 1..21: mol_type = other RNA
gagatactaaaggaagaattc

SEQ ID NO: 1707 - RNA, 23 nt, synthetic construct
  source 1..23: mol_type = other RNA
gaattcttcctttagtatctcga

SEQ ID NO: 1708 - RNA, 21 nt, synthetic construct
  source 1..21: mol_type = other RNA
agatactaaaggaagaattcc

SEQ ID NO: 1709 - RNA, 23 nt, synthetic construct
  source 1..23: mol_type = other RNA
ggaattcttcctttagtatctcg

SEQ ID NO: 1710 - RNA, 21 nt, synthetic construct
  source 1..21: mol_type = other RNA
cctcgagatactaaaggaaga

SEQ ID NO: 1711 - RNA, 23 nt, synthetic construct
  source 1..23: mol_type = other RNA
tcttcctttagtatctcgaggac

SEQ ID NO: 1712 - RNA, 21 nt, synthetic construct
  source 1..21: mol_type = other RNA
tcctcgagatactaaaggaag

SEQ ID NO: 1713 - RNA, 23 nt, synthetic construct
  source 1..23: mol_type = other RNA
cttcctttagtatctcgaggaca

SEQ ID NO: 1714 - RNA, 21 nt, synthetic construct
  source 1..21: mol_type = other RNA
acaactcaggatgaaaaattt

SEQ ID NO: 1715 - RNA, 23 nt, synthetic construct
  source 1..23: mol_type = other RNA
aaatttttcatcctgagttgtgg

SEQ ID NO: 1716 - RNA, 21 nt, synthetic construct
  source 1..21: mol_type = other RNA
caactcaggatgaaaaatttt

SEQ ID NO: 1717 - RNA, 23 nt, synthetic construct
  source 1..23: mol_type = other RNA
aaaatttttcatcctgagttgtg

SEQ ID NO: 1718 - RNA, 21 nt, synthetic construct
  source 1..21: mol_type = other RNA
cgccacaactcaggatgaaaa

SEQ ID NO: 1719 - RNA, 23 nt, synthetic construct
  source 1..23: mol_type = other RNA
ttttcatcctgagttgtggcggc

SEQ ID NO: 1720 - RNA, 21 nt, synthetic construct
  source 1..21: mol_type = other RNA
ccgccacaactcaggatgaaa

SEQ ID NO: 1721 - RNA, 23 nt, synthetic construct
  source 1..23: mol_type = other RNA
tttcatcctgagttgtggcggca

SEQ ID NO: 1722 - RNA, 21 nt, synthetic construct
  source 1..21: mol_type = other RNA
agggaaggtggaagtcttcct

SEQ ID NO: 1723 - RNA, 23 nt, synthetic construct
  source 1..23: mol_type = other RNA
aggaagacttccaccttcccttc

SEQ ID NO: 1724 - RNA, 21 nt, synthetic construct
  source 1..21: mol_type = other RNA
gggaaggtggaagtcttcctg

SEQ ID NO: 1725 - RNA, 23 nt, synthetic construct
  source 1..23: mol_type = other RNA
caggaagacttccaccttccctt

SEQ ID NO: 1726 - RNA, 21 nt, synthetic construct
  source 1..21: mol_type = other RNA
tggaagggaaggtggaagtct

SEQ ID NO: 1727 - RNA, 23 nt, synthetic construct
  source 1..23: mol_type = other RNA
agacttccaccttcccttccaca

SEQ ID NO: 1728 - RNA, 21 nt, synthetic construct
  source 1..21: mol_type = other RNA
gtggaagggaaggtggaagtc

SEQ ID NO: 1729 - RNA, 23 nt, synthetic construct
  source 1..23: mol_type = other RNA
gacttccaccttcccttccacag

SEQ ID NO: 1730 - RNA, 21 nt, synthetic construct
  source 1..21: mol_type = other RNA
ggcgagcttgccactgtgaga

SEQ ID NO: 1731 - RNA, 23 nt, synthetic construct
  source 1..23: mol_type = other RNA
tctcacagtggcaagctcgccgt

SEQ ID NO: 1732 - RNA, 21 nt, synthetic construct
  source 1..21: mol_type = other RNA
gcgagcttgccactgtgagag

SEQ ID NO: 1733 - RNA, 23 nt, synthetic construct
  source 1..23: mol_type = other RNA
ctctcacagtggcaagctcgccg

SEQ ID NO: 1734 - RNA, 21 nt, synthetic construct
  source 1..21: mol_type = other RNA
ggacggcgagcttgccactgt

SEQ ID NO: 1735 - RNA, 23 nt, synthetic construct
  source 1..23: mol_type = other RNA
acagtggcaagctcgccgtccac

SEQ ID NO: 1736 - RNA, 21 nt, synthetic construct
  source 1..21: mol_type = other RNA
tggacggcgagcttgccactg

SEQ ID NO: 1737 - RNA, 23 nt, synthetic construct
  source 1..23: mol_type = other RNA
cagtggcaagctcgccgtccaca

SEQ ID NO: 1738 - RNA, 21 nt, synthetic construct
  source 1..21: mol_type = other RNA
atgtgcgtaacagattcaaac

SEQ ID NO: 1739 - RNA, 23 nt, synthetic construct
  source 1..23: mol_type = other RNA
gtttgaatctgttacgcacatca

SEQ ID NO: 1740 - RNA, 21 nt, synthetic construct
  source 1..21: mol_type = other RNA
tgtgcgtaacagattcaaact

SEQ ID NO: 1741 - RNA, 23 nt, synthetic construct
  source 1..23: mol_type = other RNA
agtttgaatctgttacgcacatc

SEQ ID NO: 1742 - RNA, 21 nt, synthetic construct
  source 1..21: mol_type = other RNA
gatgatgtgcgtaacagattc

SEQ ID NO: 1743 - RNA, 23 nt, synthetic construct
  source 1..23: mol_type = other RNA
gaatctgttacgcacatcatcca

SEQ ID NO: 1744 - RNA, 21 nt, synthetic construct
  source 1..21: mol_type = other RNA
ggatgatgtgcgtaacagatt

SEQ ID NO: 1745 - RNA, 23 nt, synthetic construct
  source 1..23: mol_type = other RNA
aatctgttacgcacatcatccag

SEQ ID NO: 1746 - RNA, 21 nt, synthetic construct
  source 1..21: mol_type = other RNA
gggtcagcatgccaatatgtg

SEQ ID NO: 1747 - RNA, 23 nt, synthetic construct
  source 1..23: mol_type = other RNA
cacatattggcatgctgaccctc

SEQ ID NO: 1748 - RNA, 21 nt, synthetic construct
  source 1..21: mol_type = other RNA
ggtcagcatgccaatatgtgt

SEQ ID NO: 1749 - RNA, 23 nt, synthetic construct
  source 1..23: mol_type = other RNA
acacatattggcatgctgaccct

SEQ ID NO: 1750 - RNA, 21 nt, synthetic construct
  source 1..21: mol_type = other RNA
cagagggtcagcatgccaata

SEQ ID NO: 1751 - RNA, 23 nt, synthetic construct
  source 1..23: mol_type = other RNA
tattggcatgctgaccctctgtc

SEQ ID NO: 1752 - RNA, 21 nt, synthetic construct
  source 1..21: mol_type = other RNA
acagagggtcagcatgccaat

SEQ ID NO: 1753 - RNA, 23 nt, synthetic construct
  source 1..23: mol_type = other RNA
attggcatgctgaccctctgtcc

SEQ ID NO: 1754 - RNA, 21 nt, synthetic construct
  source 1..21: mol_type = other RNA
gcttgaatgggatcttggtgt

SEQ ID NO: 1755 - RNA, 23 nt, synthetic construct
  source 1..23: mol_type = other RNA
acaccaagatcccattcaagcca

SEQ ID NO: 1756 - RNA, 21 nt, synthetic construct
  source 1..21: mol_type = other RNA
cttgaatgggatcttggtgtc

SEQ ID NO: 1757 - RNA, 23 nt, synthetic construct
  source 1..23: mol_type = other RNA
gacaccaagatcccattcaagcc

SEQ ID NO: 1758 - RNA, 21 nt, synthetic construct
  source 1..21: mol_type = other RNA
catggcttgaatgggatcttg

SEQ ID NO: 1759 - RNA, 23 nt, synthetic construct
  source 1..23: mol_type = other RNA
caagatcccattcaagccatgtt

SEQ ID NO: 1760 - RNA, 21 nt, synthetic construct
  source 1..21: mol_type = other RNA
acatggcttgaatgggatctt

SEQ ID NO: 1761 - RNA, 23 nt, synthetic construct
  source 1..23: mol_type = other RNA
aagatcccattcaagccatgttt

SEQ ID NO: 1762 - RNA, 21 nt, synthetic construct
  source 1..21: mol_type = other RNA
tcaaatggctgagaagactga

SEQ ID NO: 1763 - RNA, 23 nt, synthetic construct
  source 1..23: mol_type = other RNA
tcagtcttctcagccatttgata

SEQ ID NO: 1764 - RNA, 21 nt, synthetic construct
  source 1..21: mol_type = other RNA
caaatggctgagaagactgac

SEQ ID NO: 1765 - RNA, 23 nt, synthetic construct
  source 1..23: mol_type = other RNA
gtcagtcttctcagccatttgat

SEQ ID NO: 1766 - RNA, 21 nt, synthetic construct
  source 1..21: mol_type = other RNA
gatatcaaatggctgagaaga

SEQ ID NO: 1767 - RNA, 23 nt, synthetic construct
  source 1..23: mol_type = other RNA
tcttctcagccatttgatatctt

SEQ ID NO: 1768 - RNA, 21 nt, synthetic construct
  source 1..21: mol_type = other RNA
agatatcaaatggctgagaag

SEQ ID NO: 1769 - RNA, 23 nt, synthetic construct
  source 1..23: mol_type = other RNA
cttctcagccatttgatatcttc

SEQ ID NO: 1770 - RNA, 21 nt, synthetic construct
  source 1..21: mol_type = other RNA
gaaagtcatcgacaagacatt

SEQ ID NO: 1771 - RNA, 23 nt, synthetic construct
  source 1..23: mol_type = other RNA
aatgtcttgtcgatgactttcac

SEQ ID NO: 1772 - RNA, 21 nt, synthetic construct
  source 1..21: mol_type = other RNA
aaagtcatcgacaagacattg

SEQ ID NO: 1773 - RNA, 23 nt, synthetic construct
  source 1..23: mol_type = other RNA
caatgtcttgtcgatgactttca

SEQ ID NO: 1774 - RNA, 21 nt, synthetic construct
  source 1..21: mol_type = other RNA
atgtgaaagtcatcgacaaga

SEQ ID NO: 1775 - RNA, 23 nt, synthetic construct
  source 1..23: mol_type = other RNA
tcttgtcgatgactttcacattc

SEQ ID NO: 1776 - RNA, 21 nt, synthetic construct
  source 1..21: mol_type = other RNA
aatgtgaaagtcatcgacaag

SEQ ID NO: 1777 - RNA, 23 nt, synthetic construct
  source 1..23: mol_type = other RNA
cttgtcgatgactttcacattct

SEQ ID NO: 1778 - RNA, 21 nt, synthetic construct
  source 1..21: mol_type = other RNA
ggctaatttgtatcaatgatt

SEQ ID NO: 1779 - RNA, 23 nt, synthetic construct
  source 1..23: mol_type = other RNA
aatcattgatacaaattagccgg

SEQ ID NO: 1780 - RNA, 21 nt, synthetic construct
  source 1..21: mol_type = other RNA
gctaatttgtatcaatgatta

SEQ ID NO: 1781 - RNA, 23 nt, synthetic construct
  source 1..23: mol_type = other RNA
taatcattgatacaaattagccg

SEQ ID NO: 1782 - RNA, 21 nt, synthetic construct
  source 1..21: mol_type = other RNA
ccccggctaatttgtatcaat

SEQ ID NO: 1783 - RNA, 23 nt, synthetic construct
  source 1..23: mol_type = other RNA
attgatacaaattagccggggga

SEQ ID NO: 1784 - RNA, 21 nt, synthetic construct
  source 1..21: mol_type = other RNA
cccccggctaatttgtatcaa

SEQ ID NO: 1785 - RNA, 23 nt, synthetic construct
  source 1..23: mol_type = other RNA
ttgatacaaattagccgggggag

SEQ ID NO: 1786 - RNA, 21 nt, synthetic construct
  source 1..21: mol_type = other RNA
tgtcgacttctgttttaggac

SEQ ID NO: 1787 - RNA, 23 nt, synthetic construct
  source 1..23: mol_type = other RNA
gtcctaaaacagaagtcgacaga

SEQ ID NO: 1788 - RNA, 21 nt, synthetic construct
  source 1..21: mol_type = other RNA
gtcgacttctgttttaggaca

SEQ ID NO: 1789 - RNA, 23 nt, synthetic construct
  source 1..23: mol_type = other RNA
tgtcctaaaacagaagtcgacag

SEQ ID NO: 1790 - RNA, 21 nt, synthetic construct
  source 1..21: mol_type = other RNA
gatctgtcgacttctgtttta

SEQ ID NO: 1791 - RNA, 23 nt, synthetic construct
  source 1..23: mol_type = other RNA
taaaacagaagtcgacagatctg

SEQ ID NO: 1792 - RNA, 21 nt, synthetic construct
  source 1..21: mol_type = other RNA
agatctgtcgacttctgtttt

SEQ ID NO: 1793 - RNA, 23 nt, synthetic construct
  source 1..23: mol_type = other RNA
aaaacagaagtcgacagatctgt

SEQ ID NO: 1794 - RNA, 21 nt, synthetic construct
  source 1..21: mol_type = other RNA
ccgagaagtcaccaagaagct

SEQ ID NO: 1795 - RNA, 23 nt, synthetic construct
  source 1..23: mol_type = other RNA
agcttcttggtgacttctcggtc

SEQ ID NO: 1796 - RNA, 21 nt, synthetic construct
  source 1..21: mol_type = other RNA
cgagaagtcaccaagaagcta

SEQ ID NO: 1797 - RNA, 23 nt, synthetic construct
  source 1..23: mol_type = other RNA
tagcttcttggtgacttctcggt

SEQ ID NO: 1798 - RNA, 21 nt, synthetic construct
  source 1..21: mol_type = other RNA
aggaccgagaagtcaccaaga

SEQ ID NO: 1799 - RNA, 23 nt, synthetic construct
  source 1..23: mol_type = other RNA
tcttggtgacttctcggtccttg

SEQ ID NO: 1800 - RNA, 21 nt, synthetic construct
  source 1..21: mol_type = other RNA
aaggaccgagaagtcaccaag

SEQ ID NO: 1801 - RNA, 23 nt, synthetic construct
  source 1..23: mol_type = other RNA
cttggtgacttctcggtccttgt

SEQ ID NO: 1802 - RNA, 21 nt, synthetic construct
  source 1..21: mol_type = other RNA
aaacatggcttgaatgggatc

SEQ ID NO: 1803 - RNA, 23 nt, synthetic construct
  source 1..23: mol_type = other RNA
gatcccattcaagccatgtttaa

SEQ ID NO: 1804 - RNA, 21 nt, synthetic construct
  source 1..21: mol_type = other RNA
aacatggcttgaatgggatct

SEQ ID NO: 1805 - RNA, 23 nt, synthetic construct
  source 1..23: mol_type = other RNA
agatcccattcaagccatgttta

SEQ ID NO: 1806 - RNA, 21 nt, synthetic construct
  source 1..21: mol_type = other RNA
tgttaaacatggcttgaatgg

SEQ ID NO: 1807 - RNA, 23 nt, synthetic construct
  source 1..23: mol_type = other RNA
ccattcaagccatgtttaacagc

SEQ ID NO: 1808 - RNA, 21 nt, synthetic construct
  source 1..21: mol_type = other RNA
ctgttaaacatggcttgaatg

SEQ ID NO: 1809 - RNA, 23 nt, synthetic construct
  source 1..23: mol_type = other RNA
cattcaagccatgtttaacagcc

SEQ ID NO: 1810 - RNA, 21 nt, synthetic construct
  source 1..21: mol_type = other RNA
gacttgctgcatatgtggcta

SEQ ID NO: 1811 - RNA, 23 nt, synthetic construct
  source 1..23: mol_type = other RNA
tagccacatatgcagcaagtcca

SEQ ID NO: 1812 - RNA, 21 nt, synthetic construct
  source 1..21: mol_type = other RNA
acttgctgcatatgtggctaa

SEQ ID NO: 1813 - RNA, 23 nt, synthetic construct
  source 1..23: mol_type = other RNA
ttagccacatatgcagcaagtcc

SEQ ID NO: 1814 - RNA, 21 nt, synthetic construct
  source 1..21: mol_type = other RNA
agtggacttgctgcatatgtg

SEQ ID NO: 1815 - RNA, 23 nt, synthetic construct
  source 1..23: mol_type = other RNA
cacatatgcagcaagtccactgt

SEQ ID NO: 1816 - RNA, 21 nt, synthetic construct
  source 1..21: mol_type = other RNA
cagtggacttgctgcatatgt

SEQ ID NO: 1817 - RNA, 23 nt, synthetic construct
  source 1..23: mol_type = other RNA
acatatgcagcaagtccactgtc

SEQ ID NO: 1818 - RNA, 21 nt, synthetic construct
  source 1..21: mol_type = other RNA
taaatcagtacttccaaagtc

SEQ ID NO: 1819 - RNA, 23 nt, synthetic construct
  source 1..23: mol_type = other RNA
gactttggaagtactgatttagc

SEQ ID NO: 1820 - RNA, 21 nt, synthetic construct
  source 1..21: mol_type = other RNA
aaatcagtacttccaaagtct

SEQ ID NO: 1821 - RNA, 23 nt, synthetic construct
  source 1..23: mol_type = other RNA
agactttggaagtactgatttag

SEQ ID NO: 1822 - RNA, 21 nt, synthetic construct
  source 1..21: mol_type = other RNA
atgctaaatcagtacttccaa

SEQ ID NO: 1823 - RNA, 23 nt, synthetic construct
  source 1..23: mol_type = other RNA
ttggaagtactgatttagcatgt

SEQ ID NO: 1824 - RNA, 21 nt, synthetic construct
  source 1..21: mol_type = other RNA
catgctaaatcagtacttcca

SEQ ID NO: 1825 - RNA, 23 nt, synthetic construct
  source 1..23: mol_type = other RNA
tggaagtactgatttagcatgtt

SEQ ID NO: 1826 - RNA, 21 nt, synthetic construct
  source 1..21: mol_type = other RNA
tcctcaattgaagaagtggcg

SEQ ID NO: 1827 - RNA, 23 nt, synthetic construct
  source 1..23: mol_type = other RNA
cgccacttcttcaattgaggagg

SEQ ID NO: 1828 - RNA, 21 nt, synthetic construct
  source 1..21: mol_type = other RNA
cctcaattgaagaagtggcgg

SEQ ID NO: 1829 - RNA, 23 nt, synthetic construct
  source 1..23: mol_type = other RNA
ccgccacttcttcaattgaggag

SEQ ID NO: 1830 - RNA, 21 nt, synthetic construct
  source 1..21: mol_type = other RNA
cacctcctcaattgaagaagt

SEQ ID NO: 1831 - RNA, 23 nt, synthetic construct
  source 1..23: mol_type = other RNA
acttcttcaattgaggaggtggc

SEQ ID NO: 1832 - RNA, 21 nt, synthetic construct
  source 1..21: mol_type = other RNA
ccacctcctcaattgaagaag

SEQ ID NO: 1833 - RNA, 23 nt, synthetic construct
  source 1..23: mol_type = other RNA
cttcttcaattgaggaggtggcc

SEQ ID NO: 1834 - RNA, 21 nt, synthetic construct
  source 1..21: mol_type = other RNA
caagatgtcctcgagatacta

SEQ ID NO: 1835 - RNA, 23 nt, synthetic construct
  source 1..23: mol_type = other RNA
tagtatctcgaggacatcttgaa

SEQ ID NO: 1836 - RNA, 21 nt, synthetic construct
  source 1..21: mol_type = other RNA
aagatgtcctcgagatactaa

SEQ ID NO: 1837 - RNA, 23 nt, synthetic construct
  source 1..23: mol_type = other RNA
ttagtatctcgaggacatcttga

SEQ ID NO: 1838 - RNA, 21 nt, synthetic construct
  source 1..21: mol_type = other RNA
tgttcaagatgtcctcgagat

SEQ ID NO: 1839 - RNA, 23 nt, synthetic construct
  source 1..23: mol_type = other RNA
atctcgaggacatcttgaacacc

SEQ ID NO: 1840 - RNA, 21 nt, synthetic construct
  source 1..21: mol_type = other RNA
gtgttcaagatgtcctcgaga

SEQ ID NO: 1841 - RNA, 23 nt, synthetic construct
  source 1..23: mol_type = other RNA
tctcgaggacatcttgaacacct

SEQ ID NO: 1842 - RNA, 21 nt, synthetic construct
  source 1..21: mol_type = other RNA
acatgctaaatcagtacttcc

SEQ ID NO: 1843 - RNA, 23 nt, synthetic construct
  source 1..23: mol_type = other RNA
ggaagtactgatttagcatgttg

SEQ ID NO: 1844 - RNA, 21 nt, synthetic construct
  source 1..21: mol_type = other RNA
catgctaaatcagtacttcca

SEQ ID NO: 1845 - RNA, 23 nt, synthetic construct
  source 1..23: mol_type = other RNA
tggaagtactgatttagcatgtt

SEQ ID NO: 1846 - RNA, 21 nt, synthetic construct
  source 1..21: mol_type = other RNA
aacaacatgctaaatcagtac

SEQ ID NO: 1847 - RNA, 23 nt, synthetic construct
  source 1..23: mol_type = other RNA
gtactgatttagcatgttgttca

SEQ ID NO: 1848 - RNA, 21 nt, synthetic construct
  source 1..21: mol_type = other RNA
gaacaacatgctaaatcagta

SEQ ID NO: 1849 - RNA, 23 nt, synthetic construct
  source 1..23: mol_type = other RNA
tactgatttagcatgttgttcat

SEQ ID NO: 1850 - RNA, 21 nt, synthetic construct
  source 1..21: mol_type = other RNA
gaaaggcactgatgttctgaa

SEQ ID NO: 1851 - RNA, 23 nt, synthetic construct
  source 1..23: mol_type = other RNA
ttcagaacatcagtgcctttccg

SEQ ID NO: 1852 - RNA, 21 nt, synthetic construct
  source 1..21: mol_type = other RNA
aaaggcactgatgttctgaaa

SEQ ID NO: 1853 - RNA, 23 nt, synthetic construct
  source 1..23: mol_type = other RNA
tttcagaacatcagtgcctttcc

SEQ ID NO: 1854 - RNA, 21 nt, synthetic construct
  source 1..21: mol_type = other RNA
tgcggaaaggcactgatgttc

SEQ ID NO: 1855 - RNA, 23 nt, synthetic construct
  source 1..23: mol_type = other RNA
gaacatcagtgcctttccgcaca

SEQ ID NO: 1856 - RNA, 21 nt, synthetic construct
  source 1..21: mol_type = other RNA
gtgcggaaaggcactgatgtt

SEQ ID NO: 1857 - RNA, 23 nt, synthetic construct
  source 1..23: mol_type = other RNA
aacatcagtgcctttccgcacac

SEQ ID NO: 1858 - RNA, 21 nt, synthetic construct
  source 1..21: mol_type = other RNA
gtcagcatgccaatatgtgtg

SEQ ID NO: 1859 - RNA, 23 nt, synthetic construct
  source 1..23: mol_type = other RNA
cacacatattggcatgctgaccc

SEQ ID NO: 1860 - RNA, 21 nt, synthetic construct
  source 1..21: mol_type = other RNA
tcagcatgccaatatgtgtgg

SEQ ID NO: 1861 - RNA, 23 nt, synthetic construct
  source 1..23: mol_type = other RNA
ccacacatattggcatgctgacc

SEQ ID NO: 1862 - RNA, 21 nt, synthetic construct
  source 1..21: mol_type = other RNA
gagggtcagcatgccaatatg

SEQ ID NO: 1863 - RNA, 23 nt, synthetic construct
  source 1..23: mol_type = other RNA
catattggcatgctgaccctctg

SEQ ID NO: 1864 - RNA, 21 nt, synthetic construct
  source 1..21: mol_type = other RNA
agagggtcagcatgccaatat

SEQ ID NO: 1865 - RNA, 23 nt, synthetic construct
  source 1..23: mol_type = other RNA
atattggcatgctgaccctctgt

SEQ ID NO: 1866 - RNA, 21 nt, synthetic construct
  source 1..21: mol_type = other RNA
gatgctccggaatgttgctga

SEQ ID NO: 1867 - RNA, 23 nt, synthetic construct
  source 1..23: mol_type = other RNA
tcagcaacattccggagcatcct

SEQ ID NO: 1868 - RNA, 21 nt, synthetic construct
  source 1..21: mol_type = other RNA
atgctccggaatgttgctgaa

SEQ ID NO: 1869 - RNA, 23 nt, synthetic construct
  source 1..23: mol_type = other RNA
ttcagcaacattccggagcatcc

SEQ ID NO: 1870 - RNA, 21 nt, synthetic construct
  source 1..21: mol_type = other RNA
caaggatgctccggaatgttg

SEQ ID NO: 1871 - RNA, 23 nt, synthetic construct
  source 1..23: mol_type = other RNA
caacattccggagcatccttgga

SEQ ID NO: 1872 - RNA, 21 nt, synthetic construct
  source 1..21: mol_type = other RNA
ccaaggatgctccggaatgtt

SEQ ID NO: 1873 - RNA, 23 nt, synthetic construct
  source 1..23: mol_type = other RNA
aacattccggagcatccttggat

SEQ ID NO: 1874 - RNA, 21 nt, synthetic construct
  source 1..21: mol_type = other RNA
gcgtaacagattcaaactgcc

SEQ ID NO: 1875 - RNA, 23 nt, synthetic construct
  source 1..23: mol_type = other RNA
ggcagtttgaatctgttacgcac

SEQ ID NO: 1876 - RNA, 21 nt, synthetic construct
  source 1..21: mol_type = other RNA
cgtaacagattcaaactgccg

SEQ ID NO: 1877 - RNA, 23 nt, synthetic construct
  source 1..23: mol_type = other RNA
cggcagtttgaatctgttacgca

SEQ ID NO: 1878 - RNA, 21 nt, synthetic construct
  source 1..21: mol_type = other RNA
atgtgcgtaacagattcaaac

SEQ ID NO: 1879 - RNA, 23 nt, synthetic construct
  source 1..23: mol_type = other RNA
gtttgaatctgttacgcacatca

SEQ ID NO: 1880 - RNA, 21 nt, synthetic construct
  source 1..21: mol_type = other RNA
gatgtgcgtaacagattcaaa

SEQ ID NO: 1881 - RNA, 23 nt, synthetic construct
  source 1..23: mol_type = other RNA
tttgaatctgttacgcacatcat

SEQ ID NO: 1882 - RNA, 21 nt, synthetic construct
  source 1..21: mol_type = other RNA
agagaagatgggctacaaggc

SEQ ID NO: 1883 - RNA, 23 nt, synthetic construct
  source 1..23: mol_type = other RNA
gccttgtagcccatcttctctgc

SEQ ID NO: 1884 - RNA, 21 nt, synthetic construct
  source 1..21: mol_type = other RNA
gagaagatgggctacaaggcc

SEQ ID NO: 1885 - RNA, 23 nt, synthetic construct
  source 1..23: mol_type = other RNA
ggccttgtagcccatcttctctg

SEQ ID NO: 1886 - RNA, 21 nt, synthetic construct
  source 1..21: mol_type = other RNA
aggcagagaagatgggctaca

SEQ ID NO: 1887 - RNA, 23 nt, synthetic construct
  source 1..23: mol_type = other RNA
tgtagcccatcttctctgcctgc

SEQ ID NO: 1888 - RNA, 21 nt, synthetic construct
  source 1..21: mol_type = other RNA
caggcagagaagatgggctac

SEQ ID NO: 1889 - RNA, 23 nt, synthetic construct
  source 1..23: mol_type = other RNA
gtagcccatcttctctgcctgcc

SEQ ID NO: 1890 - RNA, 21 nt, synthetic construct
  source 1..21: mol_type = other RNA
  modified_base 1: mod_base = OTHER; note = 2'-O-methyladenosine-3'- phosphorothioate
  modified_base 2: mod_base = OTHER; note = 2'-O-methyluridine-3'-phosphorothioate
  modified_base 3: mod_base = OTHER; note = 2'-O-methylguanosine-3'-phosphate
  modified_base 4: mod_base = OTHER; note = 2'-O-methyluridine-3'-phosphate
  modified_base 5: mod_base = OTHER; note = 2'-O-methyladenosine-3'-phosphate
  modified_base 6: mod_base = OTHER; note = 2'-O-methyluridine-3'-phosphate
  modified_base 7: mod_base = OTHER; note = 2'-fluoroguanosine-3'-phosphate
  modified_base 8: mod_base = OTHER; note = 2'-O-methyluridine-3'-phosphate
  modified_base 9: mod_base = OTHER; note = 2'-fluorouridine-3'-phosphate
  modified_base 10: mod_base = OTHER; note = 2'-fluoroadenosine-3'-phosphate
  modified_base 11: mod_base = OTHER; note = 2'-fluorocytidine-3'-phosphate
  modified_base 12: mod_base = OTHER; note = 2'-O-methyluridine-3'-phosphate
  modified_base 13: mod_base = OTHER; note = 2'-O-methyluridine-3'-phosphate
  modified_base 14: mod_base = OTHER; note = 2'-O-methylcytidine-3'-phosphate
  modified_base 15: mod_base = OTHER; note = 2'-O-methyluridine-3'-phosphate
  modified_base 16: mod_base = OTHER; note = 2'-O-methyluridine-3'-phosphate
  modified_base 17: mod_base = OTHER; note = 2'-O-methyladenosine-3'-phosphate
  modified_base 18: mod_base = OTHER; note = 2'-O-methylguanosine-3'-phosphate
  modified_base 19: mod_base = OTHER; note = 2'-O-methyladenosine-3'-phosphate
  modified_base 20: mod_base = OTHER; note = 2'-O-methylguanosine-3'-phosphate
  modified_base 21: mod_base = OTHER; note 2'-O-methyladenosine-3'-phosphate-N-[tris(GalNAc-alkyl)-ami dodecanoyl)]-4-hydroxyprolinol (Hyp-(GalNAc-alkyl)3)
atgtatgttacttcttagaga

SEQ ID NO: 1891 - RNA, 23 nt, synthetic construct
  source 1..23: mol_type = other RNA
  modified_base 1: mod_base = OTHER; note = 2'-O-methyluridine-3'-phosphorothioate
  modified_base 2: mod_base = OTHER; note = 2'-fluorocytidine-3'-phosphorothioate
  modified_base 3: mod_base = OTHER; note = 2'-O-methyluridine-3'-phosphate
  modified_base 4: mod_base = OTHER; note = 2'-O-methylcytidine-3'-phosphate
  modified_base 5: mod_base = OTHER; note = 2'-O-methyluridine-3'-phosphate
  modified_base 6: mod_base = OTHER; note = 2'-fluoroadenosine-3'-phosphate
  modified_base 7: mod_base = OTHER; note = 2'-O-methyladenosine-3'-phosphate
  modified_base 8: mod_base = OTHER; note = 2'-fluoroguanosine-3'-phosphate
  modified_base 9: mod_base = OTHER; note = 2'-fluoroadenosine-3'-phosphate
  modified_base 10: mod_base = OTHER; note = 2'-O-methyladenosine-3'-phosphate
  modified_base 11: mod_base = OTHER; note = 2'-O-methylguanosine-3'-phosphate
  modified_base 12: mod_base = OTHER; note = 2'-O-methyluridine-3'-phosphate
  modified_base 13: mod_base = OTHER; note = 2'-O-methyladenosine-3'-phosphate
  modified_base 14: mod_base = OTHER; note = 2'-fluoroadenosine-3'-phosphate
  modified_base 15: mod_base = OTHER; note = 2'-O-methylcytidine-3'-phosphate
  modified_base 16: mod_base = OTHER; note = 2'-fluoroadenosine-3'-phosphate
  modified_base 17: mod_base = OTHER; note = 2'-O-methyluridine-3'-phosphate
  modified_base 18: mod_base = OTHER; note = 2'-O-methyladenosine-3'-phosphate
  modified_base 19: mod_base = OTHER; note = 2'-O-methylcytidine-3'-phosphate
  modified_base 20: mod_base = OTHER; note = 2'-O-methyladenosine-3'-phosphate
  modified_base 21: mod_base = OTHER; note = 2'-O-methyluridine-3'-phosphorothioate
  modified_base 22: mod_base = OTHER; note = 2'-O-methylcytidine-3'- phosphorothioate
  modified_base 23: mod_base = OTHER; note = 2'-O-methylcytidine-3'-phosphate
tctctaagaagtaacatacatcc

SEQ ID NO: 1892 - RNA, 21 nt, synthetic construct
  source 1..21: mol_type = other RNA
  modified_base 1: mod_base = OTHER; note = 2'-O-methyluridine-3'-phosphorothioate
  modified_base 2: mod_base = OTHER; note = 2'-O-methylguanosine-3'- phosphorothioate
  modified_base 3: mod_base = OTHER; note = 2'-O-methyluridine-3'-phosphate
  modified_base 4: mod_base = OTHER; note = 2'-O-methyladenosine-3'-phosphate
  modified_base 5: mod_base = OTHER; note = 2'-O-methyluridine-3'-phosphate
  modified_base 6: mod_base = OTHER; note = 2'-O-methylguanosine-3'-phosphate
  modified_base 7: mod_base = OTHER; note = 2'-fluorouridine-3'-phosphate
  modified_base 8: mod_base = OTHER; note = 2'-O-methyluridine-3'-phosphate
  modified_base 9: mod_base = OTHER; note = 2'-fluoroadenosine-3'-phosphate
  modified_base 10: mod_base = OTHER; note = 2'-fluorocytidine-3'-phosphate
  modified_base 11: mod_base = OTHER; note = 2'-fluorouridine-3'-phosphate
  modified_base 12: mod_base = OTHER; note = 2'-O-methyluridine-3'-phosphate
  modified_base 13: mod_base = OTHER; note = 2'-O-methylcytidine-3'-phosphate
  modified_base 14: mod_base = OTHER; note = 2'-O-methyluridine-3'-phosphate
  modified_base 15: mod_base = OTHER; note = 2'-O-methyluridine-3'-phosphate
  modified_base 16: mod_base = OTHER; note = 2'-O-methyladenosine-3'-phosphate
  modified_base 17: mod_base = OTHER; note = 2'-O-methylguanosine-3'-phosphate
  modified_base 18: mod_base = OTHER; note = 2'-O-methyladenosine-3'-phosphate
  modified_base 19: mod_base = OTHER; note = 2'-O-methylguanosine-3'-phosphate
  modified_base 20: mod_base = OTHER; note = 2'-O-methyladenosine-3'-phosphate
  modified_base 21: mod_base = OTHER; note 2'-O-methylguanosine-3'-phosphate-N-[tris(GalNAc-alkyl)-ami dodecanoyl)]-4-hydroxyprolinol (Hyp-(GalNAc-alkyl)3)
tgtatgttacttcttagagag

SEQ ID NO: 1893 - RNA, 23 nt, synthetic construct
  source 1..23: mol_type = other RNA
  modified_base 1: mod_base = OTHER; note = 2'-O-methylcytidine-3'- phosphorothioate
  modified_base 2: mod_base = OTHER; note = 2'-fluorouridine -3'-phosphorothioate
  modified_base 3: mod_base = OTHER; note = 2'-O-methylcytidine-3'-phosphate
  modified_base 4: mod_base = OTHER; note = 2'-O-methyluridine-3'-phosphate
  modified_base 5: mod_base = OTHER; note = 2'-O-methylcytidine-3'-phosphate
  modified_base 6: mod_base = OTHER; note = 2'-fluorouridine-3'-phosphate
  modified_base 7: mod_base = OTHER; note = 2'-O-methyladenosine-3'-phosphate
  modified_base 8: mod_base = OTHER; note = 2'-fluoroadenosine-3'-phosphate
  modified_base 9: mod_base = OTHER; note = 2'-fluoroguanosine-3'-phosphate
  modified_base 10: mod_base = OTHER; note = 2'-O-methyladenosine-3'-phosphate
  modified_base 11: mod_base = OTHER; note = 2'-O-methyladenosine-3'-phosphate
  modified_base 12: mod_base = OTHER; note = 2'-O-methylguanosine-3'-phosphate
  modified_base 13: mod_base = OTHER; note = 2'-O-methyluridine-3'-phosphate
  modified_base 14: mod_base = OTHER; note = 2'-fluoroadenosine-3'-phosphate
  modified_base 15: mod_base = OTHER; note = 2'-O-methyladenosine-3'-phosphate
  modified_base 16: mod_base = OTHER; note = 2'-fluorocytidine-3'-phosphate
  modified_base 17: mod_base = OTHER; note = 2'-O-methyladenosine-3'-phosphate
  modified_base 18: mod_base = OTHER; note = 2'-O-methyluridine-3'-phosphate
  modified_base 19: mod_base = OTHER; note = 2'-O-methyladenosine-3'-phosphate
  modified_base 20: mod_base = OTHER; note = 2'-O-methylcytidine-3'-phosphate
  modified_base 21: mod_base = OTHER; note = 2'-O-methyladenosine-3'- phosphorothioate
  modified_base 22: mod_base = OTHER; note = 2'-O-methyluridine-3'-phosphorothioate
  modified_base 23: mod_base = OTHER; note = 2'-O-methylcytidine-3'-phosphate
ctctctaagaagtaacatacatc

SEQ ID NO: 1894 - RNA, 21 nt, synthetic construct
  source 1..21: mol_type = other RNA
  modified_base 1: mod_base = OTHER; note = 2'-O-methyluridine-3'-phosphorothioate
  modified_base 2: mod_base = OTHER; note = 2'-O-methyladenosine-3'- phosphorothioate
  modified_base 3: mod_base = OTHER; note = 2'-O-methylguanosine-3'-phosphate
  modified_base 4: mod_base = OTHER; note = 2'-O-methylguanosine-3'-phosphate
  modified_base 5: mod_base = OTHER; note = 2'-O-methyladenosine-3'-phosphate
  modified_base 6: mod_base = OTHER; note = 2'-O-methyluridine-3'-phosphate
  modified_base 7: mod_base = OTHER; note = 2'-fluoroguanosine-3'-phosphate
  modified_base 8: mod_base = OTHER; note = 2'-O-methyluridine-3'-phosphate
  modified_base 9: mod_base = OTHER; note = 2'-fluoroadenosine-3'-phosphate
  modified_base 10: mod_base = OTHER; note = 2'-fluorouridine-3'-phosphate
  modified_base 11: mod_base = OTHER; note = 2'-fluoroguanosine-3'-phosphate
  modified_base 12: mod_base = OTHER; note = 2'-O-methyluridine-3'-phosphate
  modified_base 13: mod_base = OTHER; note = 2'-O-methyluridine-3'-phosphate
  modified_base 14: mod_base = OTHER; note = 2'-O-methyladenosine-3'-phosphate
  modified_base 15: mod_base = OTHER; note = 2'-O-methylcytidine-3'-phosphate
  modified_base 16: mod_base = OTHER; note = 2'-O-methyluridine-3'-phosphate
  modified_base 17: mod_base = OTHER; note = 2'-O-methyluridine-3'-phosphate
  modified_base 18: mod_base = OTHER; note = 2'-O-methylcytidine-3'-phosphate
  modified_base 19: mod_base = OTHER; note = 2'-O-methyluridine-3'-phosphate
  modified_base 20: mod_base = OTHER; note = 2'-O-methyluridine-3'-phosphate
  modified_base 21: mod_base = OTHER; note 2'-O-methyladenosine-3'-phosphate-N-[tris(GalNAc-alkyl)-ami dodecanoyl)]-4-hydroxyprolinol (Hyp-(GalNAc-alkyl)3)
taggatgtatgttacttctta

SEQ ID NO: 1895 - RNA, 23 nt, synthetic construct
  source 1..23: mol_type = other RNA
  modified_base 1: mod_base = OTHER; note = 2'-O-methyluridine-3'-phosphorothioate
  modified_base 2: mod_base = OTHER; note = 2'-fluoroadenosine-3'-phosphorothioate
  modified_base 3: mod_base = OTHER; note = 2'-O-methyladenosine-3'-phosphate
  modified_base 4: mod_base = OTHER; note = 2'-O-methylguanosine-3'-phosphate
  modified_base 5: mod_base = OTHER; note = 2'-O-methyladenosine-3'-phosphate
  modified_base 6: mod_base = OTHER; note = 2'-fluoroadenosine-3'-phosphate
  modified_base 7: mod_base = OTHER; note = 2'-O-methylguanosine-3'-phosphate
  modified_base 8: mod_base = OTHER; note = 2'-fluorouridine-3'-phosphate
  modified_base 9: mod_base = OTHER; note = 2'-fluoroadenosine-3'-phosphate
  modified_base 10: mod_base = OTHER; note = 2'-O-methyladenosine-3'-phosphate
  modified_base 11: mod_base = OTHER; note = 2'-O-methylcytidine-3'-phosphate
  modified_base 12: mod_base = OTHER; note = 2'-O-methyladenosine-3'-phosphate
  modified_base 13: mod_base = OTHER; note = 2'-O-methyluridine-3'-phosphate
  modified_base 14: mod_base = OTHER; note = 2'-fluoroadenosine-3'-phosphate
  modified_base 15: mod_base = OTHER; note = 2'-O-methylcytidine-3'-phosphate
  modified_base 16: mod_base = OTHER; note = 2'-fluoroadenosine-3'-phosphate
  modified_base 17: mod_base = OTHER; note = 2'-O-methyluridine-3'-phosphate
  modified_base 18: mod_base = OTHER; note = 2'-O-methylcytidine-3'-phosphate
  modified_base 19: mod_base = OTHER; note = 2'-O-methylcytidine-3'-phosphate
  modified_base 20: mod_base = OTHER; note = 2'-O-methyluridine-3'-phosphate
  modified_base 21: mod_base = OTHER; note = 2'-O-methyladenosine-3'- phosphorothioate
  modified_base 22: mod_base = OTHER; note = 2'-O-methyladenosine-3'- phosphorothioate
  modified_base 23: mod_base = OTHER; note = 2'-O-methyladenosine-3'-phosphate
taagaagtaacatacatcctaaa

SEQ ID NO: 1896 - RNA, 21 nt, synthetic construct
  source 1..21: mol_type = other RNA
  modified_base 1: mod_base = OTHER; note = 2'-O-methyluridine-3'-phosphorothioate
  modified_base 2: mod_base = OTHER; note = 2'-O-methyluridine-3'-phosphorothioate
  modified_base 3: mod_base = OTHER; note = 2'-O-methyladenosine-3'-phosphate
  modified_base 4: mod_base = OTHER; note = 2'-O-methylguanosine-3'-phosphate
  modified_base 5: mod_base = OTHER; note = 2'-O-methylguanosine-3'-phosphate
  modified_base 6: mod_base = OTHER; note = 2'-O-methyladenosine-3'-phosphate
  modified_base 7: mod_base = OTHER; note = 2'-fluorouridine-3'-phosphate
  modified_base 8: mod_base = OTHER; note = 2'-O-methylguanosine-3'-phosphate
  modified_base 9: mod_base = OTHER; note = 2'-fluorouridine-3'-phosphate
  modified_base 10: mod_base = OTHER; note = 2'-fluoroadenosine-3'-phosphate
  modified_base 11: mod_base = OTHER; note = 2'-fluorouridine-3'-phosphate
  modified_base 12: mod_base = OTHER; note = 2'-O-methylguanosine-3'-phosphate
  modified_base 13: mod_base = OTHER; note = 2'-O-methyluridine-3'-phosphate
  modified_base 14: mod_base = OTHER; note = 2'-O-methyluridine-3'-phosphate
  modified_base 15: mod_base = OTHER; note = 2'-O-methyladenosine-3'-phosphate
  modified_base 16: mod_base = OTHER; note = 2'-O-methylcytidine-3'-phosphate
  modified_base 17: mod_base = OTHER; note = 2'-O-methyluridine-3'-phosphate
  modified_base 18: mod_base = OTHER; note = 2'-O-methyluridine-3'-phosphate
  modified_base 19: mod_base = OTHER; note = 2'-O-methylcytidine-3'-phosphate
  modified_base 20: mod_base = OTHER; note = 2'-O-methyluridine-3'-phosphate
  modified_base 21: mod_base = OTHER; note 2'-O-methyluridine-3'-phosphate-N-[tris(GalNAc-alkyl)-amido decanoyl)]-4-hydroxyprolinol (Hyp-(GalNAc-alkyl)3)
ttaggatgtatgttacttctt

SEQ ID NO: 1897 - RNA, 23 nt, synthetic construct
  source 1..23: mol_type = other RNA
  modified_base 1: mod_base = OTHER; note = 2'-O-methyladenosine-3'- phosphorothioate
  modified_base 2: mod_base = OTHER; note = 2'-fluoroadenosine-3'-phosphorothioate
  modified_base 3: mod_base = OTHER; note = 2'-O-methylguanosine-3'-phosphate
  modified_base 4: mod_base = OTHER; note = 2'-O-methyladenosine-3'-phosphate
  modified_base 5: mod_base = OTHER; note = 2'-O-methyladenosine-3'-phosphate
  modified_base 6: mod_base = OTHER; note = 2'-fluoroguanosine-3'-phosphate
  modified_base 7: mod_base = OTHER; note = 2'-O-methyluridine-3'-phosphate
  modified_base 8: mod_base = OTHER; note = 2'-fluoroadenosine-3'-phosphate
  modified_base 9: mod_base = OTHER; note = 2'-fluoroadenosine-3'-phosphate
  modified_base 10: mod_base = OTHER; note = 2'-O-methylcytidine-3'-phosphate
  modified_base 11: mod_base = OTHER; note = 2'-O-methyladenosine-3'-phosphate
  modified_base 12: mod_base = OTHER; note = 2'-O-methyluridine-3'-phosphate
  modified_base 13: mod_base = OTHER; note = 2'-O-methyladenosine-3'-phosphate
  modified_base 14: mod_base = OTHER; note = 2'-fluorocytidine-3'-phosphate
  modified_base 15: mod_base = OTHER; note = 2'-O-methyladenosine-3'-phosphate
  modified_base 16: mod_base = OTHER; note = 2'-fluorouridine-3'-phosphate
  modified_base 17: mod_base = OTHER; note = 2'-O-methylcytidine-3'-phosphate
  modified_base 18: mod_base = OTHER; note = 2'-O-methylcytidine-3'-phosphate
  modified_base 19: mod_base = OTHER; note = 2'-O-methyluridine-3'-phosphate
  modified_base 20: mod_base = OTHER; note = 2'-O-methyladenosine-3'-phosphate
  modified_base 21: mod_base = OTHER; note = 2'-O-methyladenosine-3'- phosphorothioate
  modified_base 22: mod_base = OTHER; note = 2'-O-methyladenosine-3'- phosphorothioate
  modified_base 23: mod_base = OTHER; note = 2'-O-methyladenosine-3'-phosphate
aagaagtaacatacatcctaaaa

SEQ ID NO: 1898 - RNA, 21 nt, synthetic construct
  source 1..21: mol_type = other RNA
  modified_base 1: mod_base = OTHER; note = 2'-O-methyladenosine-3'- phosphorothioate
  modified_base 2: mod_base = OTHER; note = 2'-O-methylguanosine-3'- phosphorothioate
  modified_base 3: mod_base = OTHER; note = 2'-O-methyladenosine-3'-phosphate
  modified_base 4: mod_base = OTHER; note = 2'-O-methyladenosine-3'-phosphate
  modified_base 5: mod_base = OTHER; note = 2'-O-methyladenosine-3'-phosphate
  modified_base 6: mod_base = OTHER; note = 2'-O-methylguanosine-3'-phosphate
  modified_base 7: mod_base = OTHER; note = 2'-fluoroguanosine-3'-phosphate
  modified_base 8: mod_base = OTHER; note = 2'-O-methyluridine-3'-phosphate
  modified_base 9: mod_base = OTHER; note = 2'-fluoroguanosine-3'-phosphate
  modified_base 10: mod_base = OTHER; note = 2'-fluorouridine-3'-phosphate
  modified_base 11: mod_base = OTHER; note = 2'-fluorouridine-3'-phosphate
  modified_base 12: mod_base = OTHER; note = 2'-O-methylcytidine-3'-phosphate
  modified_base 13: mod_base = OTHER; note = 2'-O-methyladenosine-3'-phosphate
  modified_base 14: mod_base = OTHER; note = 2'-O-methyladenosine-3'-phosphate
  modified_base 15: mod_base = OTHER; note = 2'-O-methylguanosine-3'-phosphate
  modified_base 16: mod_base = OTHER; note = 2'-O-methyladenosine-3'-phosphate
  modified_base 17: mod_base = OTHER; note = 2'-O-methyluridine-3'-phosphate
  modified_base 18: mod_base = OTHER; note = 2'-O-methylguanosine-3'-phosphate
  modified_base 19: mod_base = OTHER; note = 2'-O-methyluridine-3'-phosphate
  modified_base 20: mod_base = OTHER; note = 2'-O-methylcytidine-3'-phosphate
  modified_base 21: mod_base = OTHER; note 2'-O-methylcytidine-3'-phosphate-N-[tris(GalNAc-alkyl)-amid odecanoyl)]-4-hydroxyprolinol (Hyp-(GalNAc-alkyl)3)
agaaaggtgttcaagatgtcc

SEQ ID NO: 1899 - RNA, 23 nt, synthetic construct
  source 1..23: mol_type = other RNA
  modified_base 1: mod_base = OTHER; note = 2'-O-methylguanosine-3'- phosphorothioate
  modified_base 2: mod_base = OTHER; note = 2'-fluoroguanosine-3'-phosphorothioate
  modified_base 3: mod_base = OTHER; note = 2'-O-methyladenosine-3'-phosphate
  modified_base 4: mod_base = OTHER; note = 2'-O-methylcytidine-3'-phosphate
  modified_base 5: mod_base = OTHER; note = 2'-O-methyladenosine-3'-phosphate
  modified_base 6: mod_base = OTHER; note = 2'-fluorouridine-3'-phosphate
  modified_base 7: mod_base = OTHER; note = 2'-O-methylcytidine-3'-phosphate
  modified_base 8: mod_base = OTHER; note = 2'-fluorouridine-3'-phosphate
  modified_base 9: mod_base = OTHER; note = 2'-fluorouridine-3'-phosphate
  modified_base 10: mod_base = OTHER; note = 2'-O-methylguanosine-3'-phosphate
  modified_base 11: mod_base = OTHER; note = 2'-O-methyladenosine-3'-phosphate
  modified_base 12: mod_base = OTHER; note = 2'-O-methyladenosine-3'-phosphate
  modified_base 13: mod_base = OTHER; note = 2'-O-methylcytidine-3'-phosphate
  modified_base 14: mod_base = OTHER; note = 2'-fluoroadenosine-3'-phosphate
  modified_base 15: mod_base = OTHER; note = 2'-O-methylcytidine-3'-phosphate
  modified_base 16: mod_base = OTHER; note = 2'-fluorocytidine-3'-phosphate
  modified_base 17: mod_base = OTHER; note = 2'-O-methyluridine-3'-phosphate
  modified_base 18: mod_base = OTHER; note = 2'-O-methyluridine-3'-phosphate
  modified_base 19: mod_base = OTHER; note = 2'-O-methyluridine-3'-phosphate
  modified_base 20: mod_base = OTHER; note = 2'-O-methylcytidine-3'-phosphate
  modified_base 21: mod_base = OTHER; note = 2'-O-methyluridine-3'-phosphorothioate
  modified_base 22: mod_base = OTHER; note = 2'-O-methylcytidine-3'- phosphorothioate
  modified_base 23: mod_base = OTHER; note = 2'-O-methylcytidine-3'-phosphate
ggacatcttgaacacctttctcc

SEQ ID NO: 1900 - RNA, 21 nt, synthetic construct
  source 1..21: mol_type = other RNA
  modified_base 1: mod_base = OTHER; note = 2'-O-methylguanosine-3'- phosphorothioate
  modified_base 2: mod_base = OTHER; note = 2'-O-methyladenosine-3'- phosphorothioate
  modified_base 3: mod_base = OTHER; note = 2'-O-methyladenosine-3'-phosphate
  modified_base 4: mod_base = OTHER; note = 2'-O-methyladenosine-3'-phosphate
  modified_base 5: mod_base = OTHER; note = 2'-O-methylguanosine-3'-phosphate
  modified_base 6: mod_base = OTHER; note = 2'-O-methylguanosine-3'-phosphate
  modified_base 7: mod_base = OTHER; note = 2'-fluorouridine-3'-phosphate
  modified_base 8: mod_base = OTHER; note = 2'-O-methylguanosine-3'-phosphate
  modified_base 9: mod_base = OTHER; note = 2'-fluorouridine-3'-phosphate
  modified_base 10: mod_base = OTHER; note = 2'-fluorouridine-3'-phosphate
  modified_base 11: mod_base = OTHER; note = 2'-fluorocytidine-3'-phosphate
  modified_base 12: mod_base = OTHER; note = 2'-O-methyladenosine-3'-phosphate
  modified_base 13: mod_base = OTHER; note = 2'-O-methyladenosine-3'-phosphate
  modified_base 14: mod_base = OTHER; note = 2'-O-methylguanosine-3'-phosphate
  modified_base 15: mod_base = OTHER; note = 2'-O-methyladenosine-3'-phosphate
  modified_base 16: mod_base = OTHER; note = 2'-O-methyluridine-3'-phosphate
  modified_base 17: mod_base = OTHER; note = 2'-O-methylguanosine-3'-phosphate
  modified_base 18: mod_base = OTHER; note = 2'-O-methyluridine-3'-phosphate
  modified_base 19: mod_base = OTHER; note = 2'-O-methylcytidine-3'-phosphate
  modified_base 20: mod_base = OTHER; note = 2'-O-methylcytidine-3'-phosphate
  modified_base 21: mod_base = OTHER; note 2'-O-methyluridine-3'-phosphate-N-[tris(GalNAc-alkyl)-amido decanoyl)]-4-hydroxyprolinol (Hyp-(GalNAc-alkyl)3)
gaaaggtgttcaagatgtcct

SEQ ID NO: 1901 - RNA, 23 nt, synthetic construct
  source 1..23: mol_type = other RNA
  modified_base 1: mod_base = OTHER; note = 2'-O-methyladenosine-3'- phosphorothioate
  modified_base 2: mod_base = OTHER; note = 2'-fluoroguanosine-3'-phosphorothioate
  modified_base 3: mod_base = OTHER; note = 2'-O-methylguanosine-3'-phosphate
  modified_base 4: mod_base = OTHER; note = 2'-O-methyladenosine-3'-phosphate
  modified_base 5: mod_base = OTHER; note = 2'-O-methylcytidine-3'-phosphate
  modified_base 6: mod_base = OTHER; note = 2'-fluoroadenosine-3'-phosphate
  modified_base 7: mod_base = OTHER; note = 2'-O-methyluridine-3'-phosphate
  modified_base 8: mod_base = OTHER; note = 2'-fluorocytidine-3'-phosphate
  modified_base 9: mod_base = OTHER; note = 2'-fluorouridine-3'-phosphate
  modified_base 10: mod_base = OTHER; note = 2'-O-methyluridine-3'-phosphate
  modified_base 11: mod_base = OTHER; note = 2'-O-methylguanosine-3'-phosphate
  modified_base 12: mod_base = OTHER; note = 2'-O-methyladenosine-3'-phosphate
  modified_base 13: mod_base = OTHER; note = 2'-O-methyladenosine-3'-phosphate
  modified_base 14: mod_base = OTHER; note = 2'-fluorocytidine-3'-phosphate
  modified_base 15: mod_base = OTHER; note = 2'-O-methyladenosine-3'-phosphate
  modified_base 16: mod_base = OTHER; note = 2'-fluorocytidine-3'-phosphate
  modified_base 17: mod_base = OTHER; note = 2'-O-methylcytidine-3'-phosphate
  modified_base 18: mod_base = OTHER; note = 2'-O-methyluridine-3'-phosphate
  modified_base 19: mod_base = OTHER; note = 2'-O-methyluridine-3'-phosphate
  modified_base 20: mod_base = OTHER; note = 2'-O-methyluridine-3'-phosphate
  modified_base 21: mod_base = OTHER; note = 2'-O-methylcytidine-3'- phosphorothioate
  modified_base 22: mod_base = OTHER; note = 2'-O-methyluridine-3'-phosphorothioate
  modified_base 23: mod_base = OTHER; note = 2'-O-methylcytidine-3'-phosphate
aggacatcttgaacacctttctc

SEQ ID NO: 1902 - RNA, 21 nt, synthetic construct
  source 1..21: mol_type = other RNA
  modified_base 1: mod_base = OTHER; note = 2'-O-methylguanosine-3'- phosphorothioate
  modified_base 2: mod_base = OTHER; note = 2'-O-methylguanosine-3'- phosphorothioate
  modified_base 3: mod_base = OTHER; note = 2'-O-methylguanosine-3'-phosphate
  modified_base 4: mod_base = OTHER; note = 2'-O-methylguanosine-3'-phosphate
  modified_base 5: mod_base = OTHER; note = 2'-O-methyladenosine-3'-phosphate
  modified_base 6: mod_base = OTHER; note = 2'-O-methylguanosine-3'-phosphate
  modified_base 7: mod_base = OTHER; note = 2'-fluoroadenosine-3'-phosphate
  modified_base 8: mod_base = OTHER; note = 2'-O-methyladenosine-3'-phosphate
  modified_base 9: mod_base = OTHER; note = 2'-fluoroadenosine-3'-phosphate
  modified_base 10: mod_base = OTHER; note = 2'-fluoroguanosine-3'-phosphate
  modified_base 11: mod_base = OTHER; note = 2'-fluoroguanosine-3'-phosphate
  modified_base 12: mod_base = OTHER; note = 2'-O-methyluridine-3'-phosphate
  modified_base 13: mod_base = OTHER; note = 2'-O-methylguanosine-3'-phosphate
  modified_base 14: mod_base = OTHER; note = 2'-O-methyluridine-3'-phosphate
  modified_base 15: mod_base = OTHER; note = 2'-O-methyluridine-3'-phosphate
  modified_base 16: mod_base = OTHER; note = 2'-O-methylcytidine-3'-phosphate
  modified_base 17: mod_base = OTHER; note = 2'-O-methyladenosine-3'-phosphate
  modified_base 18: mod_base = OTHER; note = 2'-O-methyladenosine-3'-phosphate
  modified_base 19: mod_base = OTHER; note = 2'-O-methylguanosine-3'-phosphate
  modified_base 20: mod_base = OTHER; note = 2'-O-methyladenosine-3'-phosphate
  modified_base 21: mod_base = OTHER; note 2'-O-methyluridine-3'-phosphate-N-[tris(GalNAc-alkyl)-amido decanoyl)]-4-hydroxyprolinol (Hyp-(GalNAc-alkyl)3)
ggggagaaaggtgttcaagat

SEQ ID NO: 1903 - RNA, 23 nt, synthetic construct
  source 1..23: mol_type = other RNA
  modified_base 1: mod_base = OTHER; note = 2'-O-methyladenosine-3'- phosphorothioate
  modified_base 2: mod_base = OTHER; note = 2'-fluorouridine -3'-phosphorothioate
  modified_base 3: mod_base = OTHER; note = 2'-O-methylcytidine-3'-phosphate
  modified_base 4: mod_base = OTHER; note = 2'-O-methyluridine-3'-phosphate
  modified_base 5: mod_base = OTHER; note = 2'-O-methyluridine-3'-phosphate
  modified_base 6: mod_base = OTHER; note = 2'-fluoroguanosine-3'-phosphate
  modified_base 7: mod_base = OTHER; note = 2'-O-methyladenosine-3'-phosphate
  modified_base 8: mod_base = OTHER; note = 2'-fluoroadenosine-3'-phosphate
  modified_base 9: mod_base = OTHER; note = 2'-fluorocytidine-3'-phosphate
  modified_base 10: mod_base = OTHER; note = 2'-O-methyladenosine-3'-phosphate
  modified_base 11: mod_base = OTHER; note = 2'-O-methylcytidine-3'-phosphate
  modified_base 12: mod_base = OTHER; note = 2'-O-methylcytidine-3'-phosphate
  modified_base 13: mod_base = OTHER; note = 2'-O-methyluridine-3'-phosphate
  modified_base 14: mod_base = OTHER; note = 2'-fluorouridine-3'-phosphate
  modified_base 15: mod_base = OTHER; note = 2'-O-methyluridine-3'-phosphate
  modified_base 16: mod_base = OTHER; note = 2'-fluorocytidine-3'-phosphate
  modified_base 17: mod_base = OTHER; note = 2'-O-methyluridine-3'-phosphate
  modified_base 18: mod_base = OTHER; note = 2'-O-methylcytidine-3'-phosphate
  modified_base 19: mod_base = OTHER; note = 2'-O-methylcytidine-3'-phosphate
  modified_base 20: mod_base = OTHER; note = 2'-O-methylcytidine-3'-phosphate
  modified_base 21: mod_base = OTHER; note = 2'-O-methylcytidine-3'- phosphorothioate
  modified_base 22: mod_base = OTHER; note = 2'-O-methylcytidine-3'- phosphorothioate
  modified_base 23: mod_base = OTHER; note = 2'-O-methyluridine-3'-phosphate
atcttgaacacctttctccccct

SEQ ID NO: 1904 - RNA, 21 nt, synthetic construct
  source 1..21: mol_type = other RNA
  modified_base 1: mod_base = OTHER; note = 2'-O-methylguanosine-3'- phosphorothioate
  modified_base 2: mod_base = OTHER; note = 2'-O-methylguanosine-3'- phosphorothioate
  modified_base 3: mod_base = OTHER; note = 2'-O-methylguanosine-3'-phosphate
  modified_base 4: mod_base = OTHER; note = 2'-O-methylguanosine-3'-phosphate
  modified_base 5: mod_base = OTHER; note = 2'-O-methylguanosine-3'-phosphate
  modified_base 6: mod_base = OTHER; note = 2'-O-methyladenosine-3'-phosphate
  modified_base 7: mod_base = OTHER; note = 2'-fluoroguanosine-3'-phosphate
  modified_base 8: mod_base = OTHER; note = 2'-O-methyladenosine-3'-phosphate
  modified_base 9: mod_base = OTHER; note = 2'-fluoroadenosine-3'-phosphate
  modified_base 10: mod_base = OTHER; note = 2'-fluoroadenosine-3'-phosphate
  modified_base 11: mod_base = OTHER; note = 2'-fluoroguanosine-3'-phosphate
  modified_base 12: mod_base = OTHER; note = 2'-O-methylguanosine-3'-phosphate
  modified_base 13: mod_base = OTHER; note = 2'-O-methyluridine-3'-phosphate
  modified_base 14: mod_base = OTHER; note = 2'-O-methylguanosine-3'-phosphate
  modified_base 15: mod_base = OTHER; note = 2'-O-methyluridine-3'-phosphate
  modified_base 16: mod_base = OTHER; note = 2'-O-methyluridine-3'-phosphate
  modified_base 17: mod_base = OTHER; note = 2'-O-methylcytidine-3'-phosphate
  modified_base 18: mod_base = OTHER; note = 2'-O-methyladenosine-3'-phosphate
  modified_base 19: mod_base = OTHER; note = 2'-O-methyladenosine-3'-phosphate
  modified_base 20: mod_base = OTHER; note = 2'-O-methylguanosine-3'-phosphate
  modified_base 21: mod_base = OTHER; note 2'-O-methyladenosine-3'-phosphate-N-[tris(GalNAc-alkyl)-ami dodecanoyl)]-4-hydroxyprolinol (Hyp-(GalNAc-alkyl)3)
gggggagaaaggtgttcaaga

SEQ ID NO: 1905 - RNA, 23 nt, synthetic construct
  source 1..23: mol_type = other RNA
  modified_base 1: mod_base = OTHER; note = 2'-O-methyluridine-3'-phosphorothioate
  modified_base 2: mod_base = OTHER; note = 2'-fluorocytidine-3'-phosphorothioate
  modified_base 3: mod_base = OTHER; note = 2'-O-methyluridine-3'-phosphate
  modified_base 4: mod_base = OTHER; note = 2'-O-methyluridine-3'-phosphate
  modified_base 5: mod_base = OTHER; note = 2'-O-methylguanosine-3'-phosphate
  modified_base 6: mod_base = OTHER; note = 2'-fluoroadenosine-3'-phosphate
  modified_base 7: mod_base = OTHER; note = 2'-O-methyladenosine-3'-phosphate
  modified_base 8: mod_base = OTHER; note = 2'-fluorocytidine-3'-phosphate
  modified_base 9: mod_base = OTHER; note = 2'-fluoroadenosine-3'-phosphate
  modified_base 10: mod_base = OTHER; note = 2'-O-methylcytidine-3'-phosphate
  modified_base 11: mod_base = OTHER; note = 2'-O-methylcytidine-3'-phosphate
  modified_base 12: mod_base = OTHER; note = 2'-O-methyluridine-3'-phosphate
  modified_base 13: mod_base = OTHER; note = 2'-O-methyluridine-3'-phosphate
  modified_base 14: mod_base = OTHER; note = 2'-fluorouridine-3'-phosphate
  modified_base 15: mod_base = OTHER; note = 2'-O-methylcytidine-3'-phosphate
  modified_base 16: mod_base = OTHER; note = 2'-fluorouridine-3'-phosphate
  modified_base 17: mod_base = OTHER; note = 2'-O-methylcytidine-3'-phosphate
  modified_base 18: mod_base = OTHER; note = 2'-O-methylcytidine-3'-phosphate
  modified_base 19: mod_base = OTHER; note = 2'-O-methylcytidine-3'-phosphate
  modified_base 20: mod_base = OTHER; note = 2'-O-methylcytidine-3'-phosphate
  modified_base 21: mod_base = OTHER; note = 2'-O-methylcytidine-3'- phosphorothioate
  modified_base 22: mod_base = OTHER; note = 2'-O-methyluridine-3'-phosphorothioate
  modified_base 23: mod_base = OTHER; note = 2'-O-methylguanosine-3'-phosphate
tcttgaacacctttctccccctg

SEQ ID NO: 1906 - RNA, 21 nt, synthetic construct
  source 1..21: mol_type = other RNA
  modified_base 1: mod_base = OTHER; note = 2'-O-methyladenosine-3'- phosphorothioate
  modified_base 2: mod_base = OTHER; note = 2'-O-methylguanosine-3'- phosphorothioate
  modified_base 3: mod_base = OTHER; note = 2'-O-methyladenosine-3'-phosphate
  modified_base 4: mod_base = OTHER; note = 2'-O-methyladenosine-3'-phosphate
  modified_base 5: mod_base = OTHER; note = 2'-O-methyladenosine-3'-phosphate
  modified_base 6: mod_base = OTHER; note = 2'-O-methylcytidine-3'-phosphate
  modified_base 7: mod_base = OTHER; note = 2'-fluorouridine-3'-phosphate
  modified_base 8: mod_base = OTHER; note = 2'-O-methyluridine-3'-phosphate
  modified_base 9: mod_base = OTHER; note = 2'-fluorouridine-3'-phosphate
  modified_base 10: mod_base = OTHER; note = 2'-fluoroguanosine-3'-phosphate
  modified_base 11: mod_base = OTHER; note = 2'-fluoroguanosine-3'-phosphate
  modified_base 12: mod_base = OTHER; note = 2'-O-methylcytidine-3'-phosphate
  modified_base 13: mod_base = OTHER; note = 2'-O-methyluridine-3'-phosphate
  modified_base 14: mod_base = OTHER; note = 2'-O-methylguanosine-3'-phosphate
  modified_base 15: mod_base = OTHER; note = 2'-O-methyladenosine-3'-phosphate
  modified_base 16: mod_base = OTHER; note = 2'-O-methyluridine-3'-phosphate
  modified_base 17: mod_base = OTHER; note = 2'-O-methyladenosine-3'-phosphate
  modified_base 18: mod_base = OTHER; note = 2'-O-methyladenosine-3'-phosphate
  modified_base 19: mod_base = OTHER; note = 2'-O-methyluridine-3'-phosphate
  modified_base 20: mod_base = OTHER; note = 2'-O-methyladenosine-3'-phosphate
  modified_base 21: mod_base = OTHER; note 2'-O-methyluridine-3'-phosphate-N-[tris(GalNAc-alkyl)-amido decanoyl)]-4-hydroxyprolinol (Hyp-(GalNAc-alkyl)3)
agaaactttggctgataatat

SEQ ID NO: 1907 - RNA, 23 nt, synthetic construct
  source 1..23: mol_type = other RNA
  modified_base 1: mod_base = OTHER; note = 2'-O-methyladenosine-3'- phosphorothioate
  modified_base 2: mod_base = OTHER; note = 2'-fluorouridine -3'-phosphorothioate
  modified_base 3: mod_base = OTHER; note = 2'-O-methyladenosine-3'-phosphate
  modified_base 4: mod_base = OTHER; note = 2'-O-methyluridine-3'-phosphate
  modified_base 5: mod_base = OTHER; note = 2'-O-methyluridine-3'-phosphate
  modified_base 6: mod_base = OTHER; note = 2'-fluoroadenosine-3'-phosphate
  modified_base 7: mod_base = OTHER; note = 2'-O-methyluridine-3'-phosphate
  modified_base 8: mod_base = OTHER; note = 2'-fluorocytidine-3'-phosphate
  modified_base 9: mod_base = OTHER; note = 2'-fluoroadenosine-3'-phosphate
  modified_base 10: mod_base = OTHER; note = 2'-O-methylguanosine-3'-phosphate
  modified_base 11: mod_base = OTHER; note = 2'-O-methylcytidine-3'-phosphate
  modified_base 12: mod_base = OTHER; note = 2'-O-methylcytidine-3'-phosphate
  modified_base 13: mod_base = OTHER; note = 2'-O-methyladenosine-3'-phosphate
  modified_base 14: mod_base = OTHER; note = 2'-fluoroadenosine-3'-phosphate
  modified_base 15: mod_base = OTHER; note = 2'-O-methyladenosine-3'-phosphate
  modified_base 16: mod_base = OTHER; note = 2'-fluoroguanosine-3'-phosphate
  modified_base 17: mod_base = OTHER; note = 2'-O-methyluridine-3'-phosphate
  modified_base 18: mod_base = OTHER; note = 2'-O-methyluridine-3'-phosphate
  modified_base 19: mod_base = OTHER; note = 2'-O-methyluridine-3'-phosphate
  modified_base 20: mod_base = OTHER; note = 2'-O-methylcytidine-3'-phosphate
  modified_base 21: mod_base = OTHER; note = 2'-O-methyluridine-3'-phosphorothioate
  modified_base 22: mod_base = OTHER; note = 2'-O-methyluridine-3'-phosphorothioate
  modified_base 23: mod_base = OTHER; note = 2'-O-methylcytidine-3'-phosphate
atattatcagccaaagtttcttc

SEQ ID NO: 1908 - RNA, 21 nt, synthetic construct
  source 1..21: mol_type = other RNA
  modified_base 1: mod_base = OTHER; note = 2'-O-methylguanosine-3'- phosphorothioate
  modified_base 2: mod_base = OTHER; note = 2'-O-methyladenosine-3'- phosphorothioate
  modified_base 3: mod_base = OTHER; note = 2'-O-methyladenosine-3'-phosphate
  modified_base 4: mod_base = OTHER; note = 2'-O-methyladenosine-3'-phosphate
  modified_base 5: mod_base = OTHER; note = 2'-O-methylcytidine-3'-phosphate
  modified_base 6: mod_base = OTHER; note = 2'-O-methyluridine-3'-phosphate
  modified_base 7: mod_base = OTHER; note = 2'-fluorouridine-3'-phosphate
  modified_base 8: mod_base = OTHER; note = 2'-O-methyluridine-3'-phosphate
  modified_base 9: mod_base = OTHER; note = 2'-fluoroguanosine-3'-phosphate
  modified_base 10: mod_base = OTHER; note = 2'-fluoroguanosine-3'-phosphate
  modified_base 11: mod_base = OTHER; note = 2'-fluorocytidine-3'-phosphate
  modified_base 12: mod_base = OTHER; note = 2'-O-methyluridine-3'-phosphate
  modified_base 13: mod_base = OTHER; note = 2'-O-methylguanosine-3'-phosphate
  modified_base 14: mod_base = OTHER; note = 2'-O-methyladenosine-3'-phosphate
  modified_base 15: mod_base = OTHER; note = 2'-O-methyluridine-3'-phosphate
  modified_base 16: mod_base = OTHER; note = 2'-O-methyladenosine-3'-phosphate
  modified_base 17: mod_base = OTHER; note = 2'-O-methyladenosine-3'-phosphate
  modified_base 18: mod_base = OTHER; note = 2'-O-methyluridine-3'-phosphate
  modified_base 19: mod_base = OTHER; note = 2'-O-methyladenosine-3'-phosphate
  modified_base 20: mod_base = OTHER; note = 2'-O-methyluridine-3'-phosphate
  modified_base 21: mod_base = OTHER; note 2'-O-methyluridine-3'-phosphate-N-[tris(GalNAc-alkyl)-amido decanoyl)]-4-hydroxyprolinol (Hyp-(GalNAc-alkyl)3)
gaaactttggctgataatatt

SEQ ID NO: 1909 - RNA, 23 nt, synthetic construct
  source 1..23: mol_type = other RNA
  modified_base 1: mod_base = OTHER; note = 2'-O-methyladenosine-3'- phosphorothioate
  modified_base 2: mod_base = OTHER; note = 2'-fluoroadenosine-3'-phosphorothioate
  modified_base 3: mod_base = OTHER; note = 2'-O-methyluridine-3'-phosphate
  modified_base 4: mod_base = OTHER; note = 2'-O-methyladenosine-3'-phosphate
  modified_base 5: mod_base = OTHER; note = 2'-O-methyluridine-3'-phosphate
  modified_base 6: mod_base = OTHER; note = 2'-fluorouridine-3'-phosphate
  modified_base 7: mod_base = OTHER; note = 2'-O-methyladenosine-3'-phosphate
  modified_base 8: mod_base = OTHER; note = 2'-fluorouridine-3'-phosphate
  modified_base 9: mod_base = OTHER; note = 2'-fluorocytidine-3'-phosphate
  modified_base 10: mod_base = OTHER; note = 2'-O-methyladenosine-3'-phosphate
  modified_base 11: mod_base = OTHER; note = 2'-O-methylguanosine-3'-phosphate
  modified_base 12: mod_base = OTHER; note = 2'-O-methylcytidine-3'-phosphate
  modified_base 13: mod_base = OTHER; note = 2'-O-methylcytidine-3'-phosphate
  modified_base 14: mod_base = OTHER; note = 2'-fluoroadenosine-3'-phosphate
  modified_base 15: mod_base = OTHER; note = 2'-O-methyladenosine-3'-phosphate
  modified_base 16: mod_base = OTHER; note = 2'-fluoroadenosine-3'-phosphate
  modified_base 17: mod_base = OTHER; note = 2'-O-methylguanosine-3'-phosphate
  modified_base 18: mod_base = OTHER; note = 2'-O-methyluridine-3'-phosphate
  modified_base 19: mod_base = OTHER; note = 2'-O-methyluridine-3'-phosphate
  modified_base 20: mod_base = OTHER; note = 2'-O-methyluridine-3'-phosphate
  modified_base 21: mod_base = OTHER; note = 2'-O-methylcytidine-3'- phosphorothioate
  modified_base 22: mod_base = OTHER; note = 2'-O-methyluridine-3'-phosphorothioate
  modified_base 23: mod_base = OTHER; note = 2'-O-methyluridine-3'-phosphate
aatattatcagccaaagtttctt

SEQ ID NO: 1910 - RNA, 21 nt, synthetic construct
  source 1..21: mol_type = other RNA
  modified_base 1: mod_base = OTHER; note = 2'-O-methyladenosine-3'- phosphorothioate
  modified_base 2: mod_base = OTHER; note = 2'-O-methyluridine-3'-phosphorothioate
  modified_base 3: mod_base = OTHER; note = 2'-O-methylguanosine-3'-phosphate
  modified_base 4: mod_base = OTHER; note = 2'-O-methyladenosine-3'-phosphate
  modified_base 5: mod_base = OTHER; note = 2'-O-methyladenosine-3'-phosphate
  modified_base 6: mod_base = OTHER; note = 2'-O-methylguanosine-3'-phosphate
  modified_base 7: mod_base = OTHER; note = 2'-fluoroadenosine-3'-phosphate
  modified_base 8: mod_base = OTHER; note = 2'-O-methyladenosine-3'-phosphate
  modified_base 9: mod_base = OTHER; note = 2'-fluoroadenosine-3'-phosphate
  modified_base 10: mod_base = OTHER; note = 2'-fluorocytidine-3'-phosphate
  modified_base 11: mod_base = OTHER; note = 2'-fluorouridine-3'-phosphate
  modified_base 12: mod_base = OTHER; note = 2'-O-methyluridine-3'-phosphate
  modified_base 13: mod_base = OTHER; note = 2'-O-methyluridine-3'-phosphate
  modified_base 14: mod_base = OTHER; note = 2'-O-methylguanosine-3'-phosphate
  modified_base 15: mod_base = OTHER; note = 2'-O-methylguanosine-3'-phosphate
  modified_base 16: mod_base = OTHER; note = 2'-O-methylcytidine-3'-phosphate
  modified_base 17: mod_base = OTHER; note = 2'-O-methyluridine-3'-phosphate
  modified_base 18: mod_base = OTHER; note = 2'-O-methylguanosine-3'-phosphate
  modified_base 19: mod_base = OTHER; note = 2'-O-methyladenosine-3'-phosphate
  modified_base 20: mod_base = OTHER; note = 2'-O-methyluridine-3'-phosphate
  modified_base 21: mod_base = OTHER; note 2'-O-methyladenosine-3'-phosphate-N-[tris(GalNAc-alkyl)-ami dodecanoyl)]-4-hydroxyprolinol (Hyp-(GalNAc-alkyl)3)
atgaagaaactttggctgata

SEQ ID NO: 1911 - RNA, 23 nt, synthetic construct
  source 1..23: mol_type = other RNA
  modified_base 1: mod_base = OTHER; note = 2'-O-methyluridine-3'-phosphorothioate
  modified_base 2: mod_base = OTHER; note = 2'-fluoroadenosine-3'-phosphorothioate
  modified_base 3: mod_base = OTHER; note = 2'-O-methyluridine-3'-phosphate
  modified_base 4: mod_base = OTHER; note = 2'-O-methylcytidine-3'-phosphate
  modified_base 5: mod_base = OTHER; note = 2'-O-methyladenosine-3'-phosphate
  modified_base 6: mod_base = OTHER; note = 2'-fluoroguanosine-3'-phosphate
  modified_base 7: mod_base = OTHER; note = 2'-O-methylcytidine-3'-phosphate
  modified_base 8: mod_base = OTHER; note = 2'-fluorocytidine-3'-phosphate
  modified_base 9: mod_base = OTHER; note = 2'-fluoroadenosine-3'-phosphate
  modified_base 10: mod_base = OTHER; note = 2'-O-methyladenosine-3'-phosphate
  modified_base 11: mod_base = OTHER; note = 2'-O-methyladenosine-3'-phosphate
  modified_base 12: mod_base = OTHER; note = 2'-O-methylguanosine-3'-phosphate
  modified_base 13: mod_base = OTHER; note = 2'-O-methyluridine-3'-phosphate
  modified_base 14: mod_base = OTHER; note = 2'-fluorouridine-3'-phosphate
  modified_base 15: mod_base = OTHER; note = 2'-O-methyluridine-3'-phosphate
  modified_base 16: mod_base = OTHER; note = 2'-fluorocytidine-3'-phosphate
  modified_base 17: mod_base = OTHER; note = 2'-O-methyluridine-3'-phosphate
  modified_base 18: mod_base = OTHER; note = 2'-O-methyluridine-3'-phosphate
  modified_base 19: mod_base = OTHER; note = 2'-O-methylcytidine-3'-phosphate
  modified_base 20: mod_base = OTHER; note = 2'-O-methyladenosine-3'-phosphate
  modified_base 21: mod_base = OTHER; note = 2'-O-methyluridine-3'-phosphorothioate
  modified_base 22: mod_base = OTHER; note = 2'-O-methylcytidine-3'- phosphorothioate
  modified_base 23: mod_base = OTHER; note = 2'-O-methyladenosine-3'-phosphate
tatcagccaaagtttcttcatca

SEQ ID NO: 1912 - RNA, 21 nt, synthetic construct
  source 1..21: mol_type = other RNA
  modified_base 1: mod_base = OTHER; note = 2'-O-methylguanosine-3'- phosphorothioate
  modified_base 2: mod_base = OTHER; note = 2'-O-methyladenosine-3'- phosphorothioate
  modified_base 3: mod_base = OTHER; note = 2'-O-methyluridine-3'-phosphate
  modified_base 4: mod_base = OTHER; note = 2'-O-methylguanosine-3'-phosphate
  modified_base 5: mod_base = OTHER; note = 2'-O-methyladenosine-3'-phosphate
  modified_base 6: mod_base = OTHER; note = 2'-O-methyladenosine-3'-phosphate
  modified_base 7: mod_base = OTHER; note = 2'-fluoroguanosine-3'-phosphate
  modified_base 8: mod_base = OTHER; note = 2'-O-methyladenosine-3'-phosphate
  modified_base 9: mod_base = OTHER; note = 2'-fluoroadenosine-3'-phosphate
  modified_base 10: mod_base = OTHER; note = 2'-fluoroadenosine-3'-phosphate
  modified_base 11: mod_base = OTHER; note = 2'-fluorocytidine-3'-phosphate
  modified_base 12: mod_base = OTHER; note = 2'-O-methyluridine-3'-phosphate
  modified_base 13: mod_base = OTHER; note = 2'-O-methyluridine-3'-phosphate
  modified_base 14: mod_base = OTHER; note = 2'-O-methyluridine-3'-phosphate
  modified_base 15: mod_base = OTHER; note = 2'-O-methylguanosine-3'-phosphate
  modified_base 16: mod_base = OTHER; note = 2'-O-methylguanosine-3'-phosphate
  modified_base 17: mod_base = OTHER; note = 2'-O-methylcytidine-3'-phosphate
  modified_base 18: mod_base = OTHER; note = 2'-O-methyluridine-3'-phosphate
  modified_base 19: mod_base = OTHER; note = 2'-O-methylguanosine-3'-phosphate
  modified_base 20: mod_base = OTHER; note = 2'-O-methyladenosine-3'-phosphate
  modified_base 21: mod_base = OTHER; note 2'-O-methyluridine-3'-phosphate-N-[tris(GalNAc-alkyl)-amido decanoyl)]-4-hydroxyprolinol (Hyp-(GalNAc-alkyl)3)
gatgaagaaactttggctgat

SEQ ID NO: 1913 - RNA, 23 nt, synthetic construct
  source 1..23: mol_type = other RNA
  modified_base 1: mod_base = OTHER; note = 2'-O-methyladenosine-3'- phosphorothioate
  modified_base 2: mod_base = OTHER; note = 2'-fluorouridine -3'-phosphorothioate
  modified_base 3: mod_base = OTHER; note = 2'-O-methylcytidine-3'-phosphate
  modified_base 4: mod_base = OTHER; note = 2'-O-methyladenosine-3'-phosphate
  modified_base 5: mod_base = OTHER; note = 2'-O-methylguanosine-3'-phosphate
  modified_base 6: mod_base = OTHER; note = 2'-fluorocytidine-3'-phosphate
  modified_base 7: mod_base = OTHER; note = 2'-O-methylcytidine-3'-phosphate
  modified_base 8: mod_base = OTHER; note = 2'-fluoroadenosine-3'-phosphate
  modified_base 9: mod_base = OTHER; note = 2'-fluoroadenosine-3'-phosphate
  modified_base 10: mod_base = OTHER; note = 2'-O-methyladenosine-3'-phosphate
  modified_base 11: mod_base = OTHER; note = 2'-O-methylguanosine-3'-phosphate
  modified_base 12: mod_base = OTHER; note = 2'-O-methyluridine-3'-phosphate
  modified_base 13: mod_base = OTHER; note = 2'-O-methyluridine-3'-phosphate
  modified_base 14: mod_base = OTHER; note = 2'-fluorouridine-3'-phosphate
  modified_base 15: mod_base = OTHER; note = 2'-O-methylcytidine-3'-phosphate
  modified_base 16: mod_base = OTHER; note = 2'-fluorouridine-3'-phosphate
  modified_base 17: mod_base = OTHER; note = 2'-O-methyluridine-3'-phosphate
  modified_base 18: mod_base = OTHER; note = 2'-O-methylcytidine-3'-phosphate
  modified_base 19: mod_base = OTHER; note = 2'-O-methyladenosine-3'-phosphate
  modified_base 20: mod_base = OTHER; note = 2'-O-methyluridine-3'-phosphate
  modified_base 21: mod_base = OTHER; note = 2'-O-methylcytidine-3'- phosphorothioate
  modified_base 22: mod_base = OTHER; note = 2'-O-methyladenosine-3'- phosphorothioate
  modified_base 23: mod_base = OTHER; note = 2'-O-methyluridine-3'-phosphate
atcagccaaagtttcttcatcat

SEQ ID NO: 1914 - RNA, 21 nt, synthetic construct
  source 1..21: mol_type = other RNA
  modified_base 1: mod_base = OTHER; note = 2'-O-methyladenosine-3'- phosphorothioate
  modified_base 2: mod_base = OTHER; note = 2'-O-methyladenosine-3'- phosphorothioate
  modified_base 3: mod_base = OTHER; note = 2'-O-methylguanosine-3'-phosphate
  modified_base 4: mod_base = OTHER; note = 2'-O-methylguanosine-3'-phosphate
  modified_base 5: mod_base = OTHER; note = 2'-O-methylcytidine-3'-phosphate
  modified_base 6: mod_base = OTHER; note = 2'-O-methyladenosine-3'-phosphate
  modified_base 7: mod_base = OTHER; note = 2'-fluorocytidine-3'-phosphate
  modified_base 8: mod_base = OTHER; note = 2'-O-methyluridine-3'-phosphate
  modified_base 9: mod_base = OTHER; note = 2'-fluoroguanosine-3'-phosphate
  modified_base 10: mod_base = OTHER; note = 2'-fluoroadenosine-3'-phosphate
  modified_base 11: mod_base = OTHER; note = 2'-fluorouridine-3'-phosphate
  modified_base 12: mod_base = OTHER; note = 2'-O-methylguanosine-3'-phosphate
  modified_base 13: mod_base = OTHER; note = 2'-O-methyluridine-3'-phosphate
  modified_base 14: mod_base = OTHER; note = 2'-O-methyluridine-3'-phosphate
  modified_base 15: mod_base = OTHER; note = 2'-O-methylcytidine-3'-phosphate
  modified_base 16: mod_base = OTHER; note = 2'-O-methyluridine-3'-phosphate
  modified_base 17: mod_base = OTHER; note = 2'-O-methylguanosine-3'-phosphate
  modified_base 18: mod_base = OTHER; note = 2'-O-methyladenosine-3'-phosphate
  modified_base 19: mod_base = OTHER; note = 2'-O-methyladenosine-3'-phosphate
  modified_base 20: mod_base = OTHER; note = 2'-O-methyladenosine-3'-phosphate
  modified_base 21: mod_base = OTHER; note 2'-O-methylguanosine-3'-phosphate-N-[tris(GalNAc-alkyl)-ami dodecanoyl)]-4-hydroxyprolinol (Hyp-(GalNAc-alkyl)3)
aaggcactgatgttctgaaag

SEQ ID NO: 1915 - RNA, 23 nt, synthetic construct
  source 1..23: mol_type = other RNA
  modified_base 1: mod_base = OTHER; note = 2'-O-methylcytidine-3'- phosphorothioate
  modified_base 2: mod_base = OTHER; note = 2'-fluorouridine -3'-phosphorothioate
  modified_base 3: mod_base = OTHER; note = 2'-O-methyluridine-3'-phosphate
  modified_base 4: mod_base = OTHER; note = 2'-O-methyluridine-3'-phosphate
  modified_base 5: mod_base = OTHER; note = 2'-O-methylcytidine-3'-phosphate
  modified_base 6: mod_base = OTHER; note = 2'-fluoroadenosine-3'-phosphate
  modified_base 7: mod_base = OTHER; note = 2'-O-methylguanosine-3'-phosphate
  modified_base 8: mod_base = OTHER; note = 2'-fluoroadenosine-3'-phosphate
  modified_base 9: mod_base = OTHER; note = 2'-fluoroadenosine-3'-phosphate
  modified_base 10: mod_base = OTHER; note = 2'-O-methylcytidine-3'-phosphate
  modified_base 11: mod_base = OTHER; note = 2'-O-methyladenosine-3'-phosphate
  modified_base 12: mod_base = OTHER; note = 2'-O-methyluridine-3'-phosphate
  modified_base 13: mod_base = OTHER; note = 2'-O-methylcytidine-3'-phosphate
  modified_base 14: mod_base = OTHER; note = 2'-fluoroadenosine-3'-phosphate
  modified_base 15: mod_base = OTHER; note = 2'-O-methylguanosine-3'-phosphate
  modified_base 16: mod_base = OTHER; note = 2'-fluorouridine-3'-phosphate
  modified_base 17: mod_base = OTHER; note = 2'-O-methylguanosine-3'-phosphate
  modified_base 18: mod_base = OTHER; note = 2'-O-methylcytidine-3'-phosphate
  modified_base 19: mod_base = OTHER; note = 2'-O-methylcytidine-3'-phosphate
  modified_base 20: mod_base = OTHER; note = 2'-O-methyluridine-3'-phosphate
  modified_base 21: mod_base = OTHER; note = 2'-O-methyluridine-3'-phosphorothioate
  modified_base 22: mod_base = OTHER; note = 2'-O-methyluridine-3'-phosphorothioate
  modified_base 23: mod_base = OTHER; note = 2'-O-methylcytidine-3'-phosphate
ctttcagaacatcagtgcctttc

SEQ ID NO: 1916 - RNA, 21 nt, synthetic construct
  source 1..21: mol_type = other RNA
  modified_base 1: mod_base = OTHER; note = 2'-O-methyladenosine-3'- phosphorothioate
  modified_base 2: mod_base = OTHER; note = 2'-O-methylguanosine-3'- phosphorothioate
  modified_base 3: mod_base = OTHER; note = 2'-O-methylguanosine-3'-phosphate
  modified_base 4: mod_base = OTHER; note = 2'-O-methylcytidine-3'-phosphate
  modified_base 5: mod_base = OTHER; note = 2'-O-methyladenosine-3'-phosphate
  modified_base 6: mod_base = OTHER; note = 2'-O-methylcytidine-3'-phosphate
  modified_base 7: mod_base = OTHER; note = 2'-fluorouridine-3'-phosphate
  modified_base 8: mod_base = OTHER; note = 2'-O-methylguanosine-3'-phosphate
  modified_base 9: mod_base = OTHER; note = 2'-fluoroadenosine-3'-phosphate
  modified_base 10: mod_base = OTHER; note = 2'-fluorouridine-3'-phosphate
  modified_base 11: mod_base = OTHER; note = 2'-fluoroguanosine-3'-phosphate
  modified_base 12: mod_base = OTHER; note = 2'-O-methyluridine-3'-phosphate
  modified_base 13: mod_base = OTHER; note = 2'-O-methyluridine-3'-phosphate
  modified_base 14: mod_base = OTHER; note = 2'-O-methylcytidine-3'-phosphate
  modified_base 15: mod_base = OTHER; note = 2'-O-methyluridine-3'-phosphate
  modified_base 16: mod_base = OTHER; note = 2'-O-methylguanosine-3'-phosphate
  modified_base 17: mod_base = OTHER; note = 2'-O-methyladenosine-3'-phosphate
  modified_base 18: mod_base = OTHER; note = 2'-O-methyladenosine-3'-phosphate
  modified_base 19: mod_base = OTHER; note = 2'-O-methyladenosine-3'-phosphate
  modified_base 20: mod_base = OTHER; note = 2'-O-methylguanosine-3'-phosphate
  modified_base 21: mod_base = OTHER; note 2'-O-methylcytidine-3'-phosphate-N-[tris(GalNAc-alkyl)-amid odecanoyl)]-4-hydroxyprolinol (Hyp-(GalNAc-alkyl)3)
aggcactgatgttctgaaagc

SEQ ID NO: 1917 - RNA, 23 nt, synthetic construct
  source 1..23: mol_type = other RNA
  modified_base 1: mod_base = OTHER; note = 2'-O-methylguanosine-3'- phosphorothioate
  modified_base 2: mod_base = OTHER; note = 2'-fluorocytidine-3'-phosphorothioate
  modified_base 3: mod_base = OTHER; note = 2'-O-methyluridine-3'-phosphate
  modified_base 4: mod_base = OTHER; note = 2'-O-methyluridine-3'-phosphate
  modified_base 5: mod_base = OTHER; note = 2'-O-methyluridine-3'-phosphate
  modified_base 6: mod_base = OTHER; note = 2'-fluorocytidine-3'-phosphate
  modified_base 7: mod_base = OTHER; note = 2'-O-methyladenosine-3'-phosphate
  modified_base 8: mod_base = OTHER; note = 2'-fluoroguanosine-3'-phosphate
  modified_base 9: mod_base = OTHER; note = 2'-fluoroadenosine-3'-phosphate
  modified_base 10: mod_base = OTHER; note = 2'-O-methyladenosine-3'-phosphate
  modified_base 11: mod_base = OTHER; note = 2'-O-methylcytidine-3'-phosphate
  modified_base 12: mod_base = OTHER; note = 2'-O-methyladenosine-3'-phosphate
  modified_base 13: mod_base = OTHER; note = 2'-O-methyluridine-3'-phosphate
  modified_base 14: mod_base = OTHER; note = 2'-fluorocytidine-3'-phosphate
  modified_base 15: mod_base = OTHER; note = 2'-O-methyladenosine-3'-phosphate
  modified_base 16: mod_base = OTHER; note = 2'-fluoroguanosine-3'-phosphate
  modified_base 17: mod_base = OTHER; note = 2'-O-methyluridine-3'-phosphate
  modified_base 18: mod_base = OTHER; note = 2'-O-methylguanosine-3'-phosphate
  modified_base 19: mod_base = OTHER; note = 2'-O-methylcytidine-3'-phosphate
  modified_base 20: mod_base = OTHER; note = 2'-O-methylcytidine-3'-phosphate
  modified_base 21: mod_base = OTHER; note = 2'-O-methyluridine-3'-phosphorothioate
  modified_base 22: mod_base = OTHER; note = 2'-O-methyluridine-3'-phosphorothioate
  modified_base 23: mod_base = OTHER; note = 2'-O-methyluridine-3'-phosphate
gctttcagaacatcagtgccttt

SEQ ID NO: 1918 - RNA, 21 nt, synthetic construct
  source 1..21: mol_type = other RNA
  modified_base 1: mod_base = OTHER; note = 2'-O-methylcytidine-3'- phosphorothioate
  modified_base 2: mod_base = OTHER; note = 2'-O-methylguanosine-3'- phosphorothioate
  modified_base 3: mod_base = OTHER; note = 2'-O-methylguanosine-3'-phosphate
  modified_base 4: mod_base = OTHER; note = 2'-O-methyladenosine-3'-phosphate
  modified_base 5: mod_base = OTHER; note = 2'-O-methyladenosine-3'-phosphate
  modified_base 6: mod_base = OTHER; note = 2'-O-methyladenosine-3'-phosphate
  modified_base 7: mod_base = OTHER; note = 2'-fluoroguanosine-3'-phosphate
  modified_base 8: mod_base = OTHER; note = 2'-O-methylguanosine-3'-phosphate
  modified_base 9: mod_base = OTHER; note = 2'-fluorocytidine-3'-phosphate
  modified_base 10: mod_base = OTHER; note = 2'-fluoroadenosine-3'-phosphate
  modified_base 11: mod_base = OTHER; note = 2'-fluorocytidine-3'-phosphate
  modified_base 12: mod_base = OTHER; note = 2'-O-methyluridine-3'-phosphate
  modified_base 13: mod_base = OTHER; note = 2'-O-methylguanosine-3'-phosphate
  modified_base 14: mod_base = OTHER; note = 2'-O-methyladenosine-3'-phosphate
  modified_base 15: mod_base = OTHER; note = 2'-O-methyluridine-3'-phosphate
  modified_base 16: mod_base = OTHER; note = 2'-O-methylguanosine-3'-phosphate
  modified_base 17: mod_base = OTHER; note = 2'-O-methyluridine-3'-phosphate
  modified_base 18: mod_base = OTHER; note = 2'-O-methyluridine-3'-phosphate
  modified_base 19: mod_base = OTHER; note = 2'-O-methylcytidine-3'-phosphate
  modified_base 20: mod_base = OTHER; note = 2'-O-methyluridine-3'-phosphate
  modified_base 21: mod_base = OTHER; note 2'-O-methylguanosine-3'-phosphate-N-[tris(GalNAc-alkyl)-ami dodecanoyl)]-4-hydroxyprolinol (Hyp-(GalNAc-alkyl)3)
cggaaaggcactgatgttctg

SEQ ID NO: 1919 - RNA, 23 nt, synthetic construct
  source 1..23: mol_type = other RNA
  modified_base 1: mod_base = OTHER; note = 2'-O-methylcytidine-3'- phosphorothioate
  modified_base 2: mod_base = OTHER; note = 2'-fluoroadenosine-3'-phosphorothioate
  modified_base 3: mod_base = OTHER; note = 2'-O-methylguanosine-3'-phosphate
  modified_base 4: mod_base = OTHER; note = 2'-O-methyladenosine-3'-phosphate
  modified_base 5: mod_base = OTHER; note = 2'-O-methyladenosine-3'-phosphate
  modified_base 6: mod_base = OTHER; note = 2'-fluorocytidine-3'-phosphate
  modified_base 7: mod_base = OTHER; note = 2'-O-methyladenosine-3'-phosphate
  modified_base 8: mod_base = OTHER; note = 2'-fluorouridine-3'-phosphate
  modified_base 9: mod_base = OTHER; note = 2'-fluorocytidine-3'-phosphate
  modified_base 10: mod_base = OTHER; note = 2'-O-methyladenosine-3'-phosphate
  modified_base 11: mod_base = OTHER; note = 2'-O-methylguanosine-3'-phosphate
  modified_base 12: mod_base = OTHER; note = 2'-O-methyluridine-3'-phosphate
  modified_base 13: mod_base = OTHER; note = 2'-O-methylguanosine-3'-phosphate
  modified_base 14: mod_base = OTHER; note = 2'-fluorocytidine-3'-phosphate
  modified_base 15: mod_base = OTHER; note = 2'-O-methylcytidine-3'-phosphate
  modified_base 16: mod_base = OTHER; note = 2'-fluorouridine-3'-phosphate
  modified_base 17: mod_base = OTHER; note = 2'-O-methyluridine-3'-phosphate
  modified_base 18: mod_base = OTHER; note = 2'-O-methyluridine-3'-phosphate
  modified_base 19: mod_base = OTHER; note = 2'-O-methylcytidine-3'-phosphate
  modified_base 20: mod_base = OTHER; note = 2'-O-methylcytidine-3'-phosphate
  modified_base 21: mod_base = OTHER; note = 2'-O-methylguanosine-3'- phosphorothioate
  modified_base 22: mod_base = OTHER; note = 2'-O-methylcytidine-3'- phosphorothioate
  modified_base 23: mod_base = OTHER; note = 2'-O-methyladenosine-3'-phosphate
cagaacatcagtgcctttccgca

SEQ ID NO: 1920 - RNA, 21 nt, synthetic construct
  source 1..21: mol_type = other RNA
  modified_base 1: mod_base = OTHER; note = 2'-O-methylguanosine-3'- phosphorothioate
  modified_base 2: mod_base = OTHER; note = 2'-O-methylcytidine-3'- phosphorothioate
  modified_base 3: mod_base = OTHER; note = 2'-O-methylguanosine-3'-phosphate
  modified_base 4: mod_base = OTHER; note = 2'-O-methylguanosine-3'-phosphate
  modified_base 5: mod_base = OTHER; note = 2'-O-methyladenosine-3'-phosphate
  modified_base 6: mod_base = OTHER; note = 2'-O-methyladenosine-3'-phosphate
  modified_base 7: mod_base = OTHER; note = 2'-fluoroadenosine-3'-phosphate
  modified_base 8: mod_base = OTHER; note = 2'-O-methylguanosine-3'-phosphate
  modified_base 9: mod_base = OTHER; note = 2'-fluoroguanosine-3'-phosphate
  modified_base 10: mod_base = OTHER; note = 2'-fluorocytidine-3'-phosphate
  modified_base 11: mod_base = OTHER; note = 2'-fluoroadenosine-3'-phosphate
  modified_base 12: mod_base = OTHER; note = 2'-O-methylcytidine-3'-phosphate
  modified_base 13: mod_base = OTHER; note = 2'-O-methyluridine-3'-phosphate
  modified_base 14: mod_base = OTHER; note = 2'-O-methylguanosine-3'-phosphate
  modified_base 15: mod_base = OTHER; note = 2'-O-methyladenosine-3'-phosphate
  modified_base 16: mod_base = OTHER; note = 2'-O-methyluridine-3'-phosphate
  modified_base 17: mod_base = OTHER; note = 2'-O-methylguanosine-3'-phosphate
  modified_base 18: mod_base = OTHER; note = 2'-O-methyluridine-3'-phosphate
  modified_base 19: mod_base = OTHER; note = 2'-O-methyluridine-3'-phosphate
  modified_base 20: mod_base = OTHER; note = 2'-O-methylcytidine-3'-phosphate
  modified_base 21: mod_base = OTHER; note 2'-O-methyluridine-3'-phosphate-N-[tris(GalNAc-alkyl)-amido decanoyl)]-4-hydroxyprolinol (Hyp-(GalNAc-alkyl)3)
gcggaaaggcactgatgttct

SEQ ID NO: 1921 - RNA, 23 nt, synthetic construct
  source 1..23: mol_type = other RNA
  modified_base 1: mod_base = OTHER; note = 2'-O-methyladenosine-3'- phosphorothioate
  modified_base 2: mod_base = OTHER; note = 2'-fluoroguanosine-3'-phosphorothioate
  modified_base 3: mod_base = OTHER; note = 2'-O-methyladenosine-3'-phosphate
  modified_base 4: mod_base = OTHER; note = 2'-O-methyladenosine-3'-phosphate
  modified_base 5: mod_base = OTHER; note = 2'-O-methylcytidine-3'-phosphate
  modified_base 6: mod_base = OTHER; note = 2'-fluoroadenosine-3'-phosphate
  modified_base 7: mod_base = OTHER; note = 2'-O-methyluridine-3'-phosphate
  modified_base 8: mod_base = OTHER; note = 2'-fluorocytidine-3'-phosphate
  modified_base 9: mod_base = OTHER; note = 2'-fluoroadenosine-3'-phosphate
  modified_base 10: mod_base = OTHER; note = 2'-O-methylguanosine-3'-phosphate
  modified_base 11: mod_base = OTHER; note = 2'-O-methyluridine-3'-phosphate
  modified_base 12: mod_base = OTHER; note = 2'-O-methylguanosine-3'-phosphate
  modified_base 13: mod_base = OTHER; note = 2'-O-methylcytidine-3'-phosphate
  modified_base 14: mod_base = OTHER; note = 2'-fluorocytidine-3'-phosphate
  modified_base 15: mod_base = OTHER; note = 2'-O-methyluridine-3'-phosphate
  modified_base 16: mod_base = OTHER; note = 2'-fluorouridine-3'-phosphate
  modified_base 17: mod_base = OTHER; note = 2'-O-methyluridine-3'-phosphate
  modified_base 18: mod_base = OTHER; note = 2'-O-methylcytidine-3'-phosphate
  modified_base 19: mod_base = OTHER; note = 2'-O-methylcytidine-3'-phosphate
  modified_base 20: mod_base = OTHER; note = 2'-O-methylguanosine-3'-phosphate
  modified_base 21: mod_base = OTHER; note = 2'-O-methylcytidine-3'- phosphorothioate
  modified_base 22: mod_base = OTHER; note = 2'-O-methyladenosine-3'- phosphorothioate
  modified_base 23: mod_base = OTHER; note = 2'-O-methylcytidine-3'-phosphate
agaacatcagtgcctttccgcac

SEQ ID NO: 1922 - RNA, 21 nt, synthetic construct
  source 1..21: mol_type = other RNA
  modified_base 1: mod_base = OTHER; note = 2'-O-methyladenosine-3'- phosphorothioate
  modified_base 2: mod_base = OTHER; note = 2'-O-methylguanosine-3'- phosphorothioate
  modified_base 3: mod_base = OTHER; note = 2'-O-methyladenosine-3'-phosphate
  modified_base 4: mod_base = OTHER; note = 2'-O-methyladenosine-3'-phosphate
  modified_base 5: mod_base = OTHER; note = 2'-O-methylguanosine-3'-phosphate
  modified_base 6: mod_base = OTHER; note = 2'-O-methyladenosine-3'-phosphate
  modified_base 7: mod_base = OTHER; note = 2'-fluorocytidine-3'-phosphate
  modified_base 8: mod_base = OTHER; note = 2'-O-methyluridine-3'-phosphate
  modified_base 9: mod_base = OTHER; note = 2'-fluoroguanosine-3'-phosphate
  modified_base 10: mod_base = OTHER; note = 2'-fluoroadenosine-3'-phosphate
  modified_base 11: mod_base = OTHER; note = 2'-fluorocytidine-3'-phosphate
  modified_base 12: mod_base = OTHER; note = 2'-O-methyladenosine-3'-phosphate
  modified_base 13: mod_base = OTHER; note = 2'-O-methyluridine-3'-phosphate
  modified_base 14: mod_base = OTHER; note = 2'-O-methylcytidine-3'-phosphate
  modified_base 15: mod_base = OTHER; note = 2'-O-methyladenosine-3'-phosphate
  modified_base 16: mod_base = OTHER; note = 2'-O-methyluridine-3'-phosphate
  modified_base 17: mod_base = OTHER; note = 2'-O-methyluridine-3'-phosphate
  modified_base 18: mod_base = OTHER; note = 2'-O-methylguanosine-3'-phosphate
  modified_base 19: mod_base = OTHER; note = 2'-O-methylcytidine-3'-phosphate
  modified_base 20: mod_base = OTHER; note = 2'-O-methylcytidine-3'-phosphate
  modified_base 21: mod_base = OTHER; note 2'-O-methyladenosine-3'-phosphate-N-[tris(GalNAc-alkyl)-ami dodecanoyl)]-4-hydroxyprolinol (Hyp-(GalNAc-alkyl)3)
agaagactgacatcattgcca

SEQ ID NO: 1923 - RNA, 23 nt, synthetic construct
  source 1..23: mol_type = other RNA
  modified_base 1: mod_base = OTHER; note = 2'-O-methyluridine-3'-phosphorothioate
  modified_base 2: mod_base = OTHER; note = 2'-fluoroguanosine-3'-phosphorothioate
  modified_base 3: mod_base = OTHER; note = 2'-O-methylguanosine-3'-phosphate
  modified_base 4: mod_base = OTHER; note = 2'-O-methylcytidine-3'-phosphate
  modified_base 5: mod_base = OTHER; note = 2'-O-methyladenosine-3'-phosphate
  modified_base 6: mod_base = OTHER; note = 2'-fluoroadenosine-3'-phosphate
  modified_base 7: mod_base = OTHER; note = 2'-O-methyluridine-3'-phosphate
  modified_base 8: mod_base = OTHER; note = 2'-fluoroguanosine-3'-phosphate
  modified_base 9: mod_base = OTHER; note = 2'-fluoroadenosine-3'-phosphate
  modified_base 10: mod_base = OTHER; note = 2'-O-methyluridine-3'-phosphate
  modified_base 11: mod_base = OTHER; note = 2'-O-methylguanosine-3'-phosphate
  modified_base 12: mod_base = OTHER; note = 2'-O-methyluridine-3'-phosphate
  modified_base 13: mod_base = OTHER; note = 2'-O-methylcytidine-3'-phosphate
  modified_base 14: mod_base = OTHER; note = 2'-fluoroadenosine-3'-phosphate
  modified_base 15: mod_base = OTHER; note = 2'-O-methylguanosine-3'-phosphate
  modified_base 16: mod_base = OTHER; note = 2'-fluorouridine-3'-phosphate
  modified_base 17: mod_base = OTHER; note = 2'-O-methylcytidine-3'-phosphate
  modified_base 18: mod_base = OTHER; note = 2'-O-methyluridine-3'-phosphate
  modified_base 19: mod_base = OTHER; note = 2'-O-methyluridine-3'-phosphate
  modified_base 20: mod_base = OTHER; note = 2'-O-methylcytidine-3'-phosphate
  modified_base 21: mod_base = OTHER; note = 2'-O-methyluridine-3'-phosphorothioate
  modified_base 22: mod_base = OTHER; note = 2'-O-methylcytidine-3'- phosphorothioate
  modified_base 23: mod_base = OTHER; note = 2'-O-methyladenosine-3'-phosphate
tggcaatgatgtcagtcttctca

SEQ ID NO: 1924 - RNA, 21 nt, synthetic construct
  source 1..21: mol_type = other RNA
  modified_base 1: mod_base = OTHER; note = 2'-O-methylguanosine-3'- phosphorothioate
  modified_base 2: mod_base = OTHER; note = 2'-O-methyladenosine-3'- phosphorothioate
  modified_base 3: mod_base = OTHER; note = 2'-O-methyladenosine-3'-phosphate
  modified_base 4: mod_base = OTHER; note = 2'-O-methylguanosine-3'-phosphate
  modified_base 5: mod_base = OTHER; note = 2'-O-methyladenosine-3'-phosphate
  modified_base 6: mod_base = OTHER; note = 2'-O-methylcytidine-3'-phosphate
  modified_base 7: mod_base = OTHER; note = 2'-fluorouridine-3'-phosphate
  modified_base 8: mod_base = OTHER; note = 2'-O-methylguanosine-3'-phosphate
  modified_base 9: mod_base = OTHER; note = 2'-fluoroadenosine-3'-phosphate
  modified_base 10: mod_base = OTHER; note = 2'-fluorocytidine-3'-phosphate
  modified_base 11: mod_base = OTHER; note = 2'-fluoroadenosine-3'-phosphate
  modified_base 12: mod_base = OTHER; note = 2'-O-methyluridine-3'-phosphate
  modified_base 13: mod_base = OTHER; note = 2'-O-methylcytidine-3'-phosphate
  modified_base 14: mod_base = OTHER; note = 2'-O-methyladenosine-3'-phosphate
  modified_base 15: mod_base = OTHER; note = 2'-O-methyluridine-3'-phosphate
  modified_base 16: mod_base = OTHER; note = 2'-O-methyluridine-3'-phosphate
  modified_base 17: mod_base = OTHER; note = 2'-O-methylguanosine-3'-phosphate
  modified_base 18: mod_base = OTHER; note = 2'-O-methylcytidine-3'-phosphate
  modified_base 19: mod_base = OTHER; note = 2'-O-methylcytidine-3'-phosphate
  modified_base 20: mod_base = OTHER; note = 2'-O-methyladenosine-3'-phosphate
  modified_base 21: mod_base = OTHER; note 2'-O-methyladenosine-3'-phosphate-N-[tris(GalNAc-alkyl)-ami dodecanoyl)]-4-hydroxyprolinol (Hyp-(GalNAc-alkyl)3)
gaagactgacatcattgccaa

SEQ ID NO: 1925 - RNA, 23 nt, synthetic construct
  source 1..23: mol_type = other RNA
  modified_base 1: mod_base = OTHER; note = 2'-O-methyluridine-3'-phosphorothioate
  modified_base 2: mod_base = OTHER; note = 2'-fluorouridine -3'-phosphorothioate
  modified_base 3: mod_base = OTHER; note = 2'-O-methylguanosine-3'-phosphate
  modified_base 4: mod_base = OTHER; note = 2'-O-methylguanosine-3'-phosphate
  modified_base 5: mod_base = OTHER; note = 2'-O-methylcytidine-3'-phosphate
  modified_base 6: mod_base = OTHER; note = 2'-fluoroadenosine-3'-phosphate
  modified_base 7: mod_base = OTHER; note = 2'-O-methyladenosine-3'-phosphate
  modified_base 8: mod_base = OTHER; note = 2'-fluorouridine-3'-phosphate
  modified_base 9: mod_base = OTHER; note = 2'-fluoroguanosine-3'-phosphate
  modified_base 10: mod_base = OTHER; note = 2'-O-methyladenosine-3'-phosphate
  modified_base 11: mod_base = OTHER; note = 2'-O-methyluridine-3'-phosphate
  modified_base 12: mod_base = OTHER; note = 2'-O-methylguanosine-3'-phosphate
  modified_base 13: mod_base = OTHER; note = 2'-O-methyluridine-3'-phosphate
  modified_base 14: mod_base = OTHER; note = 2'-fluorocytidine-3'-phosphate
  modified_base 15: mod_base = OTHER; note = 2'-O-methyladenosine-3'-phosphate
  modified_base 16: mod_base = OTHER; note = 2'-fluoroguanosine-3'-phosphate
  modified_base 17: mod_base = OTHER; note = 2'-O-methyluridine-3'-phosphate
  modified_base 18: mod_base = OTHER; note = 2'-O-methylcytidine-3'-phosphate
  modified_base 19: mod_base = OTHER; note = 2'-O-methyluridine-3'-phosphate
  modified_base 20: mod_base = OTHER; note = 2'-O-methyluridine-3'-phosphate
  modified_base 21: mod_base = OTHER; note = 2'-O-methylcytidine-3'- phosphorothioate
  modified_base 22: mod_base = OTHER; note = 2'-O-methyluridine-3'-phosphorothioate
  modified_base 23: mod_base = OTHER; note = 2'-O-methylcytidine-3'-phosphate
ttggcaatgatgtcagtcttctc

SEQ ID NO: 1926 - RNA, 21 nt, synthetic construct
  source 1..21: mol_type = other RNA
  modified_base 1: mod_base = OTHER; note = 2'-O-methylguanosine-3'- phosphorothioate
  modified_base 2: mod_base = OTHER; note = 2'-O-methylcytidine-3'- phosphorothioate
  modified_base 3: mod_base = OTHER; note = 2'-O-methyluridine-3'-phosphate
  modified_base 4: mod_base = OTHER; note = 2'-O-methylguanosine-3'-phosphate
  modified_base 5: mod_base = OTHER; note = 2'-O-methyladenosine-3'-phosphate
  modified_base 6: mod_base = OTHER; note = 2'-O-methylguanosine-3'-phosphate
  modified_base 7: mod_base = OTHER; note = 2'-fluoroadenosine-3'-phosphate
  modified_base 8: mod_base = OTHER; note = 2'-O-methyladenosine-3'-phosphate
  modified_base 9: mod_base = OTHER; note = 2'-fluoroguanosine-3'-phosphate
  modified_base 10: mod_base = OTHER; note = 2'-fluoroadenosine-3'-phosphate
  modified_base 11: mod_base = OTHER; note = 2'-fluorocytidine-3'-phosphate
  modified_base 12: mod_base = OTHER; note = 2'-O-methyluridine-3'-phosphate
  modified_base 13: mod_base = OTHER; note = 2'-O-methylguanosine-3'-phosphate
  modified_base 14: mod_base = OTHER; note = 2'-O-methyladenosine-3'-phosphate
  modified_base 15: mod_base = OTHER; note = 2'-O-methylcytidine-3'-phosphate
  modified_base 16: mod_base = OTHER; note = 2'-O-methyladenosine-3'-phosphate
  modified_base 17: mod_base = OTHER; note = 2'-O-methyluridine-3'-phosphate
  modified_base 18: mod_base = OTHER; note = 2'-O-methylcytidine-3'-phosphate
  modified_base 19: mod_base = OTHER; note = 2'-O-methyladenosine-3'-phosphate
  modified_base 20: mod_base = OTHER; note = 2'-O-methyluridine-3'-phosphate
  modified_base 21: mod_base = OTHER; note 2'-O-methyluridine-3'-phosphate-N-[tris(GalNAc-alkyl)-amido decanoyl)]-4-hydroxyprolinol (Hyp-(GalNAc-alkyl)3)
gctgagaagactgacatcatt

SEQ ID NO: 1927 - RNA, 23 nt, synthetic construct
  source 1..23: mol_type = other RNA
  modified_base 1: mod_base = OTHER; note = 2'-O-methyladenosine-3'- phosphorothioate
  modified_base 2: mod_base = OTHER; note = 2'-fluoroadenosine-3'-phosphorothioate
  modified_base 3: mod_base = OTHER; note = 2'-O-methyluridine-3'-phosphate
  modified_base 4: mod_base = OTHER; note = 2'-O-methylguanosine-3'-phosphate
  modified_base 5: mod_base = OTHER; note = 2'-O-methyladenosine-3'-phosphate
  modified_base 6: mod_base = OTHER; note = 2'-fluorouridine-3'-phosphate
  modified_base 7: mod_base = OTHER; note = 2'-O-methylguanosine-3'-phosphate
  modified_base 8: mod_base = OTHER; note = 2'-fluorouridine-3'-phosphate
  modified_base 9: mod_base = OTHER; note = 2'-fluorocytidine-3'-phosphate
  modified_base 10: mod_base = OTHER; note = 2'-O-methyladenosine-3'-phosphate
  modified_base 11: mod_base = OTHER; note = 2'-O-methylguanosine-3'-phosphate
  modified_base 12: mod_base = OTHER; note = 2'-O-methyluridine-3'-phosphate
  modified_base 13: mod_base = OTHER; note = 2'-O-methylcytidine-3'-phosphate
  modified_base 14: mod_base = OTHER; note = 2'-fluorouridine-3'-phosphate
  modified_base 15: mod_base = OTHER; note = 2'-O-methyluridine-3'-phosphate
  modified_base 16: mod_base = OTHER; note = 2'-fluorocytidine-3'-phosphate
  modified_base 17: mod_base = OTHER; note = 2'-O-methyluridine-3'-phosphate
  modified_base 18: mod_base = OTHER; note = 2'-O-methylcytidine-3'-phosphate
  modified_base 19: mod_base = OTHER; note = 2'-O-methyladenosine-3'-phosphate
  modified_base 20: mod_base = OTHER; note = 2'-O-methylguanosine-3'-phosphate
  modified_base 21: mod_base = OTHER; note = 2'-O-methylcytidine-3'- phosphorothioate
  modified_base 22: mod_base = OTHER; note = 2'-O-methylcytidine-3'- phosphorothioate
  modified_base 23: mod_base = OTHER; note = 2'-O-methyladenosine-3'-phosphate
aatgatgtcagtcttctcagcca

SEQ ID NO: 1928 - RNA, 21 nt, synthetic construct
  source 1..21: mol_type = other RNA
  modified_base 1: mod_base = OTHER; note = 2'-O-methylguanosine-3'- phosphorothioate
  modified_base 2: mod_base = OTHER; note = 2'-O-methylguanosine-3'- phosphorothioate
  modified_base 3: mod_base = OTHER; note = 2'-O-methylcytidine-3'-phosphate
  modified_base 4: mod_base = OTHER; note = 2'-O-methyluridine-3'-phosphate
  modified_base 5: mod_base = OTHER; note = 2'-O-methylguanosine-3'-phosphate
  modified_base 6: mod_base = OTHER; note = 2'-O-methyladenosine-3'-phosphate
  modified_base 7: mod_base = OTHER; note = 2'-fluoroguanosine-3'-phosphate
  modified_base 8: mod_base = OTHER; note = 2'-O-methyladenosine-3'-phosphate
  modified_base 9: mod_base = OTHER; note = 2'-fluoroadenosine-3'-phosphate
  modified_base 10: mod_base = OTHER; note = 2'-fluoroguanosine-3'-phosphate
  modified_base 11: mod_base = OTHER; note = 2'-fluoroadenosine-3'-phosphate
  modified_base 12: mod_base = OTHER; note = 2'-O-methylcytidine-3'-phosphate
  modified_base 13: mod_base = OTHER; note = 2'-O-methyluridine-3'-phosphate
  modified_base 14: mod_base = OTHER; note = 2'-O-methylguanosine-3'-phosphate
  modified_base 15: mod_base = OTHER; note = 2'-O-methyladenosine-3'-phosphate
  modified_base 16: mod_base = OTHER; note = 2'-O-methylcytidine-3'-phosphate
  modified_base 17: mod_base = OTHER; note = 2'-O-methyladenosine-3'-phosphate
  modified_base 18: mod_base = OTHER; note = 2'-O-methyluridine-3'-phosphate
  modified_base 19: mod_base = OTHER; note = 2'-O-methylcytidine-3'-phosphate
  modified_base 20: mod_base = OTHER; note = 2'-O-methyladenosine-3'-phosphate
  modified_base 21: mod_base = OTHER; note 2'-O-methyluridine-3'-phosphate-N-[tris(GalNAc-alkyl)-amido decanoyl)]-4-hydroxyprolinol (Hyp-(GalNAc-alkyl)3)
ggctgagaagactgacatcat

SEQ ID NO: 1929 - RNA, 23 nt, synthetic construct
  source 1..23: mol_type = other RNA
  modified_base 1: mod_base = OTHER; note = 2'-O-methyladenosine-3'- phosphorothioate
  modified_base 2: mod_base = OTHER; note = 2'-fluorouridine -3'-phosphorothioate
  modified_base 3: mod_base = OTHER; note = 2'-O-methylguanosine-3'-phosphate
  modified_base 4: mod_base = OTHER; note = 2'-O-methyladenosine-3'-phosphate
  modified_base 5: mod_base = OTHER; note = 2'-O-methyluridine-3'-phosphate
  modified_base 6: mod_base = OTHER; note = 2'-fluoroguanosine-3'-phosphate
  modified_base 7: mod_base = OTHER; note = 2'-O-methyluridine-3'-phosphate
  modified_base 8: mod_base = OTHER; note = 2'-fluorocytidine-3'-phosphate
  modified_base 9: mod_base = OTHER; note = 2'-fluoroadenosine-3'-phosphate
  modified_base 10: mod_base = OTHER; note = 2'-O-methylguanosine-3'-phosphate
  modified_base 11: mod_base = OTHER; note = 2'-O-methyluridine-3'-phosphate
  modified_base 12: mod_base = OTHER; note = 2'-O-methylcytidine-3'-phosphate
  modified_base 13: mod_base = OTHER; note = 2'-O-methyluridine-3'-phosphate
  modified_base 14: mod_base = OTHER; note = 2'-fluorouridine-3'-phosphate
  modified_base 15: mod_base = OTHER; note = 2'-O-methylcytidine-3'-phosphate
  modified_base 16: mod_base = OTHER; note = 2'-fluorouridine-3'-phosphate
  modified_base 17: mod_base = OTHER; note = 2'-O-methylcytidine-3'-phosphate
  modified_base 18: mod_base = OTHER; note = 2'-O-methyladenosine-3'-phosphate
  modified_base 19: mod_base = OTHER; note = 2'-O-methylguanosine-3'-phosphate
  modified_base 20: mod_base = OTHER; note = 2'-O-methylcytidine-3'-phosphate
  modified_base 21: mod_base = OTHER; note = 2'-O-methylcytidine-3'- phosphorothioate
  modified_base 22: mod_base = OTHER; note = 2'-O-methyladenosine-3'- phosphorothioate
  modified_base 23: mod_base = OTHER; note = 2'-O-methyluridine-3'-phosphate
atgatgtcagtcttctcagccat

SEQ ID NO: 1930 - RNA, 21 nt, synthetic construct
  source 1..21: mol_type = other RNA
  modified_base 1: mod_base = OTHER; note = 2'-O-methyluridine-3'-phosphorothioate
  modified_base 2: mod_base = OTHER; note = 2'-O-methyladenosine-3'- phosphorothioate
  modified_base 3: mod_base = OTHER; note = 2'-O-methyladenosine-3'-phosphate
  modified_base 4: mod_base = OTHER; note = 2'-O-methyluridine-3'-phosphate
  modified_base 5: mod_base = OTHER; note = 2'-O-methylguanosine-3'-phosphate
  modified_base 6: mod_base = OTHER; note = 2'-O-methylcytidine-3'-phosphate
  modified_base 7: mod_base = OTHER; note = 2'-fluorocytidine-3'-phosphate
  modified_base 8: mod_base = OTHER; note = 2'-O-methyluridine-3'-phosphate
  modified_base 9: mod_base = OTHER; note = 2'-fluoroguanosine-3'-phosphate
  modified_base 10: mod_base = OTHER; note = 2'-fluoroadenosine-3'-phosphate
  modified_base 11: mod_base = OTHER; note = 2'-fluorouridine-3'-phosphate
  modified_base 12: mod_base = OTHER; note = 2'-O-methyluridine-3'-phosphate
  modified_base 13: mod_base = OTHER; note = 2'-O-methylcytidine-3'-phosphate
  modified_base 14: mod_base = OTHER; note = 2'-O-methyladenosine-3'-phosphate
  modified_base 15: mod_base = OTHER; note = 2'-O-methylcytidine-3'-phosphate
  modified_base 16: mod_base = OTHER; note = 2'-O-methyladenosine-3'-phosphate
  modified_base 17: mod_base = OTHER; note = 2'-O-methyladenosine-3'-phosphate
  modified_base 18: mod_base = OTHER; note = 2'-O-methylcytidine-3'-phosphate
  modified_base 19: mod_base = OTHER; note = 2'-O-methyluridine-3'-phosphate
  modified_base 20: mod_base = OTHER; note = 2'-O-methyluridine-3'-phosphate
  modified_base 21: mod_base = OTHER; note 2'-O-methyluridine-3'-phosphate-N-[tris(GalNAc-alkyl)-amido decanoyl)]-4-hydroxyprolinol (Hyp-(GalNAc-alkyl)3)
taatgcctgattcacaacttt

SEQ ID NO: 1931 - RNA, 23 nt, synthetic construct
  source 1..23: mol_type = other RNA
  modified_base 1: mod_base = OTHER; note = 2'-O-methyladenosine-3'- phosphorothioate
  modified_base 2: mod_base = OTHER; note = 2'-fluoroadenosine-3'-phosphorothioate
  modified_base 3: mod_base = OTHER; note = 2'-O-methyladenosine-3'-phosphate
  modified_base 4: mod_base = OTHER; note = 2'-O-methylguanosine-3'-phosphate
  modified_base 5: mod_base = OTHER; note = 2'-O-methyluridine-3'-phosphate
  modified_base 6: mod_base = OTHER; note = 2'-fluorouridine-3'-phosphate
  modified_base 7: mod_base = OTHER; note = 2'-O-methylguanosine-3'-phosphate
  modified_base 8: mod_base = OTHER; note = 2'-fluorouridine-3'-phosphate
  modified_base 9: mod_base = OTHER; note = 2'-fluoroguanosine-3'-phosphate
  modified_base 10: mod_base = OTHER; note = 2'-O-methyladenosine-3'-phosphate
  modified_base 11: mod_base = OTHER; note = 2'-O-methyladenosine-3'-phosphate
  modified_base 12: mod_base = OTHER; note = 2'-O-methyluridine-3'-phosphate
  modified_base 13: mod_base = OTHER; note = 2'-O-methylcytidine-3'-phosphate
  modified_base 14: mod_base = OTHER; note = 2'-fluoroadenosine-3'-phosphate
  modified_base 15: mod_base = OTHER; note = 2'-O-methylguanosine-3'-phosphate
  modified_base 16: mod_base = OTHER; note = 2'-fluoroguanosine-3'-phosphate
  modified_base 17: mod_base = OTHER; note = 2'-O-methylcytidine-3'-phosphate
  modified_base 18: mod_base = OTHER; note = 2'-O-methyladenosine-3'-phosphate
  modified_base 19: mod_base = OTHER; note = 2'-O-methyluridine-3'-phosphate
  modified_base 20: mod_base = OTHER; note = 2'-O-methyluridine-3'-phosphate
  modified_base 21: mod_base = OTHER; note = 2'-O-methyladenosine-3'- phosphorothioate
  modified_base 22: mod_base = OTHER; note = 2'-O-methylcytidine-3'- phosphorothioate
  modified_base 23: mod_base = OTHER; note = 2'-O-methylcytidine-3'-phosphate
aaagttgtgaatcaggcattacc

SEQ ID NO: 1932 - RNA, 21 nt, synthetic construct
  source 1..21: mol_type = other RNA
  modified_base 1: mod_base = OTHER; note = 2'-O-methyladenosine-3'- phosphorothioate
  modified_base 2: mod_base = OTHER; note = 2'-O-methyladenosine-3'- phosphorothioate
  modified_base 3: mod_base = OTHER; note = 2'-O-methyluridine-3'-phosphate
  modified_base 4: mod_base = OTHER; note = 2'-O-methylguanosine-3'-phosphate
  modified_base 5: mod_base = OTHER; note = 2'-O-methylcytidine-3'-phosphate
  modified_base 6: mod_base = OTHER; note = 2'-O-methylcytidine-3'-phosphate
  modified_base 7: mod_base = OTHER; note = 2'-fluorouridine-3'-phosphate
  modified_base 8: mod_base = OTHER; note = 2'-O-methylguanosine-3'-phosphate
  modified_base 9: mod_base = OTHER; note = 2'-fluoroadenosine-3'-phosphate
  modified_base 10: mod_base = OTHER; note = 2'-fluorouridine-3'-phosphate
  modified_base 11: mod_base = OTHER; note = 2'-fluorouridine-3'-phosphate
  modified_base 12: mod_base = OTHER; note = 2'-O-methylcytidine-3'-phosphate
  modified_base 13: mod_base = OTHER; note = 2'-O-methyladenosine-3'-phosphate
  modified_base 14: mod_base = OTHER; note = 2'-O-methylcytidine-3'-phosphate
  modified_base 15: mod_base = OTHER; note = 2'-O-methyladenosine-3'-phosphate
  modified_base 16: mod_base = OTHER; note = 2'-O-methyladenosine-3'-phosphate
  modified_base 17: mod_base = OTHER; note = 2'-O-methylcytidine-3'-phosphate
  modified_base 18: mod_base = OTHER; note = 2'-O-methyluridine-3'-phosphate
  modified_base 19: mod_base = OTHER; note = 2'-O-methyluridine-3'-phosphate
  modified_base 20: mod_base = OTHER; note = 2'-O-methyluridine-3'-phosphate
  modified_base 21: mod_base = OTHER; note 2'-O-methylguanosine-3'-phosphate-N-[tris(GalNAc-alkyl)-ami dodecanoyl)]-4-hydroxyprolinol (Hyp-(GalNAc-alkyl)3)
aatgcctgattcacaactttg

SEQ ID NO: 1933 - RNA, 23 nt, synthetic construct
  source 1..23: mol_type = other RNA
  modified_base 1: mod_base = OTHER; note = 2'-O-methylcytidine-3'- phosphorothioate
  modified_base 2: mod_base = OTHER; note = 2'-fluoroadenosine-3'-phosphorothioate
  modified_base 3: mod_base = OTHER; note = 2'-O-methyladenosine-3'-phosphate
  modified_base 4: mod_base = OTHER; note = 2'-O-methyladenosine-3'-phosphate
  modified_base 5: mod_base = OTHER; note = 2'-O-methylguanosine-3'-phosphate
  modified_base 6: mod_base = OTHER; note = 2'-fluorouridine-3'-phosphate
  modified_base 7: mod_base = OTHER; note = 2'-O-methyluridine-3'-phosphate
  modified_base 8: mod_base = OTHER; note = 2'-fluoroguanosine-3'-phosphate
  modified_base 9: mod_base = OTHER; note = 2'-fluorouridine-3'-phosphate
  modified_base 10: mod_base = OTHER; note = 2'-O-methylguanosine-3'-phosphate
  modified_base 11: mod_base = OTHER; note = 2'-O-methyladenosine-3'-phosphate
  modified_base 12: mod_base = OTHER; note = 2'-O-methyladenosine-3'-phosphate
  modified_base 13: mod_base = OTHER; note = 2'-O-methyluridine-3'-phosphate
  modified_base 14: mod_base = OTHER; note = 2'-fluorocytidine-3'-phosphate
  modified_base 15: mod_base = OTHER; note = 2'-O-methyladenosine-3'-phosphate
  modified_base 16: mod_base = OTHER; note = 2'-fluoroguanosine-3'-phosphate
  modified_base 17: mod_base = OTHER; note = 2'-O-methylguanosine-3'-phosphate
  modified_base 18: mod_base = OTHER; note = 2'-O-methylcytidine-3'-phosphate
  modified_base 19: mod_base = OTHER; note = 2'-O-methyladenosine-3'-phosphate
  modified_base 20: mod_base = OTHER; note = 2'-O-methyluridine-3'-phosphate
  modified_base 21: mod_base = OTHER; note = 2'-O-methyluridine-3'-phosphorothioate
  modified_base 22: mod_base = OTHER; note = 2'-O-methyladenosine-3'- phosphorothioate
  modified_base 23: mod_base = OTHER; note = 2'-O-methylcytidine-3'-phosphate
caaagttgtgaatcaggcattac

SEQ ID NO: 1934 - RNA, 21 nt, synthetic construct
  source 1..21: mol_type = other RNA
  modified_base 1: mod_base = OTHER; note = 2'-O-methyluridine-3'-phosphorothioate
  modified_base 2: mod_base = OTHER; note = 2'-O-methyluridine-3'-phosphorothioate
  modified_base 3: mod_base = OTHER; note = 2'-O-methylguanosine-3'-phosphate
  modified_base 4: mod_base = OTHER; note = 2'-O-methylguanosine-3'-phosphate
  modified_base 5: mod_base = OTHER; note = 2'-O-methyluridine-3'-phosphate
  modified_base 6: mod_base = OTHER; note = 2'-O-methyladenosine-3'-phosphate
  modified_base 7: mod_base = OTHER; note = 2'-fluoroadenosine-3'-phosphate
  modified_base 8: mod_base = OTHER; note = 2'-O-methyluridine-3'-phosphate
  modified_base 9: mod_base = OTHER; note = 2'-fluoroguanosine-3'-phosphate
  modified_base 10: mod_base = OTHER; note = 2'-fluorocytidine-3'-phosphate
  modified_base 11: mod_base = OTHER; note = 2'-fluorocytidine-3'-phosphate
  modified_base 12: mod_base = OTHER; note = 2'-O-methyluridine-3'-phosphate
  modified_base 13: mod_base = OTHER; note = 2'-O-methylguanosine-3'-phosphate
  modified_base 14: mod_base = OTHER; note = 2'-O-methyladenosine-3'-phosphate
  modified_base 15: mod_base = OTHER; note = 2'-O-methyluridine-3'-phosphate
  modified_base 16: mod_base = OTHER; note = 2'-O-methyluridine-3'-phosphate
  modified_base 17: mod_base = OTHER; note = 2'-O-methylcytidine-3'-phosphate
  modified_base 18: mod_base = OTHER; note = 2'-O-methyladenosine-3'-phosphate
  modified_base 19: mod_base = OTHER; note = 2'-O-methylcytidine-3'-phosphate
  modified_base 20: mod_base = OTHER; note = 2'-O-methyladenosine-3'-phosphate
  modified_base 21: mod_base = OTHER; note 2'-O-methyladenosine-3'-phosphate-N-[tris(GalNAc-alkyl)-ami dodecanoyl)]-4-hydroxyprolinol (Hyp-(GalNAc-alkyl)3)
ttggtaatgcctgattcacaa

SEQ ID NO: 1935 - RNA, 23 nt, synthetic construct
  source 1..23: mol_type = other RNA
  modified_base 1: mod_base = OTHER; note = 2'-O-methyluridine-3'-phosphorothioate
  modified_base 2: mod_base = OTHER; note = 2'-fluorouridine -3'-phosphorothioate
  modified_base 3: mod_base = OTHER; note = 2'-O-methylguanosine-3'-phosphate
  modified_base 4: mod_base = OTHER; note = 2'-O-methyluridine-3'-phosphate
  modified_base 5: mod_base = OTHER; note = 2'-O-methylguanosine-3'-phosphate
  modified_base 6: mod_base = OTHER; note = 2'-fluoroadenosine-3'-phosphate
  modified_base 7: mod_base = OTHER; note = 2'-O-methyladenosine-3'-phosphate
  modified_base 8: mod_base = OTHER; note = 2'-fluorouridine-3'-phosphate
  modified_base 9: mod_base = OTHER; note = 2'-fluorocytidine-3'-phosphate
  modified_base 10: mod_base = OTHER; note = 2'-O-methyladenosine-3'-phosphate
  modified_base 11: mod_base = OTHER; note = 2'-O-methylguanosine-3'-phosphate
  modified_base 12: mod_base = OTHER; note = 2'-O-methylguanosine-3'-phosphate
  modified_base 13: mod_base = OTHER; note = 2'-O-methylcytidine-3'-phosphate
  modified_base 14: mod_base = OTHER; note = 2'-fluoroadenosine-3'-phosphate
  modified_base 15: mod_base = OTHER; note = 2'-O-methyluridine-3'-phosphate
  modified_base 16: mod_base = OTHER; note = 2'-fluorouridine-3'-phosphate
  modified_base 17: mod_base = OTHER; note = 2'-O-methyladenosine-3'-phosphate
  modified_base 18: mod_base = OTHER; note = 2'-O-methylcytidine-3'-phosphate
  modified_base 19: mod_base = OTHER; note = 2'-O-methylcytidine-3'-phosphate
  modified_base 20: mod_base = OTHER; note = 2'-O-methyladenosine-3'-phosphate
  modified_base 21: mod_base = OTHER; note = 2'-O-methyladenosine-3'- phosphorothioate
  modified_base 22: mod_base = OTHER; note = 2'-O-methylcytidine-3'- phosphorothioate
  modified_base 23: mod_base = OTHER; note = 2'-O-methyladenosine-3'-phosphate
ttgtgaatcaggcattaccaaca

SEQ ID NO: 1936 - RNA, 21 nt, synthetic construct
  source 1..21: mol_type = other RNA
  modified_base 1: mod_base = OTHER; note = 2'-O-methylguanosine-3'- phosphorothioate
  modified_base 2: mod_base = OTHER; note = 2'-O-methyluridine-3'-phosphorothioate
  modified_base 3: mod_base = OTHER; note = 2'-O-methyluridine-3'-phosphate
  modified_base 4: mod_base = OTHER; note = 2'-O-methylguanosine-3'-phosphate
  modified_base 5: mod_base = OTHER; note = 2'-O-methylguanosine-3'-phosphate
  modified_base 6: mod_base = OTHER; note = 2'-O-methyluridine-3'-phosphate
  modified_base 7: mod_base = OTHER; note = 2'-fluoroadenosine-3'-phosphate
  modified_base 8: mod_base = OTHER; note = 2'-O-methyladenosine-3'-phosphate
  modified_base 9: mod_base = OTHER; note = 2'-fluorouridine-3'-phosphate
  modified_base 10: mod_base = OTHER; note = 2'-fluoroguanosine-3'-phosphate
  modified_base 11: mod_base = OTHER; note = 2'-fluorocytidine-3'-phosphate
  modified_base 12: mod_base = OTHER; note = 2'-O-methylcytidine-3'-phosphate
  modified_base 13: mod_base = OTHER; note = 2'-O-methyluridine-3'-phosphate
  modified_base 14: mod_base = OTHER; note = 2'-O-methylguanosine-3'-phosphate
  modified_base 15: mod_base = OTHER; note = 2'-O-methyladenosine-3'-phosphate
  modified_base 16: mod_base = OTHER; note = 2'-O-methyluridine-3'-phosphate
  modified_base 17: mod_base = OTHER; note = 2'-O-methyluridine-3'-phosphate
  modified_base 18: mod_base = OTHER; note = 2'-O-methylcytidine-3'-phosphate
  modified_base 19: mod_base = OTHER; note = 2'-O-methyladenosine-3'-phosphate
  modified_base 20: mod_base = OTHER; note = 2'-O-methylcytidine-3'-phosphate
  modified_base 21: mod_base = OTHER; note 2'-O-methyladenosine-3'-phosphate-N-[tris(GalNAc-alkyl)-ami dodecanoyl)]-4-hydroxyprolinol (Hyp-(GalNAc-alkyl)3)
gttggtaatgcctgattcaca

SEQ ID NO: 1937 - RNA, 23 nt, synthetic construct
  source 1..23: mol_type = other RNA
  modified_base 1: mod_base = OTHER; note = 2'-O-methyluridine-3'-phosphorothioate
  modified_base 2: mod_base = OTHER; note = 2'-fluoroguanosine-3'-phosphorothioate
  modified_base 3: mod_base = OTHER; note = 2'-O-methyluridine-3'-phosphate
  modified_base 4: mod_base = OTHER; note = 2'-O-methylguanosine-3'-phosphate
  modified_base 5: mod_base = OTHER; note = 2'-O-methyladenosine-3'-phosphate
  modified_base 6: mod_base = OTHER; note = 2'-fluoroadenosine-3'-phosphate
  modified_base 7: mod_base = OTHER; note = 2'-O-methyluridine-3'-phosphate
  modified_base 8: mod_base = OTHER; note = 2'-fluorocytidine-3'-phosphate
  modified_base 9: mod_base = OTHER; note = 2'-fluoroadenosine-3'-phosphate
  modified_base 10: mod_base = OTHER; note = 2'-O-methylguanosine-3'-phosphate
  modified_base 11: mod_base = OTHER; note = 2'-O-methylguanosine-3'-phosphate
  modified_base 12: mod_base = OTHER; note = 2'-O-methylcytidine-3'-phosphate
  modified_base 13: mod_base = OTHER; note = 2'-O-methyladenosine-3'-phosphate
  modified_base 14: mod_base = OTHER; note = 2'-fluorouridine-3'-phosphate
  modified_base 15: mod_base = OTHER; note = 2'-O-methyluridine-3'-phosphate
  modified_base 16: mod_base = OTHER; note = 2'-fluoroadenosine-3'-phosphate
  modified_base 17: mod_base = OTHER; note = 2'-O-methylcytidine-3'-phosphate
  modified_base 18: mod_base = OTHER; note = 2'-O-methylcytidine-3'-phosphate
  modified_base 19: mod_base = OTHER; note = 2'-O-methyladenosine-3'-phosphate
  modified_base 20: mod_base = OTHER; note = 2'-O-methyladenosine-3'-phosphate
  modified_base 21: mod_base = OTHER; note = 2'-O-methylcytidine-3'- phosphorothioate
  modified_base 22: mod_base = OTHER; note = 2'-O-methyladenosine-3'- phosphorothioate
  modified_base 23: mod_base = OTHER; note = 2'-O-methylcytidine-3'-phosphate
tgtgaatcaggcattaccaacac

SEQ ID NO: 1938 - RNA, 21 nt, synthetic construct
  source 1..21: mol_type = other RNA
  modified_base 1: mod_base = OTHER; note = 2'-O-methyluridine-3'-phosphorothioate
  modified_base 2: mod_base = OTHER; note = 2'-O-methyladenosine-3'- phosphorothioate
  modified_base 3: mod_base = OTHER; note = 2'-O-methyluridine-3'-phosphate
  modified_base 4: mod_base = OTHER; note = 2'-O-methylcytidine-3'-phosphate
  modified_base 5: mod_base = OTHER; note = 2'-O-methyladenosine-3'-phosphate
  modified_base 6: mod_base = OTHER; note = 2'-O-methyladenosine-3'-phosphate
  modified_base 7: mod_base = OTHER; note = 2'-fluoroadenosine-3'-phosphate
  modified_base 8: mod_base = OTHER; note = 2'-O-methyluridine-3'-phosphate
  modified_base 9: mod_base = OTHER; note = 2'-fluoroguanosine-3'-phosphate
  modified_base 10: mod_base = OTHER; note = 2'-fluoroguanosine-3'-phosphate
  modified_base 11: mod_base = OTHER; note = 2'-fluorocytidine-3'-phosphate
  modified_base 12: mod_base = OTHER; note = 2'-O-methyluridine-3'-phosphate
  modified_base 13: mod_base = OTHER; note = 2'-O-methylguanosine-3'-phosphate
  modified_base 14: mod_base = OTHER; note = 2'-O-methyladenosine-3'-phosphate
  modified_base 15: mod_base = OTHER; note = 2'-O-methylguanosine-3'-phosphate
  modified_base 16: mod_base = OTHER; note = 2'-O-methyladenosine-3'-phosphate
  modified_base 17: mod_base = OTHER; note = 2'-O-methyladenosine-3'-phosphate
  modified_base 18: mod_base = OTHER; note = 2'-O-methylguanosine-3'-phosphate
  modified_base 19: mod_base = OTHER; note = 2'-O-methyladenosine-3'-phosphate
  modified_base 20: mod_base = OTHER; note = 2'-O-methylcytidine-3'-phosphate
  modified_base 21: mod_base = OTHER; note 2'-O-methyluridine-3'-phosphate-N-[tris(GalNAc-alkyl)-amido decanoyl)]-4-hydroxyprolinol (Hyp-(GalNAc-alkyl)3)
tatcaaatggctgagaagact

SEQ ID NO: 1939 - RNA, 23 nt, synthetic construct
  source 1..23: mol_type = other RNA
  modified_base 1: mod_base = OTHER; note = 2'-O-methyladenosine-3'- phosphorothioate
  modified_base 2: mod_base = OTHER; note = 2'-fluoroguanosine-3'-phosphorothioate
  modified_base 3: mod_base = OTHER; note = 2'-O-methyluridine-3'-phosphate
  modified_base 4: mod_base = OTHER; note = 2'-O-methylcytidine-3'-phosphate
  modified_base 5: mod_base = OTHER; note = 2'-O-methyluridine-3'-phosphate
  modified_base 6: mod_base = OTHER; note = 2'-fluorouridine-3'-phosphate
  modified_base 7: mod_base = OTHER; note = 2'-O-methylcytidine-3'-phosphate
  modified_base 8: mod_base = OTHER; note = 2'-fluorouridine-3'-phosphate
  modified_base 9: mod_base = OTHER; note = 2'-fluorocytidine-3'-phosphate
  modified_base 10: mod_base = OTHER; note = 2'-O-methyladenosine-3'-phosphate
  modified_base 11: mod_base = OTHER; note = 2'-O-methylguanosine-3'-phosphate
  modified_base 12: mod_base = OTHER; note = 2'-O-methylcytidine-3'-phosphate
  modified_base 13: mod_base = OTHER; note = 2'-O-methylcytidine-3'-phosphate
  modified_base 14: mod_base = OTHER; note = 2'-fluoroadenosine-3'-phosphate
  modified_base 15: mod_base = OTHER; note = 2'-O-methyluridine-3'-phosphate
  modified_base 16: mod_base = OTHER; note = 2'-fluorouridine-3'-phosphate
  modified_base 17: mod_base = OTHER; note = 2'-O-methyluridine-3'-phosphate
  modified_base 18: mod_base = OTHER; note = 2'-O-methylguanosine-3'-phosphate
  modified_base 19: mod_base = OTHER; note = 2'-O-methyladenosine-3'-phosphate
  modified_base 20: mod_base = OTHER; note = 2'-O-methyluridine-3'-phosphate
  modified_base 21: mod_base = OTHER; note = 2'-O-methyladenosine-3'- phosphorothioate
  modified_base 22: mod_base = OTHER; note = 2'-O-methyluridine-3'-phosphorothioate
  modified_base 23: mod_base = OTHER; note = 2'-O-methylcytidine-3'-phosphate
agtcttctcagccatttgatatc

SEQ ID NO: 1940 - RNA, 21 nt, synthetic construct
  source 1..21: mol_type = other RNA
  modified_base 1: mod_base = OTHER; note = 2'-O-methyladenosine-3'- phosphorothioate
  modified_base 2: mod_base = OTHER; note = 2'-O-methyluridine-3'-phosphorothioate
  modified_base 3: mod_base = OTHER; note = 2'-O-methylcytidine-3'-phosphate
  modified_base 4: mod_base = OTHER; note = 2'-O-methyladenosine-3'-phosphate
  modified_base 5: mod_base = OTHER; note = 2'-O-methyladenosine-3'-phosphate
  modified_base 6: mod_base = OTHER; note = 2'-O-methyladenosine-3'-phosphate
  modified_base 7: mod_base = OTHER; note = 2'-fluorouridine-3'-phosphate
  modified_base 8: mod_base = OTHER; note = 2'-O-methylguanosine-3'-phosphate
  modified_base 9: mod_base = OTHER; note = 2'-fluoroguanosine-3'-phosphate
  modified_base 10: mod_base = OTHER; note = 2'-fluorocytidine-3'-phosphate
  modified_base 11: mod_base = OTHER; note = 2'-fluorouridine-3'-phosphate
  modified_base 12: mod_base = OTHER; note = 2'-O-methylguanosine-3'-phosphate
  modified_base 13: mod_base = OTHER; note = 2'-O-methyladenosine-3'-phosphate
  modified_base 14: mod_base = OTHER; note = 2'-O-methylguanosine-3'-phosphate
  modified_base 15: mod_base = OTHER; note = 2'-O-methyladenosine-3'-phosphate
  modified_base 16: mod_base = OTHER; note = 2'-O-methyladenosine-3'-phosphate
  modified_base 17: mod_base = OTHER; note = 2'-O-methylguanosine-3'-phosphate
  modified_base 18: mod_base = OTHER; note = 2'-O-methyladenosine-3'-phosphate
  modified_base 19: mod_base = OTHER; note = 2'-O-methylcytidine-3'-phosphate
  modified_base 20: mod_base = OTHER; note = 2'-O-methyluridine-3'-phosphate
  modified_base 21: mod_base = OTHER; note 2'-O-methylguanosine-3'-phosphate-N-[tris(GalNAc-alkyl)-ami dodecanoyl)]-4-hydroxyprolinol (Hyp-(GalNAc-alkyl)3)
atcaaatggctgagaagactg

SEQ ID NO: 1941 - RNA, 23 nt, synthetic construct
  source 1..23: mol_type = other RNA
  modified_base 1: mod_base = OTHER; note = 2'-O-methylcytidine-3'- phosphorothioate
  modified_base 2: mod_base = OTHER; note = 2'-fluoroadenosine-3'-phosphorothioate
  modified_base 3: mod_base = OTHER; note = 2'-O-methylguanosine-3'-phosphate
  modified_base 4: mod_base = OTHER; note = 2'-O-methyluridine-3'-phosphate
  modified_base 5: mod_base = OTHER; note = 2'-O-methylcytidine-3'-phosphate
  modified_base 6: mod_base = OTHER; note = 2'-fluorouridine-3'-phosphate
  modified_base 7: mod_base = OTHER; note = 2'-O-methyluridine-3'-phosphate
  modified_base 8: mod_base = OTHER; note = 2'-fluorocytidine-3'-phosphate
  modified_base 9: mod_base = OTHER; note = 2'-fluorouridine-3'-phosphate
  modified_base 10: mod_base = OTHER; note = 2'-O-methylcytidine-3'-phosphate
  modified_base 11: mod_base = OTHER; note = 2'-O-methyladenosine-3'-phosphate
  modified_base 12: mod_base = OTHER; note = 2'-O-methylguanosine-3'-phosphate
  modified_base 13: mod_base = OTHER; note = 2'-O-methylcytidine-3'-phosphate
  modified_base 14: mod_base = OTHER; note = 2'-fluorocytidine-3'-phosphate
  modified_base 15: mod_base = OTHER; note = 2'-O-methyladenosine-3'-phosphate
  modified_base 16: mod_base = OTHER; note = 2'-fluorouridine-3'-phosphate
  modified_base 17: mod_base = OTHER; note = 2'-O-methyluridine-3'-phosphate
  modified_base 18: mod_base = OTHER; note = 2'-O-methyluridine-3'-phosphate
  modified_base 19: mod_base = OTHER; note = 2'-O-methylguanosine-3'-phosphate
  modified_base 20: mod_base = OTHER; note = 2'-O-methyladenosine-3'-phosphate
  modified_base 21: mod_base = OTHER; note = 2'-O-methyluridine-3'-phosphorothioate
  modified_base 22: mod_base = OTHER; note = 2'-O-methyladenosine-3'- phosphorothioate
  modified_base 23: mod_base = OTHER; note = 2'-O-methyluridine-3'-phosphate
cagtcttctcagccatttgatat

SEQ ID NO: 1942 - RNA, 21 nt, synthetic construct
  source 1..21: mol_type = other RNA
  modified_base 1: mod_base = OTHER; note = 2'-O-methyladenosine-3'- phosphorothioate
  modified_base 2: mod_base = OTHER; note = 2'-O-methyladenosine-3'- phosphorothioate
  modified_base 3: mod_base = OTHER; note = 2'-O-methylguanosine-3'-phosphate
  modified_base 4: mod_base = OTHER; note = 2'-O-methyladenosine-3'-phosphate
  modified_base 5: mod_base = OTHER; note = 2'-O-methyluridine-3'-phosphate
  modified_base 6: mod_base = OTHER; note = 2'-O-methyladenosine-3'-phosphate
  modified_base 7: mod_base = OTHER; note = 2'-fluorouridine-3'-phosphate
  modified_base 8: mod_base = OTHER; note = 2'-O-methylcytidine-3'-phosphate
  modified_base 9: mod_base = OTHER; note = 2'-fluoroadenosine-3'-phosphate
  modified_base 10: mod_base = OTHER; note = 2'-fluoroadenosine-3'-phosphate
  modified_base 11: mod_base = OTHER; note = 2'-fluoroadenosine-3'-phosphate
  modified_base 12: mod_base = OTHER; note = 2'-O-methyluridine-3'-phosphate
  modified_base 13: mod_base = OTHER; note = 2'-O-methylguanosine-3'-phosphate
  modified_base 14: mod_base = OTHER; note = 2'-O-methylguanosine-3'-phosphate
  modified_base 15: mod_base = OTHER; note = 2'-O-methylcytidine-3'-phosphate
  modified_base 16: mod_base = OTHER; note = 2'-O-methyluridine-3'-phosphate
  modified_base 17: mod_base = OTHER; note = 2'-O-methylguanosine-3'-phosphate
  modified_base 18: mod_base = OTHER; note = 2'-O-methyladenosine-3'-phosphate
  modified_base 19: mod_base = OTHER; note = 2'-O-methylguanosine-3'-phosphate
  modified_base 20: mod_base = OTHER; note = 2'-O-methyladenosine-3'-phosphate
  modified_base 21: mod_base = OTHER; note 2'-O-methyladenosine-3'-phosphate-N-[tris(GalNAc-alkyl)-ami dodecanoyl)]-4-hydroxyprolinol (Hyp-(GalNAc-alkyl)3)
aagatatcaaatggctgagaa

SEQ ID NO: 1943 - RNA, 23 nt, synthetic construct
  source 1..23: mol_type = other RNA
  modified_base 1: mod_base = OTHER; note = 2'-O-methyluridine-3'-phosphorothioate
  modified_base 2: mod_base = OTHER; note = 2'-fluorouridine -3'-phosphorothioate
  modified_base 3: mod_base = OTHER; note = 2'-O-methylcytidine-3'-phosphate
  modified_base 4: mod_base = OTHER; note = 2'-O-methyluridine-3'-phosphate
  modified_base 5: mod_base = OTHER; note = 2'-O-methylcytidine-3'-phosphate
  modified_base 6: mod_base = OTHER; note = 2'-fluoroadenosine-3'-phosphate
  modified_base 7: mod_base = OTHER; note = 2'-O-methylguanosine-3'-phosphate
  modified_base 8: mod_base = OTHER; note = 2'-fluorocytidine-3'-phosphate
  modified_base 9: mod_base = OTHER; note = 2'-fluorocytidine-3'-phosphate
  modified_base 10: mod_base = OTHER; note = 2'-O-methyladenosine-3'-phosphate
  modified_base 11: mod_base = OTHER; note = 2'-O-methyluridine-3'-phosphate
  modified_base 12: mod_base = OTHER; note = 2'-O-methyluridine-3'-phosphate
  modified_base 13: mod_base = OTHER; note = 2'-O-methyluridine-3'-phosphate
  modified_base 14: mod_base = OTHER; note = 2'-fluoroguanosine-3'-phosphate
  modified_base 15: mod_base = OTHER; note = 2'-O-methyladenosine-3'-phosphate
  modified_base 16: mod_base = OTHER; note = 2'-fluorouridine-3'-phosphate
  modified_base 17: mod_base = OTHER; note = 2'-O-methyladenosine-3'-phosphate
  modified_base 18: mod_base = OTHER; note = 2'-O-methyluridine-3'-phosphate
  modified_base 19: mod_base = OTHER; note = 2'-O-methylcytidine-3'-phosphate
  modified_base 20: mod_base = OTHER; note = 2'-O-methyluridine-3'-phosphate
  modified_base 21: mod_base = OTHER; note = 2'-O-methyluridine-3'-phosphorothioate
  modified_base 22: mod_base = OTHER; note = 2'-O-methylcytidine-3'- phosphorothioate
  modified_base 23: mod_base = OTHER; note = 2'-O-methylcytidine-3'-phosphate
ttctcagccatttgatatcttcc

SEQ ID NO: 1944 - RNA, 21 nt, synthetic construct
  source 1..21: mol_type = other RNA
  modified_base 1: mod_base = OTHER; note = 2'-O-methylguanosine-3'- phosphorothioate
  modified_base 2: mod_base = OTHER; note = 2'-O-methyladenosine-3'- phosphorothioate
  modified_base 3: mod_base = OTHER; note = 2'-O-methyladenosine-3'-phosphate
  modified_base 4: mod_base = OTHER; note = 2'-O-methylguanosine-3'-phosphate
  modified_base 5: mod_base = OTHER; note = 2'-O-methyladenosine-3'-phosphate
  modified_base 6: mod_base = OTHER; note = 2'-O-methyluridine-3'-phosphate
  modified_base 7: mod_base = OTHER; note = 2'-fluoroadenosine-3'-phosphate
  modified_base 8: mod_base = OTHER; note = 2'-O-methyluridine-3'-phosphate
  modified_base 9: mod_base = OTHER; note = 2'-fluorocytidine-3'-phosphate
  modified_base 10: mod_base = OTHER; note = 2'-fluoroadenosine-3'-phosphate
  modified_base 11: mod_base = OTHER; note = 2'-fluoroadenosine-3'-phosphate
  modified_base 12: mod_base = OTHER; note = 2'-O-methyladenosine-3'-phosphate
  modified_base 13: mod_base = OTHER; note = 2'-O-methyluridine-3'-phosphate
  modified_base 14: mod_base = OTHER; note = 2'-O-methylguanosine-3'-phosphate
  modified_base 15: mod_base = OTHER; note = 2'-O-methylguanosine-3'-phosphate
  modified_base 16: mod_base = OTHER; note = 2'-O-methylcytidine-3'-phosphate
  modified_base 17: mod_base = OTHER; note = 2'-O-methyluridine-3'-phosphate
  modified_base 18: mod_base = OTHER; note = 2'-O-methylguanosine-3'-phosphate
  modified_base 19: mod_base = OTHER; note = 2'-O-methyladenosine-3'-phosphate
  modified_base 20: mod_base = OTHER; note = 2'-O-methylguanosine-3'-phosphate
  modified_base 21: mod_base = OTHER; note 2'-O-methyladenosine-3'-phosphate-N-[tris(GalNAc-alkyl)-ami dodecanoyl)]-4-hydroxyprolinol (Hyp-(GalNAc-alkyl)3)
gaagatatcaaatggctgaga

SEQ ID NO: 1945 - RNA, 23 nt, synthetic construct
  source 1..23: mol_type = other RNA
  modified_base 1: mod_base = OTHER; note = 2'-O-methyluridine-3'-phosphorothioate
  modified_base 2: mod_base = OTHER; note = 2'-fluorocytidine-3'-phosphorothioate
  modified_base 3: mod_base = OTHER; note = 2'-O-methyluridine-3'-phosphate
  modified_base 4: mod_base = OTHER; note = 2'-O-methylcytidine-3'-phosphate
  modified_base 5: mod_base = OTHER; note = 2'-O-methyladenosine-3'-phosphate
  modified_base 6: mod_base = OTHER; note = 2'-fluoroguanosine-3'-phosphate
  modified_base 7: mod_base = OTHER; note = 2'-O-methylcytidine-3'-phosphate
  modified_base 8: mod_base = OTHER; note = 2'-fluorocytidine-3'-phosphate
  modified_base 9: mod_base = OTHER; note = 2'-fluoroadenosine-3'-phosphate
  modified_base 10: mod_base = OTHER; note = 2'-O-methyluridine-3'-phosphate
  modified_base 11: mod_base = OTHER; note = 2'-O-methyluridine-3'-phosphate
  modified_base 12: mod_base = OTHER; note = 2'-O-methyluridine-3'-phosphate
  modified_base 13: mod_base = OTHER; note = 2'-O-methylguanosine-3'-phosphate
  modified_base 14: mod_base = OTHER; note = 2'-fluoroadenosine-3'-phosphate
  modified_base 15: mod_base = OTHER; note = 2'-O-methyluridine-3'-phosphate
  modified_base 16: mod_base = OTHER; note = 2'-fluoroadenosine-3'-phosphate
  modified_base 17: mod_base = OTHER; note = 2'-O-methyluridine-3'-phosphate
  modified_base 18: mod_base = OTHER; note = 2'-O-methylcytidine-3'-phosphate
  modified_base 19: mod_base = OTHER; note = 2'-O-methyluridine-3'-phosphate
  modified_base 20: mod_base = OTHER; note = 2'-O-methyluridine-3'-phosphate
  modified_base 21: mod_base = OTHER; note = 2'-O-methylcytidine-3'- phosphorothioate
  modified_base 22: mod_base = OTHER; note = 2'-O-methylcytidine-3'- phosphorothioate
  modified_base 23: mod_base = OTHER; note = 2'-O-methylcytidine-3'-phosphate
tctcagccatttgatatcttccc

SEQ ID NO: 1946 - RNA, 21 nt, synthetic construct
  source 1..21: mol_type = other RNA
  modified_base 1: mod_base = OTHER; note = 2'-O-methyluridine-3'-phosphorothioate
  modified_base 2: mod_base = OTHER; note = 2'-O-methylcytidine-3'- phosphorothioate
  modified_base 3: mod_base = OTHER; note = 2'-O-methyluridine-3'-phosphate
  modified_base 4: mod_base = OTHER; note = 2'-O-methylguanosine-3'-phosphate
  modified_base 5: mod_base = OTHER; note = 2'-O-methyladenosine-3'-phosphate
  modified_base 6: mod_base = OTHER; note = 2'-O-methylcytidine-3'-phosphate
  modified_base 7: mod_base = OTHER; note = 2'-fluoroadenosine-3'-phosphate
  modified_base 8: mod_base = OTHER; note = 2'-O-methylguanosine-3'-phosphate
  modified_base 9: mod_base = OTHER; note = 2'-fluorouridine-3'-phosphate
  modified_base 10: mod_base = OTHER; note = 2'-fluoroguanosine-3'-phosphate
  modified_base 11: mod_base = OTHER; note = 2'-fluorocytidine-3'-phosphate
  modified_base 12: mod_base = OTHER; note = 2'-O-methyladenosine-3'-phosphate
  modified_base 13: mod_base = OTHER; note = 2'-O-methylcytidine-3'-phosphate
  modified_base 14: mod_base = OTHER; note = 2'-O-methyladenosine-3'-phosphate
  modified_base 15: mod_base = OTHER; note = 2'-O-methyladenosine-3'-phosphate
  modified_base 16: mod_base = OTHER; note = 2'-O-methyluridine-3'-phosphate
  modified_base 17: mod_base = OTHER; note = 2'-O-methyladenosine-3'-phosphate
  modified_base 18: mod_base = OTHER; note = 2'-O-methyluridine-3'-phosphate
  modified_base 19: mod_base = OTHER; note = 2'-O-methyluridine-3'-phosphate
  modified_base 20: mod_base = OTHER; note = 2'-O-methyluridine-3'-phosphate
  modified_base 21: mod_base = OTHER; note 2'-O-methyluridine-3'-phosphate-N-[tris(GalNAc-alkyl)-amido decanoyl)]-4-hydroxyprolinol (Hyp-(GalNAc-alkyl)3)
tctgacagtgcacaatatttt

SEQ ID NO: 1947 - RNA, 23 nt, synthetic construct
  source 1..23: mol_type = other RNA
  modified_base 1: mod_base = OTHER; note = 2'-O-methyladenosine-3'- phosphorothioate
  modified_base 2: mod_base = OTHER; note = 2'-fluoroadenosine-3'-phosphorothioate
  modified_base 3: mod_base = OTHER; note = 2'-O-methyladenosine-3'-phosphate
  modified_base 4: mod_base = OTHER; note = 2'-O-methyladenosine-3'-phosphate
  modified_base 5: mod_base = OTHER; note = 2'-O-methyluridine-3'-phosphate
  modified_base 6: mod_base = OTHER; note = 2'-fluoroadenosine-3'-phosphate
  modified_base 7: mod_base = OTHER; note = 2'-O-methyluridine-3'-phosphate
  modified_base 8: mod_base = OTHER; note = 2'-fluorouridine-3'-phosphate
  modified_base 9: mod_base = OTHER; note = 2'-fluoroguanosine-3'-phosphate
  modified_base 10: mod_base = OTHER; note = 2'-O-methyluridine-3'-phosphate
  modified_base 11: mod_base = OTHER; note = 2'-O-methylguanosine-3'-phosphate
  modified_base 12: mod_base = OTHER; note = 2'-O-methylcytidine-3'-phosphate
  modified_base 13: mod_base = OTHER; note = 2'-O-methyladenosine-3'-phosphate
  modified_base 14: mod_base = OTHER; note = 2'-fluorocytidine-3'-phosphate
  modified_base 15: mod_base = OTHER; note = 2'-O-methyluridine-3'-phosphate
  modified_base 16: mod_base = OTHER; note = 2'-fluoroguanosine-3'-phosphate
  modified_base 17: mod_base = OTHER; note = 2'-O-methyluridine-3'-phosphate
  modified_base 18: mod_base = OTHER; note = 2'-O-methylcytidine-3'-phosphate
  modified_base 19: mod_base = OTHER; note = 2'-O-methyladenosine-3'-phosphate
  modified_base 20: mod_base = OTHER; note = 2'-O-methylguanosine-3'-phosphate
  modified_base 21: mod_base = OTHER; note = 2'-O-methyladenosine-3'- phosphorothioate
  modified_base 22: mod_base = OTHER; note = 2'-O-methyluridine-3'-phosphorothioate
  modified_base 23: mod_base = OTHER; note = 2'-O-methylcytidine-3'-phosphate
aaaatattgtgcactgtcagatc

SEQ ID NO: 1948 - RNA, 21 nt, synthetic construct
  source 1..21: mol_type = other RNA
  modified_base 1: mod_base = OTHER; note = 2'-O-methylcytidine-3'- phosphorothioate
  modified_base 2: mod_base = OTHER; note = 2'-O-methyluridine-3'-phosphorothioate
  modified_base 3: mod_base = OTHER; note = 2'-O-methylguanosine-3'-phosphate
  modified_base 4: mod_base = OTHER; note = 2'-O-methyladenosine-3'-phosphate
  modified_base 5: mod_base = OTHER; note = 2'-O-methylcytidine-3'-phosphate
  modified_base 6: mod_base = OTHER; note = 2'-O-methyladenosine-3'-phosphate
  modified_base 7: mod_base = OTHER; note = 2'-fluoroguanosine-3'-phosphate
  modified_base 8: mod_base = OTHER; note = 2'-O-methyluridine-3'-phosphate
  modified_base 9: mod_base = OTHER; note = 2'-fluoroguanosine-3'-phosphate
  modified_base 10: mod_base = OTHER; note = 2'-fluorocytidine-3'-phosphate
  modified_base 11: mod_base = OTHER; note = 2'-fluoroadenosine-3'-phosphate
  modified_base 12: mod_base = OTHER; note = 2'-O-methylcytidine-3'-phosphate
  modified_base 13: mod_base = OTHER; note = 2'-O-methyladenosine-3'-phosphate
  modified_base 14: mod_base = OTHER; note = 2'-O-methyladenosine-3'-phosphate
  modified_base 15: mod_base = OTHER; note = 2'-O-methyluridine-3'-phosphate
  modified_base 16: mod_base = OTHER; note = 2'-O-methyladenosine-3'-phosphate
  modified_base 17: mod_base = OTHER; note = 2'-O-methyluridine-3'-phosphate
  modified_base 18: mod_base = OTHER; note = 2'-O-methyluridine-3'-phosphate
  modified_base 19: mod_base = OTHER; note = 2'-O-methyluridine-3'-phosphate
  modified_base 20: mod_base = OTHER; note = 2'-O-methyluridine-3'-phosphate
  modified_base 21: mod_base = OTHER; note 2'-O-methylcytidine-3'-phosphate-N-[tris(GalNAc-alkyl)-amid odecanoyl)]-4-hydroxyprolinol (Hyp-(GalNAc-alkyl)3)
ctgacagtgcacaatattttc

SEQ ID NO: 1949 - RNA, 23 nt, synthetic construct
  source 1..23: mol_type = other RNA
  modified_base 1: mod_base = OTHER; note = 2'-O-methylguanosine-3'- phosphorothioate
  modified_base 2: mod_base = OTHER; note = 2'-fluoroadenosine-3'-phosphorothioate
  modified_base 3: mod_base = OTHER; note = 2'-O-methyladenosine-3'-phosphate
  modified_base 4: mod_base = OTHER; note = 2'-O-methyladenosine-3'-phosphate
  modified_base 5: mod_base = OTHER; note = 2'-O-methyladenosine-3'-phosphate
  modified_base 6: mod_base = OTHER; note = 2'-fluorouridine-3'-phosphate
  modified_base 7: mod_base = OTHER; note = 2'-O-methyladenosine-3'-phosphate
  modified_base 8: mod_base = OTHER; note = 2'-fluorouridine-3'-phosphate
  modified_base 9: mod_base = OTHER; note = 2'-fluorouridine-3'-phosphate
  modified_base 10: mod_base = OTHER; note = 2'-O-methylguanosine-3'-phosphate
  modified_base 11: mod_base = OTHER; note = 2'-O-methyluridine-3'-phosphate
  modified_base 12: mod_base = OTHER; note = 2'-O-methylguanosine-3'-phosphate
  modified_base 13: mod_base = OTHER; note = 2'-O-methylcytidine-3'-phosphate
  modified_base 14: mod_base = OTHER; note = 2'-fluoroadenosine-3'-phosphate
  modified_base 15: mod_base = OTHER; note = 2'-O-methylcytidine-3'-phosphate
  modified_base 16: mod_base = OTHER; note = 2'-fluorouridine-3'-phosphate
  modified_base 17: mod_base = OTHER; note = 2'-O-methylguanosine-3'-phosphate
  modified_base 18: mod_base = OTHER; note = 2'-O-methyluridine-3'-phosphate
  modified_base 19: mod_base = OTHER; note = 2'-O-methylcytidine-3'-phosphate
  modified_base 20: mod_base = OTHER; note = 2'-O-methyladenosine-3'-phosphate
  modified_base 21: mod_base = OTHER; note = 2'-O-methylguanosine-3'- phosphorothioate
  modified_base 22: mod_base = OTHER; note = 2'-O-methyladenosine-3'- phosphorothioate
  modified_base 23: mod_base = OTHER; note = 2'-O-methyluridine-3'-phosphate
gaaaatattgtgcactgtcagat

SEQ ID NO: 1950 - RNA, 21 nt, synthetic construct
  source 1..21: mol_type = other RNA
  modified_base 1: mod_base = OTHER; note = 2'-O-methyladenosine-3'- phosphorothioate
  modified_base 2: mod_base = OTHER; note = 2'-O-methyladenosine-3'- phosphorothioate
  modified_base 3: mod_base = OTHER; note = 2'-O-methylguanosine-3'-phosphate
  modified_base 4: mod_base = OTHER; note = 2'-O-methyladenosine-3'-phosphate
  modified_base 5: mod_base = OTHER; note = 2'-O-methyluridine-3'-phosphate
  modified_base 6: mod_base = OTHER; note = 2'-O-methylcytidine-3'-phosphate
  modified_base 7: mod_base = OTHER; note = 2'-fluorouridine-3'-phosphate
  modified_base 8: mod_base = OTHER; note = 2'-O-methylguanosine-3'-phosphate
  modified_base 9: mod_base = OTHER; note = 2'-fluoroadenosine-3'-phosphate
  modified_base 10: mod_base = OTHER; note = 2'-fluorocytidine-3'-phosphate
  modified_base 11: mod_base = OTHER; note = 2'-fluoroadenosine-3'-phosphate
  modified_base 12: mod_base = OTHER; note = 2'-O-methylguanosine-3'-phosphate
  modified_base 13: mod_base = OTHER; note = 2'-O-methyluridine-3'-phosphate
  modified_base 14: mod_base = OTHER; note = 2'-O-methylguanosine-3'-phosphate
  modified_base 15: mod_base = OTHER; note = 2'-O-methylcytidine-3'-phosphate
  modified_base 16: mod_base = OTHER; note = 2'-O-methyladenosine-3'-phosphate
  modified_base 17: mod_base = OTHER; note = 2'-O-methylcytidine-3'-phosphate
  modified_base 18: mod_base = OTHER; note = 2'-O-methyladenosine-3'-phosphate
  modified_base 19: mod_base = OTHER; note = 2'-O-methyladenosine-3'-phosphate
  modified_base 20: mod_base = OTHER; note = 2'-O-methyluridine-3'-phosphate
  modified_base 21: mod_base = OTHER; note 2'-O-methyladenosine-3'-phosphate-N-[tris(GalNAc-alkyl)-ami dodecanoyl)]-4-hydroxyprolinol (Hyp-(GalNAc-alkyl)3)
aagatctgacagtgcacaata

SEQ ID NO: 1951 - RNA, 23 nt, synthetic construct
  source 1..23: mol_type = other RNA
  modified_base 1: mod_base = OTHER; note = 2'-O-methyluridine-3'-phosphorothioate
  modified_base 2: mod_base = OTHER; note = 2'-fluoroadenosine-3'-phosphorothioate
  modified_base 3: mod_base = OTHER; note = 2'-O-methyluridine-3'-phosphate
  modified_base 4: mod_base = OTHER; note = 2'-O-methyluridine-3'-phosphate
  modified_base 5: mod_base = OTHER; note = 2'-O-methylguanosine-3'-phosphate
  modified_base 6: mod_base = OTHER; note = 2'-fluorouridine-3'-phosphate
  modified_base 7: mod_base = OTHER; note = 2'-O-methylguanosine-3'-phosphate
  modified_base 8: mod_base = OTHER; note = 2'-fluorocytidine-3'-phosphate
  modified_base 9: mod_base = OTHER; note = 2'-fluoroadenosine-3'-phosphate
  modified_base 10: mod_base = OTHER; note = 2'-O-methylcytidine-3'-phosphate
  modified_base 11: mod_base = OTHER; note = 2'-O-methyluridine-3'-phosphate
  modified_base 12: mod_base = OTHER; note = 2'-O-methylguanosine-3'-phosphate
  modified_base 13: mod_base = OTHER; note = 2'-O-methyluridine-3'-phosphate
  modified_base 14: mod_base = OTHER; note = 2'-fluorocytidine-3'-phosphate
  modified_base 15: mod_base = OTHER; note = 2'-O-methyladenosine-3'-phosphate
  modified_base 16: mod_base = OTHER; note = 2'-fluoroguanosine-3'-phosphate
  modified_base 17: mod_base = OTHER; note = 2'-O-methyladenosine-3'-phosphate
  modified_base 18: mod_base = OTHER; note = 2'-O-methyluridine-3'-phosphate
  modified_base 19: mod_base = OTHER; note = 2'-O-methylcytidine-3'-phosphate
  modified_base 20: mod_base = OTHER; note = 2'-O-methyluridine-3'-phosphate
  modified_base 21: mod_base = OTHER; note = 2'-O-methyluridine-3'-phosphorothioate
  modified_base 22: mod_base = OTHER; note = 2'-O-methylguanosine-3'- phosphorothioate
  modified_base 23: mod_base = OTHER; note = 2'-O-methylguanosine-3'-phosphate
tattgtgcactgtcagatcttgg

SEQ ID NO: 1952 - RNA, 21 nt, synthetic construct
  source 1..21: mol_type = other RNA
  modified_base 1: mod_base = OTHER; note = 2'-O-methylcytidine-3'- phosphorothioate
  modified_base 2: mod_base = OTHER; note = 2'-O-methyladenosine-3'- phosphorothioate
  modified_base 3: mod_base = OTHER; note = 2'-O-methyladenosine-3'-phosphate
  modified_base 4: mod_base = OTHER; note = 2'-O-methylguanosine-3'-phosphate
  modified_base 5: mod_base = OTHER; note = 2'-O-methyladenosine-3'-phosphate
  modified_base 6: mod_base = OTHER; note = 2'-O-methyluridine-3'-phosphate
  modified_base 7: mod_base = OTHER; note = 2'-fluorocytidine-3'-phosphate
  modified_base 8: mod_base = OTHER; note = 2'-O-methyluridine-3'-phosphate
  modified_base 9: mod_base = OTHER; note = 2'-fluoroguanosine-3'-phosphate
  modified_base 10: mod_base = OTHER; note = 2'-fluoroadenosine-3'-phosphate
  modified_base 11: mod_base = OTHER; note = 2'-fluorocytidine-3'-phosphate
  modified_base 12: mod_base = OTHER; note = 2'-O-methyladenosine-3'-phosphate
  modified_base 13: mod_base = OTHER; note = 2'-O-methylguanosine-3'-phosphate
  modified_base 14: mod_base = OTHER; note = 2'-O-methyluridine-3'-phosphate
  modified_base 15: mod_base = OTHER; note = 2'-O-methylguanosine-3'-phosphate
  modified_base 16: mod_base = OTHER; note = 2'-O-methylcytidine-3'-phosphate
  modified_base 17: mod_base = OTHER; note = 2'-O-methyladenosine-3'-phosphate
  modified_base 18: mod_base = OTHER; note = 2'-O-methylcytidine-3'-phosphate
  modified_base 19: mod_base = OTHER; note = 2'-O-methyladenosine-3'-phosphate
  modified_base 20: mod_base = OTHER; note = 2'-O-methyladenosine-3'-phosphate
  modified_base 21: mod_base = OTHER; note 2'-O-methyluridine-3'-phosphate-N-[tris(GalNAc-alkyl)-amido decanoyl)]-4-hydroxyprolinol (Hyp-(GalNAc-alkyl)3)
caagatctgacagtgcacaat

SEQ ID NO: 1953 - RNA, 23 nt, synthetic construct
  source 1..23: mol_type = other RNA
  modified_base 1: mod_base = OTHER; note = 2'-O-methyladenosine-3'- phosphorothioate
  modified_base 2: mod_base = OTHER; note = 2'-fluorouridine -3'-phosphorothioate
  modified_base 3: mod_base = OTHER; note = 2'-O-methyluridine-3'-phosphate
  modified_base 4: mod_base = OTHER; note = 2'-O-methylguanosine-3'-phosphate
  modified_base 5: mod_base = OTHER; note = 2'-O-methyluridine-3'-phosphate
  modified_base 6: mod_base = OTHER; note = 2'-fluoroguanosine-3'-phosphate
  modified_base 7: mod_base = OTHER; note = 2'-O-methylcytidine-3'-phosphate
  modified_base 8: mod_base = OTHER; note = 2'-fluoroadenosine-3'-phosphate
  modified_base 9: mod_base = OTHER; note = 2'-fluorocytidine-3'-phosphate
  modified_base 10: mod_base = OTHER; note = 2'-O-methyluridine-3'-phosphate
  modified_base 11: mod_base = OTHER; note = 2'-O-methylguanosine-3'-phosphate
  modified_base 12: mod_base = OTHER; note = 2'-O-methyluridine-3'-phosphate
  modified_base 13: mod_base = OTHER; note = 2'-O-methylcytidine-3'-phosphate
  modified_base 14: mod_base = OTHER; note = 2'-fluoroadenosine-3'-phosphate
  modified_base 15: mod_base = OTHER; note = 2'-O-methylguanosine-3'-phosphate
  modified_base 16: mod_base = OTHER; note = 2'-fluoroadenosine-3'-phosphate
  modified_base 17: mod_base = OTHER; note = 2'-O-methyluridine-3'-phosphate
  modified_base 18: mod_base = OTHER; note = 2'-O-methylcytidine-3'-phosphate
  modified_base 19: mod_base = OTHER; note = 2'-O-methyluridine-3'-phosphate
  modified_base 20: mod_base = OTHER; note = 2'-O-methyluridine-3'-phosphate
  modified_base 21: mod_base = OTHER; note = 2'-O-methylguanosine-3'- phosphorothioate
  modified_base 22: mod_base = OTHER; note = 2'-O-methylguanosine-3'- phosphorothioate
  modified_base 23: mod_base = OTHER; note = 2'-O-methyladenosine-3'-phosphate
attgtgcactgtcagatcttgga

SEQ ID NO: 1954 - RNA, 21 nt, synthetic construct
  source 1..21: mol_type = other RNA
  modified_base 1: mod_base = OTHER; note = 2'-O-methyladenosine-3'- phosphorothioate
  modified_base 2: mod_base = OTHER; note = 2'-O-methylcytidine-3'- phosphorothioate
  modified_base 3: mod_base = OTHER; note = 2'-O-methyluridine-3'-phosphate
  modified_base 4: mod_base = OTHER; note = 2'-O-methylguanosine-3'-phosphate
  modified_base 5: mod_base = OTHER; note = 2'-O-methyladenosine-3'-phosphate
  modified_base 6: mod_base = OTHER; note = 2'-O-methyluridine-3'-phosphate
  modified_base 7: mod_base = OTHER; note = 2'-fluoroguanosine-3'-phosphate
  modified_base 8: mod_base = OTHER; note = 2'-O-methyluridine-3'-phosphate
  modified_base 9: mod_base = OTHER; note = 2'-fluorouridine-3'-phosphate
  modified_base 10: mod_base = OTHER; note = 2'-fluorocytidine-3'-phosphate
  modified_base 11: mod_base = OTHER; note = 2'-fluorouridine-3'-phosphate
  modified_base 12: mod_base = OTHER; note = 2'-O-methylguanosine-3'-phosphate
  modified_base 13: mod_base = OTHER; note = 2'-O-methyladenosine-3'-phosphate
  modified_base 14: mod_base = OTHER; note = 2'-O-methyladenosine-3'-phosphate
  modified_base 15: mod_base = OTHER; note = 2'-O-methyladenosine-3'-phosphate
  modified_base 16: mod_base = OTHER; note = 2'-O-methylguanosine-3'-phosphate
  modified_base 17: mod_base = OTHER; note = 2'-O-methylcytidine-3'-phosphate
  modified_base 18: mod_base = OTHER; note = 2'-O-methyluridine-3'-phosphate
  modified_base 19: mod_base = OTHER; note = 2'-O-methylcytidine-3'-phosphate
  modified_base 20: mod_base = OTHER; note = 2'-O-methyluridine-3'-phosphate
  modified_base 21: mod_base = OTHER; note 2'-O-methylguanosine-3'-phosphate-N-[tris(GalNAc-alkyl)-ami dodecanoyl)]-4-hydroxyprolinol (Hyp-(GalNAc-alkyl)3)
actgatgttctgaaagctctg

SEQ ID NO: 1955 - RNA, 23 nt, synthetic construct
  source 1..23: mol_type = other RNA
  modified_base 1: mod_base = OTHER; note = 2'-O-methylcytidine-3'- phosphorothioate
  modified_base 2: mod_base = OTHER; note = 2'-fluoroadenosine-3'-phosphorothioate
  modified_base 3: mod_base = OTHER; note = 2'-O-methylguanosine-3'-phosphate
  modified_base 4: mod_base = OTHER; note = 2'-O-methyladenosine-3'-phosphate
  modified_base 5: mod_base = OTHER; note = 2'-O-methylguanosine-3'-phosphate
  modified_base 6: mod_base = OTHER; note = 2'-fluorocytidine-3'-phosphate
  modified_base 7: mod_base = OTHER; note = 2'-O-methyluridine-3'-phosphate
  modified_base 8: mod_base = OTHER; note = 2'-fluorouridine-3'-phosphate
  modified_base 9: mod_base = OTHER; note = 2'-fluorouridine-3'-phosphate
  modified_base 10: mod_base = OTHER; note = 2'-O-methylcytidine-3'-phosphate
  modified_base 11: mod_base = OTHER; note = 2'-O-methyladenosine-3'-phosphate
  modified_base 12: mod_base = OTHER; note = 2'-O-methylguanosine-3'-phosphate
  modified_base 13: mod_base = OTHER; note = 2'-O-methyladenosine-3'-phosphate
  modified_base 14: mod_base = OTHER; note = 2'-fluoroadenosine-3'-phosphate
  modified_base 15: mod_base = OTHER; note = 2'-O-methylcytidine-3'-phosphate
  modified_base 16: mod_base = OTHER; note = 2'-fluoroadenosine-3'-phosphate
  modified_base 17: mod_base = OTHER; note = 2'-O-methyluridine-3'-phosphate
  modified_base 18: mod_base = OTHER; note = 2'-O-methylcytidine-3'-phosphate
  modified_base 19: mod_base = OTHER; note = 2'-O-methyladenosine-3'-phosphate
  modified_base 20: mod_base = OTHER; note = 2'-O-methylguanosine-3'-phosphate
  modified_base 21: mod_base = OTHER; note = 2'-O-methyluridine-3'-phosphorothioate
  modified_base 22: mod_base = OTHER; note = 2'-O-methylguanosine-3'- phosphorothioate
  modified_base 23: mod_base = OTHER; note = 2'-O-methylcytidine-3'-phosphate
cagagctttcagaacatcagtgc

SEQ ID NO: 1956 - RNA, 21 nt, synthetic construct
  source 1..21: mol_type = other RNA
  modified_base 1: mod_base = OTHER; note = 2'-O-methylcytidine-3'- phosphorothioate
  modified_base 2: mod_base = OTHER; note = 2'-O-methyluridine-3'-phosphorothioate
  modified_base 3: mod_base = OTHER; note = 2'-O-methylguanosine-3'-phosphate
  modified_base 4: mod_base = OTHER; note = 2'-O-methyladenosine-3'-phosphate
  modified_base 5: mod_base = OTHER; note = 2'-O-methyluridine-3'-phosphate
  modified_base 6: mod_base = OTHER; note = 2'-O-methylguanosine-3'-phosphate
  modified_base 7: mod_base = OTHER; note = 2'-fluorouridine-3'-phosphate
  modified_base 8: mod_base = OTHER; note = 2'-O-methyluridine-3'-phosphate
  modified_base 9: mod_base = OTHER; note = 2'-fluorocytidine-3'-phosphate
  modified_base 10: mod_base = OTHER; note = 2'-fluorouridine-3'-phosphate
  modified_base 11: mod_base = OTHER; note = 2'-fluoroguanosine-3'-phosphate
  modified_base 12: mod_base = OTHER; note = 2'-O-methyladenosine-3'-phosphate
  modified_base 13: mod_base = OTHER; note = 2'-O-methyladenosine-3'-phosphate
  modified_base 14: mod_base = OTHER; note = 2'-O-methyladenosine-3'-phosphate
  modified_base 15: mod_base = OTHER; note = 2'-O-methylguanosine-3'-phosphate
  modified_base 16: mod_base = OTHER; note = 2'-O-methylcytidine-3'-phosphate
  modified_base 17: mod_base = OTHER; note = 2'-O-methyluridine-3'-phosphate
  modified_base 18: mod_base = OTHER; note = 2'-O-methylcytidine-3'-phosphate
  modified_base 19: mod_base = OTHER; note = 2'-O-methyluridine-3'-phosphate
  modified_base 20: mod_base = OTHER; note = 2'-O-methylguanosine-3'-phosphate
  modified_base 21: mod_base = OTHER; note 2'-O-methylguanosine-3'-phosphate-N-[tris(GalNAc-alkyl)-ami dodecanoyl)]-4-hydroxyprolinol (Hyp-(GalNAc-alkyl)3)
ctgatgttctgaaagctctgg

SEQ ID NO: 1957 - RNA, 23 nt, synthetic construct
  source 1..23: mol_type = other RNA
  modified_base 1: mod_base = OTHER; note = 2'-O-methylcytidine-3'- phosphorothioate
  modified_base 2: mod_base = OTHER; note = 2'-fluorocytidine-3'-phosphorothioate
  modified_base 3: mod_base = OTHER; note = 2'-O-methyladenosine-3'-phosphate
  modified_base 4: mod_base = OTHER; note = 2'-O-methylguanosine-3'-phosphate
  modified_base 5: mod_base = OTHER; note = 2'-O-methyladenosine-3'-phosphate
  modified_base 6: mod_base = OTHER; note = 2'-fluoroguanosine-3'-phosphate
  modified_base 7: mod_base = OTHER; note = 2'-O-methylcytidine-3'-phosphate
  modified_base 8: mod_base = OTHER; note = 2'-fluorouridine-3'-phosphate
  modified_base 9: mod_base = OTHER; note = 2'-fluorouridine-3'-phosphate
  modified_base 10: mod_base = OTHER; note = 2'-O-methyluridine-3'-phosphate
  modified_base 11: mod_base = OTHER; note = 2'-O-methylcytidine-3'-phosphate
  modified_base 12: mod_base = OTHER; note = 2'-O-methyladenosine-3'-phosphate
  modified_base 13: mod_base = OTHER; note = 2'-O-methylguanosine-3'-phosphate
  modified_base 14: mod_base = OTHER; note = 2'-fluoroadenosine-3'-phosphate
  modified_base 15: mod_base = OTHER; note = 2'-O-methyladenosine-3'-phosphate
  modified_base 16: mod_base = OTHER; note = 2'-fluorocytidine-3'-phosphate
  modified_base 17: mod_base = OTHER; note = 2'-O-methyladenosine-3'-phosphate
  modified_base 18: mod_base = OTHER; note = 2'-O-methyluridine-3'-phosphate
  modified_base 19: mod_base = OTHER; note = 2'-O-methylcytidine-3'-phosphate
  modified_base 20: mod_base = OTHER; note = 2'-O-methyladenosine-3'-phosphate
  modified_base 21: mod_base = OTHER; note = 2'-O-methylguanosine-3'- phosphorothioate
  modified_base 22: mod_base = OTHER; note = 2'-O-methyluridine-3'-phosphorothioate
  modified_base 23: mod_base = OTHER; note = 2'-O-methylguanosine-3'-phosphate
ccagagctttcagaacatcagtg

SEQ ID NO: 1958 - RNA, 21 nt, synthetic construct
  source 1..21: mol_type = other RNA
  modified_base 1: mod_base = OTHER; note = 2'-O-methyladenosine-3'- phosphorothioate
  modified_base 2: mod_base = OTHER; note = 2'-O-methylguanosine-3'- phosphorothioate
  modified_base 3: mod_base = OTHER; note = 2'-O-methylguanosine-3'-phosphate
  modified_base 4: mod_base = OTHER; note = 2'-O-methylcytidine-3'-phosphate
  modified_base 5: mod_base = OTHER; note = 2'-O-methyladenosine-3'-phosphate
  modified_base 6: mod_base = OTHER; note = 2'-O-methylcytidine-3'-phosphate
  modified_base 7: mod_base = OTHER; note = 2'-fluorouridine-3'-phosphate
  modified_base 8: mod_base = OTHER; note = 2'-O-methylguanosine-3'-phosphate
  modified_base 9: mod_base = OTHER; note = 2'-fluoroadenosine-3'-phosphate
  modified_base 10: mod_base = OTHER; note = 2'-fluorouridine-3'-phosphate
  modified_base 11: mod_base = OTHER; note = 2'-fluoroguanosine-3'-phosphate
  modified_base 12: mod_base = OTHER; note = 2'-O-methyluridine-3'-phosphate
  modified_base 13: mod_base = OTHER; note = 2'-O-methyluridine-3'-phosphate
  modified_base 14: mod_base = OTHER; note = 2'-O-methylcytidine-3'-phosphate
  modified_base 15: mod_base = OTHER; note = 2'-O-methyluridine-3'-phosphate
  modified_base 16: mod_base = OTHER; note = 2'-O-methylguanosine-3'-phosphate
  modified_base 17: mod_base = OTHER; note = 2'-O-methyladenosine-3'-phosphate
  modified_base 18: mod_base = OTHER; note = 2'-O-methyladenosine-3'-phosphate
  modified_base 19: mod_base = OTHER; note = 2'-O-methyladenosine-3'-phosphate
  modified_base 20: mod_base = OTHER; note = 2'-O-methylguanosine-3'-phosphate
  modified_base 21: mod_base = OTHER; note 2'-O-methylcytidine-3'-phosphate-N-[tris(GalNAc-alkyl)-amid odecanoyl)]-4-hydroxyprolinol (Hyp-(GalNAc-alkyl)3)
aggcactgatgttctgaaagc

SEQ ID NO: 1959 - RNA, 23 nt, synthetic construct
  source 1..23: mol_type = other RNA
  modified_base 1: mod_base = OTHER; note = 2'-O-methylguanosine-3'- phosphorothioate
  modified_base 2: mod_base = OTHER; note = 2'-fluorocytidine-3'-phosphorothioate
  modified_base 3: mod_base = OTHER; note = 2'-O-methyluridine-3'-phosphate
  modified_base 4: mod_base = OTHER; note = 2'-O-methyluridine-3'-phosphate
  modified_base 5: mod_base = OTHER; note = 2'-O-methyluridine-3'-phosphate
  modified_base 6: mod_base = OTHER; note = 2'-fluorocytidine-3'-phosphate
  modified_base 7: mod_base = OTHER; note = 2'-O-methyladenosine-3'-phosphate
  modified_base 8: mod_base = OTHER; note = 2'-fluoroguanosine-3'-phosphate
  modified_base 9: mod_base = OTHER; note = 2'-fluoroadenosine-3'-phosphate
  modified_base 10: mod_base = OTHER; note = 2'-O-methyladenosine-3'-phosphate
  modified_base 11: mod_base = OTHER; note = 2'-O-methylcytidine-3'-phosphate
  modified_base 12: mod_base = OTHER; note = 2'-O-methyladenosine-3'-phosphate
  modified_base 13: mod_base = OTHER; note = 2'-O-methyluridine-3'-phosphate
  modified_base 14: mod_base = OTHER; note = 2'-fluorocytidine-3'-phosphate
  modified_base 15: mod_base = OTHER; note = 2'-O-methyladenosine-3'-phosphate
  modified_base 16: mod_base = OTHER; note = 2'-fluoroguanosine-3'-phosphate
  modified_base 17: mod_base = OTHER; note = 2'-O-methyluridine-3'-phosphate
  modified_base 18: mod_base = OTHER; note = 2'-O-methylguanosine-3'-phosphate
  modified_base 19: mod_base = OTHER; note = 2'-O-methylcytidine-3'-phosphate
  modified_base 20: mod_base = OTHER; note = 2'-O-methylcytidine-3'-phosphate
  modified_base 21: mod_base = OTHER; note = 2'-O-methyluridine-3'-phosphorothioate
  modified_base 22: mod_base = OTHER; note = 2'-O-methyluridine-3'-phosphorothioate
  modified_base 23: mod_base = OTHER; note = 2'-O-methyluridine-3'-phosphate
gctttcagaacatcagtgccttt

SEQ ID NO: 1960 - RNA, 21 nt, synthetic construct
  source 1..21: mol_type = other RNA
  modified_base 1: mod_base = OTHER; note = 2'-O-methyladenosine-3'- phosphorothioate
  modified_base 2: mod_base = OTHER; note = 2'-O-methyladenosine-3'- phosphorothioate
  modified_base 3: mod_base = OTHER; note = 2'-O-methylguanosine-3'-phosphate
  modified_base 4: mod_base = OTHER; note = 2'-O-methylguanosine-3'-phosphate
  modified_base 5: mod_base = OTHER; note = 2'-O-methylcytidine-3'-phosphate
  modified_base 6: mod_base = OTHER; note = 2'-O-methyladenosine-3'-phosphate
  modified_base 7: mod_base = OTHER; note = 2'-fluorocytidine-3'-phosphate
  modified_base 8: mod_base = OTHER; note = 2'-O-methyluridine-3'-phosphate
  modified_base 9: mod_base = OTHER; note = 2'-fluoroguanosine-3'-phosphate
  modified_base 10: mod_base = OTHER; note = 2'-fluoroadenosine-3'-phosphate
  modified_base 11: mod_base = OTHER; note = 2'-fluorouridine-3'-phosphate
  modified_base 12: mod_base = OTHER; note = 2'-O-methylguanosine-3'-phosphate
  modified_base 13: mod_base = OTHER; note = 2'-O-methyluridine-3'-phosphate
  modified_base 14: mod_base = OTHER; note = 2'-O-methyluridine-3'-phosphate
  modified_base 15: mod_base = OTHER; note = 2'-O-methylcytidine-3'-phosphate
  modified_base 16: mod_base = OTHER; note = 2'-O-methyluridine-3'-phosphate
  modified_base 17: mod_base = OTHER; note = 2'-O-methylguanosine-3'-phosphate
  modified_base 18: mod_base = OTHER; note = 2'-O-methyladenosine-3'-phosphate
  modified_base 19: mod_base = OTHER; note = 2'-O-methyladenosine-3'-phosphate
  modified_base 20: mod_base = OTHER; note = 2'-O-methyladenosine-3'-phosphate
  modified_base 21: mod_base = OTHER; note 2'-O-methylguanosine-3'-phosphate-N-[tris(GalNAc-alkyl)-ami dodecanoyl)]-4-hydroxyprolinol (Hyp-(GalNAc-alkyl)3)
aaggcactgatgttctgaaag

SEQ ID NO: 1961 - RNA, 23 nt, synthetic construct
  source 1..23: mol_type = other RNA
  modified_base 1: mod_base = OTHER; note = 2'-O-methylcytidine-3'- phosphorothioate
  modified_base 2: mod_base = OTHER; note = 2'-fluorouridine -3'-phosphorothioate
  modified_base 3: mod_base = OTHER; note = 2'-O-methyluridine-3'-phosphate
  modified_base 4: mod_base = OTHER; note = 2'-O-methyluridine-3'-phosphate
  modified_base 5: mod_base = OTHER; note = 2'-O-methylcytidine-3'-phosphate
  modified_base 6: mod_base = OTHER; note = 2'-fluoroadenosine-3'-phosphate
  modified_base 7: mod_base = OTHER; note = 2'-O-methylguanosine-3'-phosphate
  modified_base 8: mod_base = OTHER; note = 2'-fluoroadenosine-3'-phosphate
  modified_base 9: mod_base = OTHER; note = 2'-fluoroadenosine-3'-phosphate
  modified_base 10: mod_base = OTHER; note = 2'-O-methylcytidine-3'-phosphate
  modified_base 11: mod_base = OTHER; note = 2'-O-methyladenosine-3'-phosphate
  modified_base 12: mod_base = OTHER; note = 2'-O-methyluridine-3'-phosphate
  modified_base 13: mod_base = OTHER; note = 2'-O-methylcytidine-3'-phosphate
  modified_base 14: mod_base = OTHER; note = 2'-fluoroadenosine-3'-phosphate
  modified_base 15: mod_base = OTHER; note = 2'-O-methylguanosine-3'-phosphate
  modified_base 16: mod_base = OTHER; note = 2'-fluorouridine-3'-phosphate
  modified_base 17: mod_base = OTHER; note = 2'-O-methylguanosine-3'-phosphate
  modified_base 18: mod_base = OTHER; note = 2'-O-methylcytidine-3'-phosphate
  modified_base 19: mod_base = OTHER; note = 2'-O-methylcytidine-3'-phosphate
  modified_base 20: mod_base = OTHER; note = 2'-O-methyluridine-3'-phosphate
  modified_base 21: mod_base = OTHER; note = 2'-O-methyluridine-3'-phosphorothioate
  modified_base 22: mod_base = OTHER; note = 2'-O-methyluridine-3'-phosphorothioate
  modified_base 23: mod_base = OTHER; note = 2'-O-methylcytidine-3'-phosphate
ctttcagaacatcagtgcctttc

SEQ ID NO: 1962 - RNA, 21 nt, synthetic construct
  source 1..21: mol_type = other RNA
  modified_base 1: mod_base = OTHER; note = 2'-O-methyladenosine-3'- phosphorothioate
  modified_base 2: mod_base = OTHER; note = 2'-O-methyladenosine-3'- phosphorothioate
  modified_base 3: mod_base = OTHER; note = 2'-O-methylcytidine-3'-phosphate
  modified_base 4: mod_base = OTHER; note = 2'-O-methyladenosine-3'-phosphate
  modified_base 5: mod_base = OTHER; note = 2'-O-methyladenosine-3'-phosphate
  modified_base 6: mod_base = OTHER; note = 2'-O-methylcytidine-3'-phosphate
  modified_base 7: mod_base = OTHER; note = 2'-fluoroadenosine-3'-phosphate
  modified_base 8: mod_base = OTHER; note = 2'-O-methyluridine-3'-phosphate
  modified_base 9: mod_base = OTHER; note = 2'-fluoroguanosine-3'-phosphate
  modified_base 10: mod_base = OTHER; note = 2'-fluorocytidine-3'-phosphate
  modified_base 11: mod_base = OTHER; note = 2'-fluorouridine-3'-phosphate
  modified_base 12: mod_base = OTHER; note = 2'-O-methyladenosine-3'-phosphate
  modified_base 13: mod_base = OTHER; note = 2'-O-methyladenosine-3'-phosphate
  modified_base 14: mod_base = OTHER; note = 2'-O-methyladenosine-3'-phosphate
  modified_base 15: mod_base = OTHER; note = 2'-O-methyluridine-3'-phosphate
  modified_base 16: mod_base = OTHER; note = 2'-O-methylcytidine-3'-phosphate
  modified_base 17: mod_base = OTHER; note = 2'-O-methyladenosine-3'-phosphate
  modified_base 18: mod_base = OTHER; note = 2'-O-methylguanosine-3'-phosphate
  modified_base 19: mod_base = OTHER; note = 2'-O-methyluridine-3'-phosphate
  modified_base 20: mod_base = OTHER; note = 2'-O-methyladenosine-3'-phosphate
  modified_base 21: mod_base = OTHER; note 2'-O-methylcytidine-3'-phosphate-N-[tris(GalNAc-alkyl)-amid odecanoyl)]-4-hydroxyprolinol (Hyp-(GalNAc-alkyl)3)
aacaacatgctaaatcagtac

SEQ ID NO: 1963 - RNA, 23 nt, synthetic construct
  source 1..23: mol_type = other RNA
  modified_base 1: mod_base = OTHER; note = 2'-O-methylguanosine-3'- phosphorothioate
  modified_base 2: mod_base = OTHER; note = 2'-fluorouridine -3'-phosphorothioate
  modified_base 3: mod_base = OTHER; note = 2'-O-methyladenosine-3'-phosphate
  modified_base 4: mod_base = OTHER; note = 2'-O-methylcytidine-3'-phosphate
  modified_base 5: mod_base = OTHER; note = 2'-O-methyluridine-3'-phosphate
  modified_base 6: mod_base = OTHER; note = 2'-fluoroguanosine-3'-phosphate
  modified_base 7: mod_base = OTHER; note = 2'-O-methyladenosine-3'-phosphate
  modified_base 8: mod_base = OTHER; note = 2'-fluorouridine-3'-phosphate
  modified_base 9: mod_base = OTHER; note = 2'-fluorouridine-3'-phosphate
  modified_base 10: mod_base = OTHER; note = 2'-O-methyluridine-3'-phosphate
  modified_base 11: mod_base = OTHER; note = 2'-O-methyladenosine-3'-phosphate
  modified_base 12: mod_base = OTHER; note = 2'-O-methylguanosine-3'-phosphate
  modified_base 13: mod_base = OTHER; note = 2'-O-methylcytidine-3'-phosphate
  modified_base 14: mod_base = OTHER; note = 2'-fluoroadenosine-3'-phosphate
  modified_base 15: mod_base = OTHER; note = 2'-O-methyluridine-3'-phosphate
  modified_base 16: mod_base = OTHER; note = 2'-fluoroguanosine-3'-phosphate
  modified_base 17: mod_base = OTHER; note = 2'-O-methyluridine-3'-phosphate
  modified_base 18: mod_base = OTHER; note = 2'-O-methyluridine-3'-phosphate
  modified_base 19: mod_base = OTHER; note = 2'-O-methylguanosine-3'-phosphate
  modified_base 20: mod_base = OTHER; note = 2'-O-methyluridine-3'-phosphate
  modified_base 21: mod_base = OTHER; note = 2'-O-methyluridine-3'-phosphorothioate
  modified_base 22: mod_base = OTHER; note = 2'-O-methylcytidine-3'- phosphorothioate
  modified_base 23: mod_base = OTHER; note = 2'-O-methyladenosine-3'-phosphate
gtactgatttagcatgttgttca

SEQ ID NO: 1964 - RNA, 21 nt, synthetic construct
  source 1..21: mol_type = other RNA
  modified_base 1: mod_base = OTHER; note = 2'-O-methyladenosine-3'- phosphorothioate
  modified_base 2: mod_base = OTHER; note = 2'-O-methylcytidine-3'- phosphorothioate
  modified_base 3: mod_base = OTHER; note = 2'-O-methyladenosine-3'-phosphate
  modified_base 4: mod_base = OTHER; note = 2'-O-methyladenosine-3'-phosphate
  modified_base 5: mod_base = OTHER; note = 2'-O-methylcytidine-3'-phosphate
  modified_base 6: mod_base = OTHER; note = 2'-O-methyladenosine-3'-phosphate
  modified_base 7: mod_base = OTHER; note = 2'-fluorouridine-3'-phosphate
  modified_base 8: mod_base = OTHER; note = 2'-O-methylguanosine-3'-phosphate
  modified_base 9: mod_base = OTHER; note = 2'-fluorocytidine-3'-phosphate
  modified_base 10: mod_base = OTHER; note = 2'-fluorouridine-3'-phosphate
  modified_base 11: mod_base = OTHER; note = 2'-fluoroadenosine-3'-phosphate
  modified_base 12: mod_base = OTHER; note = 2'-O-methyladenosine-3'-phosphate
  modified_base 13: mod_base = OTHER; note = 2'-O-methyladenosine-3'-phosphate
  modified_base 14: mod_base = OTHER; note = 2'-O-methyluridine-3'-phosphate
  modified_base 15: mod_base = OTHER; note = 2'-O-methylcytidine-3'-phosphate
  modified_base 16: mod_base = OTHER; note = 2'-O-methyladenosine-3'-phosphate
  modified_base 17: mod_base = OTHER; note = 2'-O-methylguanosine-3'-phosphate
  modified_base 18: mod_base = OTHER; note = 2'-O-methyluridine-3'-phosphate
  modified_base 19: mod_base = OTHER; note = 2'-O-methyladenosine-3'-phosphate
  modified_base 20: mod_base = OTHER; note = 2'-O-methylcytidine-3'-phosphate
  modified_base 21: mod_base = OTHER; note 2'-O-methyluridine-3'-phosphate-N-[tris(GalNAc-alkyl)-amido decanoyl)]-4-hydroxyprolinol (Hyp-(GalNAc-alkyl)3)
acaacatgctaaatcagtact

SEQ ID NO: 1965 - RNA, 23 nt, synthetic construct
  source 1..23: mol_type = other RNA
  modified_base 1: mod_base = OTHER; note = 2'-O-methyladenosine-3'- phosphorothioate
  modified_base 2: mod_base = OTHER; note = 2'-fluoroguanosine-3'-phosphorothioate
  modified_base 3: mod_base = OTHER; note = 2'-O-methyluridine-3'-phosphate
  modified_base 4: mod_base = OTHER; note = 2'-O-methyladenosine-3'-phosphate
  modified_base 5: mod_base = OTHER; note = 2'-O-methylcytidine-3'-phosphate
  modified_base 6: mod_base = OTHER; note = 2'-fluorouridine-3'-phosphate
  modified_base 7: mod_base = OTHER; note = 2'-O-methylguanosine-3'-phosphate
  modified_base 8: mod_base = OTHER; note = 2'-fluoroadenosine-3'-phosphate
  modified_base 9: mod_base = OTHER; note = 2'-fluorouridine-3'-phosphate
  modified_base 10: mod_base = OTHER; note = 2'-O-methyluridine-3'-phosphate
  modified_base 11: mod_base = OTHER; note = 2'-O-methyluridine-3'-phosphate
  modified_base 12: mod_base = OTHER; note = 2'-O-methyladenosine-3'-phosphate
  modified_base 13: mod_base = OTHER; note = 2'-O-methylguanosine-3'-phosphate
  modified_base 14: mod_base = OTHER; note = 2'-fluorocytidine-3'-phosphate
  modified_base 15: mod_base = OTHER; note = 2'-O-methyladenosine-3'-phosphate
  modified_base 16: mod_base = OTHER; note = 2'-fluorouridine-3'-phosphate
  modified_base 17: mod_base = OTHER; note = 2'-O-methylguanosine-3'-phosphate
  modified_base 18: mod_base = OTHER; note = 2'-O-methyluridine-3'-phosphate
  modified_base 19: mod_base = OTHER; note = 2'-O-methyluridine-3'-phosphate
  modified_base 20: mod_base = OTHER; note = 2'-O-methylguanosine-3'-phosphate
  modified_base 21: mod_base = OTHER; note = 2'-O-methyluridine-3'-phosphorothioate
  modified_base 22: mod_base = OTHER; note = 2'-O-methyluridine-3'-phosphorothioate
  modified_base 23: mod_base = OTHER; note = 2'-O-methylcytidine-3'-phosphate
agtactgatttagcatgttgttc

SEQ ID NO: 1966 - RNA, 21 nt, synthetic construct
  source 1..21: mol_type = other RNA
  modified_base 1: mod_base = OTHER; note = 2'-O-methyluridine-3'-phosphorothioate
  modified_base 2: mod_base = OTHER; note = 2'-O-methyladenosine-3'- phosphorothioate
  modified_base 3: mod_base = OTHER; note = 2'-O-methyluridine-3'-phosphate
  modified_base 4: mod_base = OTHER; note = 2'-O-methylguanosine-3'-phosphate
  modified_base 5: mod_base = OTHER; note = 2'-O-methyladenosine-3'-phosphate
  modified_base 6: mod_base = OTHER; note = 2'-O-methyladenosine-3'-phosphate
  modified_base 7: mod_base = OTHER; note = 2'-fluorocytidine-3'-phosphate
  modified_base 8: mod_base = OTHER; note = 2'-O-methyladenosine-3'-phosphate
  modified_base 9: mod_base = OTHER; note = 2'-fluoroadenosine-3'-phosphate
  modified_base 10: mod_base = OTHER; note = 2'-fluorocytidine-3'-phosphate
  modified_base 11: mod_base = OTHER; note = 2'-fluoroadenosine-3'-phosphate
  modified_base 12: mod_base = OTHER; note = 2'-O-methyluridine-3'-phosphate
  modified_base 13: mod_base = OTHER; note = 2'-O-methylguanosine-3'-phosphate
  modified_base 14: mod_base = OTHER; note = 2'-O-methylcytidine-3'-phosphate
  modified_base 15: mod_base = OTHER; note = 2'-O-methyluridine-3'-phosphate
  modified_base 16: mod_base = OTHER; note = 2'-O-methyladenosine-3'-phosphate
  modified_base 17: mod_base = OTHER; note = 2'-O-methyladenosine-3'-phosphate
  modified_base 18: mod_base = OTHER; note = 2'-O-methyladenosine-3'-phosphate
  modified_base 19: mod_base = OTHER; note = 2'-O-methyluridine-3'-phosphate
  modified_base 20: mod_base = OTHER; note = 2'-O-methylcytidine-3'-phosphate
  modified_base 21: mod_base = OTHER; note 2'-O-methyladenosine-3'-phosphate-N-[tris(GalNAc-alkyl)-ami dodecanoyl)]-4-hydroxyprolinol (Hyp-(GalNAc-alkyl)3)
tatgaacaacatgctaaatca

SEQ ID NO: 1967 - RNA, 23 nt, synthetic construct
  source 1..23: mol_type = other RNA
  modified_base 1: mod_base = OTHER; note = 2'-O-methyluridine-3'-phosphorothioate
  modified_base 2: mod_base = OTHER; note = 2'-fluoroguanosine-3'-phosphorothioate
  modified_base 3: mod_base = OTHER; note = 2'-O-methyladenosine-3'-phosphate
  modified_base 4: mod_base = OTHER; note = 2'-O-methyluridine-3'-phosphate
  modified_base 5: mod_base = OTHER; note = 2'-O-methyluridine-3'-phosphate
  modified_base 6: mod_base = OTHER; note = 2'-fluorouridine-3'-phosphate
  modified_base 7: mod_base = OTHER; note = 2'-O-methyladenosine-3'-phosphate
  modified_base 8: mod_base = OTHER; note = 2'-fluoroguanosine-3'-phosphate
  modified_base 9: mod_base = OTHER; note = 2'-fluorocytidine-3'-phosphate
  modified_base 10: mod_base = OTHER; note = 2'-O-methyladenosine-3'-phosphate
  modified_base 11: mod_base = OTHER; note = 2'-O-methyluridine-3'-phosphate
  modified_base 12: mod_base = OTHER; note = 2'-O-methylguanosine-3'-phosphate
  modified_base 13: mod_base = OTHER; note = 2'-O-methyluridine-3'-phosphate
  modified_base 14: mod_base = OTHER; note = 2'-fluorouridine-3'-phosphate
  modified_base 15: mod_base = OTHER; note = 2'-O-methylguanosine-3'-phosphate
  modified_base 16: mod_base = OTHER; note = 2'-fluorouridine-3'-phosphate
  modified_base 17: mod_base = OTHER; note = 2'-O-methyluridine-3'-phosphate
  modified_base 18: mod_base = OTHER; note = 2'-O-methylcytidine-3'-phosphate
  modified_base 19: mod_base = OTHER; note = 2'-O-methyladenosine-3'-phosphate
  modified_base 20: mod_base = OTHER; note = 2'-O-methyluridine-3'-phosphate
  modified_base 21: mod_base = OTHER; note = 2'-O-methyladenosine-3'- phosphorothioate
  modified_base 22: mod_base = OTHER; note = 2'-O-methyladenosine-3'- phosphorothioate
  modified_base 23: mod_base = OTHER; note = 2'-O-methyluridine-3'-phosphate
tgatttagcatgttgttcataat

SEQ ID NO: 1968 - RNA, 21 nt, synthetic construct
  source 1..21: mol_type = other RNA
  modified_base 1: mod_base = OTHER; note = 2'-O-methyluridine-3'-phosphorothioate
  modified_base 2: mod_base = OTHER; note = 2'-O-methyluridine-3'-phosphorothioate
  modified_base 3: mod_base = OTHER; note = 2'-O-methyladenosine-3'-phosphate
  modified_base 4: mod_base = OTHER; note = 2'-O-methyluridine-3'-phosphate
  modified_base 5: mod_base = OTHER; note = 2'-O-methylguanosine-3'-phosphate
  modified_base 6: mod_base = OTHER; note = 2'-O-methyladenosine-3'-phosphate
  modified_base 7: mod_base = OTHER; note = 2'-fluoroadenosine-3'-phosphate
  modified_base 8: mod_base = OTHER; note = 2'-O-methylcytidine-3'-phosphate
  modified_base 9: mod_base = OTHER; note = 2'-fluoroadenosine-3'-phosphate
  modified_base 10: mod_base = OTHER; note = 2'-fluoroadenosine-3'-phosphate
  modified_base 11: mod_base = OTHER; note = 2'-fluorocytidine-3'-phosphate
  modified_base 12: mod_base = OTHER; note = 2'-O-methyladenosine-3'-phosphate
  modified_base 13: mod_base = OTHER; note = 2'-O-methyluridine-3'-phosphate
  modified_base 14: mod_base = OTHER; note = 2'-O-methylguanosine-3'-phosphate
  modified_base 15: mod_base = OTHER; note = 2'-O-methylcytidine-3'-phosphate
  modified_base 16: mod_base = OTHER; note = 2'-O-methyluridine-3'-phosphate
  modified_base 17: mod_base = OTHER; note = 2'-O-methyladenosine-3'-phosphate
  modified_base 18: mod_base = OTHER; note = 2'-O-methyladenosine-3'-phosphate
  modified_base 19: mod_base = OTHER; note = 2'-O-methyladenosine-3'-phosphate
  modified_base 20: mod_base = OTHER; note = 2'-O-methyluridine-3'-phosphate
  modified_base 21: mod_base = OTHER; note 2'-O-methylcytidine-3'-phosphate-N-[tris(GalNAc-alkyl)-amid odecanoyl)]-4-hydroxyprolinol (Hyp-(GalNAc-alkyl)3)
ttatgaacaacatgctaaatc

SEQ ID NO: 1969 - RNA, 23 nt, synthetic construct
  source 1..23: mol_type = other RNA
  modified_base 1: mod_base = OTHER; note = 2'-O-methylguanosine-3'- phosphorothioate
  modified_base 2: mod_base = OTHER; note = 2'-fluoroadenosine-3'-phosphorothioate
  modified_base 3: mod_base = OTHER; note = 2'-O-methyluridine-3'-phosphate
  modified_base 4: mod_base = OTHER; note = 2'-O-methyluridine-3'-phosphate
  modified_base 5: mod_base = OTHER; note = 2'-O-methyluridine-3'-phosphate
  modified_base 6: mod_base = OTHER; note = 2'-fluoroadenosine-3'-phosphate
  modified_base 7: mod_base = OTHER; note = 2'-O-methylguanosine-3'-phosphate
  modified_base 8: mod_base = OTHER; note = 2'-fluorocytidine-3'-phosphate
  modified_base 9: mod_base = OTHER; note = 2'-fluoroadenosine-3'-phosphate
  modified_base 10: mod_base = OTHER; note = 2'-O-methyluridine-3'-phosphate
  modified_base 11: mod_base = OTHER; note = 2'-O-methylguanosine-3'-phosphate
  modified_base 12: mod_base = OTHER; note = 2'-O-methyluridine-3'-phosphate
  modified_base 13: mod_base = OTHER; note = 2'-O-methyluridine-3'-phosphate
  modified_base 14: mod_base = OTHER; note = 2'-fluoroguanosine-3'-phosphate
  modified_base 15: mod_base = OTHER; note = 2'-O-methyluridine-3'-phosphate
  modified_base 16: mod_base = OTHER; note = 2'-fluorouridine-3'-phosphate
  modified_base 17: mod_base = OTHER; note = 2'-O-methylcytidine-3'-phosphate
  modified_base 18: mod_base = OTHER; note = 2'-O-methyladenosine-3'-phosphate
  modified_base 19: mod_base = OTHER; note = 2'-O-methyluridine-3'-phosphate
  modified_base 20: mod_base = OTHER; note = 2'-O-methyladenosine-3'-phosphate
  modified_base 21: mod_base = OTHER; note = 2'-O-methyladenosine-3'- phosphorothioate
  modified_base 22: mod_base = OTHER; note = 2'-O-methyluridine-3'-phosphorothioate
  modified_base 23: mod_base = OTHER; note = 2'-O-methylcytidine-3'-phosphate
gatttagcatgttgttcataatc

SEQ ID NO: 1970 - RNA, 21 nt, synthetic construct
  source 1..21: mol_type = other RNA
  modified_base 1: mod_base = OTHER; note = 2'-O-methyluridine-3'-phosphorothioate
  modified_base 2: mod_base = OTHER; note = 2'-O-methylcytidine-3'- phosphorothioate
  modified_base 3: mod_base = OTHER; note = 2'-O-methyluridine-3'-phosphate
  modified_base 4: mod_base = OTHER; note = 2'-O-methyluridine-3'-phosphate
  modified_base 5: mod_base = OTHER; note = 2'-O-methyluridine-3'-phosphate
  modified_base 6: mod_base = OTHER; note = 2'-O-methyladenosine-3'-phosphate
  modified_base 7: mod_base = OTHER; note = 2'-fluoroguanosine-3'-phosphate
  modified_base 8: mod_base = OTHER; note = 2'-O-methyluridine-3'-phosphate
  modified_base 9: mod_base = OTHER; note = 2'-fluoroguanosine-3'-phosphate
  modified_base 10: mod_base = OTHER; note = 2'-fluorouridine-3'-phosphate
  modified_base 11: mod_base = OTHER; note = 2'-fluorocytidine-3'-phosphate
  modified_base 12: mod_base = OTHER; note = 2'-O-methyluridine-3'-phosphate
  modified_base 13: mod_base = OTHER; note = 2'-O-methylguanosine-3'-phosphate
  modified_base 14: mod_base = OTHER; note = 2'-O-methyladenosine-3'-phosphate
  modified_base 15: mod_base = OTHER; note = 2'-O-methyladenosine-3'-phosphate
  modified_base 16: mod_base = OTHER; note = 2'-O-methyluridine-3'-phosphate
  modified_base 17: mod_base = OTHER; note = 2'-O-methyladenosine-3'-phosphate
  modified_base 18: mod_base = OTHER; note = 2'-O-methyluridine-3'-phosphate
  modified_base 19: mod_base = OTHER; note = 2'-O-methyladenosine-3'-phosphate
  modified_base 20: mod_base = OTHER; note = 2'-O-methyluridine-3'-phosphate
  modified_base 21: mod_base = OTHER; note 2'-O-methylcytidine-3'-phosphate-N-[tris(GalNAc-alkyl)-amid odecanoyl)]-4-hydroxyprolinol (Hyp-(GalNAc-alkyl)3)
tctttagtgtctgaatatatc

SEQ ID NO: 1971 - RNA, 23 nt, synthetic construct
  source 1..23: mol_type = other RNA
  modified_base 1: mod_base = OTHER; note = 2'-O-methylguanosine-3'- phosphorothioate
  modified_base 2: mod_base = OTHER; note = 2'-fluoroadenosine-3'-phosphorothioate
  modified_base 3: mod_base = OTHER; note = 2'-O-methyluridine-3'-phosphate
  modified_base 4: mod_base = OTHER; note = 2'-O-methyladenosine-3'-phosphate
  modified_base 5: mod_base = OTHER; note = 2'-O-methyluridine-3'-phosphate
  modified_base 6: mod_base = OTHER; note = 2'-fluoroadenosine-3'-phosphate
  modified_base 7: mod_base = OTHER; note = 2'-O-methyluridine-3'-phosphate
  modified_base 8: mod_base = OTHER; note = 2'-fluorouridine-3'-phosphate
  modified_base 9: mod_base = OTHER; note = 2'-fluorocytidine-3'-phosphate
  modified_base 10: mod_base = OTHER; note = 2'-O-methyladenosine-3'-phosphate
  modified_base 11: mod_base = OTHER; note = 2'-O-methylguanosine-3'-phosphate
  modified_base 12: mod_base = OTHER; note = 2'-O-methyladenosine-3'-phosphate
  modified_base 13: mod_base = OTHER; note = 2'-O-methylcytidine-3'-phosphate
  modified_base 14: mod_base = OTHER; note = 2'-fluoroadenosine-3'-phosphate
  modified_base 15: mod_base = OTHER; note = 2'-O-methylcytidine-3'-phosphate
  modified_base 16: mod_base = OTHER; note = 2'-fluorouridine-3'-phosphate
  modified_base 17: mod_base = OTHER; note = 2'-O-methyladenosine-3'-phosphate
  modified_base 18: mod_base = OTHER; note = 2'-O-methyladenosine-3'-phosphate
  modified_base 19: mod_base = OTHER; note = 2'-O-methyladenosine-3'-phosphate
  modified_base 20: mod_base = OTHER; note = 2'-O-methylguanosine-3'-phosphate
  modified_base 21: mod_base = OTHER; note = 2'-O-methyladenosine-3'- phosphorothioate
  modified_base 22: mod_base = OTHER; note = 2'-O-methyluridine-3'-phosphorothioate
  modified_base 23: mod_base = OTHER; note = 2'-O-methylguanosine-3'-phosphate
gatatattcagacactaaagatg

SEQ ID NO: 1972 - RNA, 21 nt, synthetic construct
  source 1..21: mol_type = other RNA
  modified_base 1: mod_base = OTHER; note = 2'-O-methylcytidine-3'- phosphorothioate
  modified_base 2: mod_base = OTHER; note = 2'-O-methyluridine-3'-phosphorothioate
  modified_base 3: mod_base = OTHER; note = 2'-O-methyluridine-3'-phosphate
  modified_base 4: mod_base = OTHER; note = 2'-O-methyluridine-3'-phosphate
  modified_base 5: mod_base = OTHER; note = 2'-O-methyladenosine-3'-phosphate
  modified_base 6: mod_base = OTHER; note = 2'-O-methylguanosine-3'-phosphate
  modified_base 7: mod_base = OTHER; note = 2'-fluorouridine-3'-phosphate
  modified_base 8: mod_base = OTHER; note = 2'-O-methylguanosine-3'-phosphate
  modified_base 9: mod_base = OTHER; note = 2'-fluorouridine-3'-phosphate
  modified_base 10: mod_base = OTHER; note = 2'-fluorocytidine-3'-phosphate
  modified_base 11: mod_base = OTHER; note = 2'-fluorouridine-3'-phosphate
  modified_base 12: mod_base = OTHER; note = 2'-O-methylguanosine-3'-phosphate
  modified_base 13: mod_base = OTHER; note = 2'-O-methyladenosine-3'-phosphate
  modified_base 14: mod_base = OTHER; note = 2'-O-methyladenosine-3'-phosphate
  modified_base 15: mod_base = OTHER; note = 2'-O-methyluridine-3'-phosphate
  modified_base 16: mod_base = OTHER; note = 2'-O-methyladenosine-3'-phosphate
  modified_base 17: mod_base = OTHER; note = 2'-O-methyluridine-3'-phosphate
  modified_base 18: mod_base = OTHER; note = 2'-O-methyladenosine-3'-phosphate
  modified_base 19: mod_base = OTHER; note = 2'-O-methyluridine-3'-phosphate
  modified_base 20: mod_base = OTHER; note = 2'-O-methylcytidine-3'-phosphate
  modified_base 21: mod_base = OTHER; note 2'-O-methylcytidine-3'-phosphate-N-[tris(GalNAc-alkyl)-amid odecanoyl)]-4-hydroxyprolinol (Hyp-(GalNAc-alkyl)3)
ctttagtgtctgaatatatcc

SEQ ID NO: 1973 - RNA, 23 nt, synthetic construct
  source 1..23: mol_type = other RNA
  modified_base 1: mod_base = OTHER; note = 2'-O-methylguanosine-3'- phosphorothioate
  modified_base 2: mod_base = OTHER; note = 2'-fluoroguanosine-3'-phosphorothioate
  modified_base 3: mod_base = OTHER; note = 2'-O-methyladenosine-3'-phosphate
  modified_base 4: mod_base = OTHER; note = 2'-O-methyluridine-3'-phosphate
  modified_base 5: mod_base = OTHER; note = 2'-O-methyladenosine-3'-phosphate
  modified_base 6: mod_base = OTHER; note = 2'-fluorouridine-3'-phosphate
  modified_base 7: mod_base = OTHER; note = 2'-O-methyladenosine-3'-phosphate
  modified_base 8: mod_base = OTHER; note = 2'-fluorouridine-3'-phosphate
  modified_base 9: mod_base = OTHER; note = 2'-fluorouridine-3'-phosphate
  modified_base 10: mod_base = OTHER; note = 2'-O-methylcytidine-3'-phosphate
  modified_base 11: mod_base = OTHER; note = 2'-O-methyladenosine-3'-phosphate
  modified_base 12: mod_base = OTHER; note = 2'-O-methylguanosine-3'-phosphate
  modified_base 13: mod_base = OTHER; note = 2'-O-methyladenosine-3'-phosphate
  modified_base 14: mod_base = OTHER; note = 2'-fluorocytidine-3'-phosphate
  modified_base 15: mod_base = OTHER; note = 2'-O-methyladenosine-3'-phosphate
  modified_base 16: mod_base = OTHER; note = 2'-fluorocytidine-3'-phosphate
  modified_base 17: mod_base = OTHER; note = 2'-O-methyluridine-3'-phosphate
  modified_base 18: mod_base = OTHER; note = 2'-O-methyladenosine-3'-phosphate
  modified_base 19: mod_base = OTHER; note = 2'-O-methyladenosine-3'-phosphate
  modified_base 20: mod_base = OTHER; note = 2'-O-methyladenosine-3'-phosphate
  modified_base 21: mod_base = OTHER; note = 2'-O-methylguanosine-3'- phosphorothioate
  modified_base 22: mod_base = OTHER; note = 2'-O-methyladenosine-3'- phosphorothioate
  modified_base 23: mod_base = OTHER; note = 2'-O-methyluridine-3'-phosphate
ggatatattcagacactaaagat

SEQ ID NO: 1974 - RNA, 21 nt, synthetic construct
  source 1..21: mol_type = other RNA
  modified_base 1: mod_base = OTHER; note = 2'-O-methylcytidine-3'- phosphorothioate
  modified_base 2: mod_base = OTHER; note = 2'-O-methyladenosine-3'- phosphorothioate
  modified_base 3: mod_base = OTHER; note = 2'-O-methylcytidine-3'-phosphate
  modified_base 4: mod_base = OTHER; note = 2'-O-methyladenosine-3'-phosphate
  modified_base 5: mod_base = OTHER; note = 2'-O-methyluridine-3'-phosphate
  modified_base 6: mod_base = OTHER; note = 2'-O-methylcytidine-3'-phosphate
  modified_base 7: mod_base = OTHER; note = 2'-fluorouridine-3'-phosphate
  modified_base 8: mod_base = OTHER; note = 2'-O-methyluridine-3'-phosphate
  modified_base 9: mod_base = OTHER; note = 2'-fluorouridine-3'-phosphate
  modified_base 10: mod_base = OTHER; note = 2'-fluoroadenosine-3'-phosphate
  modified_base 11: mod_base = OTHER; note = 2'-fluoroguanosine-3'-phosphate
  modified_base 12: mod_base = OTHER; note = 2'-O-methyluridine-3'-phosphate
  modified_base 13: mod_base = OTHER; note = 2'-O-methylguanosine-3'-phosphate
  modified_base 14: mod_base = OTHER; note = 2'-O-methyluridine-3'-phosphate
  modified_base 15: mod_base = OTHER; note = 2'-O-methylcytidine-3'-phosphate
  modified_base 16: mod_base = OTHER; note = 2'-O-methyluridine-3'-phosphate
  modified_base 17: mod_base = OTHER; note = 2'-O-methylguanosine-3'-phosphate
  modified_base 18: mod_base = OTHER; note = 2'-O-methyladenosine-3'-phosphate
  modified_base 19: mod_base = OTHER; note = 2'-O-methyladenosine-3'-phosphate
  modified_base 20: mod_base = OTHER; note = 2'-O-methyluridine-3'-phosphate
  modified_base 21: mod_base = OTHER; note 2'-O-methyladenosine-3'-phosphate-N-[tris(GalNAc-alkyl)-ami dodecanoyl)]-4-hydroxyprolinol (Hyp-(GalNAc-alkyl)3)
cacatctttagtgtctgaata

SEQ ID NO: 1975 - RNA, 23 nt, synthetic construct
  source 1..23: mol_type = other RNA
  modified_base 1: mod_base = OTHER; note = 2'-O-methyluridine-3'-phosphorothioate
  modified_base 2: mod_base = OTHER; note = 2'-fluoroadenosine-3'-phosphorothioate
  modified_base 3: mod_base = OTHER; note = 2'-O-methyluridine-3'-phosphate
  modified_base 4: mod_base = OTHER; note = 2'-O-methyluridine-3'-phosphate
  modified_base 5: mod_base = OTHER; note = 2'-O-methylcytidine-3'-phosphate
  modified_base 6: mod_base = OTHER; note = 2'-fluoroadenosine-3'-phosphate
  modified_base 7: mod_base = OTHER; note = 2'-O-methylguanosine-3'-phosphate
  modified_base 8: mod_base = OTHER; note = 2'-fluoroadenosine-3'-phosphate
  modified_base 9: mod_base = OTHER; note = 2'-fluorocytidine-3'-phosphate
  modified_base 10: mod_base = OTHER; note = 2'-O-methyladenosine-3'-phosphate
  modified_base 11: mod_base = OTHER; note = 2'-O-methylcytidine-3'-phosphate
  modified_base 12: mod_base = OTHER; note = 2'-O-methyluridine-3'-phosphate
  modified_base 13: mod_base = OTHER; note = 2'-O-methyladenosine-3'-phosphate
  modified_base 14: mod_base = OTHER; note = 2'-fluoroadenosine-3'-phosphate
  modified_base 15: mod_base = OTHER; note = 2'-O-methyladenosine-3'-phosphate
  modified_base 16: mod_base = OTHER; note = 2'-fluoroguanosine-3'-phosphate
  modified_base 17: mod_base = OTHER; note = 2'-O-methyladenosine-3'-phosphate
  modified_base 18: mod_base = OTHER; note = 2'-O-methyluridine-3'-phosphate
  modified_base 19: mod_base = OTHER; note = 2'-O-methylguanosine-3'-phosphate
  modified_base 20: mod_base = OTHER; note = 2'-O-methyluridine-3'-phosphate
  modified_base 21: mod_base = OTHER; note = 2'-O-methylguanosine-3'- phosphorothioate
  modified_base 22: mod_base = OTHER; note = 2'-O-methyladenosine-3'- phosphorothioate
  modified_base 23: mod_base = OTHER; note = 2'-O-methyluridine-3'-phosphate
tattcagacactaaagatgtgat

SEQ ID NO: 1976 - RNA, 21 nt, synthetic construct
  source 1..21: mol_type = other RNA
  modified_base 1: mod_base = OTHER; note = 2'-O-methyluridine-3'-phosphorothioate
  modified_base 2: mod_base = OTHER; note = 2'-O-methylcytidine-3'- phosphorothioate
  modified_base 3: mod_base = OTHER; note = 2'-O-methyladenosine-3'-phosphate
  modified_base 4: mod_base = OTHER; note = 2'-O-methylcytidine-3'-phosphate
  modified_base 5: mod_base = OTHER; note = 2'-O-methyladenosine-3'-phosphate
  modified_base 6: mod_base = OTHER; note = 2'-O-methyluridine-3'-phosphate
  modified_base 7: mod_base = OTHER; note = 2'-fluorocytidine-3'-phosphate
  modified_base 8: mod_base = OTHER; note = 2'-O-methyluridine-3'-phosphate
  modified_base 9: mod_base = OTHER; note = 2'-fluorouridine-3'-phosphate
  modified_base 10: mod_base = OTHER; note = 2'-fluorouridine-3'-phosphate
  modified_base 11: mod_base = OTHER; note = 2'-fluoroadenosine-3'-phosphate
  modified_base 12: mod_base = OTHER; note = 2'-O-methylguanosine-3'-phosphate
  modified_base 13: mod_base = OTHER; note = 2'-O-methyluridine-3'-phosphate
  modified_base 14: mod_base = OTHER; note = 2'-O-methylguanosine-3'-phosphate
  modified_base 15: mod_base = OTHER; note = 2'-O-methyluridine-3'-phosphate
  modified_base 16: mod_base = OTHER; note = 2'-O-methylcytidine-3'-phosphate
  modified_base 17: mod_base = OTHER; note = 2'-O-methyluridine-3'-phosphate
  modified_base 18: mod_base = OTHER; note = 2'-O-methylguanosine-3'-phosphate
  modified_base 19: mod_base = OTHER; note = 2'-O-methyladenosine-3'-phosphate
  modified_base 20: mod_base = OTHER; note = 2'-O-methyladenosine-3'-phosphate
  modified_base 21: mod_base = OTHER; note 2'-O-methyluridine-3'-phosphate-N-[tris(GalNAc-alkyl)-amido decanoyl)]-4-hydroxyprolinol (Hyp-(GalNAc-alkyl)3)
tcacatctttagtgtctgaat

SEQ ID NO: 1977 - RNA, 23 nt, synthetic construct
  source 1..23: mol_type = other RNA
  modified_base 1: mod_base = OTHER; note = 2'-O-methyladenosine-3'- phosphorothioate
  modified_base 2: mod_base = OTHER; note = 2'-fluorouridine -3'-phosphorothioate
  modified_base 3: mod_base = OTHER; note = 2'-O-methyluridine-3'-phosphate
  modified_base 4: mod_base = OTHER; note = 2'-O-methylcytidine-3'-phosphate
  modified_base 5: mod_base = OTHER; note = 2'-O-methyladenosine-3'-phosphate
  modified_base 6: mod_base = OTHER; note = 2'-fluoroguanosine-3'-phosphate
  modified_base 7: mod_base = OTHER; note = 2'-O-methyladenosine-3'-phosphate
  modified_base 8: mod_base = OTHER; note = 2'-fluorocytidine-3'-phosphate
  modified_base 9: mod_base = OTHER; note = 2'-fluoroadenosine-3'-phosphate
  modified_base 10: mod_base = OTHER; note = 2'-O-methylcytidine-3'-phosphate
  modified_base 11: mod_base = OTHER; note = 2'-O-methyluridine-3'-phosphate
  modified_base 12: mod_base = OTHER; note = 2'-O-methyladenosine-3'-phosphate
  modified_base 13: mod_base = OTHER; note = 2'-O-methyladenosine-3'-phosphate
  modified_base 14: mod_base = OTHER; note = 2'-fluoroadenosine-3'-phosphate
  modified_base 15: mod_base = OTHER; note = 2'-O-methylguanosine-3'-phosphate
  modified_base 16: mod_base = OTHER; note = 2'-fluoroadenosine-3'-phosphate
  modified_base 17: mod_base = OTHER; note = 2'-O-methyluridine-3'-phosphate
  modified_base 18: mod_base = OTHER; note = 2'-O-methylguanosine-3'-phosphate
  modified_base 19: mod_base = OTHER; note = 2'-O-methyluridine-3'-phosphate
  modified_base 20: mod_base = OTHER; note = 2'-O-methylguanosine-3'-phosphate
  modified_base 21: mod_base = OTHER; note = 2'-O-methyladenosine-3'- phosphorothioate
  modified_base 22: mod_base = OTHER; note = 2'-O-methyluridine-3'-phosphorothioate
  modified_base 23: mod_base = OTHER; note = 2'-O-methyluridine-3'-phosphate
attcagacactaaagatgtgatt

SEQ ID NO: 1978 - RNA, 21 nt, synthetic construct
  source 1..21: mol_type = other RNA
  modified_base 1: mod_base = OTHER; note = 2'-O-methyluridine-3'-phosphorothioate
  modified_base 2: mod_base = OTHER; note = 2'-O-methylguanosine-3'- phosphorothioate
  modified_base 3: mod_base = OTHER; note = 2'-O-methyladenosine-3'-phosphate
  modified_base 4: mod_base = OTHER; note = 2'-O-methyluridine-3'-phosphate
  modified_base 5: mod_base = OTHER; note = 2'-O-methyladenosine-3'-phosphate
  modified_base 6: mod_base = OTHER; note = 2'-O-methylcytidine-3'-phosphate
  modified_base 7: mod_base = OTHER; note = 2'-fluorouridine-3'-phosphate
  modified_base 8: mod_base = OTHER; note = 2'-O-methyluridine-3'-phosphate
  modified_base 9: mod_base = OTHER; note = 2'-fluorocytidine-3'-phosphate
  modified_base 10: mod_base = OTHER; note = 2'-fluorouridine-3'-phosphate
  modified_base 11: mod_base = OTHER; note = 2'-fluorouridine-3'-phosphate
  modified_base 12: mod_base = OTHER; note = 2'-O-methyluridine-3'-phosphate
  modified_base 13: mod_base = OTHER; note = 2'-O-methylguanosine-3'-phosphate
  modified_base 14: mod_base = OTHER; note = 2'-O-methyladenosine-3'-phosphate
  modified_base 15: mod_base = OTHER; note = 2'-O-methyladenosine-3'-phosphate
  modified_base 16: mod_base = OTHER; note = 2'-O-methyluridine-3'-phosphate
  modified_base 17: mod_base = OTHER; note = 2'-O-methylguanosine-3'-phosphate
  modified_base 18: mod_base = OTHER; note = 2'-O-methyluridine-3'-phosphate
  modified_base 19: mod_base = OTHER; note = 2'-O-methyladenosine-3'-phosphate
  modified_base 20: mod_base = OTHER; note = 2'-O-methylguanosine-3'-phosphate
  modified_base 21: mod_base = OTHER; note 2'-O-methyladenosine-3'-phosphate-N-[tris(GalNAc-alkyl)-ami dodecanoyl)]-4-hydroxyprolinol (Hyp-(GalNAc-alkyl)3)
tgatacttctttgaatgtaga

SEQ ID NO: 1979 - RNA, 23 nt, synthetic construct
  source 1..23: mol_type = other RNA
  modified_base 1: mod_base = OTHER; note = 2'-O-methyluridine-3'-phosphorothioate
  modified_base 2: mod_base = OTHER; note = 2'-fluorocytidine-3'-phosphorothioate
  modified_base 3: mod_base = OTHER; note = 2'-O-methyluridine-3'-phosphate
  modified_base 4: mod_base = OTHER; note = 2'-O-methyladenosine-3'-phosphate
  modified_base 5: mod_base = OTHER; note = 2'-O-methylcytidine-3'-phosphate
  modified_base 6: mod_base = OTHER; note = 2'-fluoroadenosine-3'-phosphate
  modified_base 7: mod_base = OTHER; note = 2'-O-methyluridine-3'-phosphate
  modified_base 8: mod_base = OTHER; note = 2'-fluorouridine-3'-phosphate
  modified_base 9: mod_base = OTHER; note = 2'-fluorocytidine-3'-phosphate
  modified_base 10: mod_base = OTHER; note = 2'-O-methyladenosine-3'-phosphate
  modified_base 11: mod_base = OTHER; note = 2'-O-methyladenosine-3'-phosphate
  modified_base 12: mod_base = OTHER; note = 2'-O-methyladenosine-3'-phosphate
  modified_base 13: mod_base = OTHER; note = 2'-O-methylguanosine-3'-phosphate
  modified_base 14: mod_base = OTHER; note = 2'-fluoroadenosine-3'-phosphate
  modified_base 15: mod_base = OTHER; note = 2'-O-methyladenosine-3'-phosphate
  modified_base 16: mod_base = OTHER; note = 2'-fluoroguanosine-3'-phosphate
  modified_base 17: mod_base = OTHER; note = 2'-O-methyluridine-3'-phosphate
  modified_base 18: mod_base = OTHER; note = 2'-O-methyladenosine-3'-phosphate
  modified_base 19: mod_base = OTHER; note = 2'-O-methyluridine-3'-phosphate
  modified_base 20: mod_base = OTHER; note = 2'-O-methylcytidine-3'-phosphate
  modified_base 21: mod_base = OTHER; note = 2'-O-methyladenosine-3'- phosphorothioate
  modified_base 22: mod_base = OTHER; note = 2'-O-methylcytidine-3'- phosphorothioate
  modified_base 23: mod_base = OTHER; note = 2'-O-methylcytidine-3'-phosphate
tctacattcaaagaagtatcacc

SEQ ID NO: 1980 - RNA, 21 nt, synthetic construct
  source 1..21: mol_type = other RNA
  modified_base 1: mod_base = OTHER; note = 2'-O-methylguanosine-3'- phosphorothioate
  modified_base 2: mod_base = OTHER; note = 2'-O-methyladenosine-3'- phosphorothioate
  modified_base 3: mod_base = OTHER; note = 2'-O-methyluridine-3'-phosphate
  modified_base 4: mod_base = OTHER; note = 2'-O-methyladenosine-3'-phosphate
  modified_base 5: mod_base = OTHER; note = 2'-O-methylcytidine-3'-phosphate
  modified_base 6: mod_base = OTHER; note = 2'-O-methyluridine-3'-phosphate
  modified_base 7: mod_base = OTHER; note = 2'-fluorouridine-3'-phosphate
  modified_base 8: mod_base = OTHER; note = 2'-O-methylcytidine-3'-phosphate
  modified_base 9: mod_base = OTHER; note = 2'-fluorouridine-3'-phosphate
  modified_base 10: mod_base = OTHER; note = 2'-fluorouridine-3'-phosphate
  modified_base 11: mod_base = OTHER; note = 2'-fluorouridine-3'-phosphate
  modified_base 12: mod_base = OTHER; note = 2'-O-methylguanosine-3'-phosphate
  modified_base 13: mod_base = OTHER; note = 2'-O-methyladenosine-3'-phosphate
  modified_base 14: mod_base = OTHER; note = 2'-O-methyladenosine-3'-phosphate
  modified_base 15: mod_base = OTHER; note = 2'-O-methyluridine-3'-phosphate
  modified_base 16: mod_base = OTHER; note = 2'-O-methylguanosine-3'-phosphate
  modified_base 17: mod_base = OTHER; note = 2'-O-methyluridine-3'-phosphate
  modified_base 18: mod_base = OTHER; note = 2'-O-methyladenosine-3'-phosphate
  modified_base 19: mod_base = OTHER; note = 2'-O-methylguanosine-3'-phosphate
  modified_base 20: mod_base = OTHER; note = 2'-O-methyladenosine-3'-phosphate
  modified_base 21: mod_base = OTHER; note 2'-O-methyluridine-3'-phosphate-N-[tris(GalNAc-alkyl)-amido decanoyl)]-4-hydroxyprolinol (Hyp-(GalNAc-alkyl)3)
gatacttctttgaatgtagat

SEQ ID NO: 1981 - RNA, 23 nt, synthetic construct
  source 1..23: mol_type = other RNA
  modified_base 1: mod_base = OTHER; note = 2'-O-methyladenosine-3'- phosphorothioate
  modified_base 2: mod_base = OTHER; note = 2'-fluorouridine -3'-phosphorothioate
  modified_base 3: mod_base = OTHER; note = 2'-O-methylcytidine-3'-phosphate
  modified_base 4: mod_base = OTHER; note = 2'-O-methyluridine-3'-phosphate
  modified_base 5: mod_base = OTHER; note = 2'-O-methyladenosine-3'-phosphate
  modified_base 6: mod_base = OTHER; note = 2'-fluorocytidine-3'-phosphate
  modified_base 7: mod_base = OTHER; note = 2'-O-methyladenosine-3'-phosphate
  modified_base 8: mod_base = OTHER; note = 2'-fluorouridine-3'-phosphate
  modified_base 9: mod_base = OTHER; note = 2'-fluorouridine-3'-phosphate
  modified_base 10: mod_base = OTHER; note = 2'-O-methylcytidine-3'-phosphate
  modified_base 11: mod_base = OTHER; note = 2'-O-methyladenosine-3'-phosphate
  modified_base 12: mod_base = OTHER; note = 2'-O-methyladenosine-3'-phosphate
  modified_base 13: mod_base = OTHER; note = 2'-O-methyladenosine-3'-phosphate
  modified_base 14: mod_base = OTHER; note = 2'-fluoroguanosine-3'-phosphate
  modified_base 15: mod_base = OTHER; note = 2'-O-methyladenosine-3'-phosphate
  modified_base 16: mod_base = OTHER; note = 2'-fluoroadenosine-3'-phosphate
  modified_base 17: mod_base = OTHER; note = 2'-O-methylguanosine-3'-phosphate
  modified_base 18: mod_base = OTHER; note = 2'-O-methyluridine-3'-phosphate
  modified_base 19: mod_base = OTHER; note = 2'-O-methyladenosine-3'-phosphate
  modified_base 20: mod_base = OTHER; note = 2'-O-methyluridine-3'-phosphate
  modified_base 21: mod_base = OTHER; note = 2'-O-methylcytidine-3'- phosphorothioate
  modified_base 22: mod_base = OTHER; note = 2'-O-methyladenosine-3'- phosphorothioate
  modified_base 23: mod_base = OTHER; note = 2'-O-methylcytidine-3'-phosphate
atctacattcaaagaagtatcac

SEQ ID NO: 1982 - RNA, 21 nt, synthetic construct
  source 1..21: mol_type = other RNA
  modified_base 1: mod_base = OTHER; note = 2'-O-methyluridine-3'-phosphorothioate
  modified_base 2: mod_base = OTHER; note = 2'-O-methyluridine-3'-phosphorothioate
  modified_base 3: mod_base = OTHER; note = 2'-O-methylguanosine-3'-phosphate
  modified_base 4: mod_base = OTHER; note = 2'-O-methylguanosine-3'-phosphate
  modified_base 5: mod_base = OTHER; note = 2'-O-methyluridine-3'-phosphate
  modified_base 6: mod_base = OTHER; note = 2'-O-methylguanosine-3'-phosphate
  modified_base 7: mod_base = OTHER; note = 2'-fluoroadenosine-3'-phosphate
  modified_base 8: mod_base = OTHER; note = 2'-O-methyluridine-3'-phosphate
  modified_base 9: mod_base = OTHER; note = 2'-fluoroadenosine-3'-phosphate
  modified_base 10: mod_base = OTHER; note = 2'-fluorocytidine-3'-phosphate
  modified_base 11: mod_base = OTHER; note = 2'-fluorouridine-3'-phosphate
  modified_base 12: mod_base = OTHER; note = 2'-O-methyluridine-3'-phosphate
  modified_base 13: mod_base = OTHER; note = 2'-O-methylcytidine-3'-phosphate
  modified_base 14: mod_base = OTHER; note = 2'-O-methyluridine-3'-phosphate
  modified_base 15: mod_base = OTHER; note = 2'-O-methyluridine-3'-phosphate
  modified_base 16: mod_base = OTHER; note = 2'-O-methyluridine-3'-phosphate
  modified_base 17: mod_base = OTHER; note = 2'-O-methylguanosine-3'-phosphate
  modified_base 18: mod_base = OTHER; note = 2'-O-methyladenosine-3'-phosphate
  modified_base 19: mod_base = OTHER; note = 2'-O-methyladenosine-3'-phosphate
  modified_base 20: mod_base = OTHER; note = 2'-O-methyluridine-3'-phosphate
  modified_base 21: mod_base = OTHER; note 2'-O-methylguanosine-3'-phosphate-N-[tris(GalNAc-alkyl)-ami dodecanoyl)]-4-hydroxyprolinol (Hyp-(GalNAc-alkyl)3)
ttggtgatacttctttgaatg

SEQ ID NO: 1983 - RNA, 23 nt, synthetic construct
  source 1..23: mol_type = other RNA
  modified_base 1: mod_base = OTHER; note = 2'-O-methylcytidine-3'- phosphorothioate
  modified_base 2: mod_base = OTHER; note = 2'-fluoroadenosine-3'-phosphorothioate
  modified_base 3: mod_base = OTHER; note = 2'-O-methyluridine-3'-phosphate
  modified_base 4: mod_base = OTHER; note = 2'-O-methyluridine-3'-phosphate
  modified_base 5: mod_base = OTHER; note = 2'-O-methylcytidine-3'-phosphate
  modified_base 6: mod_base = OTHER; note = 2'-fluoroadenosine-3'-phosphate
  modified_base 7: mod_base = OTHER; note = 2'-O-methyladenosine-3'-phosphate
  modified_base 8: mod_base = OTHER; note = 2'-fluoroadenosine-3'-phosphate
  modified_base 9: mod_base = OTHER; note = 2'-fluoroguanosine-3'-phosphate
  modified_base 10: mod_base = OTHER; note = 2'-O-methyladenosine-3'-phosphate
  modified_base 11: mod_base = OTHER; note = 2'-O-methyladenosine-3'-phosphate
  modified_base 12: mod_base = OTHER; note = 2'-O-methylguanosine-3'-phosphate
  modified_base 13: mod_base = OTHER; note = 2'-O-methyluridine-3'-phosphate
  modified_base 14: mod_base = OTHER; note = 2'-fluoroadenosine-3'-phosphate
  modified_base 15: mod_base = OTHER; note = 2'-O-methyluridine-3'-phosphate
  modified_base 16: mod_base = OTHER; note = 2'-fluorocytidine-3'-phosphate
  modified_base 17: mod_base = OTHER; note = 2'-O-methyladenosine-3'-phosphate
  modified_base 18: mod_base = OTHER; note = 2'-O-methylcytidine-3'-phosphate
  modified_base 19: mod_base = OTHER; note = 2'-O-methylcytidine-3'-phosphate
  modified_base 20: mod_base = OTHER; note = 2'-O-methyladenosine-3'-phosphate
  modified_base 21: mod_base = OTHER; note = 2'-O-methyladenosine-3'- phosphorothioate
  modified_base 22: mod_base = OTHER; note = 2'-O-methyluridine-3'-phosphorothioate
  modified_base 23: mod_base = OTHER; note = 2'-O-methyluridine-3'-phosphate
cattcaaagaagtatcaccaatt

SEQ ID NO: 1984 - RNA, 21 nt, synthetic construct
  source 1..21: mol_type = other RNA
  modified_base 1: mod_base = OTHER; note = 2'-O-methyladenosine-3'- phosphorothioate
  modified_base 2: mod_base = OTHER; note = 2'-O-methyluridine-3'-phosphorothioate
  modified_base 3: mod_base = OTHER; note = 2'-O-methyluridine-3'-phosphate
  modified_base 4: mod_base = OTHER; note = 2'-O-methylguanosine-3'-phosphate
  modified_base 5: mod_base = OTHER; note = 2'-O-methylguanosine-3'-phosphate
  modified_base 6: mod_base = OTHER; note = 2'-O-methyluridine-3'-phosphate
  modified_base 7: mod_base = OTHER; note = 2'-fluoroguanosine-3'-phosphate
  modified_base 8: mod_base = OTHER; note = 2'-O-methyladenosine-3'-phosphate
  modified_base 9: mod_base = OTHER; note = 2'-fluorouridine-3'-phosphate
  modified_base 10: mod_base = OTHER; note = 2'-fluoroadenosine-3'-phosphate
  modified_base 11: mod_base = OTHER; note = 2'-fluorocytidine-3'-phosphate
  modified_base 12: mod_base = OTHER; note = 2'-O-methyluridine-3'-phosphate
  modified_base 13: mod_base = OTHER; note = 2'-O-methyluridine-3'-phosphate
  modified_base 14: mod_base = OTHER; note = 2'-O-methylcytidine-3'-phosphate
  modified_base 15: mod_base = OTHER; note = 2'-O-methyluridine-3'-phosphate
  modified_base 16: mod_base = OTHER; note = 2'-O-methyluridine-3'-phosphate
  modified_base 17: mod_base = OTHER; note = 2'-O-methyluridine-3'-phosphate
  modified_base 18: mod_base = OTHER; note = 2'-O-methylguanosine-3'-phosphate
  modified_base 19: mod_base = OTHER; note = 2'-O-methyladenosine-3'-phosphate
  modified_base 20: mod_base = OTHER; note = 2'-O-methyladenosine-3'-phosphate
  modified_base 21: mod_base = OTHER; note 2'-O-methyluridine-3'-phosphate-N-[tris(GalNAc-alkyl)-amido decanoyl)]-4-hydroxyprolinol (Hyp-(GalNAc-alkyl)3)
attggtgatacttctttgaat

SEQ ID NO: 1985 - RNA, 23 nt, synthetic construct
  source 1..23: mol_type = other RNA
  modified_base 1: mod_base = OTHER; note = 2'-O-methyladenosine-3'- phosphorothioate
  modified_base 2: mod_base = OTHER; note = 2'-fluorouridine -3'-phosphorothioate
  modified_base 3: mod_base = OTHER; note = 2'-O-methyluridine-3'-phosphate
  modified_base 4: mod_base = OTHER; note = 2'-O-methylcytidine-3'-phosphate
  modified_base 5: mod_base = OTHER; note = 2'-O-methyladenosine-3'-phosphate
  modified_base 6: mod_base = OTHER; note = 2'-fluoroadenosine-3'-phosphate
  modified_base 7: mod_base = OTHER; note = 2'-O-methyladenosine-3'-phosphate
  modified_base 8: mod_base = OTHER; note = 2'-fluoroguanosine-3'-phosphate
  modified_base 9: mod_base = OTHER; note = 2'-fluoroadenosine-3'-phosphate
  modified_base 10: mod_base = OTHER; note = 2'-O-methyladenosine-3'-phosphate
  modified_base 11: mod_base = OTHER; note = 2'-O-methylguanosine-3'-phosphate
  modified_base 12: mod_base = OTHER; note = 2'-O-methyluridine-3'-phosphate
  modified_base 13: mod_base = OTHER; note = 2'-O-methyladenosine-3'-phosphate
  modified_base 14: mod_base = OTHER; note = 2'-fluorouridine-3'-phosphate
  modified_base 15: mod_base = OTHER; note = 2'-O-methylcytidine-3'-phosphate
  modified_base 16: mod_base = OTHER; note = 2'-fluoroadenosine-3'-phosphate
  modified_base 17: mod_base = OTHER; note = 2'-O-methylcytidine-3'-phosphate
  modified_base 18: mod_base = OTHER; note = 2'-O-methylcytidine-3'-phosphate
  modified_base 19: mod_base = OTHER; note = 2'-O-methyladenosine-3'-phosphate
  modified_base 20: mod_base = OTHER; note = 2'-O-methyladenosine-3'-phosphate
  modified_base 21: mod_base = OTHER; note = 2'-O-methyluridine-3'-phosphorothioate
  modified_base 22: mod_base = OTHER; note = 2'-O-methyluridine-3'-phosphorothioate
  modified_base 23: mod_base = OTHER; note = 2'-O-methyladenosine-3'-phosphate
attcaaagaagtatcaccaatta

SEQ ID NO: 1986 - RNA, 21 nt, synthetic construct
  source 1..21: mol_type = other RNA
  modified_base 1: mod_base = OTHER; note = 2'-O-methyladenosine-3'- phosphorothioate
  modified_base 2: mod_base = OTHER; note = 2'-O-methyladenosine-3'- phosphorothioate
  modified_base 3: mod_base = OTHER; note = 2'-O-methyluridine-3'-phosphate
  modified_base 4: mod_base = OTHER; note = 2'-O-methyladenosine-3'-phosphate
  modified_base 5: mod_base = OTHER; note = 2'-O-methyladenosine-3'-phosphate
  modified_base 6: mod_base = OTHER; note = 2'-O-methylcytidine-3'-phosphate
  modified_base 7: mod_base = OTHER; note = 2'-fluorocytidine-3'-phosphate
  modified_base 8: mod_base = OTHER; note = 2'-O-methyluridine-3'-phosphate
  modified_base 9: mod_base = OTHER; note = 2'-fluoroguanosine-3'-phosphate
  modified_base 10: mod_base = OTHER; note = 2'-fluorouridine-3'-phosphate
  modified_base 11: mod_base = OTHER; note = 2'-fluoroguanosine-3'-phosphate
  modified_base 12: mod_base = OTHER; note = 2'-O-methyladenosine-3'-phosphate
  modified_base 13: mod_base = OTHER; note = 2'-O-methyladenosine-3'-phosphate
  modified_base 14: mod_base = OTHER; note = 2'-O-methyladenosine-3'-phosphate
  modified_base 15: mod_base = OTHER; note = 2'-O-methyladenosine-3'-phosphate
  modified_base 16: mod_base = OTHER; note = 2'-O-methyluridine-3'-phosphate
  modified_base 17: mod_base = OTHER; note = 2'-O-methylguanosine-3'-phosphate
  modified_base 18: mod_base = OTHER; note = 2'-O-methylcytidine-3'-phosphate
  modified_base 19: mod_base = OTHER; note = 2'-O-methyluridine-3'-phosphate
  modified_base 20: mod_base = OTHER; note = 2'-O-methylcytidine-3'-phosphate
  modified_base 21: mod_base = OTHER; note 2'-O-methylcytidine-3'-phosphate-N-[tris(GalNAc-alkyl)-amid odecanoyl)]-4-hydroxyprolinol (Hyp-(GalNAc-alkyl)3)
aataacctgtgaaaatgctcc

SEQ ID NO: 1987 - RNA, 23 nt, synthetic construct
  source 1..23: mol_type = other RNA
  modified_base 1: mod_base = OTHER; note = 2'-O-methylguanosine-3'- phosphorothioate
  modified_base 2: mod_base = OTHER; note = 2'-fluoroguanosine-3'-phosphorothioate
  modified_base 3: mod_base = OTHER; note = 2'-O-methyladenosine-3'-phosphate
  modified_base 4: mod_base = OTHER; note = 2'-O-methylguanosine-3'-phosphate
  modified_base 5: mod_base = OTHER; note = 2'-O-methylcytidine-3'-phosphate
  modified_base 6: mod_base = OTHER; note = 2'-fluoroadenosine-3'-phosphate
  modified_base 7: mod_base = OTHER; note = 2'-O-methyluridine-3'-phosphate
  modified_base 8: mod_base = OTHER; note = 2'-fluorouridine-3'-phosphate
  modified_base 9: mod_base = OTHER; note = 2'-fluorouridine-3'-phosphate
  modified_base 10: mod_base = OTHER; note = 2'-O-methyluridine-3'-phosphate
  modified_base 11: mod_base = OTHER; note = 2'-O-methylcytidine-3'-phosphate
  modified_base 12: mod_base = OTHER; note = 2'-O-methyladenosine-3'-phosphate
  modified_base 13: mod_base = OTHER; note = 2'-O-methylcytidine-3'-phosphate
  modified_base 14: mod_base = OTHER; note = 2'-fluoroadenosine-3'-phosphate
  modified_base 15: mod_base = OTHER; note = 2'-O-methylguanosine-3'-phosphate
  modified_base 16: mod_base = OTHER; note = 2'-fluoroguanosine-3'-phosphate
  modified_base 17: mod_base = OTHER; note = 2'-O-methyluridine-3'-phosphate
  modified_base 18: mod_base = OTHER; note = 2'-O-methyluridine-3'-phosphate
  modified_base 19: mod_base = OTHER; note = 2'-O-methyladenosine-3'-phosphate
  modified_base 20: mod_base = OTHER; note = 2'-O-methyluridine-3'-phosphate
  modified_base 21: mod_base = OTHER; note = 2'-O-methyluridine-3'-phosphorothioate
  modified_base 22: mod_base = OTHER; note = 2'-O-methylguanosine-3'- phosphorothioate
  modified_base 23: mod_base = OTHER; note = 2'-O-methylcytidine-3'-phosphate
ggagcattttcacaggttattgc

SEQ ID NO: 1988 - RNA, 21 nt, synthetic construct
  source 1..21: mol_type = other RNA
  modified_base 1: mod_base = OTHER; note = 2'-O-methyladenosine-3'- phosphorothioate
  modified_base 2: mod_base = OTHER; note = 2'-O-methyluridine-3'-phosphorothioate
  modified_base 3: mod_base = OTHER; note = 2'-O-methyladenosine-3'-phosphate
  modified_base 4: mod_base = OTHER; note = 2'-O-methyladenosine-3'-phosphate
  modified_base 5: mod_base = OTHER; note = 2'-O-methylcytidine-3'-phosphate
  modified_base 6: mod_base = OTHER; note = 2'-O-methylcytidine-3'-phosphate
  modified_base 7: mod_base = OTHER; note = 2'-fluorouridine-3'-phosphate
  modified_base 8: mod_base = OTHER; note = 2'-O-methylguanosine-3'-phosphate
  modified_base 9: mod_base = OTHER; note = 2'-fluorouridine-3'-phosphate
  modified_base 10: mod_base = OTHER; note = 2'-fluoroguanosine-3'-phosphate
  modified_base 11: mod_base = OTHER; note = 2'-fluoroadenosine-3'-phosphate
  modified_base 12: mod_base = OTHER; note = 2'-O-methyladenosine-3'-phosphate
  modified_base 13: mod_base = OTHER; note = 2'-O-methyladenosine-3'-phosphate
  modified_base 14: mod_base = OTHER; note = 2'-O-methyladenosine-3'-phosphate
  modified_base 15: mod_base = OTHER; note = 2'-O-methyluridine-3'-phosphate
  modified_base 16: mod_base = OTHER; note = 2'-O-methylguanosine-3'-phosphate
  modified_base 17: mod_base = OTHER; note = 2'-O-methylcytidine-3'-phosphate
  modified_base 18: mod_base = OTHER; note = 2'-O-methyluridine-3'-phosphate
  modified_base 19: mod_base = OTHER; note = 2'-O-methylcytidine-3'-phosphate
  modified_base 20: mod_base = OTHER; note = 2'-O-methylcytidine-3'-phosphate
  modified_base 21: mod_base = OTHER; note 2'-O-methylcytidine-3'-phosphate-N-[tris(GalNAc-alkyl)-amid odecanoyl)]-4-hydroxyprolinol (Hyp-(GalNAc-alkyl)3)
ataacctgtgaaaatgctccc

SEQ ID NO: 1989 - RNA, 23 nt, synthetic construct
  source 1..23: mol_type = other RNA
  modified_base 1: mod_base = OTHER; note = 2'-O-methylguanosine-3'- phosphorothioate
  modified_base 2: mod_base = OTHER; note = 2'-fluoroguanosine-3'-phosphorothioate
  modified_base 3: mod_base = OTHER; note = 2'-O-methylguanosine-3'-phosphate
  modified_base 4: mod_base = OTHER; note = 2'-O-methyladenosine-3'-phosphate
  modified_base 5: mod_base = OTHER; note = 2'-O-methylguanosine-3'-phosphate
  modified_base 6: mod_base = OTHER; note = 2'-fluorocytidine-3'-phosphate
  modified_base 7: mod_base = OTHER; note = 2'-O-methyladenosine-3'-phosphate
  modified_base 8: mod_base = OTHER; note = 2'-fluorouridine-3'-phosphate
  modified_base 9: mod_base = OTHER; note = 2'-fluorouridine-3'-phosphate
  modified_base 10: mod_base = OTHER; note = 2'-O-methyluridine-3'-phosphate
  modified_base 11: mod_base = OTHER; note = 2'-O-methyluridine-3'-phosphate
  modified_base 12: mod_base = OTHER; note = 2'-O-methylcytidine-3'-phosphate
  modified_base 13: mod_base = OTHER; note = 2'-O-methyladenosine-3'-phosphate
  modified_base 14: mod_base = OTHER; note = 2'-fluorocytidine-3'-phosphate
  modified_base 15: mod_base = OTHER; note = 2'-O-methyladenosine-3'-phosphate
  modified_base 16: mod_base = OTHER; note = 2'-fluoroguanosine-3'-phosphate
  modified_base 17: mod_base = OTHER; note = 2'-O-methylguanosine-3'-phosphate
  modified_base 18: mod_base = OTHER; note = 2'-O-methyluridine-3'-phosphate
  modified_base 19: mod_base = OTHER; note = 2'-O-methyluridine-3'-phosphate
  modified_base 20: mod_base = OTHER; note = 2'-O-methyladenosine-3'-phosphate
  modified_base 21: mod_base = OTHER; note = 2'-O-methyluridine-3'-phosphorothioate
  modified_base 22: mod_base = OTHER; note = 2'-O-methyluridine-3'-phosphorothioate
  modified_base 23: mod_base = OTHER; note = 2'-O-methylguanosine-3'-phosphate
gggagcattttcacaggttattg

SEQ ID NO: 1990 - RNA, 21 nt, synthetic construct
  source 1..21: mol_type = other RNA
  modified_base 1: mod_base = OTHER; note = 2'-O-methyluridine-3'-phosphorothioate
  modified_base 2: mod_base = OTHER; note = 2'-O-methyladenosine-3'- phosphorothioate
  modified_base 3: mod_base = OTHER; note = 2'-O-methylguanosine-3'-phosphate
  modified_base 4: mod_base = OTHER; note = 2'-O-methylcytidine-3'-phosphate
  modified_base 5: mod_base = OTHER; note = 2'-O-methyladenosine-3'-phosphate
  modified_base 6: mod_base = OTHER; note = 2'-O-methyladenosine-3'-phosphate
  modified_base 7: mod_base = OTHER; note = 2'-fluorouridine-3'-phosphate
  modified_base 8: mod_base = OTHER; note = 2'-O-methyladenosine-3'-phosphate
  modified_base 9: mod_base = OTHER; note = 2'-fluoroadenosine-3'-phosphate
  modified_base 10: mod_base = OTHER; note = 2'-fluorocytidine-3'-phosphate
  modified_base 11: mod_base = OTHER; note = 2'-fluorocytidine-3'-phosphate
  modified_base 12: mod_base = OTHER; note = 2'-O-methyluridine-3'-phosphate
  modified_base 13: mod_base = OTHER; note = 2'-O-methylguanosine-3'-phosphate
  modified_base 14: mod_base = OTHER; note = 2'-O-methyluridine-3'-phosphate
  modified_base 15: mod_base = OTHER; note = 2'-O-methylguanosine-3'-phosphate
  modified_base 16: mod_base = OTHER; note = 2'-O-methyladenosine-3'-phosphate
  modified_base 17: mod_base = OTHER; note = 2'-O-methyladenosine-3'-phosphate
  modified_base 18: mod_base = OTHER; note = 2'-O-methyladenosine-3'-phosphate
  modified_base 19: mod_base = OTHER; note = 2'-O-methyladenosine-3'-phosphate
  modified_base 20: mod_base = OTHER; note = 2'-O-methyluridine-3'-phosphate
  modified_base 21: mod_base = OTHER; note 2'-O-methylguanosine-3'-phosphate-N-[tris(GalNAc-alkyl)-ami dodecanoyl)]-4-hydroxyprolinol (Hyp-(GalNAc-alkyl)3)
tagcaataacctgtgaaaatg

SEQ ID NO: 1991 - RNA, 23 nt, synthetic construct
  source 1..23: mol_type = other RNA
  modified_base 1: mod_base = OTHER; note = 2'-O-methylcytidine-3'- phosphorothioate
  modified_base 2: mod_base = OTHER; note = 2'-fluoroadenosine-3'-phosphorothioate
  modified_base 3: mod_base = OTHER; note = 2'-O-methyluridine-3'-phosphate
  modified_base 4: mod_base = OTHER; note = 2'-O-methyluridine-3'-phosphate
  modified_base 5: mod_base = OTHER; note = 2'-O-methyluridine-3'-phosphate
  modified_base 6: mod_base = OTHER; note = 2'-fluorouridine-3'-phosphate
  modified_base 7: mod_base = OTHER; note = 2'-O-methylcytidine-3'-phosphate
  modified_base 8: mod_base = OTHER; note = 2'-fluoroadenosine-3'-phosphate
  modified_base 9: mod_base = OTHER; note = 2'-fluorocytidine-3'-phosphate
  modified_base 10: mod_base = OTHER; note = 2'-O-methyladenosine-3'-phosphate
  modified_base 11: mod_base = OTHER; note = 2'-O-methylguanosine-3'-phosphate
  modified_base 12: mod_base = OTHER; note = 2'-O-methylguanosine-3'-phosphate
  modified_base 13: mod_base = OTHER; note = 2'-O-methyluridine-3'-phosphate
  modified_base 14: mod_base = OTHER; note = 2'-fluorouridine-3'-phosphate
  modified_base 15: mod_base = OTHER; note = 2'-O-methyladenosine-3'-phosphate
  modified_base 16: mod_base = OTHER; note = 2'-fluorouridine-3'-phosphate
  modified_base 17: mod_base = OTHER; note = 2'-O-methyluridine-3'-phosphate
  modified_base 18: mod_base = OTHER; note = 2'-O-methylguanosine-3'-phosphate
  modified_base 19: mod_base = OTHER; note = 2'-O-methylcytidine-3'-phosphate
  modified_base 20: mod_base = OTHER; note = 2'-O-methyluridine-3'-phosphate
  modified_base 21: mod_base = OTHER; note = 2'-O-methyladenosine-3'- phosphorothioate
  modified_base 22: mod_base = OTHER; note = 2'-O-methyluridine-3'-phosphorothioate
  modified_base 23: mod_base = OTHER; note = 2'-O-methylcytidine-3'-phosphate
cattttcacaggttattgctatc

SEQ ID NO: 1992 - RNA, 21 nt, synthetic construct
  source 1..21: mol_type = other RNA
  modified_base 1: mod_base = OTHER; note = 2'-O-methyladenosine-3'- phosphorothioate
  modified_base 2: mod_base = OTHER; note = 2'-O-methyluridine-3'-phosphorothioate
  modified_base 3: mod_base = OTHER; note = 2'-O-methyladenosine-3'-phosphate
  modified_base 4: mod_base = OTHER; note = 2'-O-methylguanosine-3'-phosphate
  modified_base 5: mod_base = OTHER; note = 2'-O-methylcytidine-3'-phosphate
  modified_base 6: mod_base = OTHER; note = 2'-O-methyladenosine-3'-phosphate
  modified_base 7: mod_base = OTHER; note = 2'-fluoroadenosine-3'-phosphate
  modified_base 8: mod_base = OTHER; note = 2'-O-methyluridine-3'-phosphate
  modified_base 9: mod_base = OTHER; note = 2'-fluoroadenosine-3'-phosphate
  modified_base 10: mod_base = OTHER; note = 2'-fluoroadenosine-3'-phosphate
  modified_base 11: mod_base = OTHER; note = 2'-fluorocytidine-3'-phosphate
  modified_base 12: mod_base = OTHER; note = 2'-O-methylcytidine-3'-phosphate
  modified_base 13: mod_base = OTHER; note = 2'-O-methyluridine-3'-phosphate
  modified_base 14: mod_base = OTHER; note = 2'-O-methylguanosine-3'-phosphate
  modified_base 15: mod_base = OTHER; note = 2'-O-methyluridine-3'-phosphate
  modified_base 16: mod_base = OTHER; note = 2'-O-methylguanosine-3'-phosphate
  modified_base 17: mod_base = OTHER; note = 2'-O-methyladenosine-3'-phosphate
  modified_base 18: mod_base = OTHER; note = 2'-O-methyladenosine-3'-phosphate
  modified_base 19: mod_base = OTHER; note = 2'-O-methyladenosine-3'-phosphate
  modified_base 20: mod_base = OTHER; note = 2'-O-methyladenosine-3'-phosphate
  modified_base 21: mod_base = OTHER; note 2'-O-methyluridine-3'-phosphate-N-[tris(GalNAc-alkyl)-amido decanoyl)]-4-hydroxyprolinol (Hyp-(GalNAc-alkyl)3)
atagcaataacctgtgaaaat

SEQ ID NO: 1993 - RNA, 23 nt, synthetic construct
  source 1..23: mol_type = other RNA
  modified_base 1: mod_base = OTHER; note = 2'-O-methyladenosine-3'- phosphorothioate
  modified_base 2: mod_base = OTHER; note = 2'-fluorouridine -3'-phosphorothioate
  modified_base 3: mod_base = OTHER; note = 2'-O-methyluridine-3'-phosphate
  modified_base 4: mod_base = OTHER; note = 2'-O-methyluridine-3'-phosphate
  modified_base 5: mod_base = OTHER; note = 2'-O-methyluridine-3'-phosphate
  modified_base 6: mod_base = OTHER; note = 2'-fluorocytidine-3'-phosphate
  modified_base 7: mod_base = OTHER; note = 2'-O-methyladenosine-3'-phosphate
  modified_base 8: mod_base = OTHER; note = 2'-fluorocytidine-3'-phosphate
  modified_base 9: mod_base = OTHER; note = 2'-fluoroadenosine-3'-phosphate
  modified_base 10: mod_base = OTHER; note = 2'-O-methylguanosine-3'-phosphate
  modified_base 11: mod_base = OTHER; note = 2'-O-methylguanosine-3'-phosphate
  modified_base 12: mod_base = OTHER; note = 2'-O-methyluridine-3'-phosphate
  modified_base 13: mod_base = OTHER; note = 2'-O-methyluridine-3'-phosphate
  modified_base 14: mod_base = OTHER; note = 2'-fluoroadenosine-3'-phosphate
  modified_base 15: mod_base = OTHER; note = 2'-O-methyluridine-3'-phosphate
  modified_base 16: mod_base = OTHER; note = 2'-fluorouridine-3'-phosphate
  modified_base 17: mod_base = OTHER; note = 2'-O-methylguanosine-3'-phosphate
  modified_base 18: mod_base = OTHER; note = 2'-O-methylcytidine-3'-phosphate
  modified_base 19: mod_base = OTHER; note = 2'-O-methyluridine-3'-phosphate
  modified_base 20: mod_base = OTHER; note = 2'-O-methyladenosine-3'-phosphate
  modified_base 21: mod_base = OTHER; note = 2'-O-methyluridine-3'-phosphorothioate
  modified_base 22: mod_base = OTHER; note = 2'-O-methylcytidine-3'- phosphorothioate
  modified_base 23: mod_base = OTHER; note = 2'-O-methylcytidine-3'-phosphate
attttcacaggttattgctatcc

SEQ ID NO: 1994 - RNA, 21 nt, synthetic construct
  source 1..21: mol_type = other RNA
  modified_base 1: mod_base = OTHER; note = 2'-O-methyladenosine-3'- phosphorothioate
  modified_base 2: mod_base = OTHER; note = 2'-O-methyladenosine-3'- phosphorothioate
  modified_base 3: mod_base = OTHER; note = 2'-O-methyluridine-3'-phosphate
  modified_base 4: mod_base = OTHER; note = 2'-O-methylcytidine-3'-phosphate
  modified_base 5: mod_base = OTHER; note = 2'-O-methyladenosine-3'-phosphate
  modified_base 6: mod_base = OTHER; note = 2'-O-methylcytidine-3'-phosphate
  modified_base 7: mod_base = OTHER; note = 2'-fluoroadenosine-3'-phosphate
  modified_base 8: mod_base = OTHER; note = 2'-O-methyluridine-3'-phosphate
  modified_base 9: mod_base = OTHER; note = 2'-fluorocytidine-3'-phosphate
  modified_base 10: mod_base = OTHER; note = 2'-fluorouridine-3'-phosphate
  modified_base 11: mod_base = OTHER; note = 2'-fluorouridine-3'-phosphate
  modified_base 12: mod_base = OTHER; note = 2'-O-methyluridine-3'-phosphate
  modified_base 13: mod_base = OTHER; note = 2'-O-methyladenosine-3'-phosphate
  modified_base 14: mod_base = OTHER; note = 2'-O-methylguanosine-3'-phosphate
  modified_base 15: mod_base = OTHER; note = 2'-O-methyluridine-3'-phosphate
  modified_base 16: mod_base = OTHER; note = 2'-O-methylguanosine-3'-phosphate
  modified_base 17: mod_base = OTHER; note = 2'-O-methyluridine-3'-phosphate
  modified_base 18: mod_base = OTHER; note = 2'-O-methylcytidine-3'-phosphate
  modified_base 19: mod_base = OTHER; note = 2'-O-methyluridine-3'-phosphate
  modified_base 20: mod_base = OTHER; note = 2'-O-methylguanosine-3'-phosphate
  modified_base 21: mod_base = OTHER; note 2'-O-methyladenosine-3'-phosphate-N-[tris(GalNAc-alkyl)-ami dodecanoyl)]-4-hydroxyprolinol (Hyp-(GalNAc-alkyl)3)
aatcacatctttagtgtctga

SEQ ID NO: 1995 - RNA, 23 nt, synthetic construct
  source 1..23: mol_type = other RNA
  modified_base 1: mod_base = OTHER; note = 2'-O-methyluridine-3'-phosphorothioate
  modified_base 2: mod_base = OTHER; note = 2'-fluorocytidine-3'-phosphorothioate
  modified_base 3: mod_base = OTHER; note = 2'-O-methyladenosine-3'-phosphate
  modified_base 4: mod_base = OTHER; note = 2'-O-methylguanosine-3'-phosphate
  modified_base 5: mod_base = OTHER; note = 2'-O-methyladenosine-3'-phosphate
  modified_base 6: mod_base = OTHER; note = 2'-fluorocytidine-3'-phosphate
  modified_base 7: mod_base = OTHER; note = 2'-O-methyladenosine-3'-phosphate
  modified_base 8: mod_base = OTHER; note = 2'-fluorocytidine-3'-phosphate
  modified_base 9: mod_base = OTHER; note = 2'-fluorouridine-3'-phosphate
  modified_base 10: mod_base = OTHER; note = 2'-O-methyladenosine-3'-phosphate
  modified_base 11: mod_base = OTHER; note = 2'-O-methyladenosine-3'-phosphate
  modified_base 12: mod_base = OTHER; note = 2'-O-methyladenosine-3'-phosphate
  modified_base 13: mod_base = OTHER; note = 2'-O-methylguanosine-3'-phosphate
  modified_base 14: mod_base = OTHER; note = 2'-fluoroadenosine-3'-phosphate
  modified_base 15: mod_base = OTHER; note = 2'-O-methyluridine-3'-phosphate
  modified_base 16: mod_base = OTHER; note = 2'-fluoroguanosine-3'-phosphate
  modified_base 17: mod_base = OTHER; note = 2'-O-methyluridine-3'-phosphate
  modified_base 18: mod_base = OTHER; note = 2'-O-methylguanosine-3'-phosphate
  modified_base 19: mod_base = OTHER; note = 2'-O-methyladenosine-3'-phosphate
  modified_base 20: mod_base = OTHER; note = 2'-O-methyluridine-3'-phosphate
  modified_base 21: mod_base = OTHER; note = 2'-O-methyluridine-3'-phosphorothioate
  modified_base 22: mod_base = OTHER; note = 2'-O-methylguanosine-3'- phosphorothioate
  modified_base 23: mod_base = OTHER; note = 2'-O-methylguanosine-3'-phosphate
tcagacactaaagatgtgattgg

SEQ ID NO: 1996 - RNA, 21 nt, synthetic construct
  source 1..21: mol_type = other RNA
  modified_base 1: mod_base = OTHER; note = 2'-O-methyladenosine-3'- phosphorothioate
  modified_base 2: mod_base = OTHER; note = 2'-O-methyluridine-3'-phosphorothioate
  modified_base 3: mod_base = OTHER; note = 2'-O-methylcytidine-3'-phosphate
  modified_base 4: mod_base = OTHER; note = 2'-O-methyladenosine-3'-phosphate
  modified_base 5: mod_base = OTHER; note = 2'-O-methylcytidine-3'-phosphate
  modified_base 6: mod_base = OTHER; note = 2'-O-methyladenosine-3'-phosphate
  modified_base 7: mod_base = OTHER; note = 2'-fluorouridine-3'-phosphate
  modified_base 8: mod_base = OTHER; note = 2'-O-methylcytidine-3'-phosphate
  modified_base 9: mod_base = OTHER; note = 2'-fluorouridine-3'-phosphate
  modified_base 10: mod_base = OTHER; note = 2'-fluorouridine-3'-phosphate
  modified_base 11: mod_base = OTHER; note = 2'-fluorouridine-3'-phosphate
  modified_base 12: mod_base = OTHER; note = 2'-O-methyladenosine-3'-phosphate
  modified_base 13: mod_base = OTHER; note = 2'-O-methylguanosine-3'-phosphate
  modified_base 14: mod_base = OTHER; note = 2'-O-methyluridine-3'-phosphate
  modified_base 15: mod_base = OTHER; note = 2'-O-methylguanosine-3'-phosphate
  modified_base 16: mod_base = OTHER; note = 2'-O-methyluridine-3'-phosphate
  modified_base 17: mod_base = OTHER; note = 2'-O-methylcytidine-3'-phosphate
  modified_base 18: mod_base = OTHER; note = 2'-O-methyluridine-3'-phosphate
  modified_base 19: mod_base = OTHER; note = 2'-O-methylguanosine-3'-phosphate
  modified_base 20: mod_base = OTHER; note = 2'-O-methyladenosine-3'-phosphate
  modified_base 21: mod_base = OTHER; note 2'-O-methyladenosine-3'-phosphate-N-[tris(GalNAc-alkyl)-ami dodecanoyl)]-4-hydroxyprolinol (Hyp-(GalNAc-alkyl)3)
atcacatctttagtgtctgaa

SEQ ID NO: 1997 - RNA, 23 nt, synthetic construct
  source 1..23: mol_type = other RNA
  modified_base 1: mod_base = OTHER; note = 2'-O-methyluridine-3'-phosphorothioate
  modified_base 2: mod_base = OTHER; note = 2'-fluorouridine -3'-phosphorothioate
  modified_base 3: mod_base = OTHER; note = 2'-O-methylcytidine-3'-phosphate
  modified_base 4: mod_base = OTHER; note = 2'-O-methyladenosine-3'-phosphate
  modified_base 5: mod_base = OTHER; note = 2'-O-methylguanosine-3'-phosphate
  modified_base 6: mod_base = OTHER; note = 2'-fluoroadenosine-3'-phosphate
  modified_base 7: mod_base = OTHER; note = 2'-O-methylcytidine-3'-phosphate
  modified_base 8: mod_base = OTHER; note = 2'-fluoroadenosine-3'-phosphate
  modified_base 9: mod_base = OTHER; note = 2'-fluorocytidine-3'-phosphate
  modified_base 10: mod_base = OTHER; note = 2'-O-methyluridine-3'-phosphate
  modified_base 11: mod_base = OTHER; note = 2'-O-methyladenosine-3'-phosphate
  modified_base 12: mod_base = OTHER; note = 2'-O-methyladenosine-3'-phosphate
  modified_base 13: mod_base = OTHER; note = 2'-O-methyladenosine-3'-phosphate
  modified_base 14: mod_base = OTHER; note = 2'-fluoroguanosine-3'-phosphate
  modified_base 15: mod_base = OTHER; note = 2'-O-methyladenosine-3'-phosphate
  modified_base 16: mod_base = OTHER; note = 2'-fluorouridine-3'-phosphate
  modified_base 17: mod_base = OTHER; note = 2'-O-methylguanosine-3'-phosphate
  modified_base 18: mod_base = OTHER; note = 2'-O-methyluridine-3'-phosphate
  modified_base 19: mod_base = OTHER; note = 2'-O-methylguanosine-3'-phosphate
  modified_base 20: mod_base = OTHER; note = 2'-O-methyladenosine-3'-phosphate
  modified_base 21: mod_base = OTHER; note = 2'-O-methyluridine-3'-phosphorothioate
  modified_base 22: mod_base = OTHER; note = 2'-O-methyluridine-3'-phosphorothioate
  modified_base 23: mod_base = OTHER; note = 2'-O-methylguanosine-3'-phosphate
ttcagacactaaagatgtgattg

SEQ ID NO: 1998 - RNA, 21 nt, synthetic construct
  source 1..21: mol_type = other RNA
  modified_base 1: mod_base = OTHER; note = 2'-O-methyluridine-3'-phosphorothioate
  modified_base 2: mod_base = OTHER; note = 2'-O-methyluridine-3'-phosphorothioate
  modified_base 3: mod_base = OTHER; note = 2'-O-methylcytidine-3'-phosphate
  modified_base 4: mod_base = OTHER; note = 2'-O-methylcytidine-3'-phosphate
  modified_base 5: mod_base = OTHER; note = 2'-O-methyladenosine-3'-phosphate
  modified_base 6: mod_base = OTHER; note = 2'-O-methyladenosine-3'-phosphate
  modified_base 7: mod_base = OTHER; note = 2'-fluorouridine-3'-phosphate
  modified_base 8: mod_base = OTHER; note = 2'-O-methylcytidine-3'-phosphate
  modified_base 9: mod_base = OTHER; note = 2'-fluoroadenosine-3'-phosphate
  modified_base 10: mod_base = OTHER; note = 2'-fluorocytidine-3'-phosphate
  modified_base 11: mod_base = OTHER; note = 2'-fluoroadenosine-3'-phosphate
  modified_base 12: mod_base = OTHER; note = 2'-O-methyluridine-3'-phosphate
  modified_base 13: mod_base = OTHER; note = 2'-O-methylcytidine-3'-phosphate
  modified_base 14: mod_base = OTHER; note = 2'-O-methyluridine-3'-phosphate
  modified_base 15: mod_base = OTHER; note = 2'-O-methyluridine-3'-phosphate
  modified_base 16: mod_base = OTHER; note = 2'-O-methyluridine-3'-phosphate
  modified_base 17: mod_base = OTHER; note = 2'-O-methyladenosine-3'-phosphate
  modified_base 18: mod_base = OTHER; note = 2'-O-methylguanosine-3'-phosphate
  modified_base 19: mod_base = OTHER; note = 2'-O-methyluridine-3'-phosphate
  modified_base 20: mod_base = OTHER; note = 2'-O-methylguanosine-3'-phosphate
  modified_base 21: mod_base = OTHER; note 2'-O-methyluridine-3'-phosphate-N-[tris(GalNAc-alkyl)-amido decanoyl)]-4-hydroxyprolinol (Hyp-(GalNAc-alkyl)3)
ttccaatcacatctttagtgt

SEQ ID NO: 1999 - RNA, 23 nt, synthetic construct
  source 1..23: mol_type = other RNA
  modified_base 1: mod_base = OTHER; note = 2'-O-methyladenosine-3'- phosphorothioate
  modified_base 2: mod_base = OTHER; note = 2'-fluorocytidine-3'-phosphorothioate
  modified_base 3: mod_base = OTHER; note = 2'-O-methyladenosine-3'-phosphate
  modified_base 4: mod_base = OTHER; note = 2'-O-methylcytidine-3'-phosphate
  modified_base 5: mod_base = OTHER; note = 2'-O-methyluridine-3'-phosphate
  modified_base 6: mod_base = OTHER; note = 2'-fluoroadenosine-3'-phosphate
  modified_base 7: mod_base = OTHER; note = 2'-O-methyladenosine-3'-phosphate
  modified_base 8: mod_base = OTHER; note = 2'-fluoroadenosine-3'-phosphate
  modified_base 9: mod_base = OTHER; note = 2'-fluoroguanosine-3'-phosphate
  modified_base 10: mod_base = OTHER; note = 2'-O-methyladenosine-3'-phosphate
  modified_base 11: mod_base = OTHER; note = 2'-O-methyluridine-3'-phosphate
  modified_base 12: mod_base = OTHER; note = 2'-O-methylguanosine-3'-phosphate
  modified_base 13: mod_base = OTHER; note = 2'-O-methyluridine-3'-phosphate
  modified_base 14: mod_base = OTHER; note = 2'-fluoroguanosine-3'-phosphate
  modified_base 15: mod_base = OTHER; note = 2'-O-methyladenosine-3'-phosphate
  modified_base 16: mod_base = OTHER; note = 2'-fluorouridine-3'-phosphate
  modified_base 17: mod_base = OTHER; note = 2'-O-methyluridine-3'-phosphate
  modified_base 18: mod_base = OTHER; note = 2'-O-methylguanosine-3'-phosphate
  modified_base 19: mod_base = OTHER; note = 2'-O-methylguanosine-3'-phosphate
  modified_base 20: mod_base = OTHER; note = 2'-O-methyladenosine-3'-phosphate
  modified_base 21: mod_base = OTHER; note = 2'-O-methyladenosine-3'- phosphorothioate
  modified_base 22: mod_base = OTHER; note = 2'-O-methyladenosine-3'- phosphorothioate
  modified_base 23: mod_base = OTHER; note = 2'-O-methyluridine-3'-phosphate
acactaaagatgtgattggaaat

SEQ ID NO: 2000 - RNA, 21 nt, synthetic construct
  source 1..21: mol_type = other RNA
  modified_base 1: mod_base = OTHER; note = 2'-O-methyluridine-3'-phosphorothioate
  modified_base 2: mod_base = OTHER; note = 2'-O-methyluridine-3'-phosphorothioate
  modified_base 3: mod_base = OTHER; note = 2'-O-methyluridine-3'-phosphate
  modified_base 4: mod_base = OTHER; note = 2'-O-methylcytidine-3'-phosphate
  modified_base 5: mod_base = OTHER; note = 2'-O-methylcytidine-3'-phosphate
  modified_base 6: mod_base = OTHER; note = 2'-O-methyladenosine-3'-phosphate
  modified_base 7: mod_base = OTHER; note = 2'-fluoroadenosine-3'-phosphate
  modified_base 8: mod_base = OTHER; note = 2'-O-methyluridine-3'-phosphate
  modified_base 9: mod_base = OTHER; note = 2'-fluorocytidine-3'-phosphate
  modified_base 10: mod_base = OTHER; note = 2'-fluoroadenosine-3'-phosphate
  modified_base 11: mod_base = OTHER; note = 2'-fluorocytidine-3'-phosphate
  modified_base 12: mod_base = OTHER; note = 2'-O-methyladenosine-3'-phosphate
  modified_base 13: mod_base = OTHER; note = 2'-O-methyluridine-3'-phosphate
  modified_base 14: mod_base = OTHER; note = 2'-O-methylcytidine-3'-phosphate
  modified_base 15: mod_base = OTHER; note = 2'-O-methyluridine-3'-phosphate
  modified_base 16: mod_base = OTHER; note = 2'-O-methyluridine-3'-phosphate
  modified_base 17: mod_base = OTHER; note = 2'-O-methyluridine-3'-phosphate
  modified_base 18: mod_base = OTHER; note = 2'-O-methyladenosine-3'-phosphate
  modified_base 19: mod_base = OTHER; note = 2'-O-methylguanosine-3'-phosphate
  modified_base 20: mod_base = OTHER; note = 2'-O-methyluridine-3'-phosphate
  modified_base 21: mod_base = OTHER; note 2'-O-methylguanosine-3'-phosphate-N-[tris(GalNAc-alkyl)-ami dodecanoyl)]-4-hydroxyprolinol (Hyp-(GalNAc-alkyl)3)
tttccaatcacatctttagtg

SEQ ID NO: 2001 - RNA, 23 nt, synthetic construct
  source 1..23: mol_type = other RNA
  modified_base 1: mod_base = OTHER; note = 2'-O-methylcytidine-3'- phosphorothioate
  modified_base 2: mod_base = OTHER; note = 2'-fluoroadenosine-3'-phosphorothioate
  modified_base 3: mod_base = OTHER; note = 2'-O-methylcytidine-3'-phosphate
  modified_base 4: mod_base = OTHER; note = 2'-O-methyluridine-3'-phosphate
  modified_base 5: mod_base = OTHER; note = 2'-O-methyladenosine-3'-phosphate
  modified_base 6: mod_base = OTHER; note = 2'-fluoroadenosine-3'-phosphate
  modified_base 7: mod_base = OTHER; note = 2'-O-methyladenosine-3'-phosphate
  modified_base 8: mod_base = OTHER; note = 2'-fluoroguanosine-3'-phosphate
  modified_base 9: mod_base = OTHER; note = 2'-fluoroadenosine-3'-phosphate
  modified_base 10: mod_base = OTHER; note = 2'-O-methyluridine-3'-phosphate
  modified_base 11: mod_base = OTHER; note = 2'-O-methylguanosine-3'-phosphate
  modified_base 12: mod_base = OTHER; note = 2'-O-methyluridine-3'-phosphate
  modified_base 13: mod_base = OTHER; note = 2'-O-methylguanosine-3'-phosphate
  modified_base 14: mod_base = OTHER; note = 2'-fluoroadenosine-3'-phosphate
  modified_base 15: mod_base = OTHER; note = 2'-O-methyluridine-3'-phosphate
  modified_base 16: mod_base = OTHER; note = 2'-fluorouridine-3'-phosphate
  modified_base 17: mod_base = OTHER; note = 2'-O-methylguanosine-3'-phosphate
  modified_base 18: mod_base = OTHER; note = 2'-O-methylguanosine-3'-phosphate
  modified_base 19: mod_base = OTHER; note = 2'-O-methyladenosine-3'-phosphate
  modified_base 20: mod_base = OTHER; note = 2'-O-methyladenosine-3'-phosphate
  modified_base 21: mod_base = OTHER; note = 2'-O-methyladenosine-3'- phosphorothioate
  modified_base 22: mod_base = OTHER; note = 2'-O-methyluridine-3'-phosphorothioate
  modified_base 23: mod_base = OTHER; note = 2'-O-methylcytidine-3'-phosphate
cactaaagatgtgattggaaatc

SEQ ID NO: 2002 - RNA, 21 nt, synthetic construct
  source 1..21: mol_type = other RNA
  modified_base 1: mod_base = OTHER; note = 2'-O-methyladenosine-3'- phosphorothioate
  modified_base 2: mod_base = OTHER; note = 2'-O-methylcytidine-3'- phosphorothioate
  modified_base 3: mod_base = OTHER; note = 2'-O-methylguanosine-3'-phosphate
  modified_base 4: mod_base = OTHER; note = 2'-O-methylguanosine-3'-phosphate
  modified_base 5: mod_base = OTHER; note = 2'-O-methylguanosine-3'-phosphate
  modified_base 6: mod_base = OTHER; note = 2'-O-methylcytidine-3'-phosphate
  modified_base 7: mod_base = OTHER; note = 2'-fluoroadenosine-3'-phosphate
  modified_base 8: mod_base = OTHER; note = 2'-O-methyluridine-3'-phosphate
  modified_base 9: mod_base = OTHER; note = 2'-fluoroguanosine-3'-phosphate
  modified_base 10: mod_base = OTHER; note = 2'-fluoroadenosine-3'-phosphate
  modified_base 11: mod_base = OTHER; note = 2'-fluorouridine-3'-phosphate
  modified_base 12: mod_base = OTHER; note = 2'-O-methylguanosine-3'-phosphate
  modified_base 13: mod_base = OTHER; note = 2'-O-methyluridine-3'-phosphate
  modified_base 14: mod_base = OTHER; note = 2'-O-methyluridine-3'-phosphate
  modified_base 15: mod_base = OTHER; note = 2'-O-methylguanosine-3'-phosphate
  modified_base 16: mod_base = OTHER; note = 2'-O-methyladenosine-3'-phosphate
  modified_base 17: mod_base = OTHER; note = 2'-O-methylguanosine-3'-phosphate
  modified_base 18: mod_base = OTHER; note = 2'-O-methyluridine-3'-phosphate
  modified_base 19: mod_base = OTHER; note = 2'-O-methyluridine-3'-phosphate
  modified_base 20: mod_base = OTHER; note = 2'-O-methylcytidine-3'-phosphate
  modified_base 21: mod_base = OTHER; note 2'-O-methylcytidine-3'-phosphate-N-[tris(GalNAc-alkyl)-amid odecanoyl)]-4-hydroxyprolinol (Hyp-(GalNAc-alkyl)3)
acgggcatgatgttgagttcc

SEQ ID NO: 2003 - RNA, 23 nt, synthetic construct
  source 1..23: mol_type = other RNA
  modified_base 1: mod_base = OTHER; note = 2'-O-methylguanosine-3'- phosphorothioate
  modified_base 2: mod_base = OTHER; note = 2'-fluoroguanosine-3'-phosphorothioate
  modified_base 3: mod_base = OTHER; note = 2'-O-methyladenosine-3'-phosphate
  modified_base 4: mod_base = OTHER; note = 2'-O-methyladenosine-3'-phosphate
  modified_base 5: mod_base = OTHER; note = 2'-O-methylcytidine-3'-phosphate
  modified_base 6: mod_base = OTHER; note = 2'-fluorouridine-3'-phosphate
  modified_base 7: mod_base = OTHER; note = 2'-O-methylcytidine-3'-phosphate
  modified_base 8: mod_base = OTHER; note = 2'-fluoroadenosine-3'-phosphate
  modified_base 9: mod_base = OTHER; note = 2'-fluoroadenosine-3'-phosphate
  modified_base 10: mod_base = OTHER; note = 2'-O-methylcytidine-3'-phosphate
  modified_base 11: mod_base = OTHER; note = 2'-O-methyladenosine-3'-phosphate
  modified_base 12: mod_base = OTHER; note = 2'-O-methyluridine-3'-phosphate
  modified_base 13: mod_base = OTHER; note = 2'-O-methylcytidine-3'-phosphate
  modified_base 14: mod_base = OTHER; note = 2'-fluoroadenosine-3'-phosphate
  modified_base 15: mod_base = OTHER; note = 2'-O-methyluridine-3'-phosphate
  modified_base 16: mod_base = OTHER; note = 2'-fluoroguanosine-3'-phosphate
  modified_base 17: mod_base = OTHER; note = 2'-O-methylcytidine-3'-phosphate
  modified_base 18: mod_base = OTHER; note = 2'-O-methylcytidine-3'-phosphate
  modified_base 19: mod_base = OTHER; note = 2'-O-methylcytidine-3'-phosphate
  modified_base 20: mod_base = OTHER; note = 2'-O-methylguanosine-3'-phosphate
  modified_base 21: mod_base = OTHER; note = 2'-O-methyluridine-3'-phosphorothioate
  modified_base 22: mod_base = OTHER; note = 2'-O-methyluridine-3'-phosphorothioate
  modified_base 23: mod_base = OTHER; note = 2'-O-methylcytidine-3'-phosphate
ggaactcaacatcatgcccgttc

SEQ ID NO: 2004 - RNA, 21 nt, synthetic construct
  source 1..21: mol_type = other RNA
  modified_base 1: mod_base = OTHER; note = 2'-O-methylcytidine-3'- phosphorothioate
  modified_base 2: mod_base = OTHER; note = 2'-O-methylguanosine-3'- phosphorothioate
  modified_base 3: mod_base = OTHER; note = 2'-O-methylguanosine-3'-phosphate
  modified_base 4: mod_base = OTHER; note = 2'-O-methylguanosine-3'-phosphate
  modified_base 5: mod_base = OTHER; note = 2'-O-methylcytidine-3'-phosphate
  modified_base 6: mod_base = OTHER; note = 2'-O-methyladenosine-3'-phosphate
  modified_base 7: mod_base = OTHER; note = 2'-fluorouridine-3'-phosphate
  modified_base 8: mod_base = OTHER; note = 2'-O-methylguanosine-3'-phosphate
  modified_base 9: mod_base = OTHER; note = 2'-fluoroadenosine-3'-phosphate
  modified_base 10: mod_base = OTHER; note = 2'-fluorouridine-3'-phosphate
  modified_base 11: mod_base = OTHER; note = 2'-fluoroguanosine-3'-phosphate
  modified_base 12: mod_base = OTHER; note = 2'-O-methyluridine-3'-phosphate
  modified_base 13: mod_base = OTHER; note = 2'-O-methyluridine-3'-phosphate
  modified_base 14: mod_base = OTHER; note = 2'-O-methylguanosine-3'-phosphate
  modified_base 15: mod_base = OTHER; note = 2'-O-methyladenosine-3'-phosphate
  modified_base 16: mod_base = OTHER; note = 2'-O-methylguanosine-3'-phosphate
  modified_base 17: mod_base = OTHER; note = 2'-O-methyluridine-3'-phosphate
  modified_base 18: mod_base = OTHER; note = 2'-O-methyluridine-3'-phosphate
  modified_base 19: mod_base = OTHER; note = 2'-O-methylcytidine-3'-phosphate
  modified_base 20: mod_base = OTHER; note = 2'-O-methylcytidine-3'-phosphate
  modified_base 21: mod_base = OTHER; note 2'-O-methyluridine-3'-phosphate-N-[tris(GalNAc-alkyl)-amido decanoyl)]-4-hydroxyprolinol (Hyp-(GalNAc-alkyl)3)
cgggcatgatgttgagttcct

SEQ ID NO: 2005 - RNA, 23 nt, synthetic construct
  source 1..23: mol_type = other RNA
  modified_base 1: mod_base = OTHER; note = 2'-O-methyladenosine-3'- phosphorothioate
  modified_base 2: mod_base = OTHER; note = 2'-fluoroguanosine-3'-phosphorothioate
  modified_base 3: mod_base = OTHER; note = 2'-O-methylguanosine-3'-phosphate
  modified_base 4: mod_base = OTHER; note = 2'-O-methyladenosine-3'-phosphate
  modified_base 5: mod_base = OTHER; note = 2'-O-methyladenosine-3'-phosphate
  modified_base 6: mod_base = OTHER; note = 2'-fluorocytidine-3'-phosphate
  modified_base 7: mod_base = OTHER; note = 2'-O-methyluridine-3'-phosphate
  modified_base 8: mod_base = OTHER; note = 2'-fluorocytidine-3'-phosphate
  modified_base 9: mod_base = OTHER; note = 2'-fluoroadenosine-3'-phosphate
  modified_base 10: mod_base = OTHER; note = 2'-O-methyladenosine-3'-phosphate
  modified_base 11: mod_base = OTHER; note = 2'-O-methylcytidine-3'-phosphate
  modified_base 12: mod_base = OTHER; note = 2'-O-methyladenosine-3'-phosphate
  modified_base 13: mod_base = OTHER; note = 2'-O-methyluridine-3'-phosphate
  modified_base 14: mod_base = OTHER; note = 2'-fluorocytidine-3'-phosphate
  modified_base 15: mod_base = OTHER; note = 2'-O-methyladenosine-3'-phosphate
  modified_base 16: mod_base = OTHER; note = 2'-fluorouridine-3'-phosphate
  modified_base 17: mod_base = OTHER; note = 2'-O-methylguanosine-3'-phosphate
  modified_base 18: mod_base = OTHER; note = 2'-O-methylcytidine-3'-phosphate
  modified_base 19: mod_base = OTHER; note = 2'-O-methylcytidine-3'-phosphate
  modified_base 20: mod_base = OTHER; note = 2'-O-methylcytidine-3'-phosphate
  modified_base 21: mod_base = OTHER; note = 2'-O-methylguanosine-3'- phosphorothioate
  modified_base 22: mod_base = OTHER; note = 2'-O-methyluridine-3'-phosphorothioate
  modified_base 23: mod_base = OTHER; note = 2'-O-methyluridine-3'-phosphate
aggaactcaacatcatgcccgtt

SEQ ID NO: 2006 - RNA, 21 nt, synthetic construct
  source 1..21: mol_type = other RNA
  modified_base 1: mod_base = OTHER; note = 2'-O-methylguanosine-3'- phosphorothioate
  modified_base 2: mod_base = OTHER; note = 2'-O-methylguanosine-3'- phosphorothioate
  modified_base 3: mod_base = OTHER; note = 2'-O-methylguanosine-3'-phosphate
  modified_base 4: mod_base = OTHER; note = 2'-O-methyladenosine-3'-phosphate
  modified_base 5: mod_base = OTHER; note = 2'-O-methyladenosine-3'-phosphate
  modified_base 6: mod_base = OTHER; note = 2'-O-methylcytidine-3'-phosphate
  modified_base 7: mod_base = OTHER; note = 2'-fluoroguanosine-3'-phosphate
  modified_base 8: mod_base = OTHER; note = 2'-O-methylguanosine-3'-phosphate
  modified_base 9: mod_base = OTHER; note = 2'-fluoroguanosine-3'-phosphate
  modified_base 10: mod_base = OTHER; note = 2'-fluorocytidine-3'-phosphate
  modified_base 11: mod_base = OTHER; note = 2'-fluoroadenosine-3'-phosphate
  modified_base 12: mod_base = OTHER; note = 2'-O-methyluridine-3'-phosphate
  modified_base 13: mod_base = OTHER; note = 2'-O-methylguanosine-3'-phosphate
  modified_base 14: mod_base = OTHER; note = 2'-O-methyladenosine-3'-phosphate
  modified_base 15: mod_base = OTHER; note = 2'-O-methyluridine-3'-phosphate
  modified_base 16: mod_base = OTHER; note = 2'-O-methylguanosine-3'-phosphate
  modified_base 17: mod_base = OTHER; note = 2'-O-methyluridine-3'-phosphate
  modified_base 18: mod_base = OTHER; note = 2'-O-methyluridine-3'-phosphate
  modified_base 19: mod_base = OTHER; note = 2'-O-methylguanosine-3'-phosphate
  modified_base 20: mod_base = OTHER; note = 2'-O-methyladenosine-3'-phosphate
  modified_base 21: mod_base = OTHER; note 2'-O-methylguanosine-3'-phosphate-N-[tris(GalNAc-alkyl)-ami dodecanoyl)]-4-hydroxyprolinol (Hyp-(GalNAc-alkyl)3)
gggaacgggcatgatgttgag

SEQ ID NO: 2007 - RNA, 23 nt, synthetic construct
  source 1..23: mol_type = other RNA
  modified_base 1: mod_base = OTHER; note = 2'-O-methylcytidine-3'- phosphorothioate
  modified_base 2: mod_base = OTHER; note = 2'-fluorouridine -3'-phosphorothioate
  modified_base 3: mod_base = OTHER; note = 2'-O-methylcytidine-3'-phosphate
  modified_base 4: mod_base = OTHER; note = 2'-O-methyladenosine-3'-phosphate
  modified_base 5: mod_base = OTHER; note = 2'-O-methyladenosine-3'-phosphate
  modified_base 6: mod_base = OTHER; note = 2'-fluorocytidine-3'-phosphate
  modified_base 7: mod_base = OTHER; note = 2'-O-methyladenosine-3'-phosphate
  modified_base 8: mod_base = OTHER; note = 2'-fluorouridine-3'-phosphate
  modified_base 9: mod_base = OTHER; note = 2'-fluorocytidine-3'-phosphate
  modified_base 10: mod_base = OTHER; note = 2'-O-methyladenosine-3'-phosphate
  modified_base 11: mod_base = OTHER; note = 2'-O-methyluridine-3'-phosphate
  modified_base 12: mod_base = OTHER; note = 2'-O-methylguanosine-3'-phosphate
  modified_base 13: mod_base = OTHER; note = 2'-O-methylcytidine-3'-phosphate
  modified_base 14: mod_base = OTHER; note = 2'-fluorocytidine-3'-phosphate
  modified_base 15: mod_base = OTHER; note = 2'-O-methylcytidine-3'-phosphate
  modified_base 16: mod_base = OTHER; note = 2'-fluoroguanosine-3'-phosphate
  modified_base 17: mod_base = OTHER; note = 2'-O-methyluridine-3'-phosphate
  modified_base 18: mod_base = OTHER; note = 2'-O-methyluridine-3'-phosphate
  modified_base 19: mod_base = OTHER; note = 2'-O-methylcytidine-3'-phosphate
  modified_base 20: mod_base = OTHER; note = 2'-O-methylcytidine-3'-phosphate
  modified_base 21: mod_base = OTHER; note = 2'-O-methylcytidine-3'- phosphorothioate
  modified_base 22: mod_base = OTHER; note = 2'-O-methyladenosine-3'- phosphorothioate
  modified_base 23: mod_base = OTHER; note = 2'-O-methylguanosine-3'-phosphate
ctcaacatcatgcccgttcccag

SEQ ID NO: 2008 - RNA, 21 nt, synthetic construct
  source 1..21: mol_type = other RNA
  modified_base 1: mod_base = OTHER; note = 2'-O-methyluridine-3'-phosphorothioate
  modified_base 2: mod_base = OTHER; note = 2'-O-methylguanosine-3'- phosphorothioate
  modified_base 3: mod_base = OTHER; note = 2'-O-methylguanosine-3'-phosphate
  modified_base 4: mod_base = OTHER; note = 2'-O-methylguanosine-3'-phosphate
  modified_base 5: mod_base = OTHER; note = 2'-O-methyladenosine-3'-phosphate
  modified_base 6: mod_base = OTHER; note = 2'-O-methyladenosine-3'-phosphate
  modified_base 7: mod_base = OTHER; note = 2'-fluorocytidine-3'-phosphate
  modified_base 8: mod_base = OTHER; note = 2'-O-methylguanosine-3'-phosphate
  modified_base 9: mod_base = OTHER; note = 2'-fluoroguanosine-3'-phosphate
  modified_base 10: mod_base = OTHER; note = 2'-fluoroguanosine-3'-phosphate
  modified_base 11: mod_base = OTHER; note = 2'-fluorocytidine-3'-phosphate
  modified_base 12: mod_base = OTHER; note = 2'-O-methyladenosine-3'-phosphate
  modified_base 13: mod_base = OTHER; note = 2'-O-methyluridine-3'-phosphate
  modified_base 14: mod_base = OTHER; note = 2'-O-methylguanosine-3'-phosphate
  modified_base 15: mod_base = OTHER; note = 2'-O-methyladenosine-3'-phosphate
  modified_base 16: mod_base = OTHER; note = 2'-O-methyluridine-3'-phosphate
  modified_base 17: mod_base = OTHER; note = 2'-O-methylguanosine-3'-phosphate
  modified_base 18: mod_base = OTHER; note = 2'-O-methyluridine-3'-phosphate
  modified_base 19: mod_base = OTHER; note = 2'-O-methyluridine-3'-phosphate
  modified_base 20: mod_base = OTHER; note = 2'-O-methylguanosine-3'-phosphate
  modified_base 21: mod_base = OTHER; note 2'-O-methyladenosine-3'-phosphate-N-[tris(GalNAc-alkyl)-ami dodecanoyl)]-4-hydroxyprolinol (Hyp-(GalNAc-alkyl)3)
tgggaacgggcatgatgttga

SEQ ID NO: 2009 - RNA, 23 nt, synthetic construct
  source 1..23: mol_type = other RNA
  modified_base 1: mod_base = OTHER; note = 2'-O-methyluridine-3'-phosphorothioate
  modified_base 2: mod_base = OTHER; note = 2'-fluorocytidine-3'-phosphorothioate
  modified_base 3: mod_base = OTHER; note = 2'-O-methyladenosine-3'-phosphate
  modified_base 4: mod_base = OTHER; note = 2'-O-methyladenosine-3'-phosphate
  modified_base 5: mod_base = OTHER; note = 2'-O-methylcytidine-3'-phosphate
  modified_base 6: mod_base = OTHER; note = 2'-fluoroadenosine-3'-phosphate
  modified_base 7: mod_base = OTHER; note = 2'-O-methyluridine-3'-phosphate
  modified_base 8: mod_base = OTHER; note = 2'-fluorocytidine-3'-phosphate
  modified_base 9: mod_base = OTHER; note = 2'-fluoroadenosine-3'-phosphate
  modified_base 10: mod_base = OTHER; note = 2'-O-methyluridine-3'-phosphate
  modified_base 11: mod_base = OTHER; note = 2'-O-methylguanosine-3'-phosphate
  modified_base 12: mod_base = OTHER; note = 2'-O-methylcytidine-3'-phosphate
  modified_base 13: mod_base = OTHER; note = 2'-O-methylcytidine-3'-phosphate
  modified_base 14: mod_base = OTHER; note = 2'-fluorocytidine-3'-phosphate
  modified_base 15: mod_base = OTHER; note = 2'-O-methylguanosine-3'-phosphate
  modified_base 16: mod_base = OTHER; note = 2'-fluorouridine-3'-phosphate
  modified_base 17: mod_base = OTHER; note = 2'-O-methyluridine-3'-phosphate
  modified_base 18: mod_base = OTHER; note = 2'-O-methylcytidine-3'-phosphate
  modified_base 19: mod_base = OTHER; note = 2'-O-methylcytidine-3'-phosphate
  modified_base 20: mod_base = OTHER; note = 2'-O-methylcytidine-3'-phosphate
  modified_base 21: mod_base = OTHER; note = 2'-O-methyladenosine-3'- phosphorothioate
  modified_base 22: mod_base = OTHER; note = 2'-O-methylguanosine-3'- phosphorothioate
  modified_base 23: mod_base = OTHER; note = 2'-O-methylguanosine-3'-phosphate
tcaacatcatgcccgttcccagg

SEQ ID NO: 2010 - RNA, 21 nt, synthetic construct
  source 1..21: mol_type = other RNA
  modified_base 1: mod_base = OTHER; note = 2'-O-methyladenosine-3'- phosphorothioate
  modified_base 2: mod_base = OTHER; note = 2'-O-methylcytidine-3'- phosphorothioate
  modified_base 3: mod_base = OTHER; note = 2'-O-methyluridine-3'-phosphate
  modified_base 4: mod_base = OTHER; note = 2'-O-methyladenosine-3'-phosphate
  modified_base 5: mod_base = OTHER; note = 2'-O-methyladenosine-3'-phosphate
  modified_base 6: mod_base = OTHER; note = 2'-O-methylguanosine-3'-phosphate
  modified_base 7: mod_base = OTHER; note = 2'-fluoroguanosine-3'-phosphate
  modified_base 8: mod_base = OTHER; note = 2'-O-methyluridine-3'-phosphate
  modified_base 9: mod_base = OTHER; note = 2'-fluoroguanosine-3'-phosphate
  modified_base 10: mod_base = OTHER; note = 2'-fluoroadenosine-3'-phosphate
  modified_base 11: mod_base = OTHER; note = 2'-fluoroadenosine-3'-phosphate
  modified_base 12: mod_base = OTHER; note = 2'-O-methyladenosine-3'-phosphate
  modified_base 13: mod_base = OTHER; note = 2'-O-methyladenosine-3'-phosphate
  modified_base 14: mod_base = OTHER; note = 2'-O-methylguanosine-3'-phosphate
  modified_base 15: mod_base = OTHER; note = 2'-O-methyladenosine-3'-phosphate
  modified_base 16: mod_base = OTHER; note = 2'-O-methyluridine-3'-phosphate
  modified_base 17: mod_base = OTHER; note = 2'-O-methyladenosine-3'-phosphate
  modified_base 18: mod_base = OTHER; note = 2'-O-methyladenosine-3'-phosphate
  modified_base 19: mod_base = OTHER; note = 2'-O-methyluridine-3'-phosphate
  modified_base 20: mod_base = OTHER; note = 2'-O-methylguanosine-3'-phosphate
  modified_base 21: mod_base = OTHER; note 2'-O-methyladenosine-3'-phosphate-N-[tris(GalNAc-alkyl)-ami dodecanoyl)]-4-hydroxyprolinol (Hyp-(GalNAc-alkyl)3)
actaaggtgaaaagataatga

SEQ ID NO: 2011 - RNA, 23 nt, synthetic construct
  source 1..23: mol_type = other RNA
  modified_base 1: mod_base = OTHER; note = 2'-O-methyluridine-3'-phosphorothioate
  modified_base 2: mod_base = OTHER; note = 2'-fluorocytidine-3'-phosphorothioate
  modified_base 3: mod_base = OTHER; note = 2'-O-methyladenosine-3'-phosphate
  modified_base 4: mod_base = OTHER; note = 2'-O-methyluridine-3'-phosphate
  modified_base 5: mod_base = OTHER; note = 2'-O-methyluridine-3'-phosphate
  modified_base 6: mod_base = OTHER; note = 2'-fluoroadenosine-3'-phosphate
  modified_base 7: mod_base = OTHER; note = 2'-O-methyluridine-3'-phosphate
  modified_base 8: mod_base = OTHER; note = 2'-fluorocytidine-3'-phosphate
  modified_base 9: mod_base = OTHER; note = 2'-fluorouridine-3'-phosphate
  modified_base 10: mod_base = OTHER; note = 2'-O-methyluridine-3'-phosphate
  modified_base 11: mod_base = OTHER; note = 2'-O-methyluridine-3'-phosphate
  modified_base 12: mod_base = OTHER; note = 2'-O-methyluridine-3'-phosphate
  modified_base 13: mod_base = OTHER; note = 2'-O-methylcytidine-3'-phosphate
  modified_base 14: mod_base = OTHER; note = 2'-fluoroadenosine-3'-phosphate
  modified_base 15: mod_base = OTHER; note = 2'-O-methylcytidine-3'-phosphate
  modified_base 16: mod_base = OTHER; note = 2'-fluorocytidine-3'-phosphate
  modified_base 17: mod_base = OTHER; note = 2'-O-methyluridine-3'-phosphate
  modified_base 18: mod_base = OTHER; note = 2'-O-methyluridine-3'-phosphate
  modified_base 19: mod_base = OTHER; note = 2'-O-methyladenosine-3'-phosphate
  modified_base 20: mod_base = OTHER; note = 2'-O-methylguanosine-3'-phosphate
  modified_base 21: mod_base = OTHER; note = 2'-O-methyluridine-3'-phosphorothioate
  modified_base 22: mod_base = OTHER; note = 2'-O-methylguanosine-3'- phosphorothioate
  modified_base 23: mod_base = OTHER; note = 2'-O-methyluridine-3'-phosphate
tcattatcttttcaccttagtgt

SEQ ID NO: 2012 - RNA, 21 nt, synthetic construct
  source 1..21: mol_type = other RNA
  modified_base 1: mod_base = OTHER; note = 2'-O-methylcytidine-3'- phosphorothioate
  modified_base 2: mod_base = OTHER; note = 2'-O-methyluridine-3'-phosphorothioate
  modified_base 3: mod_base = OTHER; note = 2'-O-methyladenosine-3'-phosphate
  modified_base 4: mod_base = OTHER; note = 2'-O-methyladenosine-3'-phosphate
  modified_base 5: mod_base = OTHER; note = 2'-O-methylguanosine-3'-phosphate
  modified_base 6: mod_base = OTHER; note = 2'-O-methylguanosine-3'-phosphate
  modified_base 7: mod_base = OTHER; note = 2'-fluorouridine-3'-phosphate
  modified_base 8: mod_base = OTHER; note = 2'-O-methylguanosine-3'-phosphate
  modified_base 9: mod_base = OTHER; note = 2'-fluoroadenosine-3'-phosphate
  modified_base 10: mod_base = OTHER; note = 2'-fluoroadenosine-3'-phosphate
  modified_base 11: mod_base = OTHER; note = 2'-fluoroadenosine-3'-phosphate
  modified_base 12: mod_base = OTHER; note = 2'-O-methyladenosine-3'-phosphate
  modified_base 13: mod_base = OTHER; note = 2'-O-methylguanosine-3'-phosphate
  modified_base 14: mod_base = OTHER; note = 2'-O-methyladenosine-3'-phosphate
  modified_base 15: mod_base = OTHER; note = 2'-O-methyluridine-3'-phosphate
  modified_base 16: mod_base = OTHER; note = 2'-O-methyladenosine-3'-phosphate
  modified_base 17: mod_base = OTHER; note = 2'-O-methyladenosine-3'-phosphate
  modified_base 18: mod_base = OTHER; note = 2'-O-methyluridine-3'-phosphate
  modified_base 19: mod_base = OTHER; note = 2'-O-methylguanosine-3'-phosphate
  modified_base 20: mod_base = OTHER; note = 2'-O-methyladenosine-3'-phosphate
  modified_base 21: mod_base = OTHER; note 2'-O-methyluridine-3'-phosphate-N-[tris(GalNAc-alkyl)-amido decanoyl)]-4-hydroxyprolinol (Hyp-(GalNAc-alkyl)3)
ctaaggtgaaaagataatgat

SEQ ID NO: 2013 - RNA, 23 nt, synthetic construct
  source 1..23: mol_type = other RNA
  modified_base 1: mod_base = OTHER; note = 2'-O-methyladenosine-3'- phosphorothioate
  modified_base 2: mod_base = OTHER; note = 2'-fluorouridine -3'-phosphorothioate
  modified_base 3: mod_base = OTHER; note = 2'-O-methylcytidine-3'-phosphate
  modified_base 4: mod_base = OTHER; note = 2'-O-methyladenosine-3'-phosphate
  modified_base 5: mod_base = OTHER; note = 2'-O-methyluridine-3'-phosphate
  modified_base 6: mod_base = OTHER; note = 2'-fluorouridine-3'-phosphate
  modified_base 7: mod_base = OTHER; note = 2'-O-methyladenosine-3'-phosphate
  modified_base 8: mod_base = OTHER; note = 2'-fluorouridine-3'-phosphate
  modified_base 9: mod_base = OTHER; note = 2'-fluorocytidine-3'-phosphate
  modified_base 10: mod_base = OTHER; note = 2'-O-methyluridine-3'-phosphate
  modified_base 11: mod_base = OTHER; note = 2'-O-methyluridine-3'-phosphate
  modified_base 12: mod_base = OTHER; note = 2'-O-methyluridine-3'-phosphate
  modified_base 13: mod_base = OTHER; note = 2'-O-methyluridine-3'-phosphate
  modified_base 14: mod_base = OTHER; note = 2'-fluorocytidine-3'-phosphate
  modified_base 15: mod_base = OTHER; note = 2'-O-methyladenosine-3'-phosphate
  modified_base 16: mod_base = OTHER; note = 2'-fluorocytidine-3'-phosphate
  modified_base 17: mod_base = OTHER; note = 2'-O-methylcytidine-3'-phosphate
  modified_base 18: mod_base = OTHER; note = 2'-O-methyluridine-3'-phosphate
  modified_base 19: mod_base = OTHER; note = 2'-O-methyluridine-3'-phosphate
  modified_base 20: mod_base = OTHER; note = 2'-O-methyladenosine-3'-phosphate
  modified_base 21: mod_base = OTHER; note = 2'-O-methylguanosine-3'- phosphorothioate
  modified_base 22: mod_base = OTHER; note = 2'-O-methyluridine-3'-phosphorothioate
  modified_base 23: mod_base = OTHER; note = 2'-O-methylguanosine-3'-phosphate
atcattatcttttcaccttagtg

SEQ ID NO: 2014 - RNA, 21 nt, synthetic construct
  source 1..21: mol_type = other RNA
  modified_base 1: mod_base = OTHER; note = 2'-O-methyladenosine-3'- phosphorothioate
  modified_base 2: mod_base = OTHER; note = 2'-O-methyladenosine-3'- phosphorothioate
  modified_base 3: mod_base = OTHER; note = 2'-O-methyladenosine-3'-phosphate
  modified_base 4: mod_base = OTHER; note = 2'-O-methylcytidine-3'-phosphate
  modified_base 5: mod_base = OTHER; note = 2'-O-methyladenosine-3'-phosphate
  modified_base 6: mod_base = OTHER; note = 2'-O-methylcytidine-3'-phosphate
  modified_base 7: mod_base = OTHER; note = 2'-fluorouridine-3'-phosphate
  modified_base 8: mod_base = OTHER; note = 2'-O-methyladenosine-3'-phosphate
  modified_base 9: mod_base = OTHER; note = 2'-fluoroadenosine-3'-phosphate
  modified_base 10: mod_base = OTHER; note = 2'-fluoroguanosine-3'-phosphate
  modified_base 11: mod_base = OTHER; note = 2'-fluoroguanosine-3'-phosphate
  modified_base 12: mod_base = OTHER; note = 2'-O-methyluridine-3'-phosphate
  modified_base 13: mod_base = OTHER; note = 2'-O-methylguanosine-3'-phosphate
  modified_base 14: mod_base = OTHER; note = 2'-O-methyladenosine-3'-phosphate
  modified_base 15: mod_base = OTHER; note = 2'-O-methyladenosine-3'-phosphate
  modified_base 16: mod_base = OTHER; note = 2'-O-methyladenosine-3'-phosphate
  modified_base 17: mod_base = OTHER; note = 2'-O-methyladenosine-3'-phosphate
  modified_base 18: mod_base = OTHER; note = 2'-O-methylguanosine-3'-phosphate
  modified_base 19: mod_base = OTHER; note = 2'-O-methyladenosine-3'-phosphate
  modified_base 20: mod_base = OTHER; note = 2'-O-methyluridine-3'-phosphate
  modified_base 21: mod_base = OTHER; note 2'-O-methyladenosine-3'-phosphate-N-[tris(GalNAc-alkyl)-ami dodecanoyl)]-4-hydroxyprolinol (Hyp-(GalNAc-alkyl)3)
aaacactaaggtgaaaagata

SEQ ID NO: 2015 - RNA, 23 nt, synthetic construct
  source 1..23: mol_type = other RNA
  modified_base 1: mod_base = OTHER; note = 2'-O-methyluridine-3'-phosphorothioate
  modified_base 2: mod_base = OTHER; note = 2'-fluoroadenosine-3'-phosphorothioate
  modified_base 3: mod_base = OTHER; note = 2'-O-methyluridine-3'-phosphate
  modified_base 4: mod_base = OTHER; note = 2'-O-methylcytidine-3'-phosphate
  modified_base 5: mod_base = OTHER; note = 2'-O-methyluridine-3'-phosphate
  modified_base 6: mod_base = OTHER; note = 2'-fluorouridine-3'-phosphate
  modified_base 7: mod_base = OTHER; note = 2'-O-methyluridine-3'-phosphate
  modified_base 8: mod_base = OTHER; note = 2'-fluorouridine-3'-phosphate
  modified_base 9: mod_base = OTHER; note = 2'-fluorocytidine-3'-phosphate
  modified_base 10: mod_base = OTHER; note = 2'-O-methyladenosine-3'-phosphate
  modified_base 11: mod_base = OTHER; note = 2'-O-methylcytidine-3'-phosphate
  modified_base 12: mod_base = OTHER; note = 2'-O-methylcytidine-3'-phosphate
  modified_base 13: mod_base = OTHER; note = 2'-O-methyluridine-3'-phosphate
  modified_base 14: mod_base = OTHER; note = 2'-fluorouridine-3'-phosphate
  modified_base 15: mod_base = OTHER; note = 2'-O-methyladenosine-3'-phosphate
  modified_base 16: mod_base = OTHER; note = 2'-fluoroguanosine-3'-phosphate
  modified_base 17: mod_base = OTHER; note = 2'-O-methyluridine-3'-phosphate
  modified_base 18: mod_base = OTHER; note = 2'-O-methylguanosine-3'-phosphate
  modified_base 19: mod_base = OTHER; note = 2'-O-methyluridine-3'-phosphate
  modified_base 20: mod_base = OTHER; note = 2'-O-methyluridine-3'-phosphate
  modified_base 21: mod_base = OTHER; note = 2'-O-methyluridine-3'-phosphorothioate
  modified_base 22: mod_base = OTHER; note = 2'-O-methylguanosine-3'- phosphorothioate
  modified_base 23: mod_base = OTHER; note = 2'-O-methylcytidine-3'-phosphate
tatcttttcaccttagtgtttgc

SEQ ID NO: 2016 - RNA, 21 nt, synthetic construct
  source 1..21: mol_type = other RNA
  modified_base 1: mod_base = OTHER; note = 2'-O-methylcytidine-3'- phosphorothioate
  modified_base 2: mod_base = OTHER; note = 2'-O-methyladenosine-3'- phosphorothioate
  modified_base 3: mod_base = OTHER; note = 2'-O-methyladenosine-3'-phosphate
  modified_base 4: mod_base = OTHER; note = 2'-O-methyladenosine-3'-phosphate
  modified_base 5: mod_base = OTHER; note = 2'-O-methylcytidine-3'-phosphate
  modified_base 6: mod_base = OTHER; note = 2'-O-methyladenosine-3'-phosphate
  modified_base 7: mod_base = OTHER; note = 2'-fluorocytidine-3'-phosphate
  modified_base 8: mod_base = OTHER; note = 2'-O-methyluridine-3'-phosphate
  modified_base 9: mod_base = OTHER; note = 2'-fluoroadenosine-3'-phosphate
  modified_base 10: mod_base = OTHER; note = 2'-fluoroadenosine-3'-phosphate
  modified_base 11: mod_base = OTHER; note = 2'-fluoroguanosine-3'-phosphate
  modified_base 12: mod_base = OTHER; note = 2'-O-methylguanosine-3'-phosphate
  modified_base 13: mod_base = OTHER; note = 2'-O-methyluridine-3'-phosphate
  modified_base 14: mod_base = OTHER; note = 2'-O-methylguanosine-3'-phosphate
  modified_base 15: mod_base = OTHER; note = 2'-O-methyladenosine-3'-phosphate
  modified_base 16: mod_base = OTHER; note = 2'-O-methyladenosine-3'-phosphate
  modified_base 17: mod_base = OTHER; note = 2'-O-methyladenosine-3'-phosphate
  modified_base 18: mod_base = OTHER; note = 2'-O-methyladenosine-3'-phosphate
  modified_base 19: mod_base = OTHER; note = 2'-O-methylguanosine-3'-phosphate
  modified_base 20: mod_base = OTHER; note = 2'-O-methyladenosine-3'-phosphate
  modified_base 21: mod_base = OTHER; note 2'-O-methyluridine-3'-phosphate-N-[tris(GalNAc-alkyl)-amido decanoyl)]-4-hydroxyprolinol (Hyp-(GalNAc-alkyl)3)
caaacactaaggtgaaaagat

SEQ ID NO: 2017 - RNA, 23 nt, synthetic construct
  source 1..23: mol_type = other RNA
  modified_base 1: mod_base = OTHER; note = 2'-O-methyladenosine-3'- phosphorothioate
  modified_base 2: mod_base = OTHER; note = 2'-fluorouridine -3'-phosphorothioate
  modified_base 3: mod_base = OTHER; note = 2'-O-methylcytidine-3'-phosphate
  modified_base 4: mod_base = OTHER; note = 2'-O-methyluridine-3'-phosphate
  modified_base 5: mod_base = OTHER; note = 2'-O-methyluridine-3'-phosphate
  modified_base 6: mod_base = OTHER; note = 2'-fluorouridine-3'-phosphate
  modified_base 7: mod_base = OTHER; note = 2'-O-methyluridine-3'-phosphate
  modified_base 8: mod_base = OTHER; note = 2'-fluorocytidine-3'-phosphate
  modified_base 9: mod_base = OTHER; note = 2'-fluoroadenosine-3'-phosphate
  modified_base 10: mod_base = OTHER; note = 2'-O-methylcytidine-3'-phosphate
  modified_base 11: mod_base = OTHER; note = 2'-O-methylcytidine-3'-phosphate
  modified_base 12: mod_base = OTHER; note = 2'-O-methyluridine-3'-phosphate
  modified_base 13: mod_base = OTHER; note = 2'-O-methyluridine-3'-phosphate
  modified_base 14: mod_base = OTHER; note = 2'-fluoroadenosine-3'-phosphate
  modified_base 15: mod_base = OTHER; note = 2'-O-methylguanosine-3'-phosphate
  modified_base 16: mod_base = OTHER; note = 2'-fluorouridine-3'-phosphate
  modified_base 17: mod_base = OTHER; note = 2'-O-methylguanosine-3'-phosphate
  modified_base 18: mod_base = OTHER; note = 2'-O-methyluridine-3'-phosphate
  modified_base 19: mod_base = OTHER; note = 2'-O-methyluridine-3'-phosphate
  modified_base 20: mod_base = OTHER; note = 2'-O-methyluridine-3'-phosphate
  modified_base 21: mod_base = OTHER; note = 2'-O-methylguanosine-3'- phosphorothioate
  modified_base 22: mod_base = OTHER; note = 2'-O-methylcytidine-3'- phosphorothioate
  modified_base 23: mod_base = OTHER; note = 2'-O-methyluridine-3'-phosphate
atcttttcaccttagtgtttgct

SEQ ID NO: 2018 - RNA, 21 nt, synthetic construct
  source 1..21: mol_type = other RNA
  modified_base 1: mod_base = OTHER; note = 2'-O-methyladenosine-3'- phosphorothioate
  modified_base 2: mod_base = OTHER; note = 2'-O-methylguanosine-3'- phosphorothioate
  modified_base 3: mod_base = OTHER; note = 2'-O-methylguanosine-3'-phosphate
  modified_base 4: mod_base = OTHER; note = 2'-O-methyluridine-3'-phosphate
  modified_base 5: mod_base = OTHER; note = 2'-O-methyladenosine-3'-phosphate
  modified_base 6: mod_base = OTHER; note = 2'-O-methylguanosine-3'-phosphate
  modified_base 7: mod_base = OTHER; note = 2'-fluorocytidine-3'-phosphate
  modified_base 8: mod_base = OTHER; note = 2'-O-methyladenosine-3'-phosphate
  modified_base 9: mod_base = OTHER; note = 2'-fluorocytidine-3'-phosphate
  modified_base 10: mod_base = OTHER; note = 2'-fluorouridine-3'-phosphate
  modified_base 11: mod_base = OTHER; note = 2'-fluoroguanosine-3'-phosphate
  modified_base 12: mod_base = OTHER; note = 2'-O-methylguanosine-3'-phosphate
  modified_base 13: mod_base = OTHER; note = 2'-O-methyladenosine-3'-phosphate
  modified_base 14: mod_base = OTHER; note = 2'-O-methylguanosine-3'-phosphate
  modified_base 15: mod_base = OTHER; note = 2'-O-methyladenosine-3'-phosphate
  modified_base 16: mod_base = OTHER; note = 2'-O-methylguanosine-3'-phosphate
  modified_base 17: mod_base = OTHER; note = 2'-O-methyladenosine-3'-phosphate
  modified_base 18: mod_base = OTHER; note = 2'-O-methyladenosine-3'-phosphate
  modified_base 19: mod_base = OTHER; note = 2'-O-methyluridine-3'-phosphate
  modified_base 20: mod_base = OTHER; note = 2'-O-methyluridine-3'-phosphate
  modified_base 21: mod_base = OTHER; note 2'-O-methylguanosine-3'-phosphate-N-[tris(GalNAc-alkyl)-ami dodecanoyl)]-4-hydroxyprolinol (Hyp-(GalNAc-alkyl)3)
aggtagcactggagagaattg

SEQ ID NO: 2019 - RNA, 23 nt, synthetic construct
  source 1..23: mol_type = other RNA
  modified_base 1: mod_base = OTHER; note = 2'-O-methylcytidine-3'- phosphorothioate
  modified_base 2: mod_base = OTHER; note = 2'-fluoroadenosine-3'-phosphorothioate
  modified_base 3: mod_base = OTHER; note = 2'-O-methyladenosine-3'-phosphate
  modified_base 4: mod_base = OTHER; note = 2'-O-methyluridine-3'-phosphate
  modified_base 5: mod_base = OTHER; note = 2'-O-methyluridine-3'-phosphate
  modified_base 6: mod_base = OTHER; note = 2'-fluorocytidine-3'-phosphate
  modified_base 7: mod_base = OTHER; note = 2'-O-methyluridine-3'-phosphate
  modified_base 8: mod_base = OTHER; note = 2'-fluorocytidine-3'-phosphate
  modified_base 9: mod_base = OTHER; note = 2'-fluorouridine-3'-phosphate
  modified_base 10: mod_base = OTHER; note = 2'-O-methylcytidine-3'-phosphate
  modified_base 11: mod_base = OTHER; note = 2'-O-methylcytidine-3'-phosphate
  modified_base 12: mod_base = OTHER; note = 2'-O-methyladenosine-3'-phosphate
  modified_base 13: mod_base = OTHER; note = 2'-O-methylguanosine-3'-phosphate
  modified_base 14: mod_base = OTHER; note = 2'-fluorouridine-3'-phosphate
  modified_base 15: mod_base = OTHER; note = 2'-O-methylguanosine-3'-phosphate
  modified_base 16: mod_base = OTHER; note = 2'-fluorocytidine-3'-phosphate
  modified_base 17: mod_base = OTHER; note = 2'-O-methyluridine-3'-phosphate
  modified_base 18: mod_base = OTHER; note = 2'-O-methyladenosine-3'-phosphate
  modified_base 19: mod_base = OTHER; note = 2'-O-methylcytidine-3'-phosphate
  modified_base 20: mod_base = OTHER; note = 2'-O-methylcytidine-3'-phosphate
  modified_base 21: mod_base = OTHER; note = 2'-O-methyluridine-3'-phosphorothioate
  modified_base 22: mod_base = OTHER; note = 2'-O-methyluridine-3'-phosphorothioate
  modified_base 23: mod_base = OTHER; note = 2'-O-methylcytidine-3'-phosphate
caattctctccagtgctaccttc

SEQ ID NO: 2020 - RNA, 21 nt, synthetic construct
  source 1..21: mol_type = other RNA
  modified_base 1: mod_base = OTHER; note = 2'-O-methylguanosine-3'- phosphorothioate
  modified_base 2: mod_base = OTHER; note = 2'-O-methylguanosine-3'- phosphorothioate
  modified_base 3: mod_base = OTHER; note = 2'-O-methyluridine-3'-phosphate
  modified_base 4: mod_base = OTHER; note = 2'-O-methyladenosine-3'-phosphate
  modified_base 5: mod_base = OTHER; note = 2'-O-methylguanosine-3'-phosphate
  modified_base 6: mod_base = OTHER; note = 2'-O-methylcytidine-3'-phosphate
  modified_base 7: mod_base = OTHER; note = 2'-fluoroadenosine-3'-phosphate
  modified_base 8: mod_base = OTHER; note = 2'-O-methylcytidine-3'-phosphate
  modified_base 9: mod_base = OTHER; note = 2'-fluorouridine-3'-phosphate
  modified_base 10: mod_base = OTHER; note = 2'-fluoroguanosine-3'-phosphate
  modified_base 11: mod_base = OTHER; note = 2'-fluoroguanosine-3'-phosphate
  modified_base 12: mod_base = OTHER; note = 2'-O-methyladenosine-3'-phosphate
  modified_base 13: mod_base = OTHER; note = 2'-O-methylguanosine-3'-phosphate
  modified_base 14: mod_base = OTHER; note = 2'-O-methyladenosine-3'-phosphate
  modified_base 15: mod_base = OTHER; note = 2'-O-methylguanosine-3'-phosphate
  modified_base 16: mod_base = OTHER; note = 2'-O-methyladenosine-3'-phosphate
  modified_base 17: mod_base = OTHER; note = 2'-O-methyladenosine-3'-phosphate
  modified_base 18: mod_base = OTHER; note = 2'-O-methyluridine-3'-phosphate
  modified_base 19: mod_base = OTHER; note = 2'-O-methyluridine-3'-phosphate
  modified_base 20: mod_base = OTHER; note = 2'-O-methylguanosine-3'-phosphate
  modified_base 21: mod_base = OTHER; note 2'-O-methylguanosine-3'-phosphate-N-[tris(GalNAc-alkyl)-ami dodecanoyl)]-4-hydroxyprolinol (Hyp-(GalNAc-alkyl)3)
ggtagcactggagagaattgg

SEQ ID NO: 2021 - RNA, 23 nt, synthetic construct
  source 1..23: mol_type = other RNA
  modified_base 1: mod_base = OTHER; note = 2'-O-methylcytidine-3'- phosphorothioate
  modified_base 2: mod_base = OTHER; note = 2'-fluorocytidine-3'-phosphorothioate
  modified_base 3: mod_base = OTHER; note = 2'-O-methyladenosine-3'-phosphate
  modified_base 4: mod_base = OTHER; note = 2'-O-methyladenosine-3'-phosphate
  modified_base 5: mod_base = OTHER; note = 2'-O-methyluridine-3'-phosphate
  modified_base 6: mod_base = OTHER; note = 2'-fluorouridine-3'-phosphate
  modified_base 7: mod_base = OTHER; note = 2'-O-methylcytidine-3'-phosphate
  modified_base 8: mod_base = OTHER; note = 2'-fluorouridine-3'-phosphate
  modified_base 9: mod_base = OTHER; note = 2'-fluorocytidine-3'-phosphate
  modified_base 10: mod_base = OTHER; note = 2'-O-methyluridine-3'-phosphate
  modified_base 11: mod_base = OTHER; note = 2'-O-methylcytidine-3'-phosphate
  modified_base 12: mod_base = OTHER; note = 2'-O-methylcytidine-3'-phosphate
  modified_base 13: mod_base = OTHER; note = 2'-O-methyladenosine-3'-phosphate
  modified_base 14: mod_base = OTHER; note = 2'-fluoroguanosine-3'-phosphate
  modified_base 15: mod_base = OTHER; note = 2'-O-methyluridine-3'-phosphate
  modified_base 16: mod_base = OTHER; note = 2'-fluoroguanosine-3'-phosphate
  modified_base 17: mod_base = OTHER; note = 2'-O-methylcytidine-3'-phosphate
  modified_base 18: mod_base = OTHER; note = 2'-O-methyluridine-3'-phosphate
  modified_base 19: mod_base = OTHER; note = 2'-O-methyladenosine-3'-phosphate
  modified_base 20: mod_base = OTHER; note = 2'-O-methylcytidine-3'-phosphate
  modified_base 21: mod_base = OTHER; note = 2'-O-methylcytidine-3'- phosphorothioate
  modified_base 22: mod_base = OTHER; note = 2'-O-methyluridine-3'-phosphorothioate
  modified_base 23: mod_base = OTHER; note = 2'-O-methyluridine-3'-phosphate
ccaattctctccagtgctacctt

SEQ ID NO: 2022 - RNA, 21 nt, synthetic construct
  source 1..21: mol_type = other RNA
  modified_base 1: mod_base = OTHER; note = 2'-O-methylguanosine-3'- phosphorothioate
  modified_base 2: mod_base = OTHER; note = 2'-O-methyladenosine-3'- phosphorothioate
  modified_base 3: mod_base = OTHER; note = 2'-O-methylguanosine-3'-phosphate
  modified_base 4: mod_base = OTHER; note = 2'-O-methyladenosine-3'-phosphate
  modified_base 5: mod_base = OTHER; note = 2'-O-methyladenosine-3'-phosphate
  modified_base 6: mod_base = OTHER; note = 2'-O-methylguanosine-3'-phosphate
  modified_base 7: mod_base = OTHER; note = 2'-fluoroguanosine-3'-phosphate
  modified_base 8: mod_base = OTHER; note = 2'-O-methyluridine-3'-phosphate
  modified_base 9: mod_base = OTHER; note = 2'-fluoroadenosine-3'-phosphate
  modified_base 10: mod_base = OTHER; note = 2'-fluoroguanosine-3'-phosphate
  modified_base 11: mod_base = OTHER; note = 2'-fluorocytidine-3'-phosphate
  modified_base 12: mod_base = OTHER; note = 2'-O-methyladenosine-3'-phosphate
  modified_base 13: mod_base = OTHER; note = 2'-O-methylcytidine-3'-phosphate
  modified_base 14: mod_base = OTHER; note = 2'-O-methyluridine-3'-phosphate
  modified_base 15: mod_base = OTHER; note = 2'-O-methylguanosine-3'-phosphate
  modified_base 16: mod_base = OTHER; note = 2'-O-methylguanosine-3'-phosphate
  modified_base 17: mod_base = OTHER; note = 2'-O-methyladenosine-3'-phosphate
  modified_base 18: mod_base = OTHER; note = 2'-O-methylguanosine-3'-phosphate
  modified_base 19: mod_base = OTHER; note = 2'-O-methyladenosine-3'-phosphate
  modified_base 20: mod_base = OTHER; note = 2'-O-methylguanosine-3'-phosphate
  modified_base 21: mod_base = OTHER; note 2'-O-methyladenosine-3'-phosphate-N-[tris(GalNAc-alkyl)-ami dodecanoyl)]-4-hydroxyprolinol (Hyp-(GalNAc-alkyl)3)
gagaaggtagcactggagaga

SEQ ID NO: 2023 - RNA, 23 nt, synthetic construct
  source 1..23: mol_type = other RNA
  modified_base 1: mod_base = OTHER; note = 2'-O-methyluridine-3'-phosphorothioate
  modified_base 2: mod_base = OTHER; note = 2'-fluorocytidine-3'-phosphorothioate
  modified_base 3: mod_base = OTHER; note = 2'-O-methyluridine-3'-phosphate
  modified_base 4: mod_base = OTHER; note = 2'-O-methylcytidine-3'-phosphate
  modified_base 5: mod_base = OTHER; note = 2'-O-methyluridine-3'-phosphate
  modified_base 6: mod_base = OTHER; note = 2'-fluorocytidine-3'-phosphate
  modified_base 7: mod_base = OTHER; note = 2'-O-methylcytidine-3'-phosphate
  modified_base 8: mod_base = OTHER; note = 2'-fluoroadenosine-3'-phosphate
  modified_base 9: mod_base = OTHER; note = 2'-fluoroguanosine-3'-phosphate
  modified_base 10: mod_base = OTHER; note = 2'-O-methyluridine-3'-phosphate
  modified_base 11: mod_base = OTHER; note = 2'-O-methylguanosine-3'-phosphate
  modified_base 12: mod_base = OTHER; note = 2'-O-methylcytidine-3'-phosphate
  modified_base 13: mod_base = OTHER; note = 2'-O-methyluridine-3'-phosphate
  modified_base 14: mod_base = OTHER; note = 2'-fluoroadenosine-3'-phosphate
  modified_base 15: mod_base = OTHER; note = 2'-O-methylcytidine-3'-phosphate
  modified_base 16: mod_base = OTHER; note = 2'-fluorocytidine-3'-phosphate
  modified_base 17: mod_base = OTHER; note = 2'-O-methyluridine-3'-phosphate
  modified_base 18: mod_base = OTHER; note = 2'-O-methyluridine-3'-phosphate
  modified_base 19: mod_base = OTHER; note = 2'-O-methylcytidine-3'-phosphate
  modified_base 20: mod_base = OTHER; note = 2'-O-methyluridine-3'-phosphate
  modified_base 21: mod_base = OTHER; note = 2'-O-methylcytidine-3'- phosphorothioate
  modified_base 22: mod_base = OTHER; note = 2'-O-methyladenosine-3'- phosphorothioate
  modified_base 23: mod_base = OTHER; note = 2'-O-methyladenosine-3'-phosphate
tctctccagtgctaccttctcaa

SEQ ID NO: 2024 - RNA, 21 nt, synthetic construct
  source 1..21: mol_type = other RNA
  modified_base 1: mod_base = OTHER; note = 2'-O-methyluridine-3'-phosphorothioate
  modified_base 2: mod_base = OTHER; note = 2'-O-methylguanosine-3'- phosphorothioate
  modified_base 3: mod_base = OTHER; note = 2'-O-methyladenosine-3'-phosphate
  modified_base 4: mod_base = OTHER; note = 2'-O-methylguanosine-3'-phosphate
  modified_base 5: mod_base = OTHER; note = 2'-O-methyladenosine-3'-phosphate
  modified_base 6: mod_base = OTHER; note = 2'-O-methyladenosine-3'-phosphate
  modified_base 7: mod_base = OTHER; note = 2'-fluoroguanosine-3'-phosphate
  modified_base 8: mod_base = OTHER; note = 2'-O-methylguanosine-3'-phosphate
  modified_base 9: mod_base = OTHER; note = 2'-fluorouridine-3'-phosphate
  modified_base 10: mod_base = OTHER; note = 2'-fluoroadenosine-3'-phosphate
  modified_base 11: mod_base = OTHER; note = 2'-fluoroguanosine-3'-phosphate
  modified_base 12: mod_base = OTHER; note = 2'-O-methylcytidine-3'-phosphate
  modified_base 13: mod_base = OTHER; note = 2'-O-methyladenosine-3'-phosphate
  modified_base 14: mod_base = OTHER; note = 2'-O-methylcytidine-3'-phosphate
  modified_base 15: mod_base = OTHER; note = 2'-O-methyluridine-3'-phosphate
  modified_base 16: mod_base = OTHER; note = 2'-O-methylguanosine-3'-phosphate
  modified_base 17: mod_base = OTHER; note = 2'-O-methylguanosine-3'-phosphate
  modified_base 18: mod_base = OTHER; note = 2'-O-methyladenosine-3'-phosphate
  modified_base 19: mod_base = OTHER; note = 2'-O-methylguanosine-3'-phosphate
  modified_base 20: mod_base = OTHER; note = 2'-O-methyladenosine-3'-phosphate
  modified_base 21: mod_base = OTHER; note 2'-O-methylguanosine-3'-phosphate-N-[tris(GalNAc-alkyl)-ami dodecanoyl)]-4-hydroxyprolinol (Hyp-(GalNAc-alkyl)3)
tgagaaggtagcactggagag

SEQ ID NO: 2025 - RNA, 23 nt, synthetic construct
  source 1..23: mol_type = other RNA
  modified_base 1: mod_base = OTHER; note = 2'-O-methylcytidine-3'- phosphorothioate
  modified_base 2: mod_base = OTHER; note = 2'-fluorouridine -3'-phosphorothioate
  modified_base 3: mod_base = OTHER; note = 2'-O-methylcytidine-3'-phosphate
  modified_base 4: mod_base = OTHER; note = 2'-O-methyluridine-3'-phosphate
  modified_base 5: mod_base = OTHER; note = 2'-O-methylcytidine-3'-phosphate
  modified_base 6: mod_base = OTHER; note = 2'-fluorocytidine-3'-phosphate
  modified_base 7: mod_base = OTHER; note = 2'-O-methyladenosine-3'-phosphate
  modified_base 8: mod_base = OTHER; note = 2'-fluoroguanosine-3'-phosphate
  modified_base 9: mod_base = OTHER; note = 2'-fluorouridine-3'-phosphate
  modified_base 10: mod_base = OTHER; note = 2'-O-methylguanosine-3'-phosphate
  modified_base 11: mod_base = OTHER; note = 2'-O-methylcytidine-3'-phosphate
  modified_base 12: mod_base = OTHER; note = 2'-O-methyluridine-3'-phosphate
  modified_base 13: mod_base = OTHER; note = 2'-O-methyladenosine-3'-phosphate
  modified_base 14: mod_base = OTHER; note = 2'-fluorocytidine-3'-phosphate
  modified_base 15: mod_base = OTHER; note = 2'-O-methylcytidine-3'-phosphate
  modified_base 16: mod_base = OTHER; note = 2'-fluorouridine-3'-phosphate
  modified_base 17: mod_base = OTHER; note = 2'-O-methyluridine-3'-phosphate
  modified_base 18: mod_base = OTHER; note = 2'-O-methylcytidine-3'-phosphate
  modified_base 19: mod_base = OTHER; note = 2'-O-methyluridine-3'-phosphate
  modified_base 20: mod_base = OTHER; note = 2'-O-methylcytidine-3'-phosphate
  modified_base 21: mod_base = OTHER; note = 2'-O-methyladenosine-3'- phosphorothioate
  modified_base 22: mod_base = OTHER; note = 2'-O-methyladenosine-3'- phosphorothioate
  modified_base 23: mod_base = OTHER; note = 2'-O-methyladenosine-3'-phosphate
ctctccagtgctaccttctcaaa

SEQ ID NO: 2026 - RNA, 21 nt, synthetic construct
  source 1..21: mol_type = other RNA
  modified_base 1: mod_base = OTHER; note = 2'-O-methyladenosine-3'- phosphorothioate
  modified_base 2: mod_base = OTHER; note = 2'-O-methylguanosine-3'- phosphorothioate
  modified_base 3: mod_base = OTHER; note = 2'-O-methyluridine-3'-phosphate
  modified_base 4: mod_base = OTHER; note = 2'-O-methylguanosine-3'-phosphate
  modified_base 5: mod_base = OTHER; note = 2'-O-methylguanosine-3'-phosphate
  modified_base 6: mod_base = OTHER; note = 2'-O-methyladenosine-3'-phosphate
  modified_base 7: mod_base = OTHER; note = 2'-fluorocytidine-3'-phosphate
  modified_base 8: mod_base = OTHER; note = 2'-O-methyluridine-3'-phosphate
  modified_base 9: mod_base = OTHER; note = 2'-fluorouridine-3'-phosphate
  modified_base 10: mod_base = OTHER; note = 2'-fluoroguanosine-3'-phosphate
  modified_base 11: mod_base = OTHER; note = 2'-fluorocytidine-3'-phosphate
  modified_base 12: mod_base = OTHER; note = 2'-O-methyluridine-3'-phosphate
  modified_base 13: mod_base = OTHER; note = 2'-O-methylguanosine-3'-phosphate
  modified_base 14: mod_base = OTHER; note = 2'-O-methylcytidine-3'-phosphate
  modified_base 15: mod_base = OTHER; note = 2'-O-methyladenosine-3'-phosphate
  modified_base 16: mod_base = OTHER; note = 2'-O-methyluridine-3'-phosphate
  modified_base 17: mod_base = OTHER; note = 2'-O-methyladenosine-3'-phosphate
  modified_base 18: mod_base = OTHER; note = 2'-O-methyluridine-3'-phosphate
  modified_base 19: mod_base = OTHER; note = 2'-O-methylguanosine-3'-phosphate
  modified_base 20: mod_base = OTHER; note = 2'-O-methyluridine-3'-phosphate
  modified_base 21: mod_base = OTHER; note 2'-O-methylguanosine-3'-phosphate-N-[tris(GalNAc-alkyl)-ami dodecanoyl)]-4-hydroxyprolinol (Hyp-(GalNAc-alkyl)3)
agtggacttgctgcatatgtg

SEQ ID NO: 2027 - RNA, 23 nt, synthetic construct
  source 1..23: mol_type = other RNA
  modified_base 1: mod_base = OTHER; note = 2'-O-methylcytidine-3'- phosphorothioate
  modified_base 2: mod_base = OTHER; note = 2'-fluoroadenosine-3'-phosphorothioate
  modified_base 3: mod_base = OTHER; note = 2'-O-methylcytidine-3'-phosphate
  modified_base 4: mod_base = OTHER; note = 2'-O-methyladenosine-3'-phosphate
  modified_base 5: mod_base = OTHER; note = 2'-O-methyluridine-3'-phosphate
  modified_base 6: mod_base = OTHER; note = 2'-fluoroadenosine-3'-phosphate
  modified_base 7: mod_base = OTHER; note = 2'-O-methyluridine-3'-phosphate
  modified_base 8: mod_base = OTHER; note = 2'-fluoroguanosine-3'-phosphate
  modified_base 9: mod_base = OTHER; note = 2'-fluorocytidine-3'-phosphate
  modified_base 10: mod_base = OTHER; note = 2'-O-methyladenosine-3'-phosphate
  modified_base 11: mod_base = OTHER; note = 2'-O-methylguanosine-3'-phosphate
  modified_base 12: mod_base = OTHER; note = 2'-O-methylcytidine-3'-phosphate
  modified_base 13: mod_base = OTHER; note = 2'-O-methyladenosine-3'-phosphate
  modified_base 14: mod_base = OTHER; note = 2'-fluoroadenosine-3'-phosphate
  modified_base 15: mod_base = OTHER; note = 2'-O-methylguanosine-3'-phosphate
  modified_base 16: mod_base = OTHER; note = 2'-fluorouridine-3'-phosphate
  modified_base 17: mod_base = OTHER; note = 2'-O-methylcytidine-3'-phosphate
  modified_base 18: mod_base = OTHER; note = 2'-O-methylcytidine-3'-phosphate
  modified_base 19: mod_base = OTHER; note = 2'-O-methyladenosine-3'-phosphate
  modified_base 20: mod_base = OTHER; note = 2'-O-methylcytidine-3'-phosphate
  modified_base 21: mod_base = OTHER; note = 2'-O-methyluridine-3'-phosphorothioate
  modified_base 22: mod_base = OTHER; note = 2'-O-methylguanosine-3'- phosphorothioate
  modified_base 23: mod_base = OTHER; note = 2'-O-methyluridine-3'-phosphate
cacatatgcagcaagtccactgt

SEQ ID NO: 2028 - RNA, 21 nt, synthetic construct
  source 1..21: mol_type = other RNA
  modified_base 1: mod_base = OTHER; note = 2'-O-methylguanosine-3'- phosphorothioate
  modified_base 2: mod_base = OTHER; note = 2'-O-methyluridine-3'-phosphorothioate
  modified_base 3: mod_base = OTHER; note = 2'-O-methylguanosine-3'-phosphate
  modified_base 4: mod_base = OTHER; note = 2'-O-methylguanosine-3'-phosphate
  modified_base 5: mod_base = OTHER; note = 2'-O-methyladenosine-3'-phosphate
  modified_base 6: mod_base = OTHER; note = 2'-O-methylcytidine-3'-phosphate
  modified_base 7: mod_base = OTHER; note = 2'-fluorouridine-3'-phosphate
  modified_base 8: mod_base = OTHER; note = 2'-O-methyluridine-3'-phosphate
  modified_base 9: mod_base = OTHER; note = 2'-fluoroguanosine-3'-phosphate
  modified_base 10: mod_base = OTHER; note = 2'-fluorocytidine-3'-phosphate
  modified_base 11: mod_base = OTHER; note = 2'-fluorouridine-3'-phosphate
  modified_base 12: mod_base = OTHER; note = 2'-O-methylguanosine-3'-phosphate
  modified_base 13: mod_base = OTHER; note = 2'-O-methylcytidine-3'-phosphate
  modified_base 14: mod_base = OTHER; note = 2'-O-methyladenosine-3'-phosphate
  modified_base 15: mod_base = OTHER; note = 2'-O-methyluridine-3'-phosphate
  modified_base 16: mod_base = OTHER; note = 2'-O-methyladenosine-3'-phosphate
  modified_base 17: mod_base = OTHER; note = 2'-O-methyluridine-3'-phosphate
  modified_base 18: mod_base = OTHER; note = 2'-O-methylguanosine-3'-phosphate
  modified_base 19: mod_base = OTHER; note = 2'-O-methyluridine-3'-phosphate
  modified_base 20: mod_base = OTHER; note = 2'-O-methylguanosine-3'-phosphate
  modified_base 21: mod_base = OTHER; note 2'-O-methylguanosine-3'-phosphate-N-[tris(GalNAc-alkyl)-ami dodecanoyl)]-4-hydroxyprolinol (Hyp-(GalNAc-alkyl)3)
gtggacttgctgcatatgtgg

SEQ ID NO: 2029 - RNA, 23 nt, synthetic construct
  source 1..23: mol_type = other RNA
  modified_base 1: mod_base = OTHER; note = 2'-O-methylcytidine-3'- phosphorothioate
  modified_base 2: mod_base = OTHER; note = 2'-fluorocytidine-3'-phosphorothioate
  modified_base 3: mod_base = OTHER; note = 2'-O-methyladenosine-3'-phosphate
  modified_base 4: mod_base = OTHER; note = 2'-O-methylcytidine-3'-phosphate
  modified_base 5: mod_base = OTHER; note = 2'-O-methyladenosine-3'-phosphate
  modified_base 6: mod_base = OTHER; note = 2'-fluorouridine-3'-phosphate
  modified_base 7: mod_base = OTHER; note = 2'-O-methyladenosine-3'-phosphate
  modified_base 8: mod_base = OTHER; note = 2'-fluorouridine-3'-phosphate
  modified_base 9: mod_base = OTHER; note = 2'-fluoroguanosine-3'-phosphate
  modified_base 10: mod_base = OTHER; note = 2'-O-methylcytidine-3'-phosphate
  modified_base 11: mod_base = OTHER; note = 2'-O-methyladenosine-3'-phosphate
  modified_base 12: mod_base = OTHER; note = 2'-O-methylguanosine-3'-phosphate
  modified_base 13: mod_base = OTHER; note = 2'-O-methylcytidine-3'-phosphate
  modified_base 14: mod_base = OTHER; note = 2'-fluoroadenosine-3'-phosphate
  modified_base 15: mod_base = OTHER; note = 2'-O-methyladenosine-3'-phosphate
  modified_base 16: mod_base = OTHER; note = 2'-fluoroguanosine-3'-phosphate
  modified_base 17: mod_base = OTHER; note = 2'-O-methyluridine-3'-phosphate
  modified_base 18: mod_base = OTHER; note = 2'-O-methylcytidine-3'-phosphate
  modified_base 19: mod_base = OTHER; note = 2'-O-methylcytidine-3'-phosphate
  modified_base 20: mod_base = OTHER; note = 2'-O-methyladenosine-3'-phosphate
  modified_base 21: mod_base = OTHER; note = 2'-O-methylcytidine-3'- phosphorothioate
  modified_base 22: mod_base = OTHER; note = 2'-O-methyluridine-3'-phosphorothioate
  modified_base 23: mod_base = OTHER; note = 2'-O-methylguanosine-3'-phosphate
ccacatatgcagcaagtccactg

SEQ ID NO: 2030 - RNA, 21 nt, synthetic construct
  source 1..21: mol_type = other RNA
  modified_base 1: mod_base = OTHER; note = 2'-O-methylcytidine-3'- phosphorothioate
  modified_base 2: mod_base = OTHER; note = 2'-O-methylguanosine-3'- phosphorothioate
  modified_base 3: mod_base = OTHER; note = 2'-O-methyladenosine-3'-phosphate
  modified_base 4: mod_base = OTHER; note = 2'-O-methylcytidine-3'-phosphate
  modified_base 5: mod_base = OTHER; note = 2'-O-methyladenosine-3'-phosphate
  modified_base 6: mod_base = OTHER; note = 2'-O-methylguanosine-3'-phosphate
  modified_base 7: mod_base = OTHER; note = 2'-fluorouridine-3'-phosphate
  modified_base 8: mod_base = OTHER; note = 2'-O-methylguanosine-3'-phosphate
  modified_base 9: mod_base = OTHER; note = 2'-fluoroguanosine-3'-phosphate
  modified_base 10: mod_base = OTHER; note = 2'-fluoroadenosine-3'-phosphate
  modified_base 11: mod_base = OTHER; note = 2'-fluorocytidine-3'-phosphate
  modified_base 12: mod_base = OTHER; note = 2'-O-methyluridine-3'-phosphate
  modified_base 13: mod_base = OTHER; note = 2'-O-methyluridine-3'-phosphate
  modified_base 14: mod_base = OTHER; note = 2'-O-methylguanosine-3'-phosphate
  modified_base 15: mod_base = OTHER; note = 2'-O-methylcytidine-3'-phosphate
  modified_base 16: mod_base = OTHER; note = 2'-O-methyluridine-3'-phosphate
  modified_base 17: mod_base = OTHER; note = 2'-O-methylguanosine-3'-phosphate
  modified_base 18: mod_base = OTHER; note = 2'-O-methylcytidine-3'-phosphate
  modified_base 19: mod_base = OTHER; note = 2'-O-methyladenosine-3'-phosphate
  modified_base 20: mod_base = OTHER; note = 2'-O-methyluridine-3'-phosphate
  modified_base 21: mod_base = OTHER; note 2'-O-methyladenosine-3'-phosphate-N-[tris(GalNAc-alkyl)-ami dodecanoyl)]-4-hydroxyprolinol (Hyp-(GalNAc-alkyl)3)
cgacagtggacttgctgcata

SEQ ID NO: 2031 - RNA, 23 nt, synthetic construct
  source 1..23: mol_type = other RNA
  modified_base 1: mod_base = OTHER; note = 2'-O-methyluridine-3'-phosphorothioate
  modified_base 2: mod_base = OTHER; note = 2'-fluoroadenosine-3'-phosphorothioate
  modified_base 3: mod_base = OTHER; note = 2'-O-methyluridine-3'-phosphate
  modified_base 4: mod_base = OTHER; note = 2'-O-methylguanosine-3'-phosphate
  modified_base 5: mod_base = OTHER; note = 2'-O-methylcytidine-3'-phosphate
  modified_base 6: mod_base = OTHER; note = 2'-fluoroadenosine-3'-phosphate
  modified_base 7: mod_base = OTHER; note = 2'-O-methylguanosine-3'-phosphate
  modified_base 8: mod_base = OTHER; note = 2'-fluorocytidine-3'-phosphate
  modified_base 9: mod_base = OTHER; note = 2'-fluoroadenosine-3'-phosphate
  modified_base 10: mod_base = OTHER; note = 2'-O-methyladenosine-3'-phosphate
  modified_base 11: mod_base = OTHER; note = 2'-O-methylguanosine-3'-phosphate
  modified_base 12: mod_base = OTHER; note = 2'-O-methyluridine-3'-phosphate
  modified_base 13: mod_base = OTHER; note = 2'-O-methylcytidine-3'-phosphate
  modified_base 14: mod_base = OTHER; note = 2'-fluorocytidine-3'-phosphate
  modified_base 15: mod_base = OTHER; note = 2'-O-methyladenosine-3'-phosphate
  modified_base 16: mod_base = OTHER; note = 2'-fluorocytidine-3'-phosphate
  modified_base 17: mod_base = OTHER; note = 2'-O-methyluridine-3'-phosphate
  modified_base 18: mod_base = OTHER; note = 2'-O-methylguanosine-3'-phosphate
  modified_base 19: mod_base = OTHER; note = 2'-O-methyluridine-3'-phosphate
  modified_base 20: mod_base = OTHER; note = 2'-O-methylcytidine-3'-phosphate
  modified_base 21: mod_base = OTHER; note = 2'-O-methylguanosine-3'- phosphorothioate
  modified_base 22: mod_base = OTHER; note = 2'-O-methyluridine-3'-phosphorothioate
  modified_base 23: mod_base = OTHER; note = 2'-O-methylcytidine-3'-phosphate
tatgcagcaagtccactgtcgtc

SEQ ID NO: 2032 - RNA, 21 nt, synthetic construct
  source 1..21: mol_type = other RNA
  modified_base 1: mod_base = OTHER; note = 2'-O-methyladenosine-3'- phosphorothioate
  modified_base 2: mod_base = OTHER; note = 2'-O-methylcytidine-3'- phosphorothioate
  modified_base 3: mod_base = OTHER; note = 2'-O-methylguanosine-3'-phosphate
  modified_base 4: mod_base = OTHER; note = 2'-O-methyladenosine-3'-phosphate
  modified_base 5: mod_base = OTHER; note = 2'-O-methylcytidine-3'-phosphate
  modified_base 6: mod_base = OTHER; note = 2'-O-methyladenosine-3'-phosphate
  modified_base 7: mod_base = OTHER; note = 2'-fluoroguanosine-3'-phosphate
  modified_base 8: mod_base = OTHER; note = 2'-O-methyluridine-3'-phosphate
  modified_base 9: mod_base = OTHER; note = 2'-fluoroguanosine-3'-phosphate
  modified_base 10: mod_base = OTHER; note = 2'-fluoroguanosine-3'-phosphate
  modified_base 11: mod_base = OTHER; note = 2'-fluoroadenosine-3'-phosphate
  modified_base 12: mod_base = OTHER; note = 2'-O-methylcytidine-3'-phosphate
  modified_base 13: mod_base = OTHER; note = 2'-O-methyluridine-3'-phosphate
  modified_base 14: mod_base = OTHER; note = 2'-O-methyluridine-3'-phosphate
  modified_base 15: mod_base = OTHER; note = 2'-O-methylguanosine-3'-phosphate
  modified_base 16: mod_base = OTHER; note = 2'-O-methylcytidine-3'-phosphate
  modified_base 17: mod_base = OTHER; note = 2'-O-methyluridine-3'-phosphate
  modified_base 18: mod_base = OTHER; note = 2'-O-methylguanosine-3'-phosphate
  modified_base 19: mod_base = OTHER; note = 2'-O-methylcytidine-3'-phosphate
  modified_base 20: mod_base = OTHER; note = 2'-O-methyladenosine-3'-phosphate
  modified_base 21: mod_base = OTHER; note 2'-O-methyluridine-3'-phosphate-N-[tris(GalNAc-alkyl)-amido decanoyl)]-4-hydroxyprolinol (Hyp-(GalNAc-alkyl)3)
acgacagtggacttgctgcat

SEQ ID NO: 2033 - RNA, 23 nt, synthetic construct
  source 1..23: mol_type = other RNA
  modified_base 1: mod_base = OTHER; note = 2'-O-methyladenosine-3'- phosphorothioate
  modified_base 2: mod_base = OTHER; note = 2'-fluorouridine -3'-phosphorothioate
  modified_base 3: mod_base = OTHER; note = 2'-O-methylguanosine-3'-phosphate
  modified_base 4: mod_base = OTHER; note = 2'-O-methylcytidine-3'-phosphate
  modified_base 5: mod_base = OTHER; note = 2'-O-methyladenosine-3'-phosphate
  modified_base 6: mod_base = OTHER; note = 2'-fluoroguanosine-3'-phosphate
  modified_base 7: mod_base = OTHER; note = 2'-O-methylcytidine-3'-phosphate
  modified_base 8: mod_base = OTHER; note = 2'-fluoroadenosine-3'-phosphate
  modified_base 9: mod_base = OTHER; note = 2'-fluoroadenosine-3'-phosphate
  modified_base 10: mod_base = OTHER; note = 2'-O-methylguanosine-3'-phosphate
  modified_base 11: mod_base = OTHER; note = 2'-O-methyluridine-3'-phosphate
  modified_base 12: mod_base = OTHER; note = 2'-O-methylcytidine-3'-phosphate
  modified_base 13: mod_base = OTHER; note = 2'-O-methylcytidine-3'-phosphate
  modified_base 14: mod_base = OTHER; note = 2'-fluoroadenosine-3'-phosphate
  modified_base 15: mod_base = OTHER; note = 2'-O-methylcytidine-3'-phosphate
  modified_base 16: mod_base = OTHER; note = 2'-fluorouridine-3'-phosphate
  modified_base 17: mod_base = OTHER; note = 2'-O-methylguanosine-3'-phosphate
  modified_base 18: mod_base = OTHER; note = 2'-O-methyluridine-3'-phosphate
  modified_base 19: mod_base = OTHER; note = 2'-O-methylcytidine-3'-phosphate
  modified_base 20: mod_base = OTHER; note = 2'-O-methylguanosine-3'-phosphate
  modified_base 21: mod_base = OTHER; note = 2'-O-methyluridine-3'-phosphorothioate
  modified_base 22: mod_base = OTHER; note = 2'-O-methylcytidine-3'- phosphorothioate
  modified_base 23: mod_base = OTHER; note = 2'-O-methyluridine-3'-phosphate
atgcagcaagtccactgtcgtct

SEQ ID NO: 2034 - RNA, 21 nt, synthetic construct
  source 1..21: mol_type = other RNA
  modified_base 1: mod_base = OTHER; note = 2'-O-methyladenosine-3'- phosphorothioate
  modified_base 2: mod_base = OTHER; note = 2'-O-methyladenosine-3'- phosphorothioate
  modified_base 3: mod_base = OTHER; note = 2'-O-methylguanosine-3'-phosphate
  modified_base 4: mod_base = OTHER; note = 2'-O-methylguanosine-3'-phosphate
  modified_base 5: mod_base = OTHER; note = 2'-O-methyluridine-3'-phosphate
  modified_base 6: mod_base = OTHER; note = 2'-O-methylguanosine-3'-phosphate
  modified_base 7: mod_base = OTHER; note = 2'-fluorouridine-3'-phosphate
  modified_base 8: mod_base = OTHER; note = 2'-O-methyluridine-3'-phosphate
  modified_base 9: mod_base = OTHER; note = 2'-fluorocytidine-3'-phosphate
  modified_base 10: mod_base = OTHER; note = 2'-fluoroadenosine-3'-phosphate
  modified_base 11: mod_base = OTHER; note = 2'-fluoroadenosine-3'-phosphate
  modified_base 12: mod_base = OTHER; note = 2'-O-methylguanosine-3'-phosphate
  modified_base 13: mod_base = OTHER; note = 2'-O-methyladenosine-3'-phosphate
  modified_base 14: mod_base = OTHER; note = 2'-O-methyluridine-3'-phosphate
  modified_base 15: mod_base = OTHER; note = 2'-O-methylguanosine-3'-phosphate
  modified_base 16: mod_base = OTHER; note = 2'-O-methyluridine-3'-phosphate
  modified_base 17: mod_base = OTHER; note = 2'-O-methylcytidine-3'-phosphate
  modified_base 18: mod_base = OTHER; note = 2'-O-methylcytidine-3'-phosphate
  modified_base 19: mod_base = OTHER; note = 2'-O-methyluridine-3'-phosphate
  modified_base 20: mod_base = OTHER; note = 2'-O-methylcytidine-3'-phosphate
  modified_base 21: mod_base = OTHER; note 2'-O-methylguanosine-3'-phosphate-N-[tris(GalNAc-alkyl)-ami dodecanoyl)]-4-hydroxyprolinol (Hyp-(GalNAc-alkyl)3)
aaggtgttcaagatgtcctcg

SEQ ID NO: 2035 - RNA, 23 nt, synthetic construct
  source 1..23: mol_type = other RNA
  modified_base 1: mod_base = OTHER; note = 2'-O-methylcytidine-3'- phosphorothioate
  modified_base 2: mod_base = OTHER; note = 2'-fluoroguanosine-3'-phosphorothioate
  modified_base 3: mod_base = OTHER; note = 2'-O-methyladenosine-3'-phosphate
  modified_base 4: mod_base = OTHER; note = 2'-O-methylguanosine-3'-phosphate
  modified_base 5: mod_base = OTHER; note = 2'-O-methylguanosine-3'-phosphate
  modified_base 6: mod_base = OTHER; note = 2'-fluoroadenosine-3'-phosphate
  modified_base 7: mod_base = OTHER; note = 2'-O-methylcytidine-3'-phosphate
  modified_base 8: mod_base = OTHER; note = 2'-fluoroadenosine-3'-phosphate
  modified_base 9: mod_base = OTHER; note = 2'-fluorouridine-3'-phosphate
  modified_base 10: mod_base = OTHER; note = 2'-O-methylcytidine-3'-phosphate
  modified_base 11: mod_base = OTHER; note = 2'-O-methyluridine-3'-phosphate
  modified_base 12: mod_base = OTHER; note = 2'-O-methyluridine-3'-phosphate
  modified_base 13: mod_base = OTHER; note = 2'-O-methylguanosine-3'-phosphate
  modified_base 14: mod_base = OTHER; note = 2'-fluoroadenosine-3'-phosphate
  modified_base 15: mod_base = OTHER; note = 2'-O-methyladenosine-3'-phosphate
  modified_base 16: mod_base = OTHER; note = 2'-fluorocytidine-3'-phosphate
  modified_base 17: mod_base = OTHER; note = 2'-O-methyladenosine-3'-phosphate
  modified_base 18: mod_base = OTHER; note = 2'-O-methylcytidine-3'-phosphate
  modified_base 19: mod_base = OTHER; note = 2'-O-methylcytidine-3'-phosphate
  modified_base 20: mod_base = OTHER; note = 2'-O-methyluridine-3'-phosphate
  modified_base 21: mod_base = OTHER; note = 2'-O-methyluridine-3'-phosphorothioate
  modified_base 22: mod_base = OTHER; note = 2'-O-methyluridine-3'-phosphorothioate
  modified_base 23: mod_base = OTHER; note = 2'-O-methylcytidine-3'-phosphate
cgaggacatcttgaacacctttc

SEQ ID NO: 2036 - RNA, 21 nt, synthetic construct
  source 1..21: mol_type = other RNA
  modified_base 1: mod_base = OTHER; note = 2'-O-methyladenosine-3'- phosphorothioate
  modified_base 2: mod_base = OTHER; note = 2'-O-methylguanosine-3'- phosphorothioate
  modified_base 3: mod_base = OTHER; note = 2'-O-methylguanosine-3'-phosphate
  modified_base 4: mod_base = OTHER; note = 2'-O-methyluridine-3'-phosphate
  modified_base 5: mod_base = OTHER; note = 2'-O-methylguanosine-3'-phosphate
  modified_base 6: mod_base = OTHER; note = 2'-O-methyluridine-3'-phosphate
  modified_base 7: mod_base = OTHER; note = 2'-fluorouridine-3'-phosphate
  modified_base 8: mod_base = OTHER; note = 2'-O-methylcytidine-3'-phosphate
  modified_base 9: mod_base = OTHER; note = 2'-fluoroadenosine-3'-phosphate
  modified_base 10: mod_base = OTHER; note = 2'-fluoroadenosine-3'-phosphate
  modified_base 11: mod_base = OTHER; note = 2'-fluoroguanosine-3'-phosphate
  modified_base 12: mod_base = OTHER; note = 2'-O-methyladenosine-3'-phosphate
  modified_base 13: mod_base = OTHER; note = 2'-O-methyluridine-3'-phosphate
  modified_base 14: mod_base = OTHER; note = 2'-O-methylguanosine-3'-phosphate
  modified_base 15: mod_base = OTHER; note = 2'-O-methyluridine-3'-phosphate
  modified_base 16: mod_base = OTHER; note = 2'-O-methylcytidine-3'-phosphate
  modified_base 17: mod_base = OTHER; note = 2'-O-methylcytidine-3'-phosphate
  modified_base 18: mod_base = OTHER; note = 2'-O-methyluridine-3'-phosphate
  modified_base 19: mod_base = OTHER; note = 2'-O-methylcytidine-3'-phosphate
  modified_base 20: mod_base = OTHER; note = 2'-O-methylguanosine-3'-phosphate
  modified_base 21: mod_base = OTHER; note 2'-O-methyladenosine-3'-phosphate-N-[tris(GalNAc-alkyl)-ami dodecanoyl)]-4-hydroxyprolinol (Hyp-(GalNAc-alkyl)3)
aggtgttcaagatgtcctcga

SEQ ID NO: 2037 - RNA, 23 nt, synthetic construct
  source 1..23: mol_type = other RNA
  modified_base 1: mod_base = OTHER; note = 2'-O-methyluridine-3'-phosphorothioate
  modified_base 2: mod_base = OTHER; note = 2'-fluorocytidine-3'-phosphorothioate
  modified_base 3: mod_base = OTHER; note = 2'-O-methylguanosine-3'-phosphate
  modified_base 4: mod_base = OTHER; note = 2'-O-methyladenosine-3'-phosphate
  modified_base 5: mod_base = OTHER; note = 2'-O-methylguanosine-3'-phosphate
  modified_base 6: mod_base = OTHER; note = 2'-fluoroguanosine-3'-phosphate
  modified_base 7: mod_base = OTHER; note = 2'-O-methyladenosine-3'-phosphate
  modified_base 8: mod_base = OTHER; note = 2'-fluorocytidine-3'-phosphate
  modified_base 9: mod_base = OTHER; note = 2'-fluoroadenosine-3'-phosphate
  modified_base 10: mod_base = OTHER; note = 2'-O-methyluridine-3'-phosphate
  modified_base 11: mod_base = OTHER; note = 2'-O-methylcytidine-3'-phosphate
  modified_base 12: mod_base = OTHER; note = 2'-O-methyluridine-3'-phosphate
  modified_base 13: mod_base = OTHER; note = 2'-O-methyluridine-3'-phosphate
  modified_base 14: mod_base = OTHER; note = 2'-fluoroguanosine-3'-phosphate
  modified_base 15: mod_base = OTHER; note = 2'-O-methyladenosine-3'-phosphate
  modified_base 16: mod_base = OTHER; note = 2'-fluoroadenosine-3'-phosphate
  modified_base 17: mod_base = OTHER; note = 2'-O-methylcytidine-3'-phosphate
  modified_base 18: mod_base = OTHER; note = 2'-O-methyladenosine-3'-phosphate
  modified_base 19: mod_base = OTHER; note = 2'-O-methylcytidine-3'-phosphate
  modified_base 20: mod_base = OTHER; note = 2'-O-methylcytidine-3'-phosphate
  modified_base 21: mod_base = OTHER; note = 2'-O-methyluridine-3'-phosphorothioate
  modified_base 22: mod_base = OTHER; note = 2'-O-methyluridine-3'-phosphorothioate
  modified_base 23: mod_base = OTHER; note = 2'-O-methyluridine-3'-phosphate
tcgaggacatcttgaacaccttt

SEQ ID NO: 2038 - RNA, 21 nt, synthetic construct
  source 1..21: mol_type = other RNA
  modified_base 1: mod_base = OTHER; note = 2'-O-methylguanosine-3'- phosphorothioate
  modified_base 2: mod_base = OTHER; note = 2'-O-methyladenosine-3'- phosphorothioate
  modified_base 3: mod_base = OTHER; note = 2'-O-methylguanosine-3'-phosphate
  modified_base 4: mod_base = OTHER; note = 2'-O-methyladenosine-3'-phosphate
  modified_base 5: mod_base = OTHER; note = 2'-O-methyladenosine-3'-phosphate
  modified_base 6: mod_base = OTHER; note = 2'-O-methyladenosine-3'-phosphate
  modified_base 7: mod_base = OTHER; note = 2'-fluoroguanosine-3'-phosphate
  modified_base 8: mod_base = OTHER; note = 2'-O-methylguanosine-3'-phosphate
  modified_base 9: mod_base = OTHER; note = 2'-fluorouridine-3'-phosphate
  modified_base 10: mod_base = OTHER; note = 2'-fluoroguanosine-3'-phosphate
  modified_base 11: mod_base = OTHER; note = 2'-fluorouridine-3'-phosphate
  modified_base 12: mod_base = OTHER; note = 2'-O-methyluridine-3'-phosphate
  modified_base 13: mod_base = OTHER; note = 2'-O-methylcytidine-3'-phosphate
  modified_base 14: mod_base = OTHER; note = 2'-O-methyladenosine-3'-phosphate
  modified_base 15: mod_base = OTHER; note = 2'-O-methyladenosine-3'-phosphate
  modified_base 16: mod_base = OTHER; note = 2'-O-methylguanosine-3'-phosphate
  modified_base 17: mod_base = OTHER; note = 2'-O-methyladenosine-3'-phosphate
  modified_base 18: mod_base = OTHER; note = 2'-O-methyluridine-3'-phosphate
  modified_base 19: mod_base = OTHER; note = 2'-O-methylguanosine-3'-phosphate
  modified_base 20: mod_base = OTHER; note = 2'-O-methyluridine-3'-phosphate
  modified_base 21: mod_base = OTHER; note 2'-O-methylcytidine-3'-phosphate-N-[tris(GalNAc-alkyl)-amid odecanoyl)]-4-hydroxyprolinol (Hyp-(GalNAc-alkyl)3)
gagaaaggtgttcaagatgtc

SEQ ID NO: 2039 - RNA, 23 nt, synthetic construct
  source 1..23: mol_type = other RNA
  modified_base 1: mod_base = OTHER; note = 2'-O-methylguanosine-3'- phosphorothioate
  modified_base 2: mod_base = OTHER; note = 2'-fluoroadenosine-3'-phosphorothioate
  modified_base 3: mod_base = OTHER; note = 2'-O-methylcytidine-3'-phosphate
  modified_base 4: mod_base = OTHER; note = 2'-O-methyladenosine-3'-phosphate
  modified_base 5: mod_base = OTHER; note = 2'-O-methyluridine-3'-phosphate
  modified_base 6: mod_base = OTHER; note = 2'-fluorocytidine-3'-phosphate
  modified_base 7: mod_base = OTHER; note = 2'-O-methyluridine-3'-phosphate
  modified_base 8: mod_base = OTHER; note = 2'-fluorouridine-3'-phosphate
  modified_base 9: mod_base = OTHER; note = 2'-fluoroguanosine-3'-phosphate
  modified_base 10: mod_base = OTHER; note = 2'-O-methyladenosine-3'-phosphate
  modified_base 11: mod_base = OTHER; note = 2'-O-methyladenosine-3'-phosphate
  modified_base 12: mod_base = OTHER; note = 2'-O-methylcytidine-3'-phosphate
  modified_base 13: mod_base = OTHER; note = 2'-O-methyladenosine-3'-phosphate
  modified_base 14: mod_base = OTHER; note = 2'-fluorocytidine-3'-phosphate
  modified_base 15: mod_base = OTHER; note = 2'-O-methylcytidine-3'-phosphate
  modified_base 16: mod_base = OTHER; note = 2'-fluorouridine-3'-phosphate
  modified_base 17: mod_base = OTHER; note = 2'-O-methyluridine-3'-phosphate
  modified_base 18: mod_base = OTHER; note = 2'-O-methyluridine-3'-phosphate
  modified_base 19: mod_base = OTHER; note = 2'-O-methylcytidine-3'-phosphate
  modified_base 20: mod_base = OTHER; note = 2'-O-methyluridine-3'-phosphate
  modified_base 21: mod_base = OTHER; note = 2'-O-methylcytidine-3'- phosphorothioate
  modified_base 22: mod_base = OTHER; note = 2'-O-methylcytidine-3'- phosphorothioate
  modified_base 23: mod_base = OTHER; note = 2'-O-methylcytidine-3'-phosphate
gacatcttgaacacctttctccc

SEQ ID NO: 2040 - RNA, 21 nt, synthetic construct
  source 1..21: mol_type = other RNA
  modified_base 1: mod_base = OTHER; note = 2'-O-methylguanosine-3'- phosphorothioate
  modified_base 2: mod_base = OTHER; note = 2'-O-methylguanosine-3'- phosphorothioate
  modified_base 3: mod_base = OTHER; note = 2'-O-methyladenosine-3'-phosphate
  modified_base 4: mod_base = OTHER; note = 2'-O-methylguanosine-3'-phosphate
  modified_base 5: mod_base = OTHER; note = 2'-O-methyladenosine-3'-phosphate
  modified_base 6: mod_base = OTHER; note = 2'-O-methyladenosine-3'-phosphate
  modified_base 7: mod_base = OTHER; note = 2'-fluoroadenosine-3'-phosphate
  modified_base 8: mod_base = OTHER; note = 2'-O-methylguanosine-3'-phosphate
  modified_base 9: mod_base = OTHER; note = 2'-fluoroguanosine-3'-phosphate
  modified_base 10: mod_base = OTHER; note = 2'-fluorouridine-3'-phosphate
  modified_base 11: mod_base = OTHER; note = 2'-fluoroguanosine-3'-phosphate
  modified_base 12: mod_base = OTHER; note = 2'-O-methyluridine-3'-phosphate
  modified_base 13: mod_base = OTHER; note = 2'-O-methyluridine-3'-phosphate
  modified_base 14: mod_base = OTHER; note = 2'-O-methylcytidine-3'-phosphate
  modified_base 15: mod_base = OTHER; note = 2'-O-methyladenosine-3'-phosphate
  modified_base 16: mod_base = OTHER; note = 2'-O-methyladenosine-3'-phosphate
  modified_base 17: mod_base = OTHER; note = 2'-O-methylguanosine-3'-phosphate
  modified_base 18: mod_base = OTHER; note = 2'-O-methyladenosine-3'-phosphate
  modified_base 19: mod_base = OTHER; note = 2'-O-methyluridine-3'-phosphate
  modified_base 20: mod_base = OTHER; note = 2'-O-methylguanosine-3'-phosphate
  modified_base 21: mod_base = OTHER; note 2'-O-methyluridine-3'-phosphate-N-[tris(GalNAc-alkyl)-amido decanoyl)]-4-hydroxyprolinol (Hyp-(GalNAc-alkyl)3)
ggagaaaggtgttcaagatgt

SEQ ID NO: 2041 - RNA, 23 nt, synthetic construct
  source 1..23: mol_type = other RNA
  modified_base 1: mod_base = OTHER; note = 2'-O-methyladenosine-3'- phosphorothioate
  modified_base 2: mod_base = OTHER; note = 2'-fluorocytidine-3'-phosphorothioate
  modified_base 3: mod_base = OTHER; note = 2'-O-methyladenosine-3'-phosphate
  modified_base 4: mod_base = OTHER; note = 2'-O-methyluridine-3'-phosphate
  modified_base 5: mod_base = OTHER; note = 2'-O-methylcytidine-3'-phosphate
  modified_base 6: mod_base = OTHER; note = 2'-fluorouridine-3'-phosphate
  modified_base 7: mod_base = OTHER; note = 2'-O-methyluridine-3'-phosphate
  modified_base 8: mod_base = OTHER; note = 2'-fluoroguanosine-3'-phosphate
  modified_base 9: mod_base = OTHER; note = 2'-fluoroadenosine-3'-phosphate
  modified_base 10: mod_base = OTHER; note = 2'-O-methyladenosine-3'-phosphate
  modified_base 11: mod_base = OTHER; note = 2'-O-methylcytidine-3'-phosphate
  modified_base 12: mod_base = OTHER; note = 2'-O-methyladenosine-3'-phosphate
  modified_base 13: mod_base = OTHER; note = 2'-O-methylcytidine-3'-phosphate
  modified_base 14: mod_base = OTHER; note = 2'-fluorocytidine-3'-phosphate
  modified_base 15: mod_base = OTHER; note = 2'-O-methyluridine-3'-phosphate
  modified_base 16: mod_base = OTHER; note = 2'-fluorouridine-3'-phosphate
  modified_base 17: mod_base = OTHER; note = 2'-O-methyluridine-3'-phosphate
  modified_base 18: mod_base = OTHER; note = 2'-O-methylcytidine-3'-phosphate
  modified_base 19: mod_base = OTHER; note = 2'-O-methyluridine-3'-phosphate
  modified_base 20: mod_base = OTHER; note = 2'-O-methylcytidine-3'-phosphate
  modified_base 21: mod_base = OTHER; note = 2'-O-methylcytidine-3'- phosphorothioate
  modified_base 22: mod_base = OTHER; note = 2'-O-methylcytidine-3'- phosphorothioate
  modified_base 23: mod_base = OTHER; note = 2'-O-methylcytidine-3'-phosphate
acatcttgaacacctttctcccc

SEQ ID NO: 2042 - RNA, 21 nt, synthetic construct
  source 1..21: mol_type = other RNA
  modified_base 1: mod_base = OTHER; note = 2'-O-methyladenosine-3'- phosphorothioate
  modified_base 2: mod_base = OTHER; note = 2'-O-methyladenosine-3'- phosphorothioate
  modified_base 3: mod_base = OTHER; note = 2'-O-methylcytidine-3'-phosphate
  modified_base 4: mod_base = OTHER; note = 2'-O-methylcytidine-3'-phosphate
  modified_base 5: mod_base = OTHER; note = 2'-O-methylguanosine-3'-phosphate
  modified_base 6: mod_base = OTHER; note = 2'-O-methyluridine-3'-phosphate
  modified_base 7: mod_base = OTHER; note = 2'-fluorocytidine-3'-phosphate
  modified_base 8: mod_base = OTHER; note = 2'-O-methyluridine-3'-phosphate
  modified_base 9: mod_base = OTHER; note = 2'-fluoroguanosine-3'-phosphate
  modified_base 10: mod_base = OTHER; note = 2'-fluoroguanosine-3'-phosphate
  modified_base 11: mod_base = OTHER; note = 2'-fluoroadenosine-3'-phosphate
  modified_base 12: mod_base = OTHER; note = 2'-O-methyluridine-3'-phosphate
  modified_base 13: mod_base = OTHER; note = 2'-O-methylguanosine-3'-phosphate
  modified_base 14: mod_base = OTHER; note = 2'-O-methyladenosine-3'-phosphate
  modified_base 15: mod_base = OTHER; note = 2'-O-methyluridine-3'-phosphate
  modified_base 16: mod_base = OTHER; note = 2'-O-methylguanosine-3'-phosphate
  modified_base 17: mod_base = OTHER; note = 2'-O-methyluridine-3'-phosphate
  modified_base 18: mod_base = OTHER; note = 2'-O-methylguanosine-3'-phosphate
  modified_base 19: mod_base = OTHER; note = 2'-O-methylcytidine-3'-phosphate
  modified_base 20: mod_base = OTHER; note = 2'-O-methylguanosine-3'-phosphate
  modified_base 21: mod_base = OTHER; note 2'-O-methyluridine-3'-phosphate-N-[tris(GalNAc-alkyl)-amido decanoyl)]-4-hydroxyprolinol (Hyp-(GalNAc-alkyl)3)
aaccgtctggatgatgtgcgt

SEQ ID NO: 2043 - RNA, 23 nt, synthetic construct
  source 1..23: mol_type = other RNA
  modified_base 1: mod_base = OTHER; note = 2'-O-methyladenosine-3'- phosphorothioate
  modified_base 2: mod_base = OTHER; note = 2'-fluorocytidine-3'-phosphorothioate
  modified_base 3: mod_base = OTHER; note = 2'-O-methylguanosine-3'-phosphate
  modified_base 4: mod_base = OTHER; note = 2'-O-methylcytidine-3'-phosphate
  modified_base 5: mod_base = OTHER; note = 2'-O-methyladenosine-3'-phosphate
  modified_base 6: mod_base = OTHER; note = 2'-fluorocytidine-3'-phosphate
  modified_base 7: mod_base = OTHER; note = 2'-O-methyladenosine-3'-phosphate
  modified_base 8: mod_base = OTHER; note = 2'-fluorouridine-3'-phosphate
  modified_base 9: mod_base = OTHER; note = 2'-fluorocytidine-3'-phosphate
  modified_base 10: mod_base = OTHER; note = 2'-O-methyladenosine-3'-phosphate
  modified_base 11: mod_base = OTHER; note = 2'-O-methyluridine-3'-phosphate
  modified_base 12: mod_base = OTHER; note = 2'-O-methylcytidine-3'-phosphate
  modified_base 13: mod_base = OTHER; note = 2'-O-methylcytidine-3'-phosphate
  modified_base 14: mod_base = OTHER; note = 2'-fluoroadenosine-3'-phosphate
  modified_base 15: mod_base = OTHER; note = 2'-O-methylguanosine-3'-phosphate
  modified_base 16: mod_base = OTHER; note = 2'-fluoroadenosine-3'-phosphate
  modified_base 17: mod_base = OTHER; note = 2'-O-methylcytidine-3'-phosphate
  modified_base 18: mod_base = OTHER; note = 2'-O-methylguanosine-3'-phosphate
  modified_base 19: mod_base = OTHER; note = 2'-O-methylguanosine-3'-phosphate
  modified_base 20: mod_base = OTHER; note = 2'-O-methyluridine-3'-phosphate
  modified_base 21: mod_base = OTHER; note = 2'-O-methyluridine-3'-phosphorothioate
  modified_base 22: mod_base = OTHER; note = 2'-O-methylguanosine-3'- phosphorothioate
  modified_base 23: mod_base = OTHER; note = 2'-O-methylcytidine-3'-phosphate
acgcacatcatccagacggttgc

SEQ ID NO: 2044 - RNA, 21 nt, synthetic construct
  source 1..21: mol_type = other RNA
  modified_base 1: mod_base = OTHER; note = 2'-O-methyladenosine-3'- phosphorothioate
  modified_base 2: mod_base = OTHER; note = 2'-O-methylcytidine-3'- phosphorothioate
  modified_base 3: mod_base = OTHER; note = 2'-O-methylcytidine-3'-phosphate
  modified_base 4: mod_base = OTHER; note = 2'-O-methylguanosine-3'-phosphate
  modified_base 5: mod_base = OTHER; note = 2'-O-methyluridine-3'-phosphate
  modified_base 6: mod_base = OTHER; note = 2'-O-methylcytidine-3'-phosphate
  modified_base 7: mod_base = OTHER; note = 2'-fluorouridine-3'-phosphate
  modified_base 8: mod_base = OTHER; note = 2'-O-methylguanosine-3'-phosphate
  modified_base 9: mod_base = OTHER; note = 2'-fluoroguanosine-3'-phosphate
  modified_base 10: mod_base = OTHER; note = 2'-fluoroadenosine-3'-phosphate
  modified_base 11: mod_base = OTHER; note = 2'-fluorouridine-3'-phosphate
  modified_base 12: mod_base = OTHER; note = 2'-O-methylguanosine-3'-phosphate
  modified_base 13: mod_base = OTHER; note = 2'-O-methyladenosine-3'-phosphate
  modified_base 14: mod_base = OTHER; note = 2'-O-methyluridine-3'-phosphate
  modified_base 15: mod_base = OTHER; note = 2'-O-methylguanosine-3'-phosphate
  modified_base 16: mod_base = OTHER; note = 2'-O-methyluridine-3'-phosphate
  modified_base 17: mod_base = OTHER; note = 2'-O-methylguanosine-3'-phosphate
  modified_base 18: mod_base = OTHER; note = 2'-O-methylcytidine-3'-phosphate
  modified_base 19: mod_base = OTHER; note = 2'-O-methylguanosine-3'-phosphate
  modified_base 20: mod_base = OTHER; note = 2'-O-methyluridine-3'-phosphate
  modified_base 21: mod_base = OTHER; note 2'-O-methyladenosine-3'-phosphate-N-[tris(GalNAc-alkyl)-ami dodecanoyl)]-4-hydroxyprolinol (Hyp-(GalNAc-alkyl)3)
accgtctggatgatgtgcgta

SEQ ID NO: 2045 - RNA, 23 nt, synthetic construct
  source 1..23: mol_type = other RNA
  modified_base 1: mod_base = OTHER; note = 2'-O-methyluridine-3'-phosphorothioate
  modified_base 2: mod_base = OTHER; note = 2'-fluoroadenosine-3'-phosphorothioate
  modified_base 3: mod_base = OTHER; note = 2'-O-methylcytidine-3'-phosphate
  modified_base 4: mod_base = OTHER; note = 2'-O-methylguanosine-3'-phosphate
  modified_base 5: mod_base = OTHER; note = 2'-O-methylcytidine-3'-phosphate
  modified_base 6: mod_base = OTHER; note = 2'-fluoroadenosine-3'-phosphate
  modified_base 7: mod_base = OTHER; note = 2'-O-methylcytidine-3'-phosphate
  modified_base 8: mod_base = OTHER; note = 2'-fluoroadenosine-3'-phosphate
  modified_base 9: mod_base = OTHER; note = 2'-fluorouridine-3'-phosphate
  modified_base 10: mod_base = OTHER; note = 2'-O-methylcytidine-3'-phosphate
  modified_base 11: mod_base = OTHER; note = 2'-O-methyladenosine-3'-phosphate
  modified_base 12: mod_base = OTHER; note = 2'-O-methyluridine-3'-phosphate
  modified_base 13: mod_base = OTHER; note = 2'-O-methylcytidine-3'-phosphate
  modified_base 14: mod_base = OTHER; note = 2'-fluorocytidine-3'-phosphate
  modified_base 15: mod_base = OTHER; note = 2'-O-methyladenosine-3'-phosphate
  modified_base 16: mod_base = OTHER; note = 2'-fluoroguanosine-3'-phosphate
  modified_base 17: mod_base = OTHER; note = 2'-O-methyladenosine-3'-phosphate
  modified_base 18: mod_base = OTHER; note = 2'-O-methylcytidine-3'-phosphate
  modified_base 19: mod_base = OTHER; note = 2'-O-methylguanosine-3'-phosphate
  modified_base 20: mod_base = OTHER; note = 2'-O-methylguanosine-3'-phosphate
  modified_base 21: mod_base = OTHER; note = 2'-O-methyluridine-3'-phosphorothioate
  modified_base 22: mod_base = OTHER; note = 2'-O-methyluridine-3'-phosphorothioate
  modified_base 23: mod_base = OTHER; note = 2'-O-methylguanosine-3'-phosphate
tacgcacatcatccagacggttg

SEQ ID NO: 2046 - RNA, 21 nt, synthetic construct
  source 1..21: mol_type = other RNA
  modified_base 1: mod_base = OTHER; note = 2'-O-methylguanosine-3'- phosphorothioate
  modified_base 2: mod_base = OTHER; note = 2'-O-methylguanosine-3'- phosphorothioate
  modified_base 3: mod_base = OTHER; note = 2'-O-methylguanosine-3'-phosphate
  modified_base 4: mod_base = OTHER; note = 2'-O-methylcytidine-3'-phosphate
  modified_base 5: mod_base = OTHER; note = 2'-O-methyladenosine-3'-phosphate
  modified_base 6: mod_base = OTHER; note = 2'-O-methyladenosine-3'-phosphate
  modified_base 7: mod_base = OTHER; note = 2'-fluorocytidine-3'-phosphate
  modified_base 8: mod_base = OTHER; note = 2'-O-methylcytidine-3'-phosphate
  modified_base 9: mod_base = OTHER; note = 2'-fluoroguanosine-3'-phosphate
  modified_base 10: mod_base = OTHER; note = 2'-fluorouridine-3'-phosphate
  modified_base 11: mod_base = OTHER; note = 2'-fluorocytidine-3'-phosphate
  modified_base 12: mod_base = OTHER; note = 2'-O-methyluridine-3'-phosphate
  modified_base 13: mod_base = OTHER; note = 2'-O-methylguanosine-3'-phosphate
  modified_base 14: mod_base = OTHER; note = 2'-O-methylguanosine-3'-phosphate
  modified_base 15: mod_base = OTHER; note = 2'-O-methyladenosine-3'-phosphate
  modified_base 16: mod_base = OTHER; note = 2'-O-methyluridine-3'-phosphate
  modified_base 17: mod_base = OTHER; note = 2'-O-methylguanosine-3'-phosphate
  modified_base 18: mod_base = OTHER; note = 2'-O-methyladenosine-3'-phosphate
  modified_base 19: mod_base = OTHER; note = 2'-O-methyluridine-3'-phosphate
  modified_base 20: mod_base = OTHER; note = 2'-O-methylguanosine-3'-phosphate
  modified_base 21: mod_base = OTHER; note 2'-O-methyluridine-3'-phosphate-N-[tris(GalNAc-alkyl)-amido decanoyl)]-4-hydroxyprolinol (Hyp-(GalNAc-alkyl)3)
gggcaaccgtctggatgatgt

SEQ ID NO: 2047 - RNA, 23 nt, synthetic construct
  source 1..23: mol_type = other RNA
  modified_base 1: mod_base = OTHER; note = 2'-O-methyladenosine-3'- phosphorothioate
  modified_base 2: mod_base = OTHER; note = 2'-fluorocytidine-3'-phosphorothioate
  modified_base 3: mod_base = OTHER; note = 2'-O-methyladenosine-3'-phosphate
  modified_base 4: mod_base = OTHER; note = 2'-O-methyluridine-3'-phosphate
  modified_base 5: mod_base = OTHER; note = 2'-O-methylcytidine-3'-phosphate
  modified_base 6: mod_base = OTHER; note = 2'-fluoroadenosine-3'-phosphate
  modified_base 7: mod_base = OTHER; note = 2'-O-methyluridine-3'-phosphate
  modified_base 8: mod_base = OTHER; note = 2'-fluorocytidine-3'-phosphate
  modified_base 9: mod_base = OTHER; note = 2'-fluorocytidine-3'-phosphate
  modified_base 10: mod_base = OTHER; note = 2'-O-methyladenosine-3'-phosphate
  modified_base 11: mod_base = OTHER; note = 2'-O-methylguanosine-3'-phosphate
  modified_base 12: mod_base = OTHER; note = 2'-O-methyladenosine-3'-phosphate
  modified_base 13: mod_base = OTHER; note = 2'-O-methylcytidine-3'-phosphate
  modified_base 14: mod_base = OTHER; note = 2'-fluoroguanosine-3'-phosphate
  modified_base 15: mod_base = OTHER; note = 2'-O-methylguanosine-3'-phosphate
  modified_base 16: mod_base = OTHER; note = 2'-fluorouridine-3'-phosphate
  modified_base 17: mod_base = OTHER; note = 2'-O-methyluridine-3'-phosphate
  modified_base 18: mod_base = OTHER; note = 2'-O-methylguanosine-3'-phosphate
  modified_base 19: mod_base = OTHER; note = 2'-O-methylcytidine-3'-phosphate
  modified_base 20: mod_base = OTHER; note = 2'-O-methylcytidine-3'-phosphate
  modified_base 21: mod_base = OTHER; note = 2'-O-methylcytidine-3'- phosphorothioate
  modified_base 22: mod_base = OTHER; note = 2'-O-methyladenosine-3'- phosphorothioate
  modified_base 23: mod_base = OTHER; note = 2'-O-methylguanosine-3'-phosphate
acatcatccagacggttgcccag

SEQ ID NO: 2048 - RNA, 21 nt, synthetic construct
  source 1..21: mol_type = other RNA
  modified_base 1: mod_base = OTHER; note = 2'-O-methyluridine-3'-phosphorothioate
  modified_base 2: mod_base = OTHER; note = 2'-O-methylguanosine-3'- phosphorothioate
  modified_base 3: mod_base = OTHER; note = 2'-O-methylguanosine-3'-phosphate
  modified_base 4: mod_base = OTHER; note = 2'-O-methylguanosine-3'-phosphate
  modified_base 5: mod_base = OTHER; note = 2'-O-methylcytidine-3'-phosphate
  modified_base 6: mod_base = OTHER; note = 2'-O-methyladenosine-3'-phosphate
  modified_base 7: mod_base = OTHER; note = 2'-fluoroadenosine-3'-phosphate
  modified_base 8: mod_base = OTHER; note = 2'-O-methylcytidine-3'-phosphate
  modified_base 9: mod_base = OTHER; note = 2'-fluorocytidine-3'-phosphate
  modified_base 10: mod_base = OTHER; note = 2'-fluoroguanosine-3'-phosphate
  modified_base 11: mod_base = OTHER; note = 2'-fluorouridine-3'-phosphate
  modified_base 12: mod_base = OTHER; note = 2'-O-methylcytidine-3'-phosphate
  modified_base 13: mod_base = OTHER; note = 2'-O-methyluridine-3'-phosphate
  modified_base 14: mod_base = OTHER; note = 2'-O-methylguanosine-3'-phosphate
  modified_base 15: mod_base = OTHER; note = 2'-O-methylguanosine-3'-phosphate
  modified_base 16: mod_base = OTHER; note = 2'-O-methyladenosine-3'-phosphate
  modified_base 17: mod_base = OTHER; note = 2'-O-methyluridine-3'-phosphate
  modified_base 18: mod_base = OTHER; note = 2'-O-methylguanosine-3'-phosphate
  modified_base 19: mod_base = OTHER; note = 2'-O-methyladenosine-3'-phosphate
  modified_base 20: mod_base = OTHER; note = 2'-O-methyluridine-3'-phosphate
  modified_base 21: mod_base = OTHER; note 2'-O-methylguanosine-3'-phosphate-N-[tris(GalNAc-alkyl)-ami dodecanoyl)]-4-hydroxyprolinol (Hyp-(GalNAc-alkyl)3)
tgggcaaccgtctggatgatg

SEQ ID NO: 2049 - RNA, 23 nt, synthetic construct
  source 1..23: mol_type = other RNA
  modified_base 1: mod_base = OTHER; note = 2'-O-methylcytidine-3'- phosphorothioate
  modified_base 2: mod_base = OTHER; note = 2'-fluoroadenosine-3'-phosphorothioate
  modified_base 3: mod_base = OTHER; note = 2'-O-methyluridine-3'-phosphate
  modified_base 4: mod_base = OTHER; note = 2'-O-methylcytidine-3'-phosphate
  modified_base 5: mod_base = OTHER; note = 2'-O-methyladenosine-3'-phosphate
  modified_base 6: mod_base = OTHER; note = 2'-fluorouridine-3'-phosphate
  modified_base 7: mod_base = OTHER; note = 2'-O-methylcytidine-3'-phosphate
  modified_base 8: mod_base = OTHER; note = 2'-fluorocytidine-3'-phosphate
  modified_base 9: mod_base = OTHER; note = 2'-fluoroadenosine-3'-phosphate
  modified_base 10: mod_base = OTHER; note = 2'-O-methylguanosine-3'-phosphate
  modified_base 11: mod_base = OTHER; note = 2'-O-methyladenosine-3'-phosphate
  modified_base 12: mod_base = OTHER; note = 2'-O-methylcytidine-3'-phosphate
  modified_base 13: mod_base = OTHER; note = 2'-O-methylguanosine-3'-phosphate
  modified_base 14: mod_base = OTHER; note = 2'-fluoroguanosine-3'-phosphate
  modified_base 15: mod_base = OTHER; note = 2'-O-methyluridine-3'-phosphate
  modified_base 16: mod_base = OTHER; note = 2'-fluorouridine-3'-phosphate
  modified_base 17: mod_base = OTHER; note = 2'-O-methylguanosine-3'-phosphate
  modified_base 18: mod_base = OTHER; note = 2'-O-methylcytidine-3'-phosphate
  modified_base 19: mod_base = OTHER; note = 2'-O-methylcytidine-3'-phosphate
  modified_base 20: mod_base = OTHER; note = 2'-O-methylcytidine-3'-phosphate
  modified_base 21: mod_base = OTHER; note = 2'-O-methyladenosine-3'- phosphorothioate
  modified_base 22: mod_base = OTHER; note = 2'-O-methylguanosine-3'- phosphorothioate
  modified_base 23: mod_base = OTHER; note = 2'-O-methylguanosine-3'-phosphate
catcatccagacggttgcccagg

SEQ ID NO: 2050 - RNA, 21 nt, synthetic construct
  source 1..21: mol_type = other RNA
  modified_base 1: mod_base = OTHER; note = 2'-O-methylguanosine-3'- phosphorothioate
  modified_base 2: mod_base = OTHER; note = 2'-O-methyladenosine-3'- phosphorothioate
  modified_base 3: mod_base = OTHER; note = 2'-O-methyladenosine-3'-phosphate
  modified_base 4: mod_base = OTHER; note = 2'-O-methyladenosine-3'-phosphate
  modified_base 5: mod_base = OTHER; note = 2'-O-methylcytidine-3'-phosphate
  modified_base 6: mod_base = OTHER; note = 2'-O-methyluridine-3'-phosphate
  modified_base 7: mod_base = OTHER; note = 2'-fluorouridine-3'-phosphate
  modified_base 8: mod_base = OTHER; note = 2'-O-methyluridine-3'-phosphate
  modified_base 9: mod_base = OTHER; note = 2'-fluoroguanosine-3'-phosphate
  modified_base 10: mod_base = OTHER; note = 2'-fluoroguanosine-3'-phosphate
  modified_base 11: mod_base = OTHER; note = 2'-fluorocytidine-3'-phosphate
  modified_base 12: mod_base = OTHER; note = 2'-O-methyluridine-3'-phosphate
  modified_base 13: mod_base = OTHER; note = 2'-O-methylguanosine-3'-phosphate
  modified_base 14: mod_base = OTHER; note = 2'-O-methyladenosine-3'-phosphate
  modified_base 15: mod_base = OTHER; note = 2'-O-methyluridine-3'-phosphate
  modified_base 16: mod_base = OTHER; note = 2'-O-methyladenosine-3'-phosphate
  modified_base 17: mod_base = OTHER; note = 2'-O-methyladenosine-3'-phosphate
  modified_base 18: mod_base = OTHER; note = 2'-O-methyluridine-3'-phosphate
  modified_base 19: mod_base = OTHER; note = 2'-O-methyladenosine-3'-phosphate
  modified_base 20: mod_base = OTHER; note = 2'-O-methyluridine-3'-phosphate
  modified_base 21: mod_base = OTHER; note 2'-O-methyluridine-3'-phosphate-N-[tris(GalNAc-alkyl)-amido decanoyl)]-4-hydroxyprolinol (Hyp-(GalNAc-alkyl)3)
gaaactttggctgataatatt

SEQ ID NO: 2051 - RNA, 23 nt, synthetic construct
  source 1..23: mol_type = other RNA
  modified_base 1: mod_base = OTHER; note = 2'-O-methyladenosine-3'- phosphorothioate
  modified_base 2: mod_base = OTHER; note = 2'-fluoroadenosine-3'-phosphorothioate
  modified_base 3: mod_base = OTHER; note = 2'-O-methyluridine-3'-phosphate
  modified_base 4: mod_base = OTHER; note = 2'-O-methyladenosine-3'-phosphate
  modified_base 5: mod_base = OTHER; note = 2'-O-methyluridine-3'-phosphate
  modified_base 6: mod_base = OTHER; note = 2'-fluorouridine-3'-phosphate
  modified_base 7: mod_base = OTHER; note = 2'-O-methyladenosine-3'-phosphate
  modified_base 8: mod_base = OTHER; note = 2'-fluorouridine-3'-phosphate
  modified_base 9: mod_base = OTHER; note = 2'-fluorocytidine-3'-phosphate
  modified_base 10: mod_base = OTHER; note = 2'-O-methyladenosine-3'-phosphate
  modified_base 11: mod_base = OTHER; note = 2'-O-methylguanosine-3'-phosphate
  modified_base 12: mod_base = OTHER; note = 2'-O-methylcytidine-3'-phosphate
  modified_base 13: mod_base = OTHER; note = 2'-O-methylcytidine-3'-phosphate
  modified_base 14: mod_base = OTHER; note = 2'-fluoroadenosine-3'-phosphate
  modified_base 15: mod_base = OTHER; note = 2'-O-methyladenosine-3'-phosphate
  modified_base 16: mod_base = OTHER; note = 2'-fluoroadenosine-3'-phosphate
  modified_base 17: mod_base = OTHER; note = 2'-O-methylguanosine-3'-phosphate
  modified_base 18: mod_base = OTHER; note = 2'-O-methyluridine-3'-phosphate
  modified_base 19: mod_base = OTHER; note = 2'-O-methyluridine-3'-phosphate
  modified_base 20: mod_base = OTHER; note = 2'-O-methyluridine-3'-phosphate
  modified_base 21: mod_base = OTHER; note = 2'-O-methylcytidine-3'- phosphorothioate
  modified_base 22: mod_base = OTHER; note = 2'-O-methyluridine-3'-phosphorothioate
  modified_base 23: mod_base = OTHER; note = 2'-O-methyluridine-3'-phosphate
aatattatcagccaaagtttctt

SEQ ID NO: 2052 - RNA, 21 nt, synthetic construct
  source 1..21: mol_type = other RNA
  modified_base 1: mod_base = OTHER; note = 2'-O-methyladenosine-3'- phosphorothioate
  modified_base 2: mod_base = OTHER; note = 2'-O-methyladenosine-3'- phosphorothioate
  modified_base 3: mod_base = OTHER; note = 2'-O-methyladenosine-3'-phosphate
  modified_base 4: mod_base = OTHER; note = 2'-O-methylcytidine-3'-phosphate
  modified_base 5: mod_base = OTHER; note = 2'-O-methyluridine-3'-phosphate
  modified_base 6: mod_base = OTHER; note = 2'-O-methyluridine-3'-phosphate
  modified_base 7: mod_base = OTHER; note = 2'-fluorouridine-3'-phosphate
  modified_base 8: mod_base = OTHER; note = 2'-O-methylguanosine-3'-phosphate
  modified_base 9: mod_base = OTHER; note = 2'-fluoroguanosine-3'-phosphate
  modified_base 10: mod_base = OTHER; note = 2'-fluorocytidine-3'-phosphate
  modified_base 11: mod_base = OTHER; note = 2'-fluorouridine-3'-phosphate
  modified_base 12: mod_base = OTHER; note = 2'-O-methylguanosine-3'-phosphate
  modified_base 13: mod_base = OTHER; note = 2'-O-methyladenosine-3'-phosphate
  modified_base 14: mod_base = OTHER; note = 2'-O-methyluridine-3'-phosphate
  modified_base 15: mod_base = OTHER; note = 2'-O-methyladenosine-3'-phosphate
  modified_base 16: mod_base = OTHER; note = 2'-O-methyladenosine-3'-phosphate
  modified_base 17: mod_base = OTHER; note = 2'-O-methyluridine-3'-phosphate
  modified_base 18: mod_base = OTHER; note = 2'-O-methyladenosine-3'-phosphate
  modified_base 19: mod_base = OTHER; note = 2'-O-methyluridine-3'-phosphate
  modified_base 20: mod_base = OTHER; note = 2'-O-methyluridine-3'-phosphate
  modified_base 21: mod_base = OTHER; note 2'-O-methylguanosine-3'-phosphate-N-[tris(GalNAc-alkyl)-ami dodecanoyl)]-4-hydroxyprolinol (Hyp-(GalNAc-alkyl)3)
aaactttggctgataatattg

SEQ ID NO: 2053 - RNA, 23 nt, synthetic construct
  source 1..23: mol_type = other RNA
  modified_base 1: mod_base = OTHER; note = 2'-O-methylcytidine-3'- phosphorothioate
  modified_base 2: mod_base = OTHER; note = 2'-fluoroadenosine-3'-phosphorothioate
  modified_base 3: mod_base = OTHER; note = 2'-O-methyladenosine-3'-phosphate
  modified_base 4: mod_base = OTHER; note = 2'-O-methyluridine-3'-phosphate
  modified_base 5: mod_base = OTHER; note = 2'-O-methyladenosine-3'-phosphate
  modified_base 6: mod_base = OTHER; note = 2'-fluorouridine-3'-phosphate
  modified_base 7: mod_base = OTHER; note = 2'-O-methyluridine-3'-phosphate
  modified_base 8: mod_base = OTHER; note = 2'-fluoroadenosine-3'-phosphate
  modified_base 9: mod_base = OTHER; note = 2'-fluorouridine-3'-phosphate
  modified_base 10: mod_base = OTHER; note = 2'-O-methylcytidine-3'-phosphate
  modified_base 11: mod_base = OTHER; note = 2'-O-methyladenosine-3'-phosphate
  modified_base 12: mod_base = OTHER; note = 2'-O-methylguanosine-3'-phosphate
  modified_base 13: mod_base = OTHER; note = 2'-O-methylcytidine-3'-phosphate
  modified_base 14: mod_base = OTHER; note = 2'-fluorocytidine-3'-phosphate
  modified_base 15: mod_base = OTHER; note = 2'-O-methyladenosine-3'-phosphate
  modified_base 16: mod_base = OTHER; note = 2'-fluoroadenosine-3'-phosphate
  modified_base 17: mod_base = OTHER; note = 2'-O-methyladenosine-3'-phosphate
  modified_base 18: mod_base = OTHER; note = 2'-O-methylguanosine-3'-phosphate
  modified_base 19: mod_base = OTHER; note = 2'-O-methyluridine-3'-phosphate
  modified_base 20: mod_base = OTHER; note = 2'-O-methyluridine-3'-phosphate
  modified_base 21: mod_base = OTHER; note = 2'-O-methyluridine-3'-phosphorothioate
  modified_base 22: mod_base = OTHER; note = 2'-O-methylcytidine-3'- phosphorothioate
  modified_base 23: mod_base = OTHER; note = 2'-O-methyluridine-3'-phosphate
caatattatcagccaaagtttct

SEQ ID NO: 2054 - RNA, 21 nt, synthetic construct
  source 1..21: mol_type = other RNA
  modified_base 1: mod_base = OTHER; note = 2'-O-methyluridine-3'-phosphorothioate
  modified_base 2: mod_base = OTHER; note = 2'-O-methylguanosine-3'- phosphorothioate
  modified_base 3: mod_base = OTHER; note = 2'-O-methyladenosine-3'-phosphate
  modified_base 4: mod_base = OTHER; note = 2'-O-methyladenosine-3'-phosphate
  modified_base 5: mod_base = OTHER; note = 2'-O-methylguanosine-3'-phosphate
  modified_base 6: mod_base = OTHER; note = 2'-O-methyladenosine-3'-phosphate
  modified_base 7: mod_base = OTHER; note = 2'-fluoroadenosine-3'-phosphate
  modified_base 8: mod_base = OTHER; note = 2'-O-methyladenosine-3'-phosphate
  modified_base 9: mod_base = OTHER; note = 2'-fluorocytidine-3'-phosphate
  modified_base 10: mod_base = OTHER; note = 2'-fluorouridine-3'-phosphate
  modified_base 11: mod_base = OTHER; note = 2'-fluorouridine-3'-phosphate
  modified_base 12: mod_base = OTHER; note = 2'-O-methyluridine-3'-phosphate
  modified_base 13: mod_base = OTHER; note = 2'-O-methylguanosine-3'-phosphate
  modified_base 14: mod_base = OTHER; note = 2'-O-methylguanosine-3'-phosphate
  modified_base 15: mod_base = OTHER; note = 2'-O-methylcytidine-3'-phosphate
  modified_base 16: mod_base = OTHER; note = 2'-O-methyluridine-3'-phosphate
  modified_base 17: mod_base = OTHER; note = 2'-O-methylguanosine-3'-phosphate
  modified_base 18: mod_base = OTHER; note = 2'-O-methyladenosine-3'-phosphate
  modified_base 19: mod_base = OTHER; note = 2'-O-methyluridine-3'-phosphate
  modified_base 20: mod_base = OTHER; note = 2'-O-methyladenosine-3'-phosphate
  modified_base 21: mod_base = OTHER; note 2'-O-methyladenosine-3'-phosphate-N-[tris(GalNAc-alkyl)-ami dodecanoyl)]-4-hydroxyprolinol (Hyp-(GalNAc-alkyl)3)
tgaagaaactttggctgataa

SEQ ID NO: 2055 - RNA, 23 nt, synthetic construct
  source 1..23: mol_type = other RNA
  modified_base 1: mod_base = OTHER; note = 2'-O-methyluridine-3'-phosphorothioate
  modified_base 2: mod_base = OTHER; note = 2'-fluorouridine -3'-phosphorothioate
  modified_base 3: mod_base = OTHER; note = 2'-O-methyladenosine-3'-phosphate
  modified_base 4: mod_base = OTHER; note = 2'-O-methyluridine-3'-phosphate
  modified_base 5: mod_base = OTHER; note = 2'-O-methylcytidine-3'-phosphate
  modified_base 6: mod_base = OTHER; note = 2'-fluoroadenosine-3'-phosphate
  modified_base 7: mod_base = OTHER; note = 2'-O-methylguanosine-3'-phosphate
  modified_base 8: mod_base = OTHER; note = 2'-fluorocytidine-3'-phosphate
  modified_base 9: mod_base = OTHER; note = 2'-fluorocytidine-3'-phosphate
  modified_base 10: mod_base = OTHER; note = 2'-O-methyladenosine-3'-phosphate
  modified_base 11: mod_base = OTHER; note = 2'-O-methyladenosine-3'-phosphate
  modified_base 12: mod_base = OTHER; note = 2'-O-methyladenosine-3'-phosphate
  modified_base 13: mod_base = OTHER; note = 2'-O-methylguanosine-3'-phosphate
  modified_base 14: mod_base = OTHER; note = 2'-fluorouridine-3'-phosphate
  modified_base 15: mod_base = OTHER; note = 2'-O-methyluridine-3'-phosphate
  modified_base 16: mod_base = OTHER; note = 2'-fluorouridine-3'-phosphate
  modified_base 17: mod_base = OTHER; note = 2'-O-methylcytidine-3'-phosphate
  modified_base 18: mod_base = OTHER; note = 2'-O-methyluridine-3'-phosphate
  modified_base 19: mod_base = OTHER; note = 2'-O-methyluridine-3'-phosphate
  modified_base 20: mod_base = OTHER; note = 2'-O-methylcytidine-3'-phosphate
  modified_base 21: mod_base = OTHER; note = 2'-O-methyladenosine-3'- phosphorothioate
  modified_base 22: mod_base = OTHER; note = 2'-O-methyluridine-3'-phosphorothioate
  modified_base 23: mod_base = OTHER; note = 2'-O-methylcytidine-3'-phosphate
ttatcagccaaagtttcttcatc

SEQ ID NO: 2056 - RNA, 21 nt, synthetic construct
  source 1..21: mol_type = other RNA
  modified_base 1: mod_base = OTHER; note = 2'-O-methyladenosine-3'- phosphorothioate
  modified_base 2: mod_base = OTHER; note = 2'-O-methyluridine-3'-phosphorothioate
  modified_base 3: mod_base = OTHER; note = 2'-O-methylguanosine-3'-phosphate
  modified_base 4: mod_base = OTHER; note = 2'-O-methyladenosine-3'-phosphate
  modified_base 5: mod_base = OTHER; note = 2'-O-methyladenosine-3'-phosphate
  modified_base 6: mod_base = OTHER; note = 2'-O-methylguanosine-3'-phosphate
  modified_base 7: mod_base = OTHER; note = 2'-fluoroadenosine-3'-phosphate
  modified_base 8: mod_base = OTHER; note = 2'-O-methyladenosine-3'-phosphate
  modified_base 9: mod_base = OTHER; note = 2'-fluoroadenosine-3'-phosphate
  modified_base 10: mod_base = OTHER; note = 2'-fluorocytidine-3'-phosphate
  modified_base 11: mod_base = OTHER; note = 2'-fluorouridine-3'-phosphate
  modified_base 12: mod_base = OTHER; note = 2'-O-methyluridine-3'-phosphate
  modified_base 13: mod_base = OTHER; note = 2'-O-methyluridine-3'-phosphate
  modified_base 14: mod_base = OTHER; note = 2'-O-methylguanosine-3'-phosphate
  modified_base 15: mod_base = OTHER; note = 2'-O-methylguanosine-3'-phosphate
  modified_base 16: mod_base = OTHER; note = 2'-O-methylcytidine-3'-phosphate
  modified_base 17: mod_base = OTHER; note = 2'-O-methyluridine-3'-phosphate
  modified_base 18: mod_base = OTHER; note = 2'-O-methylguanosine-3'-phosphate
  modified_base 19: mod_base = OTHER; note = 2'-O-methyladenosine-3'-phosphate
  modified_base 20: mod_base = OTHER; note = 2'-O-methyluridine-3'-phosphate
  modified_base 21: mod_base = OTHER; note 2'-O-methyladenosine-3'-phosphate-N-[tris(GalNAc-alkyl)-ami dodecanoyl)]-4-hydroxyprolinol (Hyp-(GalNAc-alkyl)3)
atgaagaaactttggctgata

SEQ ID NO: 2057 - RNA, 23 nt, synthetic construct
  source 1..23: mol_type = other RNA
  modified_base 1: mod_base = OTHER; note = 2'-O-methyluridine-3'-phosphorothioate
  modified_base 2: mod_base = OTHER; note = 2'-fluoroadenosine-3'-phosphorothioate
  modified_base 3: mod_base = OTHER; note = 2'-O-methyluridine-3'-phosphate
  modified_base 4: mod_base = OTHER; note = 2'-O-methylcytidine-3'-phosphate
  modified_base 5: mod_base = OTHER; note = 2'-O-methyladenosine-3'-phosphate
  modified_base 6: mod_base = OTHER; note = 2'-fluoroguanosine-3'-phosphate
  modified_base 7: mod_base = OTHER; note = 2'-O-methylcytidine-3'-phosphate
  modified_base 8: mod_base = OTHER; note = 2'-fluorocytidine-3'-phosphate
  modified_base 9: mod_base = OTHER; note = 2'-fluoroadenosine-3'-phosphate
  modified_base 10: mod_base = OTHER; note = 2'-O-methyladenosine-3'-phosphate
  modified_base 11: mod_base = OTHER; note = 2'-O-methyladenosine-3'-phosphate
  modified_base 12: mod_base = OTHER; note = 2'-O-methylguanosine-3'-phosphate
  modified_base 13: mod_base = OTHER; note = 2'-O-methyluridine-3'-phosphate
  modified_base 14: mod_base = OTHER; note = 2'-fluorouridine-3'-phosphate
  modified_base 15: mod_base = OTHER; note = 2'-O-methyluridine-3'-phosphate
  modified_base 16: mod_base = OTHER; note = 2'-fluorocytidine-3'-phosphate
  modified_base 17: mod_base = OTHER; note = 2'-O-methyluridine-3'-phosphate
  modified_base 18: mod_base = OTHER; note = 2'-O-methyluridine-3'-phosphate
  modified_base 19: mod_base = OTHER; note = 2'-O-methylcytidine-3'-phosphate
  modified_base 20: mod_base = OTHER; note = 2'-O-methyladenosine-3'-phosphate
  modified_base 21: mod_base = OTHER; note = 2'-O-methyluridine-3'-phosphorothioate
  modified_base 22: mod_base = OTHER; note = 2'-O-methylcytidine-3'- phosphorothioate
  modified_base 23: mod_base = OTHER; note = 2'-O-methyladenosine-3'-phosphate
tatcagccaaagtttcttcatca

SEQ ID NO: 2058 - RNA, 21 nt, synthetic construct
  source 1..21: mol_type = other RNA
  modified_base 1: mod_base = OTHER; note = 2'-O-methyladenosine-3'- phosphorothioate
  modified_base 2: mod_base = OTHER; note = 2'-O-methyladenosine-3'- phosphorothioate
  modified_base 3: mod_base = OTHER; note = 2'-O-methyladenosine-3'-phosphate
  modified_base 4: mod_base = OTHER; note = 2'-O-methylguanosine-3'-phosphate
  modified_base 5: mod_base = OTHER; note = 2'-O-methylguanosine-3'-phosphate
  modified_base 6: mod_base = OTHER; note = 2'-O-methyluridine-3'-phosphate
  modified_base 7: mod_base = OTHER; note = 2'-fluoroguanosine-3'-phosphate
  modified_base 8: mod_base = OTHER; note = 2'-O-methyluridine-3'-phosphate
  modified_base 9: mod_base = OTHER; note = 2'-fluorouridine-3'-phosphate
  modified_base 10: mod_base = OTHER; note = 2'-fluorocytidine-3'-phosphate
  modified_base 11: mod_base = OTHER; note = 2'-fluoroadenosine-3'-phosphate
  modified_base 12: mod_base = OTHER; note = 2'-O-methyladenosine-3'-phosphate
  modified_base 13: mod_base = OTHER; note = 2'-O-methylguanosine-3'-phosphate
  modified_base 14: mod_base = OTHER; note = 2'-O-methyladenosine-3'-phosphate
  modified_base 15: mod_base = OTHER; note = 2'-O-methyluridine-3'-phosphate
  modified_base 16: mod_base = OTHER; note = 2'-O-methylguanosine-3'-phosphate
  modified_base 17: mod_base = OTHER; note = 2'-O-methyluridine-3'-phosphate
  modified_base 18: mod_base = OTHER; note = 2'-O-methylcytidine-3'-phosphate
  modified_base 19: mod_base = OTHER; note = 2'-O-methylcytidine-3'-phosphate
  modified_base 20: mod_base = OTHER; note = 2'-O-methyluridine-3'-phosphate
  modified_base 21: mod_base = OTHER; note 2'-O-methylcytidine-3'-phosphate-N-[tris(GalNAc-alkyl)-amid odecanoyl)]-4-hydroxyprolinol (Hyp-(GalNAc-alkyl)3)
aaaggtgttcaagatgtcctc

SEQ ID NO: 2059 - RNA, 23 nt, synthetic construct
  source 1..23: mol_type = other RNA
  modified_base 1: mod_base = OTHER; note = 2'-O-methylguanosine-3'- phosphorothioate
  modified_base 2: mod_base = OTHER; note = 2'-fluoroadenosine-3'-phosphorothioate
  modified_base 3: mod_base = OTHER; note = 2'-O-methylguanosine-3'-phosphate
  modified_base 4: mod_base = OTHER; note = 2'-O-methylguanosine-3'-phosphate
  modified_base 5: mod_base = OTHER; note = 2'-O-methyladenosine-3'-phosphate
  modified_base 6: mod_base = OTHER; note = 2'-fluorocytidine-3'-phosphate
  modified_base 7: mod_base = OTHER; note = 2'-O-methyladenosine-3'-phosphate
  modified_base 8: mod_base = OTHER; note = 2'-fluorouridine-3'-phosphate
  modified_base 9: mod_base = OTHER; note = 2'-fluorocytidine-3'-phosphate
  modified_base 10: mod_base = OTHER; note = 2'-O-methyluridine-3'-phosphate
  modified_base 11: mod_base = OTHER; note = 2'-O-methyluridine-3'-phosphate
  modified_base 12: mod_base = OTHER; note = 2'-O-methylguanosine-3'-phosphate
  modified_base 13: mod_base = OTHER; note = 2'-O-methyladenosine-3'-phosphate
  modified_base 14: mod_base = OTHER; note = 2'-fluoroadenosine-3'-phosphate
  modified_base 15: mod_base = OTHER; note = 2'-O-methylcytidine-3'-phosphate
  modified_base 16: mod_base = OTHER; note = 2'-fluoroadenosine-3'-phosphate
  modified_base 17: mod_base = OTHER; note = 2'-O-methylcytidine-3'-phosphate
  modified_base 18: mod_base = OTHER; note = 2'-O-methylcytidine-3'-phosphate
  modified_base 19: mod_base = OTHER; note = 2'-O-methyluridine-3'-phosphate
  modified_base 20: mod_base = OTHER; note = 2'-O-methyluridine-3'-phosphate
  modified_base 21: mod_base = OTHER; note = 2'-O-methyluridine-3'-phosphorothioate
  modified_base 22: mod_base = OTHER; note = 2'-O-methylcytidine-3'- phosphorothioate
  modified_base 23: mod_base = OTHER; note = 2'-O-methyluridine-3'-phosphate
gaggacatcttgaacacctttct

SEQ ID NO: 2060 - RNA, 21 nt, synthetic construct
  source 1..21: mol_type = other RNA
  modified_base 1: mod_base = OTHER; note = 2'-O-methyladenosine-3'- phosphorothioate
  modified_base 2: mod_base = OTHER; note = 2'-O-methyladenosine-3'- phosphorothioate
  modified_base 3: mod_base = OTHER; note = 2'-O-methylguanosine-3'-phosphate
  modified_base 4: mod_base = OTHER; note = 2'-O-methylguanosine-3'-phosphate
  modified_base 5: mod_base = OTHER; note = 2'-O-methyluridine-3'-phosphate
  modified_base 6: mod_base = OTHER; note = 2'-O-methylguanosine-3'-phosphate
  modified_base 7: mod_base = OTHER; note = 2'-fluorouridine-3'-phosphate
  modified_base 8: mod_base = OTHER; note = 2'-O-methyluridine-3'-phosphate
  modified_base 9: mod_base = OTHER; note = 2'-fluorocytidine-3'-phosphate
  modified_base 10: mod_base = OTHER; note = 2'-fluoroadenosine-3'-phosphate
  modified_base 11: mod_base = OTHER; note = 2'-fluoroadenosine-3'-phosphate
  modified_base 12: mod_base = OTHER; note = 2'-O-methylguanosine-3'-phosphate
  modified_base 13: mod_base = OTHER; note = 2'-O-methyladenosine-3'-phosphate
  modified_base 14: mod_base = OTHER; note = 2'-O-methyluridine-3'-phosphate
  modified_base 15: mod_base = OTHER; note = 2'-O-methylguanosine-3'-phosphate
  modified_base 16: mod_base = OTHER; note = 2'-O-methyluridine-3'-phosphate
  modified_base 17: mod_base = OTHER; note = 2'-O-methylcytidine-3'-phosphate
  modified_base 18: mod_base = OTHER; note = 2'-O-methylcytidine-3'-phosphate
  modified_base 19: mod_base = OTHER; note = 2'-O-methyluridine-3'-phosphate
  modified_base 20: mod_base = OTHER; note = 2'-O-methylcytidine-3'-phosphate
  modified_base 21: mod_base = OTHER; note 2'-O-methylguanosine-3'-phosphate-N-[tris(GalNAc-alkyl)-ami dodecanoyl)]-4-hydroxyprolinol (Hyp-(GalNAc-alkyl)3)
aaggtgttcaagatgtcctcg

SEQ ID NO: 2061 - RNA, 23 nt, synthetic construct
  source 1..23: mol_type = other RNA
  modified_base 1: mod_base = OTHER; note = 2'-O-methylcytidine-3'- phosphorothioate
  modified_base 2: mod_base = OTHER; note = 2'-fluoroguanosine-3'-phosphorothioate
  modified_base 3: mod_base = OTHER; note = 2'-O-methyladenosine-3'-phosphate
  modified_base 4: mod_base = OTHER; note = 2'-O-methylguanosine-3'-phosphate
  modified_base 5: mod_base = OTHER; note = 2'-O-methylguanosine-3'-phosphate
  modified_base 6: mod_base = OTHER; note = 2'-fluoroadenosine-3'-phosphate
  modified_base 7: mod_base = OTHER; note = 2'-O-methylcytidine-3'-phosphate
  modified_base 8: mod_base = OTHER; note = 2'-fluoroadenosine-3'-phosphate
  modified_base 9: mod_base = OTHER; note = 2'-fluorouridine-3'-phosphate
  modified_base 10: mod_base = OTHER; note = 2'-O-methylcytidine-3'-phosphate
  modified_base 11: mod_base = OTHER; note = 2'-O-methyluridine-3'-phosphate
  modified_base 12: mod_base = OTHER; note = 2'-O-methyluridine-3'-phosphate
  modified_base 13: mod_base = OTHER; note = 2'-O-methylguanosine-3'-phosphate
  modified_base 14: mod_base = OTHER; note = 2'-fluoroadenosine-3'-phosphate
  modified_base 15: mod_base = OTHER; note = 2'-O-methyladenosine-3'-phosphate
  modified_base 16: mod_base = OTHER; note = 2'-fluorocytidine-3'-phosphate
  modified_base 17: mod_base = OTHER; note = 2'-O-methyladenosine-3'-phosphate
  modified_base 18: mod_base = OTHER; note = 2'-O-methylcytidine-3'-phosphate
  modified_base 19: mod_base = OTHER; note = 2'-O-methylcytidine-3'-phosphate
  modified_base 20: mod_base = OTHER; note = 2'-O-methyluridine-3'-phosphate
  modified_base 21: mod_base = OTHER; note = 2'-O-methyluridine-3'-phosphorothioate
  modified_base 22: mod_base = OTHER; note = 2'-O-methyluridine-3'-phosphorothioate
  modified_base 23: mod_base = OTHER; note = 2'-O-methylcytidine-3'-phosphate
cgaggacatcttgaacacctttc

SEQ ID NO: 2062 - RNA, 21 nt, synthetic construct
  source 1..21: mol_type = other RNA
  modified_base 1: mod_base = OTHER; note = 2'-O-methylguanosine-3'- phosphorothioate
  modified_base 2: mod_base = OTHER; note = 2'-O-methylguanosine-3'- phosphorothioate
  modified_base 3: mod_base = OTHER; note = 2'-O-methyladenosine-3'-phosphate
  modified_base 4: mod_base = OTHER; note = 2'-O-methylguanosine-3'-phosphate
  modified_base 5: mod_base = OTHER; note = 2'-O-methyladenosine-3'-phosphate
  modified_base 6: mod_base = OTHER; note = 2'-O-methyladenosine-3'-phosphate
  modified_base 7: mod_base = OTHER; note = 2'-fluoroadenosine-3'-phosphate
  modified_base 8: mod_base = OTHER; note = 2'-O-methylguanosine-3'-phosphate
  modified_base 9: mod_base = OTHER; note = 2'-fluoroguanosine-3'-phosphate
  modified_base 10: mod_base = OTHER; note = 2'-fluorouridine-3'-phosphate
  modified_base 11: mod_base = OTHER; note = 2'-fluoroguanosine-3'-phosphate
  modified_base 12: mod_base = OTHER; note = 2'-O-methyluridine-3'-phosphate
  modified_base 13: mod_base = OTHER; note = 2'-O-methyluridine-3'-phosphate
  modified_base 14: mod_base = OTHER; note = 2'-O-methylcytidine-3'-phosphate
  modified_base 15: mod_base = OTHER; note = 2'-O-methyladenosine-3'-phosphate
  modified_base 16: mod_base = OTHER; note = 2'-O-methyladenosine-3'-phosphate
  modified_base 17: mod_base = OTHER; note = 2'-O-methylguanosine-3'-phosphate
  modified_base 18: mod_base = OTHER; note = 2'-O-methyladenosine-3'-phosphate
  modified_base 19: mod_base = OTHER; note = 2'-O-methyluridine-3'-phosphate
  modified_base 20: mod_base = OTHER; note = 2'-O-methylguanosine-3'-phosphate
  modified_base 21: mod_base = OTHER; note 2'-O-methyluridine-3'-phosphate-N-[tris(GalNAc-alkyl)-amido decanoyl)]-4-hydroxyprolinol (Hyp-(GalNAc-alkyl)3)
ggagaaaggtgttcaagatgt

SEQ ID NO: 2063 - RNA, 23 nt, synthetic construct
  source 1..23: mol_type = other RNA
  modified_base 1: mod_base = OTHER; note = 2'-O-methyladenosine-3'- phosphorothioate
  modified_base 2: mod_base = OTHER; note = 2'-fluorocytidine-3'-phosphorothioate
  modified_base 3: mod_base = OTHER; note = 2'-O-methyladenosine-3'-phosphate
  modified_base 4: mod_base = OTHER; note = 2'-O-methyluridine-3'-phosphate
  modified_base 5: mod_base = OTHER; note = 2'-O-methylcytidine-3'-phosphate
  modified_base 6: mod_base = OTHER; note = 2'-fluorouridine-3'-phosphate
  modified_base 7: mod_base = OTHER; note = 2'-O-methyluridine-3'-phosphate
  modified_base 8: mod_base = OTHER; note = 2'-fluoroguanosine-3'-phosphate
  modified_base 9: mod_base = OTHER; note = 2'-fluoroadenosine-3'-phosphate
  modified_base 10: mod_base = OTHER; note = 2'-O-methyladenosine-3'-phosphate
  modified_base 11: mod_base = OTHER; note = 2'-O-methylcytidine-3'-phosphate
  modified_base 12: mod_base = OTHER; note = 2'-O-methyladenosine-3'-phosphate
  modified_base 13: mod_base = OTHER; note = 2'-O-methylcytidine-3'-phosphate
  modified_base 14: mod_base = OTHER; note = 2'-fluorocytidine-3'-phosphate
  modified_base 15: mod_base = OTHER; note = 2'-O-methyluridine-3'-phosphate
  modified_base 16: mod_base = OTHER; note = 2'-fluorouridine-3'-phosphate
  modified_base 17: mod_base = OTHER; note = 2'-O-methyluridine-3'-phosphate
  modified_base 18: mod_base = OTHER; note = 2'-O-methylcytidine-3'-phosphate
  modified_base 19: mod_base = OTHER; note = 2'-O-methyluridine-3'-phosphate
  modified_base 20: mod_base = OTHER; note = 2'-O-methylcytidine-3'-phosphate
  modified_base 21: mod_base = OTHER; note = 2'-O-methylcytidine-3'- phosphorothioate
  modified_base 22: mod_base = OTHER; note = 2'-O-methylcytidine-3'- phosphorothioate
  modified_base 23: mod_base = OTHER; note = 2'-O-methylcytidine-3'-phosphate
acatcttgaacacctttctcccc

SEQ ID NO: 2064 - RNA, 21 nt, synthetic construct
  source 1..21: mol_type = other RNA
  modified_base 1: mod_base = OTHER; note = 2'-O-methylguanosine-3'- phosphorothioate
  modified_base 2: mod_base = OTHER; note = 2'-O-methylguanosine-3'- phosphorothioate
  modified_base 3: mod_base = OTHER; note = 2'-O-methylguanosine-3'-phosphate
  modified_base 4: mod_base = OTHER; note = 2'-O-methyladenosine-3'-phosphate
  modified_base 5: mod_base = OTHER; note = 2'-O-methylguanosine-3'-phosphate
  modified_base 6: mod_base = OTHER; note = 2'-O-methyladenosine-3'-phosphate
  modified_base 7: mod_base = OTHER; note = 2'-fluoroadenosine-3'-phosphate
  modified_base 8: mod_base = OTHER; note = 2'-O-methyladenosine-3'-phosphate
  modified_base 9: mod_base = OTHER; note = 2'-fluoroguanosine-3'-phosphate
  modified_base 10: mod_base = OTHER; note = 2'-fluoroguanosine-3'-phosphate
  modified_base 11: mod_base = OTHER; note = 2'-fluorouridine-3'-phosphate
  modified_base 12: mod_base = OTHER; note = 2'-O-methylguanosine-3'-phosphate
  modified_base 13: mod_base = OTHER; note = 2'-O-methyluridine-3'-phosphate
  modified_base 14: mod_base = OTHER; note = 2'-O-methyluridine-3'-phosphate
  modified_base 15: mod_base = OTHER; note = 2'-O-methylcytidine-3'-phosphate
  modified_base 16: mod_base = OTHER; note = 2'-O-methyladenosine-3'-phosphate
  modified_base 17: mod_base = OTHER; note = 2'-O-methyladenosine-3'-phosphate
  modified_base 18: mod_base = OTHER; note = 2'-O-methylguanosine-3'-phosphate
  modified_base 19: mod_base = OTHER; note = 2'-O-methyladenosine-3'-phosphate
  modified_base 20: mod_base = OTHER; note = 2'-O-methyluridine-3'-phosphate
  modified_base 21: mod_base = OTHER; note 2'-O-methylguanosine-3'-phosphate-N-[tris(GalNAc-alkyl)-ami dodecanoyl)]-4-hydroxyprolinol (Hyp-(GalNAc-alkyl)3)
gggagaaaggtgttcaagatg

SEQ ID NO: 2065 - RNA, 23 nt, synthetic construct
  source 1..23: mol_type = other RNA
  modified_base 1: mod_base = OTHER; note = 2'-O-methylcytidine-3'- phosphorothioate
  modified_base 2: mod_base = OTHER; note = 2'-fluoroadenosine-3'-phosphorothioate
  modified_base 3: mod_base = OTHER; note = 2'-O-methyluridine-3'-phosphate
  modified_base 4: mod_base = OTHER; note = 2'-O-methylcytidine-3'-phosphate
  modified_base 5: mod_base = OTHER; note = 2'-O-methyluridine-3'-phosphate
  modified_base 6: mod_base = OTHER; note = 2'-fluorouridine-3'-phosphate
  modified_base 7: mod_base = OTHER; note = 2'-O-methylguanosine-3'-phosphate
  modified_base 8: mod_base = OTHER; note = 2'-fluoroadenosine-3'-phosphate
  modified_base 9: mod_base = OTHER; note = 2'-fluoroadenosine-3'-phosphate
  modified_base 10: mod_base = OTHER; note = 2'-O-methylcytidine-3'-phosphate
  modified_base 11: mod_base = OTHER; note = 2'-O-methyladenosine-3'-phosphate
  modified_base 12: mod_base = OTHER; note = 2'-O-methylcytidine-3'-phosphate
  modified_base 13: mod_base = OTHER; note = 2'-O-methylcytidine-3'-phosphate
  modified_base 14: mod_base = OTHER; note = 2'-fluorouridine-3'-phosphate
  modified_base 15: mod_base = OTHER; note = 2'-O-methyluridine-3'-phosphate
  modified_base 16: mod_base = OTHER; note = 2'-fluorouridine-3'-phosphate
  modified_base 17: mod_base = OTHER; note = 2'-O-methylcytidine-3'-phosphate
  modified_base 18: mod_base = OTHER; note = 2'-O-methyluridine-3'-phosphate
  modified_base 19: mod_base = OTHER; note = 2'-O-methylcytidine-3'-phosphate
  modified_base 20: mod_base = OTHER; note = 2'-O-methylcytidine-3'-phosphate
  modified_base 21: mod_base = OTHER; note = 2'-O-methylcytidine-3'- phosphorothioate
  modified_base 22: mod_base = OTHER; note = 2'-O-methylcytidine-3'- phosphorothioate
  modified_base 23: mod_base = OTHER; note = 2'-O-methylcytidine-3'-phosphate
catcttgaacacctttctccccc

SEQ ID NO: 2066 - RNA, 21 nt, synthetic construct
  source 1..21: mol_type = other RNA
  modified_base 1: mod_base = OTHER; note = 2'-O-methyladenosine-3'- phosphorothioate
  modified_base 2: mod_base = OTHER; note = 2'-O-methyladenosine-3'- phosphorothioate
  modified_base 3: mod_base = OTHER; note = 2'-O-methyladenosine-3'-phosphate
  modified_base 4: mod_base = OTHER; note = 2'-O-methyluridine-3'-phosphate
  modified_base 5: mod_base = OTHER; note = 2'-O-methylcytidine-3'-phosphate
  modified_base 6: mod_base = OTHER; note = 2'-O-methyladenosine-3'-phosphate
  modified_base 7: mod_base = OTHER; note = 2'-fluoroguanosine-3'-phosphate
  modified_base 8: mod_base = OTHER; note = 2'-O-methyluridine-3'-phosphate
  modified_base 9: mod_base = OTHER; note = 2'-fluoroadenosine-3'-phosphate
  modified_base 10: mod_base = OTHER; note = 2'-fluorocytidine-3'-phosphate
  modified_base 11: mod_base = OTHER; note = 2'-fluorouridine-3'-phosphate
  modified_base 12: mod_base = OTHER; note = 2'-O-methyluridine-3'-phosphate
  modified_base 13: mod_base = OTHER; note = 2'-O-methylcytidine-3'-phosphate
  modified_base 14: mod_base = OTHER; note = 2'-O-methylcytidine-3'-phosphate
  modified_base 15: mod_base = OTHER; note = 2'-O-methyladenosine-3'-phosphate
  modified_base 16: mod_base = OTHER; note = 2'-O-methyladenosine-3'-phosphate
  modified_base 17: mod_base = OTHER; note = 2'-O-methyladenosine-3'-phosphate
  modified_base 18: mod_base = OTHER; note = 2'-O-methylguanosine-3'-phosphate
  modified_base 19: mod_base = OTHER; note = 2'-O-methyluridine-3'-phosphate
  modified_base 20: mod_base = OTHER; note = 2'-O-methylcytidine-3'-phosphate
  modified_base 21: mod_base = OTHER; note 2'-O-methyluridine-3'-phosphate-N-[tris(GalNAc-alkyl)-amido decanoyl)]-4-hydroxyprolinol (Hyp-(GalNAc-alkyl)3)
aaatcagtacttccaaagtct

SEQ ID NO: 2067 - RNA, 23 nt, synthetic construct
  source 1..23: mol_type = other RNA
  modified_base 1: mod_base = OTHER; note = 2'-O-methyladenosine-3'- phosphorothioate
  modified_base 2: mod_base = OTHER; note = 2'-fluoroguanosine-3'-phosphorothioate
  modified_base 3: mod_base = OTHER; note = 2'-O-methyladenosine-3'-phosphate
  modified_base 4: mod_base = OTHER; note = 2'-O-methylcytidine-3'-phosphate
  modified_base 5: mod_base = OTHER; note = 2'-O-methyluridine-3'-phosphate
  modified_base 6: mod_base = OTHER; note = 2'-fluorouridine-3'-phosphate
  modified_base 7: mod_base = OTHER; note = 2'-O-methyluridine-3'-phosphate
  modified_base 8: mod_base = OTHER; note = 2'-fluoroguanosine-3'-phosphate
  modified_base 9: mod_base = OTHER; note = 2'-fluoroguanosine-3'-phosphate
  modified_base 10: mod_base = OTHER; note = 2'-O-methyladenosine-3'-phosphate
  modified_base 11: mod_base = OTHER; note = 2'-O-methyladenosine-3'-phosphate
  modified_base 12: mod_base = OTHER; note = 2'-O-methylguanosine-3'-phosphate
  modified_base 13: mod_base = OTHER; note = 2'-O-methyluridine-3'-phosphate
  modified_base 14: mod_base = OTHER; note = 2'-fluoroadenosine-3'-phosphate
  modified_base 15: mod_base = OTHER; note = 2'-O-methylcytidine-3'-phosphate
  modified_base 16: mod_base = OTHER; note = 2'-fluorouridine-3'-phosphate
  modified_base 17: mod_base = OTHER; note = 2'-O-methylguanosine-3'-phosphate
  modified_base 18: mod_base = OTHER; note = 2'-O-methyladenosine-3'-phosphate
  modified_base 19: mod_base = OTHER; note = 2'-O-methyluridine-3'-phosphate
  modified_base 20: mod_base = OTHER; note = 2'-O-methyluridine-3'-phosphate
  modified_base 21: mod_base = OTHER; note = 2'-O-methyluridine-3'-phosphorothioate
  modified_base 22: mod_base = OTHER; note = 2'-O-methyladenosine-3'- phosphorothioate
  modified_base 23: mod_base = OTHER; note = 2'-O-methylguanosine-3'-phosphate
agactttggaagtactgatttag

SEQ ID NO: 2068 - RNA, 21 nt, synthetic construct
  source 1..21: mol_type = other RNA
  modified_base 1: mod_base = OTHER; note = 2'-O-methyladenosine-3'- phosphorothioate
  modified_base 2: mod_base = OTHER; note = 2'-O-methyladenosine-3'- phosphorothioate
  modified_base 3: mod_base = OTHER; note = 2'-O-methyluridine-3'-phosphate
  modified_base 4: mod_base = OTHER; note = 2'-O-methylcytidine-3'-phosphate
  modified_base 5: mod_base = OTHER; note = 2'-O-methyladenosine-3'-phosphate
  modified_base 6: mod_base = OTHER; note = 2'-O-methylguanosine-3'-phosphate
  modified_base 7: mod_base = OTHER; note = 2'-fluorouridine-3'-phosphate
  modified_base 8: mod_base = OTHER; note = 2'-O-methyladenosine-3'-phosphate
  modified_base 9: mod_base = OTHER; note = 2'-fluorocytidine-3'-phosphate
  modified_base 10: mod_base = OTHER; note = 2'-fluorouridine-3'-phosphate
  modified_base 11: mod_base = OTHER; note = 2'-fluorouridine-3'-phosphate
  modified_base 12: mod_base = OTHER; note = 2'-O-methylcytidine-3'-phosphate
  modified_base 13: mod_base = OTHER; note = 2'-O-methylcytidine-3'-phosphate
  modified_base 14: mod_base = OTHER; note = 2'-O-methyladenosine-3'-phosphate
  modified_base 15: mod_base = OTHER; note = 2'-O-methyladenosine-3'-phosphate
  modified_base 16: mod_base = OTHER; note = 2'-O-methyladenosine-3'-phosphate
  modified_base 17: mod_base = OTHER; note = 2'-O-methylguanosine-3'-phosphate
  modified_base 18: mod_base = OTHER; note = 2'-O-methyluridine-3'-phosphate
  modified_base 19: mod_base = OTHER; note = 2'-O-methylcytidine-3'-phosphate
  modified_base 20: mod_base = OTHER; note = 2'-O-methyluridine-3'-phosphate
  modified_base 21: mod_base = OTHER; note 2'-O-methyladenosine-3'-phosphate-N-[tris(GalNAc-alkyl)-ami dodecanoyl)]-4-hydroxyprolinol (Hyp-(GalNAc-alkyl)3)
aatcagtacttccaaagtcta

SEQ ID NO: 2069 - RNA, 23 nt, synthetic construct
  source 1..23: mol_type = other RNA
  modified_base 1: mod_base = OTHER; note = 2'-O-methyluridine-3'-phosphorothioate
  modified_base 2: mod_base = OTHER; note = 2'-fluoroadenosine-3'-phosphorothioate
  modified_base 3: mod_base = OTHER; note = 2'-O-methylguanosine-3'-phosphate
  modified_base 4: mod_base = OTHER; note = 2'-O-methyladenosine-3'-phosphate
  modified_base 5: mod_base = OTHER; note = 2'-O-methylcytidine-3'-phosphate
  modified_base 6: mod_base = OTHER; note = 2'-fluorouridine-3'-phosphate
  modified_base 7: mod_base = OTHER; note = 2'-O-methyluridine-3'-phosphate
  modified_base 8: mod_base = OTHER; note = 2'-fluorouridine-3'-phosphate
  modified_base 9: mod_base = OTHER; note = 2'-fluoroguanosine-3'-phosphate
  modified_base 10: mod_base = OTHER; note = 2'-O-methylguanosine-3'-phosphate
  modified_base 11: mod_base = OTHER; note = 2'-O-methyladenosine-3'-phosphate
  modified_base 12: mod_base = OTHER; note = 2'-O-methyladenosine-3'-phosphate
  modified_base 13: mod_base = OTHER; note = 2'-O-methylguanosine-3'-phosphate
  modified_base 14: mod_base = OTHER; note = 2'-fluorouridine-3'-phosphate
  modified_base 15: mod_base = OTHER; note = 2'-O-methyladenosine-3'-phosphate
  modified_base 16: mod_base = OTHER; note = 2'-fluorocytidine-3'-phosphate
  modified_base 17: mod_base = OTHER; note = 2'-O-methyluridine-3'-phosphate
  modified_base 18: mod_base = OTHER; note = 2'-O-methylguanosine-3'-phosphate
  modified_base 19: mod_base = OTHER; note = 2'-O-methyladenosine-3'-phosphate
  modified_base 20: mod_base = OTHER; note = 2'-O-methyluridine-3'-phosphate
  modified_base 21: mod_base = OTHER; note = 2'-O-methyluridine-3'-phosphorothioate
  modified_base 22: mod_base = OTHER; note = 2'-O-methyluridine-3'-phosphorothioate
  modified_base 23: mod_base = OTHER; note = 2'-O-methyladenosine-3'-phosphate
tagactttggaagtactgattta

SEQ ID NO: 2070 - RNA, 21 nt, synthetic construct
  source 1..21: mol_type = other RNA
  modified_base 1: mod_base = OTHER; note = 2'-O-methyluridine-3'-phosphorothioate
  modified_base 2: mod_base = OTHER; note = 2'-O-methylguanosine-3'- phosphorothioate
  modified_base 3: mod_base = OTHER; note = 2'-O-methylcytidine-3'-phosphate
  modified_base 4: mod_base = OTHER; note = 2'-O-methyluridine-3'-phosphate
  modified_base 5: mod_base = OTHER; note = 2'-O-methyladenosine-3'-phosphate
  modified_base 6: mod_base = OTHER; note = 2'-O-methyladenosine-3'-phosphate
  modified_base 7: mod_base = OTHER; note = 2'-fluoroadenosine-3'-phosphate
  modified_base 8: mod_base = OTHER; note = 2'-O-methyluridine-3'-phosphate
  modified_base 9: mod_base = OTHER; note = 2'-fluorocytidine-3'-phosphate
  modified_base 10: mod_base = OTHER; note = 2'-fluoroadenosine-3'-phosphate
  modified_base 11: mod_base = OTHER; note = 2'-fluoroguanosine-3'-phosphate
  modified_base 12: mod_base = OTHER; note = 2'-O-methyluridine-3'-phosphate
  modified_base 13: mod_base = OTHER; note = 2'-O-methyladenosine-3'-phosphate
  modified_base 14: mod_base = OTHER; note = 2'-O-methylcytidine-3'-phosphate
  modified_base 15: mod_base = OTHER; note = 2'-O-methyluridine-3'-phosphate
  modified_base 16: mod_base = OTHER; note = 2'-O-methyluridine-3'-phosphate
  modified_base 17: mod_base = OTHER; note = 2'-O-methylcytidine-3'-phosphate
  modified_base 18: mod_base = OTHER; note = 2'-O-methylcytidine-3'-phosphate
  modified_base 19: mod_base = OTHER; note = 2'-O-methyladenosine-3'-phosphate
  modified_base 20: mod_base = OTHER; note = 2'-O-methyladenosine-3'-phosphate
  modified_base 21: mod_base = OTHER; note 2'-O-methyladenosine-3'-phosphate-N-[tris(GalNAc-alkyl)-ami dodecanoyl)]-4-hydroxyprolinol (Hyp-(GalNAc-alkyl)3)
tgctaaatcagtacttccaaa

SEQ ID NO: 2071 - RNA, 23 nt, synthetic construct
  source 1..23: mol_type = other RNA
  modified_base 1: mod_base = OTHER; note = 2'-O-methyluridine-3'-phosphorothioate
  modified_base 2: mod_base = OTHER; note = 2'-fluorouridine -3'-phosphorothioate
  modified_base 3: mod_base = OTHER; note = 2'-O-methyluridine-3'-phosphate
  modified_base 4: mod_base = OTHER; note = 2'-O-methylguanosine-3'-phosphate
  modified_base 5: mod_base = OTHER; note = 2'-O-methylguanosine-3'-phosphate
  modified_base 6: mod_base = OTHER; note = 2'-fluoroadenosine-3'-phosphate
  modified_base 7: mod_base = OTHER; note = 2'-O-methyladenosine-3'-phosphate
  modified_base 8: mod_base = OTHER; note = 2'-fluoroguanosine-3'-phosphate
  modified_base 9: mod_base = OTHER; note = 2'-fluorouridine-3'-phosphate
  modified_base 10: mod_base = OTHER; note = 2'-O-methyladenosine-3'-phosphate
  modified_base 11: mod_base = OTHER; note = 2'-O-methylcytidine-3'-phosphate
  modified_base 12: mod_base = OTHER; note = 2'-O-methyluridine-3'-phosphate
  modified_base 13: mod_base = OTHER; note = 2'-O-methylguanosine-3'-phosphate
  modified_base 14: mod_base = OTHER; note = 2'-fluoroadenosine-3'-phosphate
  modified_base 15: mod_base = OTHER; note = 2'-O-methyluridine-3'-phosphate
  modified_base 16: mod_base = OTHER; note = 2'-fluorouridine-3'-phosphate
  modified_base 17: mod_base = OTHER; note = 2'-O-methyluridine-3'-phosphate
  modified_base 18: mod_base = OTHER; note = 2'-O-methyladenosine-3'-phosphate
  modified_base 19: mod_base = OTHER; note = 2'-O-methylguanosine-3'-phosphate
  modified_base 20: mod_base = OTHER; note = 2'-O-methylcytidine-3'-phosphate
  modified_base 21: mod_base = OTHER; note = 2'-O-methyladenosine-3'- phosphorothioate
  modified_base 22: mod_base = OTHER; note = 2'-O-methyluridine-3'-phosphorothioate
  modified_base 23: mod_base = OTHER; note = 2'-O-methylguanosine-3'-phosphate
tttggaagtactgatttagcatg

SEQ ID NO: 2072 - RNA, 21 nt, synthetic construct
  source 1..21: mol_type = other RNA
  modified_base 1: mod_base = OTHER; note = 2'-O-methyladenosine-3'- phosphorothioate
  modified_base 2: mod_base = OTHER; note = 2'-O-methyluridine-3'-phosphorothioate
  modified_base 3: mod_base = OTHER; note = 2'-O-methylguanosine-3'-phosphate
  modified_base 4: mod_base = OTHER; note = 2'-O-methylcytidine-3'-phosphate
  modified_base 5: mod_base = OTHER; note = 2'-O-methyluridine-3'-phosphate
  modified_base 6: mod_base = OTHER; note = 2'-O-methyladenosine-3'-phosphate
  modified_base 7: mod_base = OTHER; note = 2'-fluoroadenosine-3'-phosphate
  modified_base 8: mod_base = OTHER; note = 2'-O-methyladenosine-3'-phosphate
  modified_base 9: mod_base = OTHER; note = 2'-fluorouridine-3'-phosphate
  modified_base 10: mod_base = OTHER; note = 2'-fluorocytidine-3'-phosphate
  modified_base 11: mod_base = OTHER; note = 2'-fluoroadenosine-3'-phosphate
  modified_base 12: mod_base = OTHER; note = 2'-O-methylguanosine-3'-phosphate
  modified_base 13: mod_base = OTHER; note = 2'-O-methyluridine-3'-phosphate
  modified_base 14: mod_base = OTHER; note = 2'-O-methyladenosine-3'-phosphate
  modified_base 15: mod_base = OTHER; note = 2'-O-methylcytidine-3'-phosphate
  modified_base 16: mod_base = OTHER; note = 2'-O-methyluridine-3'-phosphate
  modified_base 17: mod_base = OTHER; note = 2'-O-methyluridine-3'-phosphate
  modified_base 18: mod_base = OTHER; note = 2'-O-methylcytidine-3'-phosphate
  modified_base 19: mod_base = OTHER; note = 2'-O-methylcytidine-3'-phosphate
  modified_base 20: mod_base = OTHER; note = 2'-O-methyladenosine-3'-phosphate
  modified_base 21: mod_base = OTHER; note 2'-O-methyladenosine-3'-phosphate-N-[tris(GalNAc-alkyl)-ami dodecanoyl)]-4-hydroxyprolinol (Hyp-(GalNAc-alkyl)3)
atgctaaatcagtacttccaa

SEQ ID NO: 2073 - RNA, 23 nt, synthetic construct
  source 1..23: mol_type = other RNA
  modified_base 1: mod_base = OTHER; note = 2'-O-methyluridine-3'-phosphorothioate
  modified_base 2: mod_base = OTHER; note = 2'-fluorouridine -3'-phosphorothioate
  modified_base 3: mod_base = OTHER; note = 2'-O-methylguanosine-3'-phosphate
  modified_base 4: mod_base = OTHER; note = 2'-O-methylguanosine-3'-phosphate
  modified_base 5: mod_base = OTHER; note = 2'-O-methyladenosine-3'-phosphate
  modified_base 6: mod_base = OTHER; note = 2'-fluoroadenosine-3'-phosphate
  modified_base 7: mod_base = OTHER; note = 2'-O-methylguanosine-3'-phosphate
  modified_base 8: mod_base = OTHER; note = 2'-fluorouridine-3'-phosphate
  modified_base 9: mod_base = OTHER; note = 2'-fluoroadenosine-3'-phosphate
  modified_base 10: mod_base = OTHER; note = 2'-O-methylcytidine-3'-phosphate
  modified_base 11: mod_base = OTHER; note = 2'-O-methyluridine-3'-phosphate
  modified_base 12: mod_base = OTHER; note = 2'-O-methylguanosine-3'-phosphate
  modified_base 13: mod_base = OTHER; note = 2'-O-methyladenosine-3'-phosphate
  modified_base 14: mod_base = OTHER; note = 2'-fluorouridine-3'-phosphate
  modified_base 15: mod_base = OTHER; note = 2'-O-methyluridine-3'-phosphate
  modified_base 16: mod_base = OTHER; note = 2'-fluorouridine-3'-phosphate
  modified_base 17: mod_base = OTHER; note = 2'-O-methyladenosine-3'-phosphate
  modified_base 18: mod_base = OTHER; note = 2'-O-methylguanosine-3'-phosphate
  modified_base 19: mod_base = OTHER; note = 2'-O-methylcytidine-3'-phosphate
  modified_base 20: mod_base = OTHER; note = 2'-O-methyladenosine-3'-phosphate
  modified_base 21: mod_base = OTHER; note = 2'-O-methyluridine-3'-phosphorothioate
  modified_base 22: mod_base = OTHER; note = 2'-O-methylguanosine-3'- phosphorothioate
  modified_base 23: mod_base = OTHER; note = 2'-O-methyluridine-3'-phosphate
ttggaagtactgatttagcatgt

SEQ ID NO: 2074 - RNA, 21 nt, synthetic construct
  source 1..21: mol_type = other RNA
  modified_base 1: mod_base = OTHER; note = 2'-O-methyladenosine-3'- phosphorothioate
  modified_base 2: mod_base = OTHER; note = 2'-O-methylcytidine-3'- phosphorothioate
  modified_base 3: mod_base = OTHER; note = 2'-O-methyladenosine-3'-phosphate
  modified_base 4: mod_base = OTHER; note = 2'-O-methyluridine-3'-phosphate
  modified_base 5: mod_base = OTHER; note = 2'-O-methylcytidine-3'-phosphate
  modified_base 6: mod_base = OTHER; note = 2'-O-methyluridine-3'-phosphate
  modified_base 7: mod_base = OTHER; note = 2'-fluorouridine-3'-phosphate
  modified_base 8: mod_base = OTHER; note = 2'-O-methyluridine-3'-phosphate
  modified_base 9: mod_base = OTHER; note = 2'-fluoroadenosine-3'-phosphate
  modified_base 10: mod_base = OTHER; note = 2'-fluoroguanosine-3'-phosphate
  modified_base 11: mod_base = OTHER; note = 2'-fluorouridine-3'-phosphate
  modified_base 12: mod_base = OTHER; note = 2'-O-methylguanosine-3'-phosphate
  modified_base 13: mod_base = OTHER; note = 2'-O-methyluridine-3'-phosphate
  modified_base 14: mod_base = OTHER; note = 2'-O-methylcytidine-3'-phosphate
  modified_base 15: mod_base = OTHER; note = 2'-O-methyluridine-3'-phosphate
  modified_base 16: mod_base = OTHER; note = 2'-O-methylguanosine-3'-phosphate
  modified_base 17: mod_base = OTHER; note = 2'-O-methyladenosine-3'-phosphate
  modified_base 18: mod_base = OTHER; note = 2'-O-methyladenosine-3'-phosphate
  modified_base 19: mod_base = OTHER; note = 2'-O-methyluridine-3'-phosphate
  modified_base 20: mod_base = OTHER; note = 2'-O-methyladenosine-3'-phosphate
  modified_base 21: mod_base = OTHER; note 2'-O-methyluridine-3'-phosphate-N-[tris(GalNAc-alkyl)-amido decanoyl)]-4-hydroxyprolinol (Hyp-(GalNAc-alkyl)3)
acatctttagtgtctgaatat

SEQ ID NO: 2075 - RNA, 23 nt, synthetic construct
  source 1..23: mol_type = other RNA
  modified_base 1: mod_base = OTHER; note = 2'-O-methyladenosine-3'- phosphorothioate
  modified_base 2: mod_base = OTHER; note = 2'-fluorouridine -3'-phosphorothioate
  modified_base 3: mod_base = OTHER; note = 2'-O-methyladenosine-3'-phosphate
  modified_base 4: mod_base = OTHER; note = 2'-O-methyluridine-3'-phosphate
  modified_base 5: mod_base = OTHER; note = 2'-O-methyluridine-3'-phosphate
  modified_base 6: mod_base = OTHER; note = 2'-fluorocytidine-3'-phosphate
  modified_base 7: mod_base = OTHER; note = 2'-O-methyladenosine-3'-phosphate
  modified_base 8: mod_base = OTHER; note = 2'-fluoroguanosine-3'-phosphate
  modified_base 9: mod_base = OTHER; note = 2'-fluoroadenosine-3'-phosphate
  modified_base 10: mod_base = OTHER; note = 2'-O-methylcytidine-3'-phosphate
  modified_base 11: mod_base = OTHER; note = 2'-O-methyladenosine-3'-phosphate
  modified_base 12: mod_base = OTHER; note = 2'-O-methylcytidine-3'-phosphate
  modified_base 13: mod_base = OTHER; note = 2'-O-methyluridine-3'-phosphate
  modified_base 14: mod_base = OTHER; note = 2'-fluoroadenosine-3'-phosphate
  modified_base 15: mod_base = OTHER; note = 2'-O-methyladenosine-3'-phosphate
  modified_base 16: mod_base = OTHER; note = 2'-fluoroadenosine-3'-phosphate
  modified_base 17: mod_base = OTHER; note = 2'-O-methylguanosine-3'-phosphate
  modified_base 18: mod_base = OTHER; note = 2'-O-methyladenosine-3'-phosphate
  modified_base 19: mod_base = OTHER; note = 2'-O-methyluridine-3'-phosphate
  modified_base 20: mod_base = OTHER; note = 2'-O-methylguanosine-3'-phosphate
  modified_base 21: mod_base = OTHER; note = 2'-O-methyluridine-3'-phosphorothioate
  modified_base 22: mod_base = OTHER; note = 2'-O-methylguanosine-3'- phosphorothioate
  modified_base 23: mod_base = OTHER; note = 2'-O-methyladenosine-3'-phosphate
atattcagacactaaagatgtga

SEQ ID NO: 2076 - RNA, 21 nt, synthetic construct
  source 1..21: mol_type = other RNA
  modified_base 1: mod_base = OTHER; note = 2'-O-methylcytidine-3'- phosphorothioate
  modified_base 2: mod_base = OTHER; note = 2'-O-methyladenosine-3'- phosphorothioate
  modified_base 3: mod_base = OTHER; note = 2'-O-methyluridine-3'-phosphate
  modified_base 4: mod_base = OTHER; note = 2'-O-methylcytidine-3'-phosphate
  modified_base 5: mod_base = OTHER; note = 2'-O-methyluridine-3'-phosphate
  modified_base 6: mod_base = OTHER; note = 2'-O-methyluridine-3'-phosphate
  modified_base 7: mod_base = OTHER; note = 2'-fluorouridine-3'-phosphate
  modified_base 8: mod_base = OTHER; note = 2'-O-methyladenosine-3'-phosphate
  modified_base 9: mod_base = OTHER; note = 2'-fluoroguanosine-3'-phosphate
  modified_base 10: mod_base = OTHER; note = 2'-fluorouridine-3'-phosphate
  modified_base 11: mod_base = OTHER; note = 2'-fluoroguanosine-3'-phosphate
  modified_base 12: mod_base = OTHER; note = 2'-O-methyluridine-3'-phosphate
  modified_base 13: mod_base = OTHER; note = 2'-O-methylcytidine-3'-phosphate
  modified_base 14: mod_base = OTHER; note = 2'-O-methyluridine-3'-phosphate
  modified_base 15: mod_base = OTHER; note = 2'-O-methylguanosine-3'-phosphate
  modified_base 16: mod_base = OTHER; note = 2'-O-methyladenosine-3'-phosphate
  modified_base 17: mod_base = OTHER; note = 2'-O-methyladenosine-3'-phosphate
  modified_base 18: mod_base = OTHER; note = 2'-O-methyluridine-3'-phosphate
  modified_base 19: mod_base = OTHER; note = 2'-O-methyladenosine-3'-phosphate
  modified_base 20: mod_base = OTHER; note = 2'-O-methyluridine-3'-phosphate
  modified_base 21: mod_base = OTHER; note 2'-O-methyladenosine-3'-phosphate-N-[tris(GalNAc-alkyl)-ami dodecanoyl)]-4-hydroxyprolinol (Hyp-(GalNAc-alkyl)3)
catctttagtgtctgaatata

SEQ ID NO: 2077 - RNA, 23 nt, synthetic construct
  source 1..23: mol_type = other RNA
  modified_base 1: mod_base = OTHER; note = 2'-O-methyluridine-3'-phosphorothioate
  modified_base 2: mod_base = OTHER; note = 2'-fluoroadenosine-3'-phosphorothioate
  modified_base 3: mod_base = OTHER; note = 2'-O-methyluridine-3'-phosphate
  modified_base 4: mod_base = OTHER; note = 2'-O-methyladenosine-3'-phosphate
  modified_base 5: mod_base = OTHER; note = 2'-O-methyluridine-3'-phosphate
  modified_base 6: mod_base = OTHER; note = 2'-fluorouridine-3'-phosphate
  modified_base 7: mod_base = OTHER; note = 2'-O-methylcytidine-3'-phosphate
  modified_base 8: mod_base = OTHER; note = 2'-fluoroadenosine-3'-phosphate
  modified_base 9: mod_base = OTHER; note = 2'-fluoroguanosine-3'-phosphate
  modified_base 10: mod_base = OTHER; note = 2'-O-methyladenosine-3'-phosphate
  modified_base 11: mod_base = OTHER; note = 2'-O-methylcytidine-3'-phosphate
  modified_base 12: mod_base = OTHER; note = 2'-O-methyladenosine-3'-phosphate
  modified_base 13: mod_base = OTHER; note = 2'-O-methylcytidine-3'-phosphate
  modified_base 14: mod_base = OTHER; note = 2'-fluorouridine-3'-phosphate
  modified_base 15: mod_base = OTHER; note = 2'-O-methyladenosine-3'-phosphate
  modified_base 16: mod_base = OTHER; note = 2'-fluoroadenosine-3'-phosphate
  modified_base 17: mod_base = OTHER; note = 2'-O-methyladenosine-3'-phosphate
  modified_base 18: mod_base = OTHER; note = 2'-O-methylguanosine-3'-phosphate
  modified_base 19: mod_base = OTHER; note = 2'-O-methyladenosine-3'-phosphate
  modified_base 20: mod_base = OTHER; note = 2'-O-methyluridine-3'-phosphate
  modified_base 21: mod_base = OTHER; note = 2'-O-methylguanosine-3'- phosphorothioate
  modified_base 22: mod_base = OTHER; note = 2'-O-methyluridine-3'-phosphorothioate
  modified_base 23: mod_base = OTHER; note = 2'-O-methylguanosine-3'-phosphate
tatattcagacactaaagatgtg

SEQ ID NO: 2078 - RNA, 21 nt, synthetic construct
  source 1..21: mol_type = other RNA
  modified_base 1: mod_base = OTHER; note = 2'-O-methyladenosine-3'- phosphorothioate
  modified_base 2: mod_base = OTHER; note = 2'-O-methyladenosine-3'- phosphorothioate
  modified_base 3: mod_base = OTHER; note = 2'-O-methyluridine-3'-phosphate
  modified_base 4: mod_base = OTHER; note = 2'-O-methylcytidine-3'-phosphate
  modified_base 5: mod_base = OTHER; note = 2'-O-methyladenosine-3'-phosphate
  modified_base 6: mod_base = OTHER; note = 2'-O-methylcytidine-3'-phosphate
  modified_base 7: mod_base = OTHER; note = 2'-fluoroadenosine-3'-phosphate
  modified_base 8: mod_base = OTHER; note = 2'-O-methyluridine-3'-phosphate
  modified_base 9: mod_base = OTHER; note = 2'-fluorocytidine-3'-phosphate
  modified_base 10: mod_base = OTHER; note = 2'-fluorouridine-3'-phosphate
  modified_base 11: mod_base = OTHER; note = 2'-fluorouridine-3'-phosphate
  modified_base 12: mod_base = OTHER; note = 2'-O-methyluridine-3'-phosphate
  modified_base 13: mod_base = OTHER; note = 2'-O-methyladenosine-3'-phosphate
  modified_base 14: mod_base = OTHER; note = 2'-O-methylguanosine-3'-phosphate
  modified_base 15: mod_base = OTHER; note = 2'-O-methyluridine-3'-phosphate
  modified_base 16: mod_base = OTHER; note = 2'-O-methylguanosine-3'-phosphate
  modified_base 17: mod_base = OTHER; note = 2'-O-methyluridine-3'-phosphate
  modified_base 18: mod_base = OTHER; note = 2'-O-methylcytidine-3'-phosphate
  modified_base 19: mod_base = OTHER; note = 2'-O-methyluridine-3'-phosphate
  modified_base 20: mod_base = OTHER; note = 2'-O-methylguanosine-3'-phosphate
  modified_base 21: mod_base = OTHER; note 2'-O-methyladenosine-3'-phosphate-N-[tris(GalNAc-alkyl)-ami dodecanoyl)]-4-hydroxyprolinol (Hyp-(GalNAc-alkyl)3)
aatcacatctttagtgtctga

SEQ ID NO: 2079 - RNA, 23 nt, synthetic construct
  source 1..23: mol_type = other RNA
  modified_base 1: mod_base = OTHER; note = 2'-O-methyluridine-3'-phosphorothioate
  modified_base 2: mod_base = OTHER; note = 2'-fluorocytidine-3'-phosphorothioate
  modified_base 3: mod_base = OTHER; note = 2'-O-methyladenosine-3'-phosphate
  modified_base 4: mod_base = OTHER; note = 2'-O-methylguanosine-3'-phosphate
  modified_base 5: mod_base = OTHER; note = 2'-O-methyladenosine-3'-phosphate
  modified_base 6: mod_base = OTHER; note = 2'-fluorocytidine-3'-phosphate
  modified_base 7: mod_base = OTHER; note = 2'-O-methyladenosine-3'-phosphate
  modified_base 8: mod_base = OTHER; note = 2'-fluorocytidine-3'-phosphate
  modified_base 9: mod_base = OTHER; note = 2'-fluorouridine-3'-phosphate
  modified_base 10: mod_base = OTHER; note = 2'-O-methyladenosine-3'-phosphate
  modified_base 11: mod_base = OTHER; note = 2'-O-methyladenosine-3'-phosphate
  modified_base 12: mod_base = OTHER; note = 2'-O-methyladenosine-3'-phosphate
  modified_base 13: mod_base = OTHER; note = 2'-O-methylguanosine-3'-phosphate
  modified_base 14: mod_base = OTHER; note = 2'-fluoroadenosine-3'-phosphate
  modified_base 15: mod_base = OTHER; note = 2'-O-methyluridine-3'-phosphate
  modified_base 16: mod_base = OTHER; note = 2'-fluoroguanosine-3'-phosphate
  modified_base 17: mod_base = OTHER; note = 2'-O-methyluridine-3'-phosphate
  modified_base 18: mod_base = OTHER; note = 2'-O-methylguanosine-3'-phosphate
  modified_base 19: mod_base = OTHER; note = 2'-O-methyladenosine-3'-phosphate
  modified_base 20: mod_base = OTHER; note = 2'-O-methyluridine-3'-phosphate
  modified_base 21: mod_base = OTHER; note = 2'-O-methyluridine-3'-phosphorothioate
  modified_base 22: mod_base = OTHER; note = 2'-O-methylguanosine-3'- phosphorothioate
  modified_base 23: mod_base = OTHER; note = 2'-O-methylguanosine-3'-phosphate
tcagacactaaagatgtgattgg

SEQ ID NO: 2080 - RNA, 21 nt, synthetic construct
  source 1..21: mol_type = other RNA
  modified_base 1: mod_base = OTHER; note = 2'-O-methylcytidine-3'- phosphorothioate
  modified_base 2: mod_base = OTHER; note = 2'-O-methyladenosine-3'- phosphorothioate
  modified_base 3: mod_base = OTHER; note = 2'-O-methyladenosine-3'-phosphate
  modified_base 4: mod_base = OTHER; note = 2'-O-methyluridine-3'-phosphate
  modified_base 5: mod_base = OTHER; note = 2'-O-methylcytidine-3'-phosphate
  modified_base 6: mod_base = OTHER; note = 2'-O-methyladenosine-3'-phosphate
  modified_base 7: mod_base = OTHER; note = 2'-fluorocytidine-3'-phosphate
  modified_base 8: mod_base = OTHER; note = 2'-O-methyladenosine-3'-phosphate
  modified_base 9: mod_base = OTHER; note = 2'-fluorouridine-3'-phosphate
  modified_base 10: mod_base = OTHER; note = 2'-fluorocytidine-3'-phosphate
  modified_base 11: mod_base = OTHER; note = 2'-fluorouridine-3'-phosphate
  modified_base 12: mod_base = OTHER; note = 2'-O-methyluridine-3'-phosphate
  modified_base 13: mod_base = OTHER; note = 2'-O-methyluridine-3'-phosphate
  modified_base 14: mod_base = OTHER; note = 2'-O-methyladenosine-3'-phosphate
  modified_base 15: mod_base = OTHER; note = 2'-O-methylguanosine-3'-phosphate
  modified_base 16: mod_base = OTHER; note = 2'-O-methyluridine-3'-phosphate
  modified_base 17: mod_base = OTHER; note = 2'-O-methylguanosine-3'-phosphate
  modified_base 18: mod_base = OTHER; note = 2'-O-methyluridine-3'-phosphate
  modified_base 19: mod_base = OTHER; note = 2'-O-methylcytidine-3'-phosphate
  modified_base 20: mod_base = OTHER; note = 2'-O-methyluridine-3'-phosphate
  modified_base 21: mod_base = OTHER; note 2'-O-methylguanosine-3'-phosphate-N-[tris(GalNAc-alkyl)-ami dodecanoyl)]-4-hydroxyprolinol (Hyp-(GalNAc-alkyl)3)
caatcacatctttagtgtctg

SEQ ID NO: 2081 - RNA, 23 nt, synthetic construct
  source 1..23: mol_type = other RNA
  modified_base 1: mod_base = OTHER; note = 2'-O-methylcytidine-3'- phosphorothioate
  modified_base 2: mod_base = OTHER; note = 2'-fluoroadenosine-3'-phosphorothioate
  modified_base 3: mod_base = OTHER; note = 2'-O-methylguanosine-3'-phosphate
  modified_base 4: mod_base = OTHER; note = 2'-O-methyladenosine-3'-phosphate
  modified_base 5: mod_base = OTHER; note = 2'-O-methylcytidine-3'-phosphate
  modified_base 6: mod_base = OTHER; note = 2'-fluoroadenosine-3'-phosphate
  modified_base 7: mod_base = OTHER; note = 2'-O-methylcytidine-3'-phosphate
  modified_base 8: mod_base = OTHER; note = 2'-fluorouridine-3'-phosphate
  modified_base 9: mod_base = OTHER; note = 2'-fluoroadenosine-3'-phosphate
  modified_base 10: mod_base = OTHER; note = 2'-O-methyladenosine-3'-phosphate
  modified_base 11: mod_base = OTHER; note = 2'-O-methyladenosine-3'-phosphate
  modified_base 12: mod_base = OTHER; note = 2'-O-methylguanosine-3'-phosphate
  modified_base 13: mod_base = OTHER; note = 2'-O-methyladenosine-3'-phosphate
  modified_base 14: mod_base = OTHER; note = 2'-fluorouridine-3'-phosphate
  modified_base 15: mod_base = OTHER; note = 2'-O-methylguanosine-3'-phosphate
  modified_base 16: mod_base = OTHER; note = 2'-fluorouridine-3'-phosphate
  modified_base 17: mod_base = OTHER; note = 2'-O-methylguanosine-3'-phosphate
  modified_base 18: mod_base = OTHER; note = 2'-O-methyladenosine-3'-phosphate
  modified_base 19: mod_base = OTHER; note = 2'-O-methyluridine-3'-phosphate
  modified_base 20: mod_base = OTHER; note = 2'-O-methyluridine-3'-phosphate
  modified_base 21: mod_base = OTHER; note = 2'-O-methylguanosine-3'- phosphorothioate
  modified_base 22: mod_base = OTHER; note = 2'-O-methylguanosine-3'- phosphorothioate
  modified_base 23: mod_base = OTHER; note = 2'-O-methyladenosine-3'-phosphate
cagacactaaagatgtgattgga

SEQ ID NO: 2082 - RNA, 21 nt, synthetic construct
  source 1..21: mol_type = other RNA
  modified_base 1: mod_base = OTHER; note = 2'-O-methylguanosine-3'- phosphorothioate
  modified_base 2: mod_base = OTHER; note = 2'-O-methylcytidine-3'- phosphorothioate
  modified_base 3: mod_base = OTHER; note = 2'-O-methyladenosine-3'-phosphate
  modified_base 4: mod_base = OTHER; note = 2'-O-methyluridine-3'-phosphate
  modified_base 5: mod_base = OTHER; note = 2'-O-methylguanosine-3'-phosphate
  modified_base 6: mod_base = OTHER; note = 2'-O-methyluridine-3'-phosphate
  modified_base 7: mod_base = OTHER; note = 2'-fluoroadenosine-3'-phosphate
  modified_base 8: mod_base = OTHER; note = 2'-O-methyluridine-3'-phosphate
  modified_base 9: mod_base = OTHER; note = 2'-fluorouridine-3'-phosphate
  modified_base 10: mod_base = OTHER; note = 2'-fluoroadenosine-3'-phosphate
  modified_base 11: mod_base = OTHER; note = 2'-fluorocytidine-3'-phosphate
  modified_base 12: mod_base = OTHER; note = 2'-O-methyluridine-3'-phosphate
  modified_base 13: mod_base = OTHER; note = 2'-O-methyluridine-3'-phosphate
  modified_base 14: mod_base = OTHER; note = 2'-O-methylguanosine-3'-phosphate
  modified_base 15: mod_base = OTHER; note = 2'-O-methyladenosine-3'-phosphate
  modified_base 16: mod_base = OTHER; note = 2'-O-methylcytidine-3'-phosphate
  modified_base 17: mod_base = OTHER; note = 2'-O-methyladenosine-3'-phosphate
  modified_base 18: mod_base = OTHER; note = 2'-O-methyladenosine-3'-phosphate
  modified_base 19: mod_base = OTHER; note = 2'-O-methyladenosine-3'-phosphate
  modified_base 20: mod_base = OTHER; note = 2'-O-methylguanosine-3'-phosphate
  modified_base 21: mod_base = OTHER; note 2'-O-methyladenosine-3'-phosphate-N-[tris(GalNAc-alkyl)-ami dodecanoyl)]-4-hydroxyprolinol (Hyp-(GalNAc-alkyl)3)
gcatgtattacttgacaaaga

SEQ ID NO: 2083 - RNA, 23 nt, synthetic construct
  source 1..23: mol_type = other RNA
  modified_base 1: mod_base = OTHER; note = 2'-O-methyluridine-3'-phosphorothioate
  modified_base 2: mod_base = OTHER; note = 2'-fluorocytidine-3'-phosphorothioate
  modified_base 3: mod_base = OTHER; note = 2'-O-methyluridine-3'-phosphate
  modified_base 4: mod_base = OTHER; note = 2'-O-methyluridine-3'-phosphate
  modified_base 5: mod_base = OTHER; note = 2'-O-methyluridine-3'-phosphate
  modified_base 6: mod_base = OTHER; note = 2'-fluoroguanosine-3'-phosphate
  modified_base 7: mod_base = OTHER; note = 2'-O-methyluridine-3'-phosphate
  modified_base 8: mod_base = OTHER; note = 2'-fluorocytidine-3'-phosphate
  modified_base 9: mod_base = OTHER; note = 2'-fluoroadenosine-3'-phosphate
  modified_base 10: mod_base = OTHER; note = 2'-O-methyladenosine-3'-phosphate
  modified_base 11: mod_base = OTHER; note = 2'-O-methylguanosine-3'-phosphate
  modified_base 12: mod_base = OTHER; note = 2'-O-methyluridine-3'-phosphate
  modified_base 13: mod_base = OTHER; note = 2'-O-methyladenosine-3'-phosphate
  modified_base 14: mod_base = OTHER; note = 2'-fluoroadenosine-3'-phosphate
  modified_base 15: mod_base = OTHER; note = 2'-O-methyluridine-3'-phosphate
  modified_base 16: mod_base = OTHER; note = 2'-fluoroadenosine-3'-phosphate
  modified_base 17: mod_base = OTHER; note = 2'-O-methylcytidine-3'-phosphate
  modified_base 18: mod_base = OTHER; note = 2'-O-methyladenosine-3'-phosphate
  modified_base 19: mod_base = OTHER; note = 2'-O-methyluridine-3'-phosphate
  modified_base 20: mod_base = OTHER; note = 2'-O-methylguanosine-3'-phosphate
  modified_base 21: mod_base = OTHER; note = 2'-O-methylcytidine-3'- phosphorothioate
  modified_base 22: mod_base = OTHER; note = 2'-O-methyluridine-3'-phosphorothioate
  modified_base 23: mod_base = OTHER; note = 2'-O-methylguanosine-3'-phosphate
tctttgtcaagtaatacatgctg

SEQ ID NO: 2084 - RNA, 21 nt, synthetic construct
  source 1..21: mol_type = other RNA
  modified_base 1: mod_base = OTHER; note = 2'-O-methylcytidine-3'- phosphorothioate
  modified_base 2: mod_base = OTHER; note = 2'-O-methyladenosine-3'- phosphorothioate
  modified_base 3: mod_base = OTHER; note = 2'-O-methyluridine-3'-phosphate
  modified_base 4: mod_base = OTHER; note = 2'-O-methylguanosine-3'-phosphate
  modified_base 5: mod_base = OTHER; note = 2'-O-methyluridine-3'-phosphate
  modified_base 6: mod_base = OTHER; note = 2'-O-methyladenosine-3'-phosphate
  modified_base 7: mod_base = OTHER; note = 2'-fluorouridine-3'-phosphate
  modified_base 8: mod_base = OTHER; note = 2'-O-methyluridine-3'-phosphate
  modified_base 9: mod_base = OTHER; note = 2'-fluoroadenosine-3'-phosphate
  modified_base 10: mod_base = OTHER; note = 2'-fluorocytidine-3'-phosphate
  modified_base 11: mod_base = OTHER; note = 2'-fluorouridine-3'-phosphate
  modified_base 12: mod_base = OTHER; note = 2'-O-methyluridine-3'-phosphate
  modified_base 13: mod_base = OTHER; note = 2'-O-methylguanosine-3'-phosphate
  modified_base 14: mod_base = OTHER; note = 2'-O-methyladenosine-3'-phosphate
  modified_base 15: mod_base = OTHER; note = 2'-O-methylcytidine-3'-phosphate
  modified_base 16: mod_base = OTHER; note = 2'-O-methyladenosine-3'-phosphate
  modified_base 17: mod_base = OTHER; note = 2'-O-methyladenosine-3'-phosphate
  modified_base 18: mod_base = OTHER; note = 2'-O-methyladenosine-3'-phosphate
  modified_base 19: mod_base = OTHER; note = 2'-O-methylguanosine-3'-phosphate
  modified_base 20: mod_base = OTHER; note = 2'-O-methyladenosine-3'-phosphate
  modified_base 21: mod_base = OTHER; note 2'-O-methylguanosine-3'-phosphate-N-[tris(GalNAc-alkyl)-ami dodecanoyl)]-4-hydroxyprolinol (Hyp-(GalNAc-alkyl)3)
catgtattacttgacaaagag

SEQ ID NO: 2085 - RNA, 23 nt, synthetic construct
  source 1..23: mol_type = other RNA
  modified_base 1: mod_base = OTHER; note = 2'-O-methylcytidine-3'- phosphorothioate
  modified_base 2: mod_base = OTHER; note = 2'-fluorouridine -3'-phosphorothioate
  modified_base 3: mod_base = OTHER; note = 2'-O-methylcytidine-3'-phosphate
  modified_base 4: mod_base = OTHER; note = 2'-O-methyluridine-3'-phosphate
  modified_base 5: mod_base = OTHER; note = 2'-O-methyluridine-3'-phosphate
  modified_base 6: mod_base = OTHER; note = 2'-fluorouridine-3'-phosphate
  modified_base 7: mod_base = OTHER; note = 2'-O-methylguanosine-3'-phosphate
  modified_base 8: mod_base = OTHER; note = 2'-fluorouridine-3'-phosphate
  modified_base 9: mod_base = OTHER; note = 2'-fluorocytidine-3'-phosphate
  modified_base 10: mod_base = OTHER; note = 2'-O-methyladenosine-3'-phosphate
  modified_base 11: mod_base = OTHER; note = 2'-O-methyladenosine-3'-phosphate
  modified_base 12: mod_base = OTHER; note = 2'-O-methylguanosine-3'-phosphate
  modified_base 13: mod_base = OTHER; note = 2'-O-methyluridine-3'-phosphate
  modified_base 14: mod_base = OTHER; note = 2'-fluoroadenosine-3'-phosphate
  modified_base 15: mod_base = OTHER; note = 2'-O-methyladenosine-3'-phosphate
  modified_base 16: mod_base = OTHER; note = 2'-fluorouridine-3'-phosphate
  modified_base 17: mod_base = OTHER; note = 2'-O-methyladenosine-3'-phosphate
  modified_base 18: mod_base = OTHER; note = 2'-O-methylcytidine-3'-phosphate
  modified_base 19: mod_base = OTHER; note = 2'-O-methyladenosine-3'-phosphate
  modified_base 20: mod_base = OTHER; note = 2'-O-methyluridine-3'-phosphate
  modified_base 21: mod_base = OTHER; note = 2'-O-methylguanosine-3'- phosphorothioate
  modified_base 22: mod_base = OTHER; note = 2'-O-methylcytidine-3'- phosphorothioate
  modified_base 23: mod_base = OTHER; note = 2'-O-methyluridine-3'-phosphate
ctctttgtcaagtaatacatgct

SEQ ID NO: 2086 - RNA, 21 nt, synthetic construct
  source 1..21: mol_type = other RNA
  modified_base 1: mod_base = OTHER; note = 2'-O-methyluridine-3'-phosphorothioate
  modified_base 2: mod_base = OTHER; note = 2'-O-methyluridine-3'-phosphorothioate
  modified_base 3: mod_base = OTHER; note = 2'-O-methylcytidine-3'-phosphate
  modified_base 4: mod_base = OTHER; note = 2'-O-methyladenosine-3'-phosphate
  modified_base 5: mod_base = OTHER; note = 2'-O-methylguanosine-3'-phosphate
  modified_base 6: mod_base = OTHER; note = 2'-O-methylcytidine-3'-phosphate
  modified_base 7: mod_base = OTHER; note = 2'-fluoroadenosine-3'-phosphate
  modified_base 8: mod_base = OTHER; note = 2'-O-methyluridine-3'-phosphate
  modified_base 9: mod_base = OTHER; note = 2'-fluoroguanosine-3'-phosphate
  modified_base 10: mod_base = OTHER; note = 2'-fluorouridine-3'-phosphate
  modified_base 11: mod_base = OTHER; note = 2'-fluoroadenosine-3'-phosphate
  modified_base 12: mod_base = OTHER; note = 2'-O-methyluridine-3'-phosphate
  modified_base 13: mod_base = OTHER; note = 2'-O-methyluridine-3'-phosphate
  modified_base 14: mod_base = OTHER; note = 2'-O-methyladenosine-3'-phosphate
  modified_base 15: mod_base = OTHER; note = 2'-O-methylcytidine-3'-phosphate
  modified_base 16: mod_base = OTHER; note = 2'-O-methyluridine-3'-phosphate
  modified_base 17: mod_base = OTHER; note = 2'-O-methyluridine-3'-phosphate
  modified_base 18: mod_base = OTHER; note = 2'-O-methylguanosine-3'-phosphate
  modified_base 19: mod_base = OTHER; note = 2'-O-methyladenosine-3'-phosphate
  modified_base 20: mod_base = OTHER; note = 2'-O-methylcytidine-3'-phosphate
  modified_base 21: mod_base = OTHER; note 2'-O-methyladenosine-3'-phosphate-N-[tris(GalNAc-alkyl)-ami dodecanoyl)]-4-hydroxyprolinol (Hyp-(GalNAc-alkyl)3)
ttcagcatgtattacttgaca

SEQ ID NO: 2087 - RNA, 23 nt, synthetic construct
  source 1..23: mol_type = other RNA
  modified_base 1: mod_base = OTHER; note = 2'-O-methyluridine-3'-phosphorothioate
  modified_base 2: mod_base = OTHER; note = 2'-fluoroguanosine-3'-phosphorothioate
  modified_base 3: mod_base = OTHER; note = 2'-O-methyluridine-3'-phosphate
  modified_base 4: mod_base = OTHER; note = 2'-O-methylcytidine-3'-phosphate
  modified_base 5: mod_base = OTHER; note = 2'-O-methyladenosine-3'-phosphate
  modified_base 6: mod_base = OTHER; note = 2'-fluoroadenosine-3'-phosphate
  modified_base 7: mod_base = OTHER; note = 2'-O-methylguanosine-3'-phosphate
  modified_base 8: mod_base = OTHER; note = 2'-fluorouridine-3'-phosphate
  modified_base 9: mod_base = OTHER; note = 2'-fluoroadenosine-3'-phosphate
  modified_base 10: mod_base = OTHER; note = 2'-O-methyladenosine-3'-phosphate
  modified_base 11: mod_base = OTHER; note = 2'-O-methyluridine-3'-phosphate
  modified_base 12: mod_base = OTHER; note = 2'-O-methyladenosine-3'-phosphate
  modified_base 13: mod_base = OTHER; note = 2'-O-methylcytidine-3'-phosphate
  modified_base 14: mod_base = OTHER; note = 2'-fluoroadenosine-3'-phosphate
  modified_base 15: mod_base = OTHER; note = 2'-O-methyluridine-3'-phosphate
  modified_base 16: mod_base = OTHER; note = 2'-fluoroguanosine-3'-phosphate
  modified_base 17: mod_base = OTHER; note = 2'-O-methylcytidine-3'-phosphate
  modified_base 18: mod_base = OTHER; note = 2'-O-methyluridine-3'-phosphate
  modified_base 19: mod_base = OTHER; note = 2'-O-methylguanosine-3'-phosphate
  modified_base 20: mod_base = OTHER; note = 2'-O-methyladenosine-3'-phosphate
  modified_base 21: mod_base = OTHER; note = 2'-O-methyladenosine-3'- phosphorothioate
  modified_base 22: mod_base = OTHER; note = 2'-O-methyladenosine-3'- phosphorothioate
  modified_base 23: mod_base = OTHER; note = 2'-O-methyladenosine-3'-phosphate
tgtcaagtaatacatgctgaaaa

SEQ ID NO: 2088 - RNA, 21 nt, synthetic construct
  source 1..21: mol_type = other RNA
  modified_base 1: mod_base = OTHER; note = 2'-O-methyluridine-3'-phosphorothioate
  modified_base 2: mod_base = OTHER; note = 2'-O-methyluridine-3'-phosphorothioate
  modified_base 3: mod_base = OTHER; note = 2'-O-methyluridine-3'-phosphate
  modified_base 4: mod_base = OTHER; note = 2'-O-methylcytidine-3'-phosphate
  modified_base 5: mod_base = OTHER; note = 2'-O-methyladenosine-3'-phosphate
  modified_base 6: mod_base = OTHER; note = 2'-O-methylguanosine-3'-phosphate
  modified_base 7: mod_base = OTHER; note = 2'-fluorocytidine-3'-phosphate
  modified_base 8: mod_base = OTHER; note = 2'-O-methyladenosine-3'-phosphate
  modified_base 9: mod_base = OTHER; note = 2'-fluorouridine-3'-phosphate
  modified_base 10: mod_base = OTHER; note = 2'-fluoroguanosine-3'-phosphate
  modified_base 11: mod_base = OTHER; note = 2'-fluorouridine-3'-phosphate
  modified_base 12: mod_base = OTHER; note = 2'-O-methyladenosine-3'-phosphate
  modified_base 13: mod_base = OTHER; note = 2'-O-methyluridine-3'-phosphate
  modified_base 14: mod_base = OTHER; note = 2'-O-methyluridine-3'-phosphate
  modified_base 15: mod_base = OTHER; note = 2'-O-methyladenosine-3'-phosphate
  modified_base 16: mod_base = OTHER; note = 2'-O-methylcytidine-3'-phosphate
  modified_base 17: mod_base = OTHER; note = 2'-O-methyluridine-3'-phosphate
  modified_base 18: mod_base = OTHER; note = 2'-O-methyluridine-3'-phosphate
  modified_base 19: mod_base = OTHER; note = 2'-O-methylguanosine-3'-phosphate
  modified_base 20: mod_base = OTHER; note = 2'-O-methyladenosine-3'-phosphate
  modified_base 21: mod_base = OTHER; note 2'-O-methylcytidine-3'-phosphate-N-[tris(GalNAc-alkyl)-amid odecanoyl)]-4-hydroxyprolinol (Hyp-(GalNAc-alkyl)3)
tttcagcatgtattacttgac

SEQ ID NO: 2089 - RNA, 23 nt, synthetic construct
  source 1..23: mol_type = other RNA
  modified_base 1: mod_base = OTHER; note = 2'-O-methylguanosine-3'- phosphorothioate
  modified_base 2: mod_base = OTHER; note = 2'-fluorouridine -3'-phosphorothioate
  modified_base 3: mod_base = OTHER; note = 2'-O-methylcytidine-3'-phosphate
  modified_base 4: mod_base = OTHER; note = 2'-O-methyladenosine-3'-phosphate
  modified_base 5: mod_base = OTHER; note = 2'-O-methyladenosine-3'-phosphate
  modified_base 6: mod_base = OTHER; note = 2'-fluoroguanosine-3'-phosphate
  modified_base 7: mod_base = OTHER; note = 2'-O-methyluridine-3'-phosphate
  modified_base 8: mod_base = OTHER; note = 2'-fluoroadenosine-3'-phosphate
  modified_base 9: mod_base = OTHER; note = 2'-fluoroadenosine-3'-phosphate
  modified_base 10: mod_base = OTHER; note = 2'-O-methyluridine-3'-phosphate
  modified_base 11: mod_base = OTHER; note = 2'-O-methyladenosine-3'-phosphate
  modified_base 12: mod_base = OTHER; note = 2'-O-methylcytidine-3'-phosphate
  modified_base 13: mod_base = OTHER; note = 2'-O-methyladenosine-3'-phosphate
  modified_base 14: mod_base = OTHER; note = 2'-fluorouridine-3'-phosphate
  modified_base 15: mod_base = OTHER; note = 2'-O-methylguanosine-3'-phosphate
  modified_base 16: mod_base = OTHER; note = 2'-fluorocytidine-3'-phosphate
  modified_base 17: mod_base = OTHER; note = 2'-O-methyluridine-3'-phosphate
  modified_base 18: mod_base = OTHER; note = 2'-O-methylguanosine-3'-phosphate
  modified_base 19: mod_base = OTHER; note = 2'-O-methyladenosine-3'-phosphate
  modified_base 20: mod_base = OTHER; note = 2'-O-methyladenosine-3'-phosphate
  modified_base 21: mod_base = OTHER; note = 2'-O-methyladenosine-3'- phosphorothioate
  modified_base 22: mod_base = OTHER; note = 2'-O-methyladenosine-3'- phosphorothioate
  modified_base 23: mod_base = OTHER; note = 2'-O-methyladenosine-3'-phosphate
gtcaagtaatacatgctgaaaaa

SEQ ID NO: 2090 - RNA, 21 nt, synthetic construct
  source 1..21: mol_type = other RNA
  modified_base 1: mod_base = OTHER; note = 2'-O-methyladenosine-3'- phosphorothioate
  modified_base 2: mod_base = OTHER; note = 2'-O-methyluridine-3'-phosphorothioate
  modified_base 3: mod_base = OTHER; note = 2'-O-methylguanosine-3'-phosphate
  modified_base 4: mod_base = OTHER; note = 2'-O-methyluridine-3'-phosphate
  modified_base 5: mod_base = OTHER; note = 2'-O-methyluridine-3'-phosphate
  modified_base 6: mod_base = OTHER; note = 2'-O-methyladenosine-3'-phosphate
  modified_base 7: mod_base = OTHER; note = 2'-fluorocytidine-3'-phosphate
  modified_base 8: mod_base = OTHER; note = 2'-O-methyluridine-3'-phosphate
  modified_base 9: mod_base = OTHER; note = 2'-fluorouridine-3'-phosphate
  modified_base 10: mod_base = OTHER; note = 2'-fluorocytidine-3'-phosphate
  modified_base 11: mod_base = OTHER; note = 2'-fluorouridine-3'-phosphate
  modified_base 12: mod_base = OTHER; note = 2'-O-methyluridine-3'-phosphate
  modified_base 13: mod_base = OTHER; note = 2'-O-methyladenosine-3'-phosphate
  modified_base 14: mod_base = OTHER; note = 2'-O-methylguanosine-3'-phosphate
  modified_base 15: mod_base = OTHER; note = 2'-O-methyladenosine-3'-phosphate
  modified_base 16: mod_base = OTHER; note = 2'-O-methylguanosine-3'-phosphate
  modified_base 17: mod_base = OTHER; note = 2'-O-methyladenosine-3'-phosphate
  modified_base 18: mod_base = OTHER; note = 2'-O-methylguanosine-3'-phosphate
  modified_base 19: mod_base = OTHER; note = 2'-O-methyladenosine-3'-phosphate
  modified_base 20: mod_base = OTHER; note = 2'-O-methyladenosine-3'-phosphate
  modified_base 21: mod_base = OTHER; note 2'-O-methyladenosine-3'-phosphate-N-[tris(GalNAc-alkyl)-ami dodecanoyl)]-4-hydroxyprolinol (Hyp-(GalNAc-alkyl)3)
atgttacttcttagagagaaa

SEQ ID NO: 2091 - RNA, 23 nt, synthetic construct
  source 1..23: mol_type = other RNA
  modified_base 1: mod_base = OTHER; note = 2'-O-methyluridine-3'-phosphorothioate
  modified_base 2: mod_base = OTHER; note = 2'-fluorouridine -3'-phosphorothioate
  modified_base 3: mod_base = OTHER; note = 2'-O-methyluridine-3'-phosphate
  modified_base 4: mod_base = OTHER; note = 2'-O-methylcytidine-3'-phosphate
  modified_base 5: mod_base = OTHER; note = 2'-O-methyluridine-3'-phosphate
  modified_base 6: mod_base = OTHER; note = 2'-fluorocytidine-3'-phosphate
  modified_base 7: mod_base = OTHER; note = 2'-O-methyluridine-3'-phosphate
  modified_base 8: mod_base = OTHER; note = 2'-fluorocytidine-3'-phosphate
  modified_base 9: mod_base = OTHER; note = 2'-fluorouridine-3'-phosphate
  modified_base 10: mod_base = OTHER; note = 2'-O-methyladenosine-3'-phosphate
  modified_base 11: mod_base = OTHER; note = 2'-O-methyladenosine-3'-phosphate
  modified_base 12: mod_base = OTHER; note = 2'-O-methylguanosine-3'-phosphate
  modified_base 13: mod_base = OTHER; note = 2'-O-methyladenosine-3'-phosphate
  modified_base 14: mod_base = OTHER; note = 2'-fluoroadenosine-3'-phosphate
  modified_base 15: mod_base = OTHER; note = 2'-O-methylguanosine-3'-phosphate
  modified_base 16: mod_base = OTHER; note = 2'-fluorouridine-3'-phosphate
  modified_base 17: mod_base = OTHER; note = 2'-O-methyladenosine-3'-phosphate
  modified_base 18: mod_base = OTHER; note = 2'-O-methyladenosine-3'-phosphate
  modified_base 19: mod_base = OTHER; note = 2'-O-methylcytidine-3'-phosphate
  modified_base 20: mod_base = OTHER; note = 2'-O-methyladenosine-3'-phosphate
  modified_base 21: mod_base = OTHER; note = 2'-O-methyluridine-3'-phosphorothioate
  modified_base 22: mod_base = OTHER; note = 2'-O-methyladenosine-3'- phosphorothioate
  modified_base 23: mod_base = OTHER; note = 2'-O-methylcytidine-3'-phosphate
tttctctctaagaagtaacatac

SEQ ID NO: 2092 - RNA, 21 nt, synthetic construct
  source 1..21: mol_type = other RNA
  modified_base 1: mod_base = OTHER; note = 2'-O-methyluridine-3'-phosphorothioate
  modified_base 2: mod_base = OTHER; note = 2'-O-methylguanosine-3'- phosphorothioate
  modified_base 3: mod_base = OTHER; note = 2'-O-methyluridine-3'-phosphate
  modified_base 4: mod_base = OTHER; note = 2'-O-methyluridine-3'-phosphate
  modified_base 5: mod_base = OTHER; note = 2'-O-methyladenosine-3'-phosphate
  modified_base 6: mod_base = OTHER; note = 2'-O-methylcytidine-3'-phosphate
  modified_base 7: mod_base = OTHER; note = 2'-fluorouridine-3'-phosphate
  modified_base 8: mod_base = OTHER; note = 2'-O-methyluridine-3'-phosphate
  modified_base 9: mod_base = OTHER; note = 2'-fluorocytidine-3'-phosphate
  modified_base 10: mod_base = OTHER; note = 2'-fluorouridine-3'-phosphate
  modified_base 11: mod_base = OTHER; note = 2'-fluorouridine-3'-phosphate
  modified_base 12: mod_base = OTHER; note = 2'-O-methyladenosine-3'-phosphate
  modified_base 13: mod_base = OTHER; note = 2'-O-methylguanosine-3'-phosphate
  modified_base 14: mod_base = OTHER; note = 2'-O-methyladenosine-3'-phosphate
  modified_base 15: mod_base = OTHER; note = 2'-O-methylguanosine-3'-phosphate
  modified_base 16: mod_base = OTHER; note = 2'-O-methyladenosine-3'-phosphate
  modified_base 17: mod_base = OTHER; note = 2'-O-methylguanosine-3'-phosphate
  modified_base 18: mod_base = OTHER; note = 2'-O-methyladenosine-3'-phosphate
  modified_base 19: mod_base = OTHER; note = 2'-O-methyladenosine-3'-phosphate
  modified_base 20: mod_base = OTHER; note = 2'-O-methyladenosine-3'-phosphate
  modified_base 21: mod_base = OTHER; note 2'-O-methyluridine-3'-phosphate-N-[tris(GalNAc-alkyl)-amido decanoyl)]-4-hydroxyprolinol (Hyp-(GalNAc-alkyl)3)
tgttacttcttagagagaaat

SEQ ID NO: 2093 - RNA, 23 nt, synthetic construct
  source 1..23: mol_type = other RNA
  modified_base 1: mod_base = OTHER; note = 2'-O-methyladenosine-3'- phosphorothioate
  modified_base 2: mod_base = OTHER; note = 2'-fluorouridine -3'-phosphorothioate
  modified_base 3: mod_base = OTHER; note = 2'-O-methyluridine-3'-phosphate
  modified_base 4: mod_base = OTHER; note = 2'-O-methyluridine-3'-phosphate
  modified_base 5: mod_base = OTHER; note = 2'-O-methylcytidine-3'-phosphate
  modified_base 6: mod_base = OTHER; note = 2'-fluorouridine-3'-phosphate
  modified_base 7: mod_base = OTHER; note = 2'-O-methylcytidine-3'-phosphate
  modified_base 8: mod_base = OTHER; note = 2'-fluorouridine-3'-phosphate
  modified_base 9: mod_base = OTHER; note = 2'-fluorocytidine-3'-phosphate
  modified_base 10: mod_base = OTHER; note = 2'-O-methyluridine-3'-phosphate
  modified_base 11: mod_base = OTHER; note = 2'-O-methyladenosine-3'-phosphate
  modified_base 12: mod_base = OTHER; note = 2'-O-methyladenosine-3'-phosphate
  modified_base 13: mod_base = OTHER; note = 2'-O-methylguanosine-3'-phosphate
  modified_base 14: mod_base = OTHER; note = 2'-fluoroadenosine-3'-phosphate
  modified_base 15: mod_base = OTHER; note = 2'-O-methyladenosine-3'-phosphate
  modified_base 16: mod_base = OTHER; note = 2'-fluoroguanosine-3'-phosphate
  modified_base 17: mod_base = OTHER; note = 2'-O-methyluridine-3'-phosphate
  modified_base 18: mod_base = OTHER; note = 2'-O-methyladenosine-3'-phosphate
  modified_base 19: mod_base = OTHER; note = 2'-O-methyladenosine-3'-phosphate
  modified_base 20: mod_base = OTHER; note = 2'-O-methylcytidine-3'-phosphate
  modified_base 21: mod_base = OTHER; note = 2'-O-methyladenosine-3'- phosphorothioate
  modified_base 22: mod_base = OTHER; note = 2'-O-methyluridine-3'-phosphorothioate
  modified_base 23: mod_base = OTHER; note = 2'-O-methyladenosine-3'-phosphate
atttctctctaagaagtaacata

SEQ ID NO: 2094 - RNA, 21 nt, synthetic construct
  source 1..21: mol_type = other RNA
  modified_base 1: mod_base = OTHER; note = 2'-O-methyladenosine-3'- phosphorothioate
  modified_base 2: mod_base = OTHER; note = 2'-O-methyluridine-3'-phosphorothioate
  modified_base 3: mod_base = OTHER; note = 2'-O-methylguanosine-3'-phosphate
  modified_base 4: mod_base = OTHER; note = 2'-O-methyluridine-3'-phosphate
  modified_base 5: mod_base = OTHER; note = 2'-O-methyladenosine-3'-phosphate
  modified_base 6: mod_base = OTHER; note = 2'-O-methyluridine-3'-phosphate
  modified_base 7: mod_base = OTHER; note = 2'-fluoroguanosine-3'-phosphate
  modified_base 8: mod_base = OTHER; note = 2'-O-methyluridine-3'-phosphate
  modified_base 9: mod_base = OTHER; note = 2'-fluorouridine-3'-phosphate
  modified_base 10: mod_base = OTHER; note = 2'-fluoroadenosine-3'-phosphate
  modified_base 11: mod_base = OTHER; note = 2'-fluorocytidine-3'-phosphate
  modified_base 12: mod_base = OTHER; note = 2'-O-methyluridine-3'-phosphate
  modified_base 13: mod_base = OTHER; note = 2'-O-methyluridine-3'-phosphate
  modified_base 14: mod_base = OTHER; note = 2'-O-methylcytidine-3'-phosphate
  modified_base 15: mod_base = OTHER; note = 2'-O-methyluridine-3'-phosphate
  modified_base 16: mod_base = OTHER; note = 2'-O-methyluridine-3'-phosphate
  modified_base 17: mod_base = OTHER; note = 2'-O-methyladenosine-3'-phosphate
  modified_base 18: mod_base = OTHER; note = 2'-O-methylguanosine-3'-phosphate
  modified_base 19: mod_base = OTHER; note = 2'-O-methyladenosine-3'-phosphate
  modified_base 20: mod_base = OTHER; note = 2'-O-methylguanosine-3'-phosphate
  modified_base 21: mod_base = OTHER; note 2'-O-methyladenosine-3'-phosphate-N-[tris(GalNAc-alkyl)-ami dodecanoyl)]-4-hydroxyprolinol (Hyp-(GalNAc-alkyl)3)
atgtatgttacttcttagaga

SEQ ID NO: 2095 - RNA, 23 nt, synthetic construct
  source 1..23: mol_type = other RNA
  modified_base 1: mod_base = OTHER; note = 2'-O-methyluridine-3'-phosphorothioate
  modified_base 2: mod_base = OTHER; note = 2'-fluorocytidine-3'-phosphorothioate
  modified_base 3: mod_base = OTHER; note = 2'-O-methyluridine-3'-phosphate
  modified_base 4: mod_base = OTHER; note = 2'-O-methylcytidine-3'-phosphate
  modified_base 5: mod_base = OTHER; note = 2'-O-methyluridine-3'-phosphate
  modified_base 6: mod_base = OTHER; note = 2'-fluoroadenosine-3'-phosphate
  modified_base 7: mod_base = OTHER; note = 2'-O-methyladenosine-3'-phosphate
  modified_base 8: mod_base = OTHER; note = 2'-fluoroguanosine-3'-phosphate
  modified_base 9: mod_base = OTHER; note = 2'-fluoroadenosine-3'-phosphate
  modified_base 10: mod_base = OTHER; note = 2'-O-methyladenosine-3'-phosphate
  modified_base 11: mod_base = OTHER; note = 2'-O-methylguanosine-3'-phosphate
  modified_base 12: mod_base = OTHER; note = 2'-O-methyluridine-3'-phosphate
  modified_base 13: mod_base = OTHER; note = 2'-O-methyladenosine-3'-phosphate
  modified_base 14: mod_base = OTHER; note = 2'-fluoroadenosine-3'-phosphate
  modified_base 15: mod_base = OTHER; note = 2'-O-methylcytidine-3'-phosphate
  modified_base 16: mod_base = OTHER; note = 2'-fluoroadenosine-3'-phosphate
  modified_base 17: mod_base = OTHER; note = 2'-O-methyluridine-3'-phosphate
  modified_base 18: mod_base = OTHER; note = 2'-O-methyladenosine-3'-phosphate
  modified_base 19: mod_base = OTHER; note = 2'-O-methylcytidine-3'-phosphate
  modified_base 20: mod_base = OTHER; note = 2'-O-methyladenosine-3'-phosphate
  modified_base 21: mod_base = OTHER; note = 2'-O-methyluridine-3'-phosphorothioate
  modified_base 22: mod_base = OTHER; note = 2'-O-methylcytidine-3'- phosphorothioate
  modified_base 23: mod_base = OTHER; note = 2'-O-methylcytidine-3'-phosphate
tctctaagaagtaacatacatcc

SEQ ID NO: 2096 - RNA, 21 nt, synthetic construct
  source 1..21: mol_type = other RNA
  modified_base 1: mod_base = OTHER; note = 2'-O-methylguanosine-3'- phosphorothioate
  modified_base 2: mod_base = OTHER; note = 2'-O-methyladenosine-3'- phosphorothioate
  modified_base 3: mod_base = OTHER; note = 2'-O-methyluridine-3'-phosphate
  modified_base 4: mod_base = OTHER; note = 2'-O-methylguanosine-3'-phosphate
  modified_base 5: mod_base = OTHER; note = 2'-O-methyluridine-3'-phosphate
  modified_base 6: mod_base = OTHER; note = 2'-O-methyladenosine-3'-phosphate
  modified_base 7: mod_base = OTHER; note = 2'-fluorouridine-3'-phosphate
  modified_base 8: mod_base = OTHER; note = 2'-O-methylguanosine-3'-phosphate
  modified_base 9: mod_base = OTHER; note = 2'-fluorouridine-3'-phosphate
  modified_base 10: mod_base = OTHER; note = 2'-fluorouridine-3'-phosphate
  modified_base 11: mod_base = OTHER; note = 2'-fluoroadenosine-3'-phosphate
  modified_base 12: mod_base = OTHER; note = 2'-O-methylcytidine-3'-phosphate
  modified_base 13: mod_base = OTHER; note = 2'-O-methyluridine-3'-phosphate
  modified_base 14: mod_base = OTHER; note = 2'-O-methyluridine-3'-phosphate
  modified_base 15: mod_base = OTHER; note = 2'-O-methylcytidine-3'-phosphate
  modified_base 16: mod_base = OTHER; note = 2'-O-methyluridine-3'-phosphate
  modified_base 17: mod_base = OTHER; note = 2'-O-methyluridine-3'-phosphate
  modified_base 18: mod_base = OTHER; note = 2'-O-methyladenosine-3'-phosphate
  modified_base 19: mod_base = OTHER; note = 2'-O-methylguanosine-3'-phosphate
  modified_base 20: mod_base = OTHER; note = 2'-O-methyladenosine-3'-phosphate
  modified_base 21: mod_base = OTHER; note 2'-O-methylguanosine-3'-phosphate-N-[tris(GalNAc-alkyl)-ami dodecanoyl)]-4-hydroxyprolinol (Hyp-(GalNAc-alkyl)3)
gatgtatgttacttcttagag

SEQ ID NO: 2097 - RNA, 23 nt, synthetic construct
  source 1..23: mol_type = other RNA
  modified_base 1: mod_base = OTHER; note = 2'-O-methylcytidine-3'- phosphorothioate
  modified_base 2: mod_base = OTHER; note = 2'-fluorouridine -3'-phosphorothioate
  modified_base 3: mod_base = OTHER; note = 2'-O-methylcytidine-3'-phosphate
  modified_base 4: mod_base = OTHER; note = 2'-O-methyluridine-3'-phosphate
  modified_base 5: mod_base = OTHER; note = 2'-O-methyladenosine-3'-phosphate
  modified_base 6: mod_base = OTHER; note = 2'-fluoroadenosine-3'-phosphate
  modified_base 7: mod_base = OTHER; note = 2'-O-methylguanosine-3'-phosphate
  modified_base 8: mod_base = OTHER; note = 2'-fluoroadenosine-3'-phosphate
  modified_base 9: mod_base = OTHER; note = 2'-fluoroadenosine-3'-phosphate
  modified_base 10: mod_base = OTHER; note = 2'-O-methylguanosine-3'-phosphate
  modified_base 11: mod_base = OTHER; note = 2'-O-methyluridine-3'-phosphate
  modified_base 12: mod_base = OTHER; note = 2'-O-methyladenosine-3'-phosphate
  modified_base 13: mod_base = OTHER; note = 2'-O-methyladenosine-3'-phosphate
  modified_base 14: mod_base = OTHER; note = 2'-fluorocytidine-3'-phosphate
  modified_base 15: mod_base = OTHER; note = 2'-O-methyladenosine-3'-phosphate
  modified_base 16: mod_base = OTHER; note = 2'-fluorouridine-3'-phosphate
  modified_base 17: mod_base = OTHER; note = 2'-O-methyladenosine-3'-phosphate
  modified_base 18: mod_base = OTHER; note = 2'-O-methylcytidine-3'-phosphate
  modified_base 19: mod_base = OTHER; note = 2'-O-methyladenosine-3'-phosphate
  modified_base 20: mod_base = OTHER; note = 2'-O-methyluridine-3'-phosphate
  modified_base 21: mod_base = OTHER; note = 2'-O-methylcytidine-3'- phosphorothioate
  modified_base 22: mod_base = OTHER; note = 2'-O-methylcytidine-3'- phosphorothioate
  modified_base 23: mod_base = OTHER; note = 2'-O-methyluridine-3'-phosphate
ctctaagaagtaacatacatcct

SEQ ID NO: 2098 - RNA, 21 nt, synthetic construct
  source 1..21: mol_type = other RNA
  modified_base 1: mod_base = OTHER; note = 2'-O-methyladenosine-3'- phosphorothioate
  modified_base 2: mod_base = OTHER; note = 2'-O-methylcytidine-3'- phosphorothioate
  modified_base 3: mod_base = OTHER; note = 2'-O-methyladenosine-3'-phosphate
  modified_base 4: mod_base = OTHER; note = 2'-O-methyladenosine-3'-phosphate
  modified_base 5: mod_base = OTHER; note = 2'-O-methylcytidine-3'-phosphate
  modified_base 6: mod_base = OTHER; note = 2'-O-methyluridine-3'-phosphate
  modified_base 7: mod_base = OTHER; note = 2'-fluorouridine-3'-phosphate
  modified_base 8: mod_base = OTHER; note = 2'-O-methyluridine-3'-phosphate
  modified_base 9: mod_base = OTHER; note = 2'-fluoroguanosine-3'-phosphate
  modified_base 10: mod_base = OTHER; note = 2'-fluoroadenosine-3'-phosphate
  modified_base 11: mod_base = OTHER; note = 2'-fluoroguanosine-3'-phosphate
  modified_base 12: mod_base = OTHER; note = 2'-O-methyladenosine-3'-phosphate
  modified_base 13: mod_base = OTHER; note = 2'-O-methyladenosine-3'-phosphate
  modified_base 14: mod_base = OTHER; note = 2'-O-methylguanosine-3'-phosphate
  modified_base 15: mod_base = OTHER; note = 2'-O-methylguanosine-3'-phosphate
  modified_base 16: mod_base = OTHER; note = 2'-O-methyluridine-3'-phosphate
  modified_base 17: mod_base = OTHER; note = 2'-O-methyladenosine-3'-phosphate
  modified_base 18: mod_base = OTHER; note = 2'-O-methylguanosine-3'-phosphate
  modified_base 19: mod_base = OTHER; note = 2'-O-methylcytidine-3'-phosphate
  modified_base 20: mod_base = OTHER; note = 2'-O-methyladenosine-3'-phosphate
  modified_base 21: mod_base = OTHER; note 2'-O-methylcytidine-3'-phosphate-N-[tris(GalNAc-alkyl)-amid odecanoyl)]-4-hydroxyprolinol (Hyp-(GalNAc-alkyl)3)
acaactttgagaaggtagcac

SEQ ID NO: 2099 - RNA, 23 nt, synthetic construct
  source 1..23: mol_type = other RNA
  modified_base 1: mod_base = OTHER; note = 2'-O-methylguanosine-3'- phosphorothioate
  modified_base 2: mod_base = OTHER; note = 2'-fluorouridine -3'-phosphorothioate
  modified_base 3: mod_base = OTHER; note = 2'-O-methylguanosine-3'-phosphate
  modified_base 4: mod_base = OTHER; note = 2'-O-methylcytidine-3'-phosphate
  modified_base 5: mod_base = OTHER; note = 2'-O-methyluridine-3'-phosphate
  modified_base 6: mod_base = OTHER; note = 2'-fluoroadenosine-3'-phosphate
  modified_base 7: mod_base = OTHER; note = 2'-O-methylcytidine-3'-phosphate
  modified_base 8: mod_base = OTHER; note = 2'-fluorocytidine-3'-phosphate
  modified_base 9: mod_base = OTHER; note = 2'-fluorouridine-3'-phosphate
  modified_base 10: mod_base = OTHER; note = 2'-O-methyluridine-3'-phosphate
  modified_base 11: mod_base = OTHER; note = 2'-O-methylcytidine-3'-phosphate
  modified_base 12: mod_base = OTHER; note = 2'-O-methyluridine-3'-phosphate
  modified_base 13: mod_base = OTHER; note = 2'-O-methylcytidine-3'-phosphate
  modified_base 14: mod_base = OTHER; note = 2'-fluoroadenosine-3'-phosphate
  modified_base 15: mod_base = OTHER; note = 2'-O-methyladenosine-3'-phosphate
  modified_base 16: mod_base = OTHER; note = 2'-fluoroadenosine-3'-phosphate
  modified_base 17: mod_base = OTHER; note = 2'-O-methylguanosine-3'-phosphate
  modified_base 18: mod_base = OTHER; note = 2'-O-methyluridine-3'-phosphate
  modified_base 19: mod_base = OTHER; note = 2'-O-methyluridine-3'-phosphate
  modified_base 20: mod_base = OTHER; note = 2'-O-methylguanosine-3'-phosphate
  modified_base 21: mod_base = OTHER; note = 2'-O-methyluridine-3'-phosphorothioate
  modified_base 22: mod_base = OTHER; note = 2'-O-methylguanosine-3'- phosphorothioate
  modified_base 23: mod_base = OTHER; note = 2'-O-methyladenosine-3'-phosphate
gtgctaccttctcaaagttgtga

SEQ ID NO: 2100 - RNA, 21 nt, synthetic construct
  source 1..21: mol_type = other RNA
  modified_base 1: mod_base = OTHER; note = 2'-O-methylcytidine-3'- phosphorothioate
  modified_base 2: mod_base = OTHER; note = 2'-O-methyladenosine-3'- phosphorothioate
  modified_base 3: mod_base = OTHER; note = 2'-O-methyladenosine-3'-phosphate
  modified_base 4: mod_base = OTHER; note = 2'-O-methylcytidine-3'-phosphate
  modified_base 5: mod_base = OTHER; note = 2'-O-methyluridine-3'-phosphate
  modified_base 6: mod_base = OTHER; note = 2'-O-methyluridine-3'-phosphate
  modified_base 7: mod_base = OTHER; note = 2'-fluorouridine-3'-phosphate
  modified_base 8: mod_base = OTHER; note = 2'-O-methylguanosine-3'-phosphate
  modified_base 9: mod_base = OTHER; note = 2'-fluoroadenosine-3'-phosphate
  modified_base 10: mod_base = OTHER; note = 2'-fluoroguanosine-3'-phosphate
  modified_base 11: mod_base = OTHER; note = 2'-fluoroadenosine-3'-phosphate
  modified_base 12: mod_base = OTHER; note = 2'-O-methyladenosine-3'-phosphate
  modified_base 13: mod_base = OTHER; note = 2'-O-methylguanosine-3'-phosphate
  modified_base 14: mod_base = OTHER; note = 2'-O-methylguanosine-3'-phosphate
  modified_base 15: mod_base = OTHER; note = 2'-O-methyluridine-3'-phosphate
  modified_base 16: mod_base = OTHER; note = 2'-O-methyladenosine-3'-phosphate
  modified_base 17: mod_base = OTHER; note = 2'-O-methylguanosine-3'-phosphate
  modified_base 18: mod_base = OTHER; note = 2'-O-methylcytidine-3'-phosphate
  modified_base 19: mod_base = OTHER; note = 2'-O-methyladenosine-3'-phosphate
  modified_base 20: mod_base = OTHER; note = 2'-O-methylcytidine-3'-phosphate
  modified_base 21: mod_base = OTHER; note 2'-O-methyluridine-3'-phosphate-N-[tris(GalNAc-alkyl)-amido decanoyl)]-4-hydroxyprolinol (Hyp-(GalNAc-alkyl)3)
caactttgagaaggtagcact

SEQ ID NO: 2101 - RNA, 23 nt, synthetic construct
  source 1..23: mol_type = other RNA
  modified_base 1: mod_base = OTHER; note = 2'-O-methyladenosine-3'- phosphorothioate
  modified_base 2: mod_base = OTHER; note = 2'-fluoroguanosine-3'-phosphorothioate
  modified_base 3: mod_base = OTHER; note = 2'-O-methyluridine-3'-phosphate
  modified_base 4: mod_base = OTHER; note = 2'-O-methylguanosine-3'-phosphate
  modified_base 5: mod_base = OTHER; note = 2'-O-methylcytidine-3'-phosphate
  modified_base 6: mod_base = OTHER; note = 2'-fluorouridine-3'-phosphate
  modified_base 7: mod_base = OTHER; note = 2'-O-methyladenosine-3'-phosphate
  modified_base 8: mod_base = OTHER; note = 2'-fluorocytidine-3'-phosphate
  modified_base 9: mod_base = OTHER; note = 2'-fluorocytidine-3'-phosphate
  modified_base 10: mod_base = OTHER; note = 2'-O-methyluridine-3'-phosphate
  modified_base 11: mod_base = OTHER; note = 2'-O-methyluridine-3'-phosphate
  modified_base 12: mod_base = OTHER; note = 2'-O-methylcytidine-3'-phosphate
  modified_base 13: mod_base = OTHER; note = 2'-O-methyluridine-3'-phosphate
  modified_base 14: mod_base = OTHER; note = 2'-fluorocytidine-3'-phosphate
  modified_base 15: mod_base = OTHER; note = 2'-O-methyladenosine-3'-phosphate
  modified_base 16: mod_base = OTHER; note = 2'-fluoroadenosine-3'-phosphate
  modified_base 17: mod_base = OTHER; note = 2'-O-methyladenosine-3'-phosphate
  modified_base 18: mod_base = OTHER; note = 2'-O-methylguanosine-3'-phosphate
  modified_base 19: mod_base = OTHER; note = 2'-O-methyluridine-3'-phosphate
  modified_base 20: mod_base = OTHER; note = 2'-O-methyluridine-3'-phosphate
  modified_base 21: mod_base = OTHER; note = 2'-O-methylguanosine-3'- phosphorothioate
  modified_base 22: mod_base = OTHER; note = 2'-O-methyluridine-3'-phosphorothioate
  modified_base 23: mod_base = OTHER; note = 2'-O-methylguanosine-3'-phosphate
agtgctaccttctcaaagttgtg

SEQ ID NO: 2102 - RNA, 21 nt, synthetic construct
  source 1..21: mol_type = other RNA
  modified_base 1: mod_base = OTHER; note = 2'-O-methyladenosine-3'- phosphorothioate
  modified_base 2: mod_base = OTHER; note = 2'-O-methyluridine-3'-phosphorothioate
  modified_base 3: mod_base = OTHER; note = 2'-O-methyluridine-3'-phosphate
  modified_base 4: mod_base = OTHER; note = 2'-O-methylcytidine-3'-phosphate
  modified_base 5: mod_base = OTHER; note = 2'-O-methyladenosine-3'-phosphate
  modified_base 6: mod_base = OTHER; note = 2'-O-methylcytidine-3'-phosphate
  modified_base 7: mod_base = OTHER; note = 2'-fluoroadenosine-3'-phosphate
  modified_base 8: mod_base = OTHER; note = 2'-O-methyladenosine-3'-phosphate
  modified_base 9: mod_base = OTHER; note = 2'-fluorocytidine-3'-phosphate
  modified_base 10: mod_base = OTHER; note = 2'-fluorouridine-3'-phosphate
  modified_base 11: mod_base = OTHER; note = 2'-fluorouridine-3'-phosphate
  modified_base 12: mod_base = OTHER; note = 2'-O-methyluridine-3'-phosphate
  modified_base 13: mod_base = OTHER; note = 2'-O-methylguanosine-3'-phosphate
  modified_base 14: mod_base = OTHER; note = 2'-O-methyladenosine-3'-phosphate
  modified_base 15: mod_base = OTHER; note = 2'-O-methylguanosine-3'-phosphate
  modified_base 16: mod_base = OTHER; note = 2'-O-methyladenosine-3'-phosphate
  modified_base 17: mod_base = OTHER; note = 2'-O-methyladenosine-3'-phosphate
  modified_base 18: mod_base = OTHER; note = 2'-O-methylguanosine-3'-phosphate
  modified_base 19: mod_base = OTHER; note = 2'-O-methylguanosine-3'-phosphate
  modified_base 20: mod_base = OTHER; note = 2'-O-methyluridine-3'-phosphate
  modified_base 21: mod_base = OTHER; note 2'-O-methyladenosine-3'-phosphate-N-[tris(GalNAc-alkyl)-ami dodecanoyl)]-4-hydroxyprolinol (Hyp-(GalNAc-alkyl)3)
attcacaactttgagaaggta

SEQ ID NO: 2103 - RNA, 23 nt, synthetic construct
  source 1..23: mol_type = other RNA
  modified_base 1: mod_base = OTHER; note = 2'-O-methyluridine-3'-phosphorothioate
  modified_base 2: mod_base = OTHER; note = 2'-fluoroadenosine-3'-phosphorothioate
  modified_base 3: mod_base = OTHER; note = 2'-O-methylcytidine-3'-phosphate
  modified_base 4: mod_base = OTHER; note = 2'-O-methylcytidine-3'-phosphate
  modified_base 5: mod_base = OTHER; note = 2'-O-methyluridine-3'-phosphate
  modified_base 6: mod_base = OTHER; note = 2'-fluorouridine-3'-phosphate
  modified_base 7: mod_base = OTHER; note = 2'-O-methylcytidine-3'-phosphate
  modified_base 8: mod_base = OTHER; note = 2'-fluorouridine-3'-phosphate
  modified_base 9: mod_base = OTHER; note = 2'-fluorocytidine-3'-phosphate
  modified_base 10: mod_base = OTHER; note = 2'-O-methyladenosine-3'-phosphate
  modified_base 11: mod_base = OTHER; note = 2'-O-methyladenosine-3'-phosphate
  modified_base 12: mod_base = OTHER; note = 2'-O-methyladenosine-3'-phosphate
  modified_base 13: mod_base = OTHER; note = 2'-O-methylguanosine-3'-phosphate
  modified_base 14: mod_base = OTHER; note = 2'-fluorouridine-3'-phosphate
  modified_base 15: mod_base = OTHER; note = 2'-O-methyluridine-3'-phosphate
  modified_base 16: mod_base = OTHER; note = 2'-fluoroguanosine-3'-phosphate
  modified_base 17: mod_base = OTHER; note = 2'-O-methyluridine-3'-phosphate
  modified_base 18: mod_base = OTHER; note = 2'-O-methylguanosine-3'-phosphate
  modified_base 19: mod_base = OTHER; note = 2'-O-methyladenosine-3'-phosphate
  modified_base 20: mod_base = OTHER; note = 2'-O-methyladenosine-3'-phosphate
  modified_base 21: mod_base = OTHER; note = 2'-O-methyluridine-3'-phosphorothioate
  modified_base 22: mod_base = OTHER; note = 2'-O-methylcytidine-3'- phosphorothioate
  modified_base 23: mod_base = OTHER; note = 2'-O-methyladenosine-3'-phosphate
taccttctcaaagttgtgaatca

SEQ ID NO: 2104 - RNA, 21 nt, synthetic construct
  source 1..21: mol_type = other RNA
  modified_base 1: mod_base = OTHER; note = 2'-O-methylguanosine-3'- phosphorothioate
  modified_base 2: mod_base = OTHER; note = 2'-O-methyladenosine-3'- phosphorothioate
  modified_base 3: mod_base = OTHER; note = 2'-O-methyluridine-3'-phosphate
  modified_base 4: mod_base = OTHER; note = 2'-O-methyluridine-3'-phosphate
  modified_base 5: mod_base = OTHER; note = 2'-O-methylcytidine-3'-phosphate
  modified_base 6: mod_base = OTHER; note = 2'-O-methyladenosine-3'-phosphate
  modified_base 7: mod_base = OTHER; note = 2'-fluorocytidine-3'-phosphate
  modified_base 8: mod_base = OTHER; note = 2'-O-methyladenosine-3'-phosphate
  modified_base 9: mod_base = OTHER; note = 2'-fluoroadenosine-3'-phosphate
  modified_base 10: mod_base = OTHER; note = 2'-fluorocytidine-3'-phosphate
  modified_base 11: mod_base = OTHER; note = 2'-fluorouridine-3'-phosphate
  modified_base 12: mod_base = OTHER; note = 2'-O-methyluridine-3'-phosphate
  modified_base 13: mod_base = OTHER; note = 2'-O-methyluridine-3'-phosphate
  modified_base 14: mod_base = OTHER; note = 2'-O-methylguanosine-3'-phosphate
  modified_base 15: mod_base = OTHER; note = 2'-O-methyladenosine-3'-phosphate
  modified_base 16: mod_base = OTHER; note = 2'-O-methylguanosine-3'-phosphate
  modified_base 17: mod_base = OTHER; note = 2'-O-methyladenosine-3'-phosphate
  modified_base 18: mod_base = OTHER; note = 2'-O-methyladenosine-3'-phosphate
  modified_base 19: mod_base = OTHER; note = 2'-O-methylguanosine-3'-phosphate
  modified_base 20: mod_base = OTHER; note = 2'-O-methylguanosine-3'-phosphate
  modified_base 21: mod_base = OTHER; note 2'-O-methyluridine-3'-phosphate-N-[tris(GalNAc-alkyl)-amido decanoyl)]-4-hydroxyprolinol (Hyp-(GalNAc-alkyl)3)
gattcacaactttgagaaggt

SEQ ID NO: 2105 - RNA, 23 nt, synthetic construct
  source 1..23: mol_type = other RNA
  modified_base 1: mod_base = OTHER; note = 2'-O-methyladenosine-3'- phosphorothioate
  modified_base 2: mod_base = OTHER; note = 2'-fluorocytidine-3'-phosphorothioate
  modified_base 3: mod_base = OTHER; note = 2'-O-methylcytidine-3'-phosphate
  modified_base 4: mod_base = OTHER; note = 2'-O-methyluridine-3'-phosphate
  modified_base 5: mod_base = OTHER; note = 2'-O-methyluridine-3'-phosphate
  modified_base 6: mod_base = OTHER; note = 2'-fluorocytidine-3'-phosphate
  modified_base 7: mod_base = OTHER; note = 2'-O-methyluridine-3'-phosphate
  modified_base 8: mod_base = OTHER; note = 2'-fluorocytidine-3'-phosphate
  modified_base 9: mod_base = OTHER; note = 2'-fluoroadenosine-3'-phosphate
  modified_base 10: mod_base = OTHER; note = 2'-O-methyladenosine-3'-phosphate
  modified_base 11: mod_base = OTHER; note = 2'-O-methyladenosine-3'-phosphate
  modified_base 12: mod_base = OTHER; note = 2'-O-methylguanosine-3'-phosphate
  modified_base 13: mod_base = OTHER; note = 2'-O-methyluridine-3'-phosphate
  modified_base 14: mod_base = OTHER; note = 2'-fluorouridine-3'-phosphate
  modified_base 15: mod_base = OTHER; note = 2'-O-methylguanosine-3'-phosphate
  modified_base 16: mod_base = OTHER; note = 2'-fluorouridine-3'-phosphate
  modified_base 17: mod_base = OTHER; note = 2'-O-methylguanosine-3'-phosphate
  modified_base 18: mod_base = OTHER; note = 2'-O-methyladenosine-3'-phosphate
  modified_base 19: mod_base = OTHER; note = 2'-O-methyladenosine-3'-phosphate
  modified_base 20: mod_base = OTHER; note = 2'-O-methyluridine-3'-phosphate
  modified_base 21: mod_base = OTHER; note = 2'-O-methylcytidine-3'- phosphorothioate
  modified_base 22: mod_base = OTHER; note = 2'-O-methyladenosine-3'- phosphorothioate
  modified_base 23: mod_base = OTHER; note = 2'-O-methylguanosine-3'-phosphate
accttctcaaagttgtgaatcag

SEQ ID NO: 2106 - RNA, 21 nt, synthetic construct
  source 1..21: mol_type = other RNA
  modified_base 1: mod_base = OTHER; note = 2'-O-methyladenosine-3'- phosphorothioate
  modified_base 2: mod_base = OTHER; note = 2'-O-methyladenosine-3'- phosphorothioate
  modified_base 3: mod_base = OTHER; note = 2'-O-methylcytidine-3'-phosphate
  modified_base 4: mod_base = OTHER; note = 2'-O-methyladenosine-3'-phosphate
  modified_base 5: mod_base = OTHER; note = 2'-O-methyluridine-3'-phosphate
  modified_base 6: mod_base = OTHER; note = 2'-O-methylguanosine-3'-phosphate
  modified_base 7: mod_base = OTHER; note = 2'-fluorocytidine-3'-phosphate
  modified_base 8: mod_base = OTHER; note = 2'-O-methyluridine-3'-phosphate
  modified_base 9: mod_base = OTHER; note = 2'-fluoroadenosine-3'-phosphate
  modified_base 10: mod_base = OTHER; note = 2'-fluoroadenosine-3'-phosphate
  modified_base 11: mod_base = OTHER; note = 2'-fluoroadenosine-3'-phosphate
  modified_base 12: mod_base = OTHER; note = 2'-O-methyluridine-3'-phosphate
  modified_base 13: mod_base = OTHER; note = 2'-O-methylcytidine-3'-phosphate
  modified_base 14: mod_base = OTHER; note = 2'-O-methyladenosine-3'-phosphate
  modified_base 15: mod_base = OTHER; note = 2'-O-methylguanosine-3'-phosphate
  modified_base 16: mod_base = OTHER; note = 2'-O-methyluridine-3'-phosphate
  modified_base 17: mod_base = OTHER; note = 2'-O-methyladenosine-3'-phosphate
  modified_base 18: mod_base = OTHER; note = 2'-O-methylcytidine-3'-phosphate
  modified_base 19: mod_base = OTHER; note = 2'-O-methyluridine-3'-phosphate
  modified_base 20: mod_base = OTHER; note = 2'-O-methyluridine-3'-phosphate
  modified_base 21: mod_base = OTHER; note 2'-O-methylcytidine-3'-phosphate-N-[tris(GalNAc-alkyl)-amid odecanoyl)]-4-hydroxyprolinol (Hyp-(GalNAc-alkyl)3)
aacatgctaaatcagtacttc

SEQ ID NO: 2107 - RNA, 23 nt, synthetic construct
  source 1..23: mol_type = other RNA
  modified_base 1: mod_base = OTHER; note = 2'-O-methylguanosine-3'- phosphorothioate
  modified_base 2: mod_base = OTHER; note = 2'-fluoroadenosine-3'-phosphorothioate
  modified_base 3: mod_base = OTHER; note = 2'-O-methyladenosine-3'-phosphate
  modified_base 4: mod_base = OTHER; note = 2'-O-methylguanosine-3'-phosphate
  modified_base 5: mod_base = OTHER; note = 2'-O-methyluridine-3'-phosphate
  modified_base 6: mod_base = OTHER; note = 2'-fluoroadenosine-3'-phosphate
  modified_base 7: mod_base = OTHER; note = 2'-O-methylcytidine-3'-phosphate
  modified_base 8: mod_base = OTHER; note = 2'-fluorouridine-3'-phosphate
  modified_base 9: mod_base = OTHER; note = 2'-fluoroguanosine-3'-phosphate
  modified_base 10: mod_base = OTHER; note = 2'-O-methyladenosine-3'-phosphate
  modified_base 11: mod_base = OTHER; note = 2'-O-methyluridine-3'-phosphate
  modified_base 12: mod_base = OTHER; note = 2'-O-methyluridine-3'-phosphate
  modified_base 13: mod_base = OTHER; note = 2'-O-methyluridine-3'-phosphate
  modified_base 14: mod_base = OTHER; note = 2'-fluoroadenosine-3'-phosphate
  modified_base 15: mod_base = OTHER; note = 2'-O-methylguanosine-3'-phosphate
  modified_base 16: mod_base = OTHER; note = 2'-fluorocytidine-3'-phosphate
  modified_base 17: mod_base = OTHER; note = 2'-O-methyladenosine-3'-phosphate
  modified_base 18: mod_base = OTHER; note = 2'-O-methyluridine-3'-phosphate
  modified_base 19: mod_base = OTHER; note = 2'-O-methylguanosine-3'-phosphate
  modified_base 20: mod_base = OTHER; note = 2'-O-methyluridine-3'-phosphate
  modified_base 21: mod_base = OTHER; note = 2'-O-methyluridine-3'-phosphorothioate
  modified_base 22: mod_base = OTHER; note = 2'-O-methylguanosine-3'- phosphorothioate
  modified_base 23: mod_base = OTHER; note = 2'-O-methyluridine-3'-phosphate
gaagtactgatttagcatgttgt

SEQ ID NO: 2108 - RNA, 21 nt, synthetic construct
  source 1..21: mol_type = other RNA
  modified_base 1: mod_base = OTHER; note = 2'-O-methyladenosine-3'- phosphorothioate
  modified_base 2: mod_base = OTHER; note = 2'-O-methylcytidine-3'- phosphorothioate
  modified_base 3: mod_base = OTHER; note = 2'-O-methyladenosine-3'-phosphate
  modified_base 4: mod_base = OTHER; note = 2'-O-methyluridine-3'-phosphate
  modified_base 5: mod_base = OTHER; note = 2'-O-methylguanosine-3'-phosphate
  modified_base 6: mod_base = OTHER; note = 2'-O-methylcytidine-3'-phosphate
  modified_base 7: mod_base = OTHER; note = 2'-fluorouridine-3'-phosphate
  modified_base 8: mod_base = OTHER; note = 2'-O-methyladenosine-3'-phosphate
  modified_base 9: mod_base = OTHER; note = 2'-fluoroadenosine-3'-phosphate
  modified_base 10: mod_base = OTHER; note = 2'-fluoroadenosine-3'-phosphate
  modified_base 11: mod_base = OTHER; note = 2'-fluorouridine-3'-phosphate
  modified_base 12: mod_base = OTHER; note = 2'-O-methylcytidine-3'-phosphate
  modified_base 13: mod_base = OTHER; note = 2'-O-methyladenosine-3'-phosphate
  modified_base 14: mod_base = OTHER; note = 2'-O-methylguanosine-3'-phosphate
  modified_base 15: mod_base = OTHER; note = 2'-O-methyluridine-3'-phosphate
  modified_base 16: mod_base = OTHER; note = 2'-O-methyladenosine-3'-phosphate
  modified_base 17: mod_base = OTHER; note = 2'-O-methylcytidine-3'-phosphate
  modified_base 18: mod_base = OTHER; note = 2'-O-methyluridine-3'-phosphate
  modified_base 19: mod_base = OTHER; note = 2'-O-methyluridine-3'-phosphate
  modified_base 20: mod_base = OTHER; note = 2'-O-methylcytidine-3'-phosphate
  modified_base 21: mod_base = OTHER; note 2'-O-methylcytidine-3'-phosphate-N-[tris(GalNAc-alkyl)-amid odecanoyl)]-4-hydroxyprolinol (Hyp-(GalNAc-alkyl)3)
acatgctaaatcagtacttcc

SEQ ID NO: 2109 - RNA, 23 nt, synthetic construct
  source 1..23: mol_type = other RNA
  modified_base 1: mod_base = OTHER; note = 2'-O-methylguanosine-3'- phosphorothioate
  modified_base 2: mod_base = OTHER; note = 2'-fluoroguanosine-3'-phosphorothioate
  modified_base 3: mod_base = OTHER; note = 2'-O-methyladenosine-3'-phosphate
  modified_base 4: mod_base = OTHER; note = 2'-O-methyladenosine-3'-phosphate
  modified_base 5: mod_base = OTHER; note = 2'-O-methylguanosine-3'-phosphate
  modified_base 6: mod_base = OTHER; note = 2'-fluorouridine-3'-phosphate
  modified_base 7: mod_base = OTHER; note = 2'-O-methyladenosine-3'-phosphate
  modified_base 8: mod_base = OTHER; note = 2'-fluorocytidine-3'-phosphate
  modified_base 9: mod_base = OTHER; note = 2'-fluorouridine-3'-phosphate
  modified_base 10: mod_base = OTHER; note = 2'-O-methylguanosine-3'-phosphate
  modified_base 11: mod_base = OTHER; note = 2'-O-methyladenosine-3'-phosphate
  modified_base 12: mod_base = OTHER; note = 2'-O-methyluridine-3'-phosphate
  modified_base 13: mod_base = OTHER; note = 2'-O-methyluridine-3'-phosphate
  modified_base 14: mod_base = OTHER; note = 2'-fluorouridine-3'-phosphate
  modified_base 15: mod_base = OTHER; note = 2'-O-methyladenosine-3'-phosphate
  modified_base 16: mod_base = OTHER; note = 2'-fluoroguanosine-3'-phosphate
  modified_base 17: mod_base = OTHER; note = 2'-O-methylcytidine-3'-phosphate
  modified_base 18: mod_base = OTHER; note = 2'-O-methyladenosine-3'-phosphate
  modified_base 19: mod_base = OTHER; note = 2'-O-methyluridine-3'-phosphate
  modified_base 20: mod_base = OTHER; note = 2'-O-methylguanosine-3'-phosphate
  modified_base 21: mod_base = OTHER; note = 2'-O-methyluridine-3'-phosphorothioate
  modified_base 22: mod_base = OTHER; note = 2'-O-methyluridine-3'-phosphorothioate
  modified_base 23: mod_base = OTHER; note = 2'-O-methylguanosine-3'-phosphate
ggaagtactgatttagcatgttg

SEQ ID NO: 2110 - RNA, 21 nt, synthetic construct
  source 1..21: mol_type = other RNA
  modified_base 1: mod_base = OTHER; note = 2'-O-methylguanosine-3'- phosphorothioate
  modified_base 2: mod_base = OTHER; note = 2'-O-methyladenosine-3'- phosphorothioate
  modified_base 3: mod_base = OTHER; note = 2'-O-methyladenosine-3'-phosphate
  modified_base 4: mod_base = OTHER; note = 2'-O-methylcytidine-3'-phosphate
  modified_base 5: mod_base = OTHER; note = 2'-O-methyladenosine-3'-phosphate
  modified_base 6: mod_base = OTHER; note = 2'-O-methyladenosine-3'-phosphate
  modified_base 7: mod_base = OTHER; note = 2'-fluorocytidine-3'-phosphate
  modified_base 8: mod_base = OTHER; note = 2'-O-methyladenosine-3'-phosphate
  modified_base 9: mod_base = OTHER; note = 2'-fluorouridine-3'-phosphate
  modified_base 10: mod_base = OTHER; note = 2'-fluoroguanosine-3'-phosphate
  modified_base 11: mod_base = OTHER; note = 2'-fluorocytidine-3'-phosphate
  modified_base 12: mod_base = OTHER; note = 2'-O-methyluridine-3'-phosphate
  modified_base 13: mod_base = OTHER; note = 2'-O-methyladenosine-3'-phosphate
  modified_base 14: mod_base = OTHER; note = 2'-O-methyladenosine-3'-phosphate
  modified_base 15: mod_base = OTHER; note = 2'-O-methyladenosine-3'-phosphate
  modified_base 16: mod_base = OTHER; note = 2'-O-methyluridine-3'-phosphate
  modified_base 17: mod_base = OTHER; note = 2'-O-methylcytidine-3'-phosphate
  modified_base 18: mod_base = OTHER; note = 2'-O-methyladenosine-3'-phosphate
  modified_base 19: mod_base = OTHER; note = 2'-O-methylguanosine-3'-phosphate
  modified_base 20: mod_base = OTHER; note = 2'-O-methyluridine-3'-phosphate
  modified_base 21: mod_base = OTHER; note 2'-O-methyladenosine-3'-phosphate-N-[tris(GalNAc-alkyl)-ami dodecanoyl)]-4-hydroxyprolinol (Hyp-(GalNAc-alkyl)3)
gaacaacatgctaaatcagta

SEQ ID NO: 2111 - RNA, 23 nt, synthetic construct
  source 1..23: mol_type = other RNA
  modified_base 1: mod_base = OTHER; note = 2'-O-methyluridine-3'-phosphorothioate
  modified_base 2: mod_base = OTHER; note = 2'-fluoroadenosine-3'-phosphorothioate
  modified_base 3: mod_base = OTHER; note = 2'-O-methylcytidine-3'-phosphate
  modified_base 4: mod_base = OTHER; note = 2'-O-methyluridine-3'-phosphate
  modified_base 5: mod_base = OTHER; note = 2'-O-methylguanosine-3'-phosphate
  modified_base 6: mod_base = OTHER; note = 2'-fluoroadenosine-3'-phosphate
  modified_base 7: mod_base = OTHER; note = 2'-O-methyluridine-3'-phosphate
  modified_base 8: mod_base = OTHER; note = 2'-fluorouridine-3'-phosphate
  modified_base 9: mod_base = OTHER; note = 2'-fluorouridine-3'-phosphate
  modified_base 10: mod_base = OTHER; note = 2'-O-methyladenosine-3'-phosphate
  modified_base 11: mod_base = OTHER; note = 2'-O-methylguanosine-3'-phosphate
  modified_base 12: mod_base = OTHER; note = 2'-O-methylcytidine-3'-phosphate
  modified_base 13: mod_base = OTHER; note = 2'-O-methyladenosine-3'-phosphate
  modified_base 14: mod_base = OTHER; note = 2'-fluorouridine-3'-phosphate
  modified_base 15: mod_base = OTHER; note = 2'-O-methylguanosine-3'-phosphate
  modified_base 16: mod_base = OTHER; note = 2'-fluorouridine-3'-phosphate
  modified_base 17: mod_base = OTHER; note = 2'-O-methyluridine-3'-phosphate
  modified_base 18: mod_base = OTHER; note = 2'-O-methylguanosine-3'-phosphate
  modified_base 19: mod_base = OTHER; note = 2'-O-methyluridine-3'-phosphate
  modified_base 20: mod_base = OTHER; note = 2'-O-methyluridine-3'-phosphate
  modified_base 21: mod_base = OTHER; note = 2'-O-methylcytidine-3'- phosphorothioate
  modified_base 22: mod_base = OTHER; note = 2'-O-methyladenosine-3'- phosphorothioate
  modified_base 23: mod_base = OTHER; note = 2'-O-methyluridine-3'-phosphate
tactgatttagcatgttgttcat

SEQ ID NO: 2112 - RNA, 21 nt, synthetic construct
  source 1..21: mol_type = other RNA
  modified_base 1: mod_base = OTHER; note = 2'-O-methyluridine-3'-phosphorothioate
  modified_base 2: mod_base = OTHER; note = 2'-O-methylguanosine-3'- phosphorothioate
  modified_base 3: mod_base = OTHER; note = 2'-O-methyladenosine-3'-phosphate
  modified_base 4: mod_base = OTHER; note = 2'-O-methyladenosine-3'-phosphate
  modified_base 5: mod_base = OTHER; note = 2'-O-methylcytidine-3'-phosphate
  modified_base 6: mod_base = OTHER; note = 2'-O-methyladenosine-3'-phosphate
  modified_base 7: mod_base = OTHER; note = 2'-fluoroadenosine-3'-phosphate
  modified_base 8: mod_base = OTHER; note = 2'-O-methylcytidine-3'-phosphate
  modified_base 9: mod_base = OTHER; note = 2'-fluoroadenosine-3'-phosphate
  modified_base 10: mod_base = OTHER; note = 2'-fluorouridine-3'-phosphate
  modified_base 11: mod_base = OTHER; note = 2'-fluoroguanosine-3'-phosphate
  modified_base 12: mod_base = OTHER; note = 2'-O-methylcytidine-3'-phosphate
  modified_base 13: mod_base = OTHER; note = 2'-O-methyluridine-3'-phosphate
  modified_base 14: mod_base = OTHER; note = 2'-O-methyladenosine-3'-phosphate
  modified_base 15: mod_base = OTHER; note = 2'-O-methyladenosine-3'-phosphate
  modified_base 16: mod_base = OTHER; note = 2'-O-methyladenosine-3'-phosphate
  modified_base 17: mod_base = OTHER; note = 2'-O-methyluridine-3'-phosphate
  modified_base 18: mod_base = OTHER; note = 2'-O-methylcytidine-3'-phosphate
  modified_base 19: mod_base = OTHER; note = 2'-O-methyladenosine-3'-phosphate
  modified_base 20: mod_base = OTHER; note = 2'-O-methylguanosine-3'-phosphate
  modified_base 21: mod_base = OTHER; note 2'-O-methyluridine-3'-phosphate-N-[tris(GalNAc-alkyl)-amido decanoyl)]-4-hydroxyprolinol (Hyp-(GalNAc-alkyl)3)
tgaacaacatgctaaatcagt

SEQ ID NO: 2113 - RNA, 23 nt, synthetic construct
  source 1..23: mol_type = other RNA
  modified_base 1: mod_base = OTHER; note = 2'-O-methyladenosine-3'- phosphorothioate
  modified_base 2: mod_base = OTHER; note = 2'-fluorocytidine-3'-phosphorothioate
  modified_base 3: mod_base = OTHER; note = 2'-O-methyluridine-3'-phosphate
  modified_base 4: mod_base = OTHER; note = 2'-O-methylguanosine-3'-phosphate
  modified_base 5: mod_base = OTHER; note = 2'-O-methyladenosine-3'-phosphate
  modified_base 6: mod_base = OTHER; note = 2'-fluorouridine-3'-phosphate
  modified_base 7: mod_base = OTHER; note = 2'-O-methyluridine-3'-phosphate
  modified_base 8: mod_base = OTHER; note = 2'-fluorouridine-3'-phosphate
  modified_base 9: mod_base = OTHER; note = 2'-fluoroadenosine-3'-phosphate
  modified_base 10: mod_base = OTHER; note = 2'-O-methylguanosine-3'-phosphate
  modified_base 11: mod_base = OTHER; note = 2'-O-methylcytidine-3'-phosphate
  modified_base 12: mod_base = OTHER; note = 2'-O-methyladenosine-3'-phosphate
  modified_base 13: mod_base = OTHER; note = 2'-O-methyluridine-3'-phosphate
  modified_base 14: mod_base = OTHER; note = 2'-fluoroguanosine-3'-phosphate
  modified_base 15: mod_base = OTHER; note = 2'-O-methyluridine-3'-phosphate
  modified_base 16: mod_base = OTHER; note = 2'-fluorouridine-3'-phosphate
  modified_base 17: mod_base = OTHER; note = 2'-O-methylguanosine-3'-phosphate
  modified_base 18: mod_base = OTHER; note = 2'-O-methyluridine-3'-phosphate
  modified_base 19: mod_base = OTHER; note = 2'-O-methyluridine-3'-phosphate
  modified_base 20: mod_base = OTHER; note = 2'-O-methylcytidine-3'-phosphate
  modified_base 21: mod_base = OTHER; note = 2'-O-methyladenosine-3'- phosphorothioate
  modified_base 22: mod_base = OTHER; note = 2'-O-methyluridine-3'-phosphorothioate
  modified_base 23: mod_base = OTHER; note = 2'-O-methyladenosine-3'-phosphate
actgatttagcatgttgttcata

SEQ ID NO: 2114 - RNA, 21 nt, synthetic construct
  source 1..21: mol_type = other RNA
  modified_base 1: mod_base = OTHER; note = 2'-O-methyladenosine-3'- phosphorothioate
  modified_base 2: mod_base = OTHER; note = 2'-O-methyladenosine-3'- phosphorothioate
  modified_base 3: mod_base = OTHER; note = 2'-O-methyladenosine-3'-phosphate
  modified_base 4: mod_base = OTHER; note = 2'-O-methylcytidine-3'-phosphate
  modified_base 5: mod_base = OTHER; note = 2'-O-methylcytidine-3'-phosphate
  modified_base 6: mod_base = OTHER; note = 2'-O-methyladenosine-3'-phosphate
  modified_base 7: mod_base = OTHER; note = 2'-fluoroguanosine-3'-phosphate
  modified_base 8: mod_base = OTHER; note = 2'-O-methyluridine-3'-phosphate
  modified_base 9: mod_base = OTHER; note = 2'-fluoroadenosine-3'-phosphate
  modified_base 10: mod_base = OTHER; note = 2'-fluorocytidine-3'-phosphate
  modified_base 11: mod_base = OTHER; note = 2'-fluorouridine-3'-phosphate
  modified_base 12: mod_base = OTHER; note = 2'-O-methyluridine-3'-phosphate
  modified_base 13: mod_base = OTHER; note = 2'-O-methyluridine-3'-phosphate
  modified_base 14: mod_base = OTHER; note = 2'-O-methyladenosine-3'-phosphate
  modified_base 15: mod_base = OTHER; note = 2'-O-methyluridine-3'-phosphate
  modified_base 16: mod_base = OTHER; note = 2'-O-methylcytidine-3'-phosphate
  modified_base 17: mod_base = OTHER; note = 2'-O-methyladenosine-3'-phosphate
  modified_base 18: mod_base = OTHER; note = 2'-O-methyluridine-3'-phosphate
  modified_base 19: mod_base = OTHER; note = 2'-O-methyluridine-3'-phosphate
  modified_base 20: mod_base = OTHER; note = 2'-O-methyluridine-3'-phosphate
  modified_base 21: mod_base = OTHER; note 2'-O-methyluridine-3'-phosphate-N-[tris(GalNAc-alkyl)-amido decanoyl)]-4-hydroxyprolinol (Hyp-(GalNAc-alkyl)3)
aaaccagtactttatcatttt

SEQ ID NO: 2115 - RNA, 23 nt, synthetic construct
  source 1..23: mol_type = other RNA
  modified_base 1: mod_base = OTHER; note = 2'-O-methyladenosine-3'- phosphorothioate
  modified_base 2: mod_base = OTHER; note = 2'-fluoroadenosine-3'-phosphorothioate
  modified_base 3: mod_base = OTHER; note = 2'-O-methyladenosine-3'-phosphate
  modified_base 4: mod_base = OTHER; note = 2'-O-methyladenosine-3'-phosphate
  modified_base 5: mod_base = OTHER; note = 2'-O-methyluridine-3'-phosphate
  modified_base 6: mod_base = OTHER; note = 2'-fluoroguanosine-3'-phosphate
  modified_base 7: mod_base = OTHER; note = 2'-O-methyladenosine-3'-phosphate
  modified_base 8: mod_base = OTHER; note = 2'-fluorouridine-3'-phosphate
  modified_base 9: mod_base = OTHER; note = 2'-fluoroadenosine-3'-phosphate
  modified_base 10: mod_base = OTHER; note = 2'-O-methyladenosine-3'-phosphate
  modified_base 11: mod_base = OTHER; note = 2'-O-methyladenosine-3'-phosphate
  modified_base 12: mod_base = OTHER; note = 2'-O-methylguanosine-3'-phosphate
  modified_base 13: mod_base = OTHER; note = 2'-O-methyluridine-3'-phosphate
  modified_base 14: mod_base = OTHER; note = 2'-fluoroadenosine-3'-phosphate
  modified_base 15: mod_base = OTHER; note = 2'-O-methylcytidine-3'-phosphate
  modified_base 16: mod_base = OTHER; note = 2'-fluorouridine-3'-phosphate
  modified_base 17: mod_base = OTHER; note = 2'-O-methylguanosine-3'-phosphate
  modified_base 18: mod_base = OTHER; note = 2'-O-methylguanosine-3'-phosphate
  modified_base 19: mod_base = OTHER; note = 2'-O-methyluridine-3'-phosphate
  modified_base 20: mod_base = OTHER; note = 2'-O-methyluridine-3'-phosphate
  modified_base 21: mod_base = OTHER; note = 2'-O-methyluridine-3'-phosphorothioate
  modified_base 22: mod_base = OTHER; note = 2'-O-methylcytidine-3'- phosphorothioate
  modified_base 23: mod_base = OTHER; note = 2'-O-methyladenosine-3'-phosphate
aaaatgataaagtactggtttca

SEQ ID NO: 2116 - RNA, 21 nt, synthetic construct
  source 1..21: mol_type = other RNA
  modified_base 1: mod_base = OTHER; note = 2'-O-methyladenosine-3'- phosphorothioate
  modified_base 2: mod_base = OTHER; note = 2'-O-methyladenosine-3'- phosphorothioate
  modified_base 3: mod_base = OTHER; note = 2'-O-methylcytidine-3'-phosphate
  modified_base 4: mod_base = OTHER; note = 2'-O-methylcytidine-3'-phosphate
  modified_base 5: mod_base = OTHER; note = 2'-O-methyladenosine-3'-phosphate
  modified_base 6: mod_base = OTHER; note = 2'-O-methylguanosine-3'-phosphate
  modified_base 7: mod_base = OTHER; note = 2'-fluorouridine-3'-phosphate
  modified_base 8: mod_base = OTHER; note = 2'-O-methyladenosine-3'-phosphate
  modified_base 9: mod_base = OTHER; note = 2'-fluorocytidine-3'-phosphate
  modified_base 10: mod_base = OTHER; note = 2'-fluorouridine-3'-phosphate
  modified_base 11: mod_base = OTHER; note = 2'-fluorouridine-3'-phosphate
  modified_base 12: mod_base = OTHER; note = 2'-O-methyluridine-3'-phosphate
  modified_base 13: mod_base = OTHER; note = 2'-O-methyladenosine-3'-phosphate
  modified_base 14: mod_base = OTHER; note = 2'-O-methyluridine-3'-phosphate
  modified_base 15: mod_base = OTHER; note = 2'-O-methylcytidine-3'-phosphate
  modified_base 16: mod_base = OTHER; note = 2'-O-methyladenosine-3'-phosphate
  modified_base 17: mod_base = OTHER; note = 2'-O-methyluridine-3'-phosphate
  modified_base 18: mod_base = OTHER; note = 2'-O-methyluridine-3'-phosphate
  modified_base 19: mod_base = OTHER; note = 2'-O-methyluridine-3'-phosphate
  modified_base 20: mod_base = OTHER; note = 2'-O-methyluridine-3'-phosphate
  modified_base 21: mod_base = OTHER; note 2'-O-methylcytidine-3'-phosphate-N-[tris(GalNAc-alkyl)-amid odecanoyl)]-4-hydroxyprolinol (Hyp-(GalNAc-alkyl)3)
aaccagtactttatcattttc

SEQ ID NO: 2117 - RNA, 23 nt, synthetic construct
  source 1..23: mol_type = other RNA
  modified_base 1: mod_base = OTHER; note = 2'-O-methylguanosine-3'- phosphorothioate
  modified_base 2: mod_base = OTHER; note = 2'-fluoroadenosine-3'-phosphorothioate
  modified_base 3: mod_base = OTHER; note = 2'-O-methyladenosine-3'-phosphate
  modified_base 4: mod_base = OTHER; note = 2'-O-methyladenosine-3'-phosphate
  modified_base 5: mod_base = OTHER; note = 2'-O-methyladenosine-3'-phosphate
  modified_base 6: mod_base = OTHER; note = 2'-fluorouridine-3'-phosphate
  modified_base 7: mod_base = OTHER; note = 2'-O-methylguanosine-3'-phosphate
  modified_base 8: mod_base = OTHER; note = 2'-fluoroadenosine-3'-phosphate
  modified_base 9: mod_base = OTHER; note = 2'-fluorouridine-3'-phosphate
  modified_base 10: mod_base = OTHER; note = 2'-O-methyladenosine-3'-phosphate
  modified_base 11: mod_base = OTHER; note = 2'-O-methyladenosine-3'-phosphate
  modified_base 12: mod_base = OTHER; note = 2'-O-methyladenosine-3'-phosphate
  modified_base 13: mod_base = OTHER; note = 2'-O-methylguanosine-3'-phosphate
  modified_base 14: mod_base = OTHER; note = 2'-fluorouridine-3'-phosphate
  modified_base 15: mod_base = OTHER; note = 2'-O-methyladenosine-3'-phosphate
  modified_base 16: mod_base = OTHER; note = 2'-fluorocytidine-3'-phosphate
  modified_base 17: mod_base = OTHER; note = 2'-O-methyluridine-3'-phosphate
  modified_base 18: mod_base = OTHER; note = 2'-O-methylguanosine-3'-phosphate
  modified_base 19: mod_base = OTHER; note = 2'-O-methylguanosine-3'-phosphate
  modified_base 20: mod_base = OTHER; note = 2'-O-methyluridine-3'-phosphate
  modified_base 21: mod_base = OTHER; note = 2'-O-methyluridine-3'-phosphorothioate
  modified_base 22: mod_base = OTHER; note = 2'-O-methyluridine-3'-phosphorothioate
  modified_base 23: mod_base = OTHER; note = 2'-O-methylcytidine-3'-phosphate
gaaaatgataaagtactggtttc

SEQ ID NO: 2118 - RNA, 21 nt, synthetic construct
  source 1..21: mol_type = other RNA
  modified_base 1: mod_base = OTHER; note = 2'-O-methyluridine-3'-phosphorothioate
  modified_base 2: mod_base = OTHER; note = 2'-O-methyluridine-3'-phosphorothioate
  modified_base 3: mod_base = OTHER; note = 2'-O-methyluridine-3'-phosphate
  modified_base 4: mod_base = OTHER; note = 2'-O-methylguanosine-3'-phosphate
  modified_base 5: mod_base = OTHER; note = 2'-O-methyladenosine-3'-phosphate
  modified_base 6: mod_base = OTHER; note = 2'-O-methyladenosine-3'-phosphate
  modified_base 7: mod_base = OTHER; note = 2'-fluoroadenosine-3'-phosphate
  modified_base 8: mod_base = OTHER; note = 2'-O-methylcytidine-3'-phosphate
  modified_base 9: mod_base = OTHER; note = 2'-fluorocytidine-3'-phosphate
  modified_base 10: mod_base = OTHER; note = 2'-fluoroadenosine-3'-phosphate
  modified_base 11: mod_base = OTHER; note = 2'-fluoroguanosine-3'-phosphate
  modified_base 12: mod_base = OTHER; note = 2'-O-methyluridine-3'-phosphate
  modified_base 13: mod_base = OTHER; note = 2'-O-methyladenosine-3'-phosphate
  modified_base 14: mod_base = OTHER; note = 2'-O-methylcytidine-3'-phosphate
  modified_base 15: mod_base = OTHER; note = 2'-O-methyluridine-3'-phosphate
  modified_base 16: mod_base = OTHER; note = 2'-O-methyluridine-3'-phosphate
  modified_base 17: mod_base = OTHER; note = 2'-O-methyluridine-3'-phosphate
  modified_base 18: mod_base = OTHER; note = 2'-O-methyladenosine-3'-phosphate
  modified_base 19: mod_base = OTHER; note = 2'-O-methyluridine-3'-phosphate
  modified_base 20: mod_base = OTHER; note = 2'-O-methylcytidine-3'-phosphate
  modified_base 21: mod_base = OTHER; note 2'-O-methyladenosine-3'-phosphate-N-[tris(GalNAc-alkyl)-ami dodecanoyl)]-4-hydroxyprolinol (Hyp-(GalNAc-alkyl)3)
tttgaaaccagtactttatca

SEQ ID NO: 2119 - RNA, 23 nt, synthetic construct
  source 1..23: mol_type = other RNA
  modified_base 1: mod_base = OTHER; note = 2'-O-methyluridine-3'-phosphorothioate
  modified_base 2: mod_base = OTHER; note = 2'-fluoroguanosine-3'-phosphorothioate
  modified_base 3: mod_base = OTHER; note = 2'-O-methyladenosine-3'-phosphate
  modified_base 4: mod_base = OTHER; note = 2'-O-methyluridine-3'-phosphate
  modified_base 5: mod_base = OTHER; note = 2'-O-methyladenosine-3'-phosphate
  modified_base 6: mod_base = OTHER; note = 2'-fluoroadenosine-3'-phosphate
  modified_base 7: mod_base = OTHER; note = 2'-O-methyladenosine-3'-phosphate
  modified_base 8: mod_base = OTHER; note = 2'-fluoroguanosine-3'-phosphate
  modified_base 9: mod_base = OTHER; note = 2'-fluorouridine-3'-phosphate
  modified_base 10: mod_base = OTHER; note = 2'-O-methyladenosine-3'-phosphate
  modified_base 11: mod_base = OTHER; note = 2'-O-methylcytidine-3'-phosphate
  modified_base 12: mod_base = OTHER; note = 2'-O-methyluridine-3'-phosphate
  modified_base 13: mod_base = OTHER; note = 2'-O-methylguanosine-3'-phosphate
  modified_base 14: mod_base = OTHER; note = 2'-fluoroguanosine-3'-phosphate
  modified_base 15: mod_base = OTHER; note = 2'-O-methyluridine-3'-phosphate
  modified_base 16: mod_base = OTHER; note = 2'-fluorouridine-3'-phosphate
  modified_base 17: mod_base = OTHER; note = 2'-O-methyluridine-3'-phosphate
  modified_base 18: mod_base = OTHER; note = 2'-O-methylcytidine-3'-phosphate
  modified_base 19: mod_base = OTHER; note = 2'-O-methyladenosine-3'-phosphate
  modified_base 20: mod_base = OTHER; note = 2'-O-methyladenosine-3'-phosphate
  modified_base 21: mod_base = OTHER; note = 2'-O-methyladenosine-3'- phosphorothioate
  modified_base 22: mod_base = OTHER; note = 2'-O-methyladenosine-3'- phosphorothioate
  modified_base 23: mod_base = OTHER; note = 2'-O-methyluridine-3'-phosphate
tgataaagtactggtttcaaaat

SEQ ID NO: 2120 - RNA, 21 nt, synthetic construct
  source 1..21: mol_type = other RNA
  modified_base 1: mod_base = OTHER; note = 2'-O-methyluridine-3'-phosphorothioate
  modified_base 2: mod_base = OTHER; note = 2'-O-methyluridine-3'-phosphorothioate
  modified_base 3: mod_base = OTHER; note = 2'-O-methyluridine-3'-phosphate
  modified_base 4: mod_base = OTHER; note = 2'-O-methyluridine-3'-phosphate
  modified_base 5: mod_base = OTHER; note = 2'-O-methylguanosine-3'-phosphate
  modified_base 6: mod_base = OTHER; note = 2'-O-methyladenosine-3'-phosphate
  modified_base 7: mod_base = OTHER; note = 2'-fluoroadenosine-3'-phosphate
  modified_base 8: mod_base = OTHER; note = 2'-O-methyladenosine-3'-phosphate
  modified_base 9: mod_base = OTHER; note = 2'-fluorocytidine-3'-phosphate
  modified_base 10: mod_base = OTHER; note = 2'-fluorocytidine-3'-phosphate
  modified_base 11: mod_base = OTHER; note = 2'-fluoroadenosine-3'-phosphate
  modified_base 12: mod_base = OTHER; note = 2'-O-methylguanosine-3'-phosphate
  modified_base 13: mod_base = OTHER; note = 2'-O-methyluridine-3'-phosphate
  modified_base 14: mod_base = OTHER; note = 2'-O-methyladenosine-3'-phosphate
  modified_base 15: mod_base = OTHER; note = 2'-O-methylcytidine-3'-phosphate
  modified_base 16: mod_base = OTHER; note = 2'-O-methyluridine-3'-phosphate
  modified_base 17: mod_base = OTHER; note = 2'-O-methyluridine-3'-phosphate
  modified_base 18: mod_base = OTHER; note = 2'-O-methyluridine-3'-phosphate
  modified_base 19: mod_base = OTHER; note = 2'-O-methyladenosine-3'-phosphate
  modified_base 20: mod_base = OTHER; note = 2'-O-methyluridine-3'-phosphate
  modified_base 21: mod_base = OTHER; note 2'-O-methylcytidine-3'-phosphate-N-[tris(GalNAc-alkyl)-amid odecanoyl)]-4-hydroxyprolinol (Hyp-(GalNAc-alkyl)3)
ttttgaaaccagtactttatc

SEQ ID NO: 2121 - RNA, 23 nt, synthetic construct
  source 1..23: mol_type = other RNA
  modified_base 1: mod_base = OTHER; note = 2'-O-methylguanosine-3'- phosphorothioate
  modified_base 2: mod_base = OTHER; note = 2'-fluoroadenosine-3'-phosphorothioate
  modified_base 3: mod_base = OTHER; note = 2'-O-methyluridine-3'-phosphate
  modified_base 4: mod_base = OTHER; note = 2'-O-methyladenosine-3'-phosphate
  modified_base 5: mod_base = OTHER; note = 2'-O-methyladenosine-3'-phosphate
  modified_base 6: mod_base = OTHER; note = 2'-fluoroadenosine-3'-phosphate
  modified_base 7: mod_base = OTHER; note = 2'-O-methylguanosine-3'-phosphate
  modified_base 8: mod_base = OTHER; note = 2'-fluorouridine-3'-phosphate
  modified_base 9: mod_base = OTHER; note = 2'-fluoroadenosine-3'-phosphate
  modified_base 10: mod_base = OTHER; note = 2'-O-methylcytidine-3'-phosphate
  modified_base 11: mod_base = OTHER; note = 2'-O-methyluridine-3'-phosphate
  modified_base 12: mod_base = OTHER; note = 2'-O-methylguanosine-3'-phosphate
  modified_base 13: mod_base = OTHER; note = 2'-O-methylguanosine-3'-phosphate
  modified_base 14: mod_base = OTHER; note = 2'-fluorouridine-3'-phosphate
  modified_base 15: mod_base = OTHER; note = 2'-O-methyluridine-3'-phosphate
  modified_base 16: mod_base = OTHER; note = 2'-fluorouridine-3'-phosphate
  modified_base 17: mod_base = OTHER; note = 2'-O-methylcytidine-3'-phosphate
  modified_base 18: mod_base = OTHER; note = 2'-O-methyladenosine-3'-phosphate
  modified_base 19: mod_base = OTHER; note = 2'-O-methyladenosine-3'-phosphate
  modified_base 20: mod_base = OTHER; note = 2'-O-methyladenosine-3'-phosphate
  modified_base 21: mod_base = OTHER; note = 2'-O-methyladenosine-3'- phosphorothioate
  modified_base 22: mod_base = OTHER; note = 2'-O-methyluridine-3'-phosphorothioate
  modified_base 23: mod_base = OTHER; note = 2'-O-methyluridine-3'-phosphate
gataaagtactggtttcaaaatt

SEQ ID NO: 2122 - RNA, 21 nt, synthetic construct
  source 1..21: mol_type = other RNA
  modified_base 1: mod_base = OTHER; note = 2'-O-methylguanosine-3'- phosphorothioate
  modified_base 2: mod_base = OTHER; note = 2'-O-methyladenosine-3'- phosphorothioate
  modified_base 3: mod_base = OTHER; note = 2'-O-methylguanosine-3'-phosphate
  modified_base 4: mod_base = OTHER; note = 2'-O-methyladenosine-3'-phosphate
  modified_base 5: mod_base = OTHER; note = 2'-O-methyladenosine-3'-phosphate
  modified_base 6: mod_base = OTHER; note = 2'-O-methylguanosine-3'-phosphate
  modified_base 7: mod_base = OTHER; note = 2'-fluoroadenosine-3'-phosphate
  modified_base 8: mod_base = OTHER; note = 2'-O-methyluridine-3'-phosphate
  modified_base 9: mod_base = OTHER; note = 2'-fluoroguanosine-3'-phosphate
  modified_base 10: mod_base = OTHER; note = 2'-fluoroguanosine-3'-phosphate
  modified_base 11: mod_base = OTHER; note = 2'-fluoroguanosine-3'-phosphate
  modified_base 12: mod_base = OTHER; note = 2'-O-methylcytidine-3'-phosphate
  modified_base 13: mod_base = OTHER; note = 2'-O-methyluridine-3'-phosphate
  modified_base 14: mod_base = OTHER; note = 2'-O-methyladenosine-3'-phosphate
  modified_base 15: mod_base = OTHER; note = 2'-O-methylcytidine-3'-phosphate
  modified_base 16: mod_base = OTHER; note = 2'-O-methyladenosine-3'-phosphate
  modified_base 17: mod_base = OTHER; note = 2'-O-methyladenosine-3'-phosphate
  modified_base 18: mod_base = OTHER; note = 2'-O-methylguanosine-3'-phosphate
  modified_base 19: mod_base = OTHER; note = 2'-O-methylguanosine-3'-phosphate
  modified_base 20: mod_base = OTHER; note = 2'-O-methylcytidine-3'-phosphate
  modified_base 21: mod_base = OTHER; note 2'-O-methylcytidine-3'-phosphate-N-[tris(GalNAc-alkyl)-amid odecanoyl)]-4-hydroxyprolinol (Hyp-(GalNAc-alkyl)3)
gagaagatgggctacaaggcc

SEQ ID NO: 2123 - RNA, 23 nt, synthetic construct
  source 1..23: mol_type = other RNA
  modified_base 1: mod_base = OTHER; note = 2'-O-methylguanosine-3'- phosphorothioate
  modified_base 2: mod_base = OTHER; note = 2'-fluoroguanosine-3'-phosphorothioate
  modified_base 3: mod_base = OTHER; note = 2'-O-methylcytidine-3'-phosphate
  modified_base 4: mod_base = OTHER; note = 2'-O-methylcytidine-3'-phosphate
  modified_base 5: mod_base = OTHER; note = 2'-O-methyluridine-3'-phosphate
  modified_base 6: mod_base = OTHER; note = 2'-fluorouridine-3'-phosphate
  modified_base 7: mod_base = OTHER; note = 2'-O-methylguanosine-3'-phosphate
  modified_base 8: mod_base = OTHER; note = 2'-fluorouridine-3'-phosphate
  modified_base 9: mod_base = OTHER; note = 2'-fluoroadenosine-3'-phosphate
  modified_base 10: mod_base = OTHER; note = 2'-O-methylguanosine-3'-phosphate
  modified_base 11: mod_base = OTHER; note = 2'-O-methylcytidine-3'-phosphate
  modified_base 12: mod_base = OTHER; note = 2'-O-methylcytidine-3'-phosphate
  modified_base 13: mod_base = OTHER; note = 2'-O-methylcytidine-3'-phosphate
  modified_base 14: mod_base = OTHER; note = 2'-fluoroadenosine-3'-phosphate
  modified_base 15: mod_base = OTHER; note = 2'-O-methyluridine-3'-phosphate
  modified_base 16: mod_base = OTHER; note = 2'-fluorocytidine-3'-phosphate
  modified_base 17: mod_base = OTHER; note = 2'-O-methyluridine-3'-phosphate
  modified_base 18: mod_base = OTHER; note = 2'-O-methyluridine-3'-phosphate
  modified_base 19: mod_base = OTHER; note = 2'-O-methylcytidine-3'-phosphate
  modified_base 20: mod_base = OTHER; note = 2'-O-methyluridine-3'-phosphate
  modified_base 21: mod_base = OTHER; note = 2'-O-methylcytidine-3'- phosphorothioate
  modified_base 22: mod_base = OTHER; note = 2'-O-methyluridine-3'-phosphorothioate
  modified_base 23: mod_base = OTHER; note = 2'-O-methylguanosine-3'-phosphate
ggccttgtagcccatcttctctg

SEQ ID NO: 2124 - RNA, 21 nt, synthetic construct
  source 1..21: mol_type = other RNA
  modified_base 1: mod_base = OTHER; note = 2'-O-methyladenosine-3'- phosphorothioate
  modified_base 2: mod_base = OTHER; note = 2'-O-methylguanosine-3'- phosphorothioate
  modified_base 3: mod_base = OTHER; note = 2'-O-methyladenosine-3'-phosphate
  modified_base 4: mod_base = OTHER; note = 2'-O-methyladenosine-3'-phosphate
  modified_base 5: mod_base = OTHER; note = 2'-O-methylguanosine-3'-phosphate
  modified_base 6: mod_base = OTHER; note = 2'-O-methyladenosine-3'-phosphate
  modified_base 7: mod_base = OTHER; note = 2'-fluorouridine-3'-phosphate
  modified_base 8: mod_base = OTHER; note = 2'-O-methylguanosine-3'-phosphate
  modified_base 9: mod_base = OTHER; note = 2'-fluoroguanosine-3'-phosphate
  modified_base 10: mod_base = OTHER; note = 2'-fluoroguanosine-3'-phosphate
  modified_base 11: mod_base = OTHER; note = 2'-fluorocytidine-3'-phosphate
  modified_base 12: mod_base = OTHER; note = 2'-O-methyluridine-3'-phosphate
  modified_base 13: mod_base = OTHER; note = 2'-O-methyladenosine-3'-phosphate
  modified_base 14: mod_base = OTHER; note = 2'-O-methylcytidine-3'-phosphate
  modified_base 15: mod_base = OTHER; note = 2'-O-methyladenosine-3'-phosphate
  modified_base 16: mod_base = OTHER; note = 2'-O-methyladenosine-3'-phosphate
  modified_base 17: mod_base = OTHER; note = 2'-O-methylguanosine-3'-phosphate
  modified_base 18: mod_base = OTHER; note = 2'-O-methylguanosine-3'-phosphate
  modified_base 19: mod_base = OTHER; note = 2'-O-methylcytidine-3'-phosphate
  modified_base 20: mod_base = OTHER; note = 2'-O-methylcytidine-3'-phosphate
  modified_base 21: mod_base = OTHER; note 2'-O-methyladenosine-3'-phosphate-N-[tris(GalNAc-alkyl)-ami dodecanoyl)]-4-hydroxyprolinol (Hyp-(GalNAc-alkyl)3)
agaagatgggctacaaggcca

SEQ ID NO: 2125 - RNA, 23 nt, synthetic construct
  source 1..23: mol_type = other RNA
  modified_base 1: mod_base = OTHER; note = 2'-O-methyluridine-3'-phosphorothioate
  modified_base 2: mod_base = OTHER; note = 2'-fluoroguanosine-3'-phosphorothioate
  modified_base 3: mod_base = OTHER; note = 2'-O-methylguanosine-3'-phosphate
  modified_base 4: mod_base = OTHER; note = 2'-O-methylcytidine-3'-phosphate
  modified_base 5: mod_base = OTHER; note = 2'-O-methylcytidine-3'-phosphate
  modified_base 6: mod_base = OTHER; note = 2'-fluorouridine-3'-phosphate
  modified_base 7: mod_base = OTHER; note = 2'-O-methyluridine-3'-phosphate
  modified_base 8: mod_base = OTHER; note = 2'-fluoroguanosine-3'-phosphate
  modified_base 9: mod_base = OTHER; note = 2'-fluorouridine-3'-phosphate
  modified_base 10: mod_base = OTHER; note = 2'-O-methyladenosine-3'-phosphate
  modified_base 11: mod_base = OTHER; note = 2'-O-methylguanosine-3'-phosphate
  modified_base 12: mod_base = OTHER; note = 2'-O-methylcytidine-3'-phosphate
  modified_base 13: mod_base = OTHER; note = 2'-O-methylcytidine-3'-phosphate
  modified_base 14: mod_base = OTHER; note = 2'-fluorocytidine-3'-phosphate
  modified_base 15: mod_base = OTHER; note = 2'-O-methyladenosine-3'-phosphate
  modified_base 16: mod_base = OTHER; note = 2'-fluorouridine-3'-phosphate
  modified_base 17: mod_base = OTHER; note = 2'-O-methylcytidine-3'-phosphate
  modified_base 18: mod_base = OTHER; note = 2'-O-methyluridine-3'-phosphate
  modified_base 19: mod_base = OTHER; note = 2'-O-methyluridine-3'-phosphate
  modified_base 20: mod_base = OTHER; note = 2'-O-methylcytidine-3'-phosphate
  modified_base 21: mod_base = OTHER; note = 2'-O-methyluridine-3'-phosphorothioate
  modified_base 22: mod_base = OTHER; note = 2'-O-methylcytidine-3'- phosphorothioate
  modified_base 23: mod_base = OTHER; note = 2'-O-methyluridine-3'-phosphate
tggccttgtagcccatcttctct

SEQ ID NO: 2126 - RNA, 21 nt, synthetic construct
  source 1..21: mol_type = other RNA
  modified_base 1: mod_base = OTHER; note = 2'-O-methylguanosine-3'- phosphorothioate
  modified_base 2: mod_base = OTHER; note = 2'-O-methylguanosine-3'- phosphorothioate
  modified_base 3: mod_base = OTHER; note = 2'-O-methylcytidine-3'-phosphate
  modified_base 4: mod_base = OTHER; note = 2'-O-methyladenosine-3'-phosphate
  modified_base 5: mod_base = OTHER; note = 2'-O-methylguanosine-3'-phosphate
  modified_base 6: mod_base = OTHER; note = 2'-O-methyladenosine-3'-phosphate
  modified_base 7: mod_base = OTHER; note = 2'-fluoroguanosine-3'-phosphate
  modified_base 8: mod_base = OTHER; note = 2'-O-methyladenosine-3'-phosphate
  modified_base 9: mod_base = OTHER; note = 2'-fluoroadenosine-3'-phosphate
  modified_base 10: mod_base = OTHER; note = 2'-fluoroguanosine-3'-phosphate
  modified_base 11: mod_base = OTHER; note = 2'-fluoroadenosine-3'-phosphate
  modified_base 12: mod_base = OTHER; note = 2'-O-methyluridine-3'-phosphate
  modified_base 13: mod_base = OTHER; note = 2'-O-methylguanosine-3'-phosphate
  modified_base 14: mod_base = OTHER; note = 2'-O-methylguanosine-3'-phosphate
  modified_base 15: mod_base = OTHER; note = 2'-O-methylguanosine-3'-phosphate
  modified_base 16: mod_base = OTHER; note = 2'-O-methylcytidine-3'-phosphate
  modified_base 17: mod_base = OTHER; note = 2'-O-methyluridine-3'-phosphate
  modified_base 18: mod_base = OTHER; note = 2'-O-methyladenosine-3'-phosphate
  modified_base 19: mod_base = OTHER; note = 2'-O-methylcytidine-3'-phosphate
  modified_base 20: mod_base = OTHER; note = 2'-O-methyladenosine-3'-phosphate
  modified_base 21: mod_base = OTHER; note 2'-O-methyladenosine-3'-phosphate-N-[tris(GalNAc-alkyl)-ami dodecanoyl)]-4-hydroxyprolinol (Hyp-(GalNAc-alkyl)3)
ggcagagaagatgggctacaa

SEQ ID NO: 2127 - RNA, 23 nt, synthetic construct
  source 1..23: mol_type = other RNA
  modified_base 1: mod_base = OTHER; note = 2'-O-methyluridine-3'-phosphorothioate
  modified_base 2: mod_base = OTHER; note = 2'-fluorouridine -3'-phosphorothioate
  modified_base 3: mod_base = OTHER; note = 2'-O-methylguanosine-3'-phosphate
  modified_base 4: mod_base = OTHER; note = 2'-O-methyluridine-3'-phosphate
  modified_base 5: mod_base = OTHER; note = 2'-O-methyladenosine-3'-phosphate
  modified_base 6: mod_base = OTHER; note = 2'-fluoroguanosine-3'-phosphate
  modified_base 7: mod_base = OTHER; note = 2'-O-methylcytidine-3'-phosphate
  modified_base 8: mod_base = OTHER; note = 2'-fluorocytidine-3'-phosphate
  modified_base 9: mod_base = OTHER; note = 2'-fluorocytidine-3'-phosphate
  modified_base 10: mod_base = OTHER; note = 2'-O-methyladenosine-3'-phosphate
  modified_base 11: mod_base = OTHER; note = 2'-O-methyluridine-3'-phosphate
  modified_base 12: mod_base = OTHER; note = 2'-O-methylcytidine-3'-phosphate
  modified_base 13: mod_base = OTHER; note = 2'-O-methyluridine-3'-phosphate
  modified_base 14: mod_base = OTHER; note = 2'-fluorouridine-3'-phosphate
  modified_base 15: mod_base = OTHER; note = 2'-O-methylcytidine-3'-phosphate
  modified_base 16: mod_base = OTHER; note = 2'-fluorouridine-3'-phosphate
  modified_base 17: mod_base = OTHER; note = 2'-O-methylcytidine-3'-phosphate
  modified_base 18: mod_base = OTHER; note = 2'-O-methyluridine-3'-phosphate
  modified_base 19: mod_base = OTHER; note = 2'-O-methylguanosine-3'-phosphate
  modified_base 20: mod_base = OTHER; note = 2'-O-methylcytidine-3'-phosphate
  modified_base 21: mod_base = OTHER; note = 2'-O-methylcytidine-3'- phosphorothioate
  modified_base 22: mod_base = OTHER; note = 2'-O-methyluridine-3'-phosphorothioate
  modified_base 23: mod_base = OTHER; note = 2'-O-methylguanosine-3'-phosphate
ttgtagcccatcttctctgcctg

SEQ ID NO: 2128 - RNA, 21 nt, synthetic construct
  source 1..21: mol_type = other RNA
  modified_base 1: mod_base = OTHER; note = 2'-O-methyladenosine-3'- phosphorothioate
  modified_base 2: mod_base = OTHER; note = 2'-O-methylguanosine-3'- phosphorothioate
  modified_base 3: mod_base = OTHER; note = 2'-O-methylguanosine-3'-phosphate
  modified_base 4: mod_base = OTHER; note = 2'-O-methylcytidine-3'-phosphate
  modified_base 5: mod_base = OTHER; note = 2'-O-methyladenosine-3'-phosphate
  modified_base 6: mod_base = OTHER; note = 2'-O-methylguanosine-3'-phosphate
  modified_base 7: mod_base = OTHER; note = 2'-fluoroadenosine-3'-phosphate
  modified_base 8: mod_base = OTHER; note = 2'-O-methylguanosine-3'-phosphate
  modified_base 9: mod_base = OTHER; note = 2'-fluoroadenosine-3'-phosphate
  modified_base 10: mod_base = OTHER; note = 2'-fluoroadenosine-3'-phosphate
  modified_base 11: mod_base = OTHER; note = 2'-fluoroguanosine-3'-phosphate
  modified_base 12: mod_base = OTHER; note = 2'-O-methyladenosine-3'-phosphate
  modified_base 13: mod_base = OTHER; note = 2'-O-methyluridine-3'-phosphate
  modified_base 14: mod_base = OTHER; note = 2'-O-methylguanosine-3'-phosphate
  modified_base 15: mod_base = OTHER; note = 2'-O-methylguanosine-3'-phosphate
  modified_base 16: mod_base = OTHER; note = 2'-O-methylguanosine-3'-phosphate
  modified_base 17: mod_base = OTHER; note = 2'-O-methylcytidine-3'-phosphate
  modified_base 18: mod_base = OTHER; note = 2'-O-methyluridine-3'-phosphate
  modified_base 19: mod_base = OTHER; note = 2'-O-methyladenosine-3'-phosphate
  modified_base 20: mod_base = OTHER; note = 2'-O-methylcytidine-3'-phosphate
  modified_base 21: mod_base = OTHER; note 2'-O-methyladenosine-3'-phosphate-N-[tris(GalNAc-alkyl)-ami dodecanoyl)]-4-hydroxyprolinol (Hyp-(GalNAc-alkyl)3)
aggcagagaagatgggctaca

SEQ ID NO: 2129 - RNA, 23 nt, synthetic construct
  source 1..23: mol_type = other RNA
  modified_base 1: mod_base = OTHER; note = 2'-O-methyluridine-3'-phosphorothioate
  modified_base 2: mod_base = OTHER; note = 2'-fluoroguanosine-3'-phosphorothioate
  modified_base 3: mod_base = OTHER; note = 2'-O-methyluridine-3'-phosphate
  modified_base 4: mod_base = OTHER; note = 2'-O-methyladenosine-3'-phosphate
  modified_base 5: mod_base = OTHER; note = 2'-O-methylguanosine-3'-phosphate
  modified_base 6: mod_base = OTHER; note = 2'-fluorocytidine-3'-phosphate
  modified_base 7: mod_base = OTHER; note = 2'-O-methylcytidine-3'-phosphate
  modified_base 8: mod_base = OTHER; note = 2'-fluorocytidine-3'-phosphate
  modified_base 9: mod_base = OTHER; note = 2'-fluoroadenosine-3'-phosphate
  modified_base 10: mod_base = OTHER; note = 2'-O-methyluridine-3'-phosphate
  modified_base 11: mod_base = OTHER; note = 2'-O-methylcytidine-3'-phosphate
  modified_base 12: mod_base = OTHER; note = 2'-O-methyluridine-3'-phosphate
  modified_base 13: mod_base = OTHER; note = 2'-O-methyluridine-3'-phosphate
  modified_base 14: mod_base = OTHER; note = 2'-fluorocytidine-3'-phosphate
  modified_base 15: mod_base = OTHER; note = 2'-O-methyluridine-3'-phosphate
  modified_base 16: mod_base = OTHER; note = 2'-fluorocytidine-3'-phosphate
  modified_base 17: mod_base = OTHER; note = 2'-O-methyluridine-3'-phosphate
  modified_base 18: mod_base = OTHER; note = 2'-O-methylguanosine-3'-phosphate
  modified_base 19: mod_base = OTHER; note = 2'-O-methylcytidine-3'-phosphate
  modified_base 20: mod_base = OTHER; note = 2'-O-methylcytidine-3'-phosphate
  modified_base 21: mod_base = OTHER; note = 2'-O-methyluridine-3'-phosphorothioate
  modified_base 22: mod_base = OTHER; note = 2'-O-methylguanosine-3'- phosphorothioate
  modified_base 23: mod_base = OTHER; note = 2'-O-methylcytidine-3'-phosphate
tgtagcccatcttctctgcctgc

SEQ ID NO: 2130 - RNA, 21 nt, synthetic construct
  source 1..21: mol_type = other RNA
  modified_base 1: mod_base = OTHER; note = 2'-O-methyladenosine-3'- phosphorothioate
  modified_base 2: mod_base = OTHER; note = 2'-O-methyladenosine-3'- phosphorothioate
  modified_base 3: mod_base = OTHER; note = 2'-O-methylcytidine-3'-phosphate
  modified_base 4: mod_base = OTHER; note = 2'-O-methylguanosine-3'-phosphate
  modified_base 5: mod_base = OTHER; note = 2'-O-methylguanosine-3'-phosphate
  modified_base 6: mod_base = OTHER; note = 2'-O-methylguanosine-3'-phosphate
  modified_base 7: mod_base = OTHER; note = 2'-fluorocytidine-3'-phosphate
  modified_base 8: mod_base = OTHER; note = 2'-O-methyladenosine-3'-phosphate
  modified_base 9: mod_base = OTHER; note = 2'-fluorouridine-3'-phosphate
  modified_base 10: mod_base = OTHER; note = 2'-fluoroguanosine-3'-phosphate
  modified_base 11: mod_base = OTHER; note = 2'-fluoroadenosine-3'-phosphate
  modified_base 12: mod_base = OTHER; note = 2'-O-methyluridine-3'-phosphate
  modified_base 13: mod_base = OTHER; note = 2'-O-methylguanosine-3'-phosphate
  modified_base 14: mod_base = OTHER; note = 2'-O-methyluridine-3'-phosphate
  modified_base 15: mod_base = OTHER; note = 2'-O-methyluridine-3'-phosphate
  modified_base 16: mod_base = OTHER; note = 2'-O-methylguanosine-3'-phosphate
  modified_base 17: mod_base = OTHER; note = 2'-O-methyladenosine-3'-phosphate
  modified_base 18: mod_base = OTHER; note = 2'-O-methylguanosine-3'-phosphate
  modified_base 19: mod_base = OTHER; note = 2'-O-methyluridine-3'-phosphate
  modified_base 20: mod_base = OTHER; note = 2'-O-methyluridine-3'-phosphate
  modified_base 21: mod_base = OTHER; note 2'-O-methylcytidine-3'-phosphate-N-[tris(GalNAc-alkyl)-amid odecanoyl)]-4-hydroxyprolinol (Hyp-(GalNAc-alkyl)3)
aacgggcatgatgttgagttc

SEQ ID NO: 2131 - RNA, 23 nt, synthetic construct
  source 1..23: mol_type = other RNA
  modified_base 1: mod_base = OTHER; note = 2'-O-methylguanosine-3'- phosphorothioate
  modified_base 2: mod_base = OTHER; note = 2'-fluoroadenosine-3'-phosphorothioate
  modified_base 3: mod_base = OTHER; note = 2'-O-methyladenosine-3'-phosphate
  modified_base 4: mod_base = OTHER; note = 2'-O-methylcytidine-3'-phosphate
  modified_base 5: mod_base = OTHER; note = 2'-O-methyluridine-3'-phosphate
  modified_base 6: mod_base = OTHER; note = 2'-fluorocytidine-3'-phosphate
  modified_base 7: mod_base = OTHER; note = 2'-O-methyladenosine-3'-phosphate
  modified_base 8: mod_base = OTHER; note = 2'-fluoroadenosine-3'-phosphate
  modified_base 9: mod_base = OTHER; note = 2'-fluorocytidine-3'-phosphate
  modified_base 10: mod_base = OTHER; note = 2'-O-methyladenosine-3'-phosphate
  modified_base 11: mod_base = OTHER; note = 2'-O-methyluridine-3'-phosphate
  modified_base 12: mod_base = OTHER; note = 2'-O-methylcytidine-3'-phosphate
  modified_base 13: mod_base = OTHER; note = 2'-O-methyladenosine-3'-phosphate
  modified_base 14: mod_base = OTHER; note = 2'-fluorouridine-3'-phosphate
  modified_base 15: mod_base = OTHER; note = 2'-O-methylguanosine-3'-phosphate
  modified_base 16: mod_base = OTHER; note = 2'-fluorocytidine-3'-phosphate
  modified_base 17: mod_base = OTHER; note = 2'-O-methylcytidine-3'-phosphate
  modified_base 18: mod_base = OTHER; note = 2'-O-methylcytidine-3'-phosphate
  modified_base 19: mod_base = OTHER; note = 2'-O-methylguanosine-3'-phosphate
  modified_base 20: mod_base = OTHER; note = 2'-O-methyluridine-3'-phosphate
  modified_base 21: mod_base = OTHER; note = 2'-O-methyluridine-3'-phosphorothioate
  modified_base 22: mod_base = OTHER; note = 2'-O-methylcytidine-3'- phosphorothioate
  modified_base 23: mod_base = OTHER; note = 2'-O-methylcytidine-3'-phosphate
gaactcaacatcatgcccgttcc

SEQ ID NO: 2132 - RNA, 21 nt, synthetic construct
  source 1..21: mol_type = other RNA
  modified_base 1: mod_base = OTHER; note = 2'-O-methyladenosine-3'- phosphorothioate
  modified_base 2: mod_base = OTHER; note = 2'-O-methylcytidine-3'- phosphorothioate
  modified_base 3: mod_base = OTHER; note = 2'-O-methylguanosine-3'-phosphate
  modified_base 4: mod_base = OTHER; note = 2'-O-methylguanosine-3'-phosphate
  modified_base 5: mod_base = OTHER; note = 2'-O-methylguanosine-3'-phosphate
  modified_base 6: mod_base = OTHER; note = 2'-O-methylcytidine-3'-phosphate
  modified_base 7: mod_base = OTHER; note = 2'-fluoroadenosine-3'-phosphate
  modified_base 8: mod_base = OTHER; note = 2'-O-methyluridine-3'-phosphate
  modified_base 9: mod_base = OTHER; note = 2'-fluoroguanosine-3'-phosphate
  modified_base 10: mod_base = OTHER; note = 2'-fluoroadenosine-3'-phosphate
  modified_base 11: mod_base = OTHER; note = 2'-fluorouridine-3'-phosphate
  modified_base 12: mod_base = OTHER; note = 2'-O-methylguanosine-3'-phosphate
  modified_base 13: mod_base = OTHER; note = 2'-O-methyluridine-3'-phosphate
  modified_base 14: mod_base = OTHER; note = 2'-O-methyluridine-3'-phosphate
  modified_base 15: mod_base = OTHER; note = 2'-O-methylguanosine-3'-phosphate
  modified_base 16: mod_base = OTHER; note = 2'-O-methyladenosine-3'-phosphate
  modified_base 17: mod_base = OTHER; note = 2'-O-methylguanosine-3'-phosphate
  modified_base 18: mod_base = OTHER; note = 2'-O-methyluridine-3'-phosphate
  modified_base 19: mod_base = OTHER; note = 2'-O-methyluridine-3'-phosphate
  modified_base 20: mod_base = OTHER; note = 2'-O-methylcytidine-3'-phosphate
  modified_base 21: mod_base = OTHER; note 2'-O-methylcytidine-3'-phosphate-N-[tris(GalNAc-alkyl)-amid odecanoyl)]-4-hydroxyprolinol (Hyp-(GalNAc-alkyl)3)
acgggcatgatgttgagttcc

SEQ ID NO: 2133 - RNA, 23 nt, synthetic construct
  source 1..23: mol_type = other RNA
  modified_base 1: mod_base = OTHER; note = 2'-O-methylguanosine-3'- phosphorothioate
  modified_base 2: mod_base = OTHER; note = 2'-fluoroguanosine-3'-phosphorothioate
  modified_base 3: mod_base = OTHER; note = 2'-O-methyladenosine-3'-phosphate
  modified_base 4: mod_base = OTHER; note = 2'-O-methyladenosine-3'-phosphate
  modified_base 5: mod_base = OTHER; note = 2'-O-methylcytidine-3'-phosphate
  modified_base 6: mod_base = OTHER; note = 2'-fluorouridine-3'-phosphate
  modified_base 7: mod_base = OTHER; note = 2'-O-methylcytidine-3'-phosphate
  modified_base 8: mod_base = OTHER; note = 2'-fluoroadenosine-3'-phosphate
  modified_base 9: mod_base = OTHER; note = 2'-fluoroadenosine-3'-phosphate
  modified_base 10: mod_base = OTHER; note = 2'-O-methylcytidine-3'-phosphate
  modified_base 11: mod_base = OTHER; note = 2'-O-methyladenosine-3'-phosphate
  modified_base 12: mod_base = OTHER; note = 2'-O-methyluridine-3'-phosphate
  modified_base 13: mod_base = OTHER; note = 2'-O-methylcytidine-3'-phosphate
  modified_base 14: mod_base = OTHER; note = 2'-fluoroadenosine-3'-phosphate
  modified_base 15: mod_base = OTHER; note = 2'-O-methyluridine-3'-phosphate
  modified_base 16: mod_base = OTHER; note = 2'-fluoroguanosine-3'-phosphate
  modified_base 17: mod_base = OTHER; note = 2'-O-methylcytidine-3'-phosphate
  modified_base 18: mod_base = OTHER; note = 2'-O-methylcytidine-3'-phosphate
  modified_base 19: mod_base = OTHER; note = 2'-O-methylcytidine-3'-phosphate
  modified_base 20: mod_base = OTHER; note = 2'-O-methylguanosine-3'-phosphate
  modified_base 21: mod_base = OTHER; note = 2'-O-methyluridine-3'-phosphorothioate
  modified_base 22: mod_base = OTHER; note = 2'-O-methyluridine-3'-phosphorothioate
  modified_base 23: mod_base = OTHER; note = 2'-O-methylcytidine-3'-phosphate
ggaactcaacatcatgcccgttc

SEQ ID NO: 2134 - RNA, 21 nt, synthetic construct
  source 1..21: mol_type = other RNA
  modified_base 1: mod_base = OTHER; note = 2'-O-methyluridine-3'-phosphorothioate
  modified_base 2: mod_base = OTHER; note = 2'-O-methylguanosine-3'- phosphorothioate
  modified_base 3: mod_base = OTHER; note = 2'-O-methylguanosine-3'-phosphate
  modified_base 4: mod_base = OTHER; note = 2'-O-methylguanosine-3'-phosphate
  modified_base 5: mod_base = OTHER; note = 2'-O-methyladenosine-3'-phosphate
  modified_base 6: mod_base = OTHER; note = 2'-O-methyladenosine-3'-phosphate
  modified_base 7: mod_base = OTHER; note = 2'-fluorocytidine-3'-phosphate
  modified_base 8: mod_base = OTHER; note = 2'-O-methylguanosine-3'-phosphate
  modified_base 9: mod_base = OTHER; note = 2'-fluoroguanosine-3'-phosphate
  modified_base 10: mod_base = OTHER; note = 2'-fluoroguanosine-3'-phosphate
  modified_base 11: mod_base = OTHER; note = 2'-fluorocytidine-3'-phosphate
  modified_base 12: mod_base = OTHER; note = 2'-O-methyladenosine-3'-phosphate
  modified_base 13: mod_base = OTHER; note = 2'-O-methyluridine-3'-phosphate
  modified_base 14: mod_base = OTHER; note = 2'-O-methylguanosine-3'-phosphate
  modified_base 15: mod_base = OTHER; note = 2'-O-methyladenosine-3'-phosphate
  modified_base 16: mod_base = OTHER; note = 2'-O-methyluridine-3'-phosphate
  modified_base 17: mod_base = OTHER; note = 2'-O-methylguanosine-3'-phosphate
  modified_base 18: mod_base = OTHER; note = 2'-O-methyluridine-3'-phosphate
  modified_base 19: mod_base = OTHER; note = 2'-O-methyluridine-3'-phosphate
  modified_base 20: mod_base = OTHER; note = 2'-O-methylguanosine-3'-phosphate
  modified_base 21: mod_base = OTHER; note 2'-O-methyladenosine-3'-phosphate-N-[tris(GalNAc-alkyl)-ami dodecanoyl)]-4-hydroxyprolinol (Hyp-(GalNAc-alkyl)3)
tgggaacgggcatgatgttga

SEQ ID NO: 2135 - RNA, 23 nt, synthetic construct
  source 1..23: mol_type = other RNA
  modified_base 1: mod_base = OTHER; note = 2'-O-methyluridine-3'-phosphorothioate
  modified_base 2: mod_base = OTHER; note = 2'-fluorocytidine-3'-phosphorothioate
  modified_base 3: mod_base = OTHER; note = 2'-O-methyladenosine-3'-phosphate
  modified_base 4: mod_base = OTHER; note = 2'-O-methyladenosine-3'-phosphate
  modified_base 5: mod_base = OTHER; note = 2'-O-methylcytidine-3'-phosphate
  modified_base 6: mod_base = OTHER; note = 2'-fluoroadenosine-3'-phosphate
  modified_base 7: mod_base = OTHER; note = 2'-O-methyluridine-3'-phosphate
  modified_base 8: mod_base = OTHER; note = 2'-fluorocytidine-3'-phosphate
  modified_base 9: mod_base = OTHER; note = 2'-fluoroadenosine-3'-phosphate
  modified_base 10: mod_base = OTHER; note = 2'-O-methyluridine-3'-phosphate
  modified_base 11: mod_base = OTHER; note = 2'-O-methylguanosine-3'-phosphate
  modified_base 12: mod_base = OTHER; note = 2'-O-methylcytidine-3'-phosphate
  modified_base 13: mod_base = OTHER; note = 2'-O-methylcytidine-3'-phosphate
  modified_base 14: mod_base = OTHER; note = 2'-fluorocytidine-3'-phosphate
  modified_base 15: mod_base = OTHER; note = 2'-O-methylguanosine-3'-phosphate
  modified_base 16: mod_base = OTHER; note = 2'-fluorouridine-3'-phosphate
  modified_base 17: mod_base = OTHER; note = 2'-O-methyluridine-3'-phosphate
  modified_base 18: mod_base = OTHER; note = 2'-O-methylcytidine-3'-phosphate
  modified_base 19: mod_base = OTHER; note = 2'-O-methylcytidine-3'-phosphate
  modified_base 20: mod_base = OTHER; note = 2'-O-methylcytidine-3'-phosphate
  modified_base 21: mod_base = OTHER; note = 2'-O-methyladenosine-3'- phosphorothioate
  modified_base 22: mod_base = OTHER; note = 2'-O-methylguanosine-3'- phosphorothioate
  modified_base 23: mod_base = OTHER; note = 2'-O-methylguanosine-3'-phosphate
tcaacatcatgcccgttcccagg

SEQ ID NO: 2136 - RNA, 21 nt, synthetic construct
  source 1..21: mol_type = other RNA
  modified_base 1: mod_base = OTHER; note = 2'-O-methylcytidine-3'- phosphorothioate
  modified_base 2: mod_base = OTHER; note = 2'-O-methyluridine-3'-phosphorothioate
  modified_base 3: mod_base = OTHER; note = 2'-O-methylguanosine-3'-phosphate
  modified_base 4: mod_base = OTHER; note = 2'-O-methylguanosine-3'-phosphate
  modified_base 5: mod_base = OTHER; note = 2'-O-methylguanosine-3'-phosphate
  modified_base 6: mod_base = OTHER; note = 2'-O-methyladenosine-3'-phosphate
  modified_base 7: mod_base = OTHER; note = 2'-fluoroadenosine-3'-phosphate
  modified_base 8: mod_base = OTHER; note = 2'-O-methylcytidine-3'-phosphate
  modified_base 9: mod_base = OTHER; note = 2'-fluoroguanosine-3'-phosphate
  modified_base 10: mod_base = OTHER; note = 2'-fluoroguanosine-3'-phosphate
  modified_base 11: mod_base = OTHER; note = 2'-fluoroguanosine-3'-phosphate
  modified_base 12: mod_base = OTHER; note = 2'-O-methylcytidine-3'-phosphate
  modified_base 13: mod_base = OTHER; note = 2'-O-methyladenosine-3'-phosphate
  modified_base 14: mod_base = OTHER; note = 2'-O-methyluridine-3'-phosphate
  modified_base 15: mod_base = OTHER; note = 2'-O-methylguanosine-3'-phosphate
  modified_base 16: mod_base = OTHER; note = 2'-O-methyladenosine-3'-phosphate
  modified_base 17: mod_base = OTHER; note = 2'-O-methyluridine-3'-phosphate
  modified_base 18: mod_base = OTHER; note = 2'-O-methylguanosine-3'-phosphate
  modified_base 19: mod_base = OTHER; note = 2'-O-methyluridine-3'-phosphate
  modified_base 20: mod_base = OTHER; note = 2'-O-methyluridine-3'-phosphate
  modified_base 21: mod_base = OTHER; note 2'-O-methylguanosine-3'-phosphate-N-[tris(GalNAc-alkyl)-ami dodecanoyl)]-4-hydroxyprolinol (Hyp-(GalNAc-alkyl)3)
ctgggaacgggcatgatgttg

SEQ ID NO: 2137 - RNA, 23 nt, synthetic construct
  source 1..23: mol_type = other RNA
  modified_base 1: mod_base = OTHER; note = 2'-O-methylcytidine-3'- phosphorothioate
  modified_base 2: mod_base = OTHER; note = 2'-fluoroadenosine-3'-phosphorothioate
  modified_base 3: mod_base = OTHER; note = 2'-O-methyladenosine-3'-phosphate
  modified_base 4: mod_base = OTHER; note = 2'-O-methylcytidine-3'-phosphate
  modified_base 5: mod_base = OTHER; note = 2'-O-methyladenosine-3'-phosphate
  modified_base 6: mod_base = OTHER; note = 2'-fluorouridine-3'-phosphate
  modified_base 7: mod_base = OTHER; note = 2'-O-methylcytidine-3'-phosphate
  modified_base 8: mod_base = OTHER; note = 2'-fluoroadenosine-3'-phosphate
  modified_base 9: mod_base = OTHER; note = 2'-fluorouridine-3'-phosphate
  modified_base 10: mod_base = OTHER; note = 2'-O-methylguanosine-3'-phosphate
  modified_base 11: mod_base = OTHER; note = 2'-O-methylcytidine-3'-phosphate
  modified_base 12: mod_base = OTHER; note = 2'-O-methylcytidine-3'-phosphate
  modified_base 13: mod_base = OTHER; note = 2'-O-methylcytidine-3'-phosphate
  modified_base 14: mod_base = OTHER; note = 2'-fluoroguanosine-3'-phosphate
  modified_base 15: mod_base = OTHER; note = 2'-O-methyluridine-3'-phosphate
  modified_base 16: mod_base = OTHER; note = 2'-fluorouridine-3'-phosphate
  modified_base 17: mod_base = OTHER; note = 2'-O-methylcytidine-3'-phosphate
  modified_base 18: mod_base = OTHER; note = 2'-O-methylcytidine-3'-phosphate
  modified_base 19: mod_base = OTHER; note = 2'-O-methylcytidine-3'-phosphate
  modified_base 20: mod_base = OTHER; note = 2'-O-methyladenosine-3'-phosphate
  modified_base 21: mod_base = OTHER; note = 2'-O-methylguanosine-3'- phosphorothioate
  modified_base 22: mod_base = OTHER; note = 2'-O-methylguanosine-3'- phosphorothioate
  modified_base 23: mod_base = OTHER; note = 2'-O-methylguanosine-3'-phosphate
caacatcatgcccgttcccaggg

SEQ ID NO: 2138 - RNA, 21 nt, synthetic construct
  source 1..21: mol_type = other RNA
  modified_base 1: mod_base = OTHER; note = 2'-O-methyladenosine-3'- phosphorothioate
  modified_base 2: mod_base = OTHER; note = 2'-O-methyluridine-3'-phosphorothioate
  modified_base 3: mod_base = OTHER; note = 2'-O-methylguanosine-3'-phosphate
  modified_base 4: mod_base = OTHER; note = 2'-O-methyluridine-3'-phosphate
  modified_base 5: mod_base = OTHER; note = 2'-O-methylguanosine-3'-phosphate
  modified_base 6: mod_base = OTHER; note = 2'-O-methylguanosine-3'-phosphate
  modified_base 7: mod_base = OTHER; note = 2'-fluorocytidine-3'-phosphate
  modified_base 8: mod_base = OTHER; note = 2'-O-methyluridine-3'-phosphate
  modified_base 9: mod_base = OTHER; note = 2'-fluoroadenosine-3'-phosphate
  modified_base 10: mod_base = OTHER; note = 2'-fluoroadenosine-3'-phosphate
  modified_base 11: mod_base = OTHER; note = 2'-fluoroadenosine-3'-phosphate
  modified_base 12: mod_base = OTHER; note = 2'-O-methylguanosine-3'-phosphate
  modified_base 13: mod_base = OTHER; note = 2'-O-methylcytidine-3'-phosphate
  modified_base 14: mod_base = OTHER; note = 2'-O-methyladenosine-3'-phosphate
  modified_base 15: mod_base = OTHER; note = 2'-O-methyladenosine-3'-phosphate
  modified_base 16: mod_base = OTHER; note = 2'-O-methyluridine-3'-phosphate
  modified_base 17: mod_base = OTHER; note = 2'-O-methyladenosine-3'-phosphate
  modified_base 18: mod_base = OTHER; note = 2'-O-methylguanosine-3'-phosphate
  modified_base 19: mod_base = OTHER; note = 2'-O-methyladenosine-3'-phosphate
  modified_base 20: mod_base = OTHER; note = 2'-O-methylcytidine-3'-phosphate
  modified_base 21: mod_base = OTHER; note 2'-O-methylcytidine-3'-phosphate-N-[tris(GalNAc-alkyl)-amid odecanoyl)]-4-hydroxyprolinol (Hyp-(GalNAc-alkyl)3)
atgtggctaaagcaatagacc

SEQ ID NO: 2139 - RNA, 23 nt, synthetic construct
  source 1..23: mol_type = other RNA
  modified_base 1: mod_base = OTHER; note = 2'-O-methylguanosine-3'- phosphorothioate
  modified_base 2: mod_base = OTHER; note = 2'-fluoroguanosine-3'-phosphorothioate
  modified_base 3: mod_base = OTHER; note = 2'-O-methyluridine-3'-phosphate
  modified_base 4: mod_base = OTHER; note = 2'-O-methylcytidine-3'-phosphate
  modified_base 5: mod_base = OTHER; note = 2'-O-methyluridine-3'-phosphate
  modified_base 6: mod_base = OTHER; note = 2'-fluoroadenosine-3'-phosphate
  modified_base 7: mod_base = OTHER; note = 2'-O-methyluridine-3'-phosphate
  modified_base 8: mod_base = OTHER; note = 2'-fluorouridine-3'-phosphate
  modified_base 9: mod_base = OTHER; note = 2'-fluoroguanosine-3'-phosphate
  modified_base 10: mod_base = OTHER; note = 2'-O-methylcytidine-3'-phosphate
  modified_base 11: mod_base = OTHER; note = 2'-O-methyluridine-3'-phosphate
  modified_base 12: mod_base = OTHER; note = 2'-O-methyluridine-3'-phosphate
  modified_base 13: mod_base = OTHER; note = 2'-O-methyluridine-3'-phosphate
  modified_base 14: mod_base = OTHER; note = 2'-fluoroadenosine-3'-phosphate
  modified_base 15: mod_base = OTHER; note = 2'-O-methylguanosine-3'-phosphate
  modified_base 16: mod_base = OTHER; note = 2'-fluorocytidine-3'-phosphate
  modified_base 17: mod_base = OTHER; note = 2'-O-methylcytidine-3'-phosphate
  modified_base 18: mod_base = OTHER; note = 2'-O-methyladenosine-3'-phosphate
  modified_base 19: mod_base = OTHER; note = 2'-O-methylcytidine-3'-phosphate
  modified_base 20: mod_base = OTHER; note = 2'-O-methyladenosine-3'-phosphate
  modified_base 21: mod_base = OTHER; note = 2'-O-methyluridine-3'-phosphorothioate
  modified_base 22: mod_base = OTHER; note = 2'-O-methyladenosine-3'- phosphorothioate
  modified_base 23: mod_base = OTHER; note = 2'-O-methyluridine-3'-phosphate
ggtctattgctttagccacatat

SEQ ID NO: 2140 - RNA, 21 nt, synthetic construct
  source 1..21: mol_type = other RNA
  modified_base 1: mod_base = OTHER; note = 2'-O-methyluridine-3'-phosphorothioate
  modified_base 2: mod_base = OTHER; note = 2'-O-methylguanosine-3'- phosphorothioate
  modified_base 3: mod_base = OTHER; note = 2'-O-methyluridine-3'-phosphate
  modified_base 4: mod_base = OTHER; note = 2'-O-methylguanosine-3'-phosphate
  modified_base 5: mod_base = OTHER; note = 2'-O-methylguanosine-3'-phosphate
  modified_base 6: mod_base = OTHER; note = 2'-O-methylcytidine-3'-phosphate
  modified_base 7: mod_base = OTHER; note = 2'-fluorouridine-3'-phosphate
  modified_base 8: mod_base = OTHER; note = 2'-O-methyladenosine-3'-phosphate
  modified_base 9: mod_base = OTHER; note = 2'-fluoroadenosine-3'-phosphate
  modified_base 10: mod_base = OTHER; note = 2'-fluoroadenosine-3'-phosphate
  modified_base 11: mod_base = OTHER; note = 2'-fluoroguanosine-3'-phosphate
  modified_base 12: mod_base = OTHER; note = 2'-O-methylcytidine-3'-phosphate
  modified_base 13: mod_base = OTHER; note = 2'-O-methyladenosine-3'-phosphate
  modified_base 14: mod_base = OTHER; note = 2'-O-methyladenosine-3'-phosphate
  modified_base 15: mod_base = OTHER; note = 2'-O-methyluridine-3'-phosphate
  modified_base 16: mod_base = OTHER; note = 2'-O-methyladenosine-3'-phosphate
  modified_base 17: mod_base = OTHER; note = 2'-O-methylguanosine-3'-phosphate
  modified_base 18: mod_base = OTHER; note = 2'-O-methyladenosine-3'-phosphate
  modified_base 19: mod_base = OTHER; note = 2'-O-methylcytidine-3'-phosphate
  modified_base 20: mod_base = OTHER; note = 2'-O-methylcytidine-3'-phosphate
  modified_base 21: mod_base = OTHER; note 2'-O-methylcytidine-3'-phosphate-N-[tris(GalNAc-alkyl)-amid odecanoyl)]-4-hydroxyprolinol (Hyp-(GalNAc-alkyl)3)
tgtggctaaagcaatagaccc

SEQ ID NO: 2141 - RNA, 23 nt, synthetic construct
  source 1..23: mol_type = other RNA
  modified_base 1: mod_base = OTHER; note = 2'-O-methylguanosine-3'- phosphorothioate
  modified_base 2: mod_base = OTHER; note = 2'-fluoroguanosine-3'-phosphorothioate
  modified_base 3: mod_base = OTHER; note = 2'-O-methylguanosine-3'-phosphate
  modified_base 4: mod_base = OTHER; note = 2'-O-methyluridine-3'-phosphate
  modified_base 5: mod_base = OTHER; note = 2'-O-methylcytidine-3'-phosphate
  modified_base 6: mod_base = OTHER; note = 2'-fluorouridine-3'-phosphate
  modified_base 7: mod_base = OTHER; note = 2'-O-methyladenosine-3'-phosphate
  modified_base 8: mod_base = OTHER; note = 2'-fluorouridine-3'-phosphate
  modified_base 9: mod_base = OTHER; note = 2'-fluorouridine-3'-phosphate
  modified_base 10: mod_base = OTHER; note = 2'-O-methylguanosine-3'-phosphate
  modified_base 11: mod_base = OTHER; note = 2'-O-methylcytidine-3'-phosphate
  modified_base 12: mod_base = OTHER; note = 2'-O-methyluridine-3'-phosphate
  modified_base 13: mod_base = OTHER; note = 2'-O-methyluridine-3'-phosphate
  modified_base 14: mod_base = OTHER; note = 2'-fluorouridine-3'-phosphate
  modified_base 15: mod_base = OTHER; note = 2'-O-methyladenosine-3'-phosphate
  modified_base 16: mod_base = OTHER; note = 2'-fluoroguanosine-3'-phosphate
  modified_base 17: mod_base = OTHER; note = 2'-O-methylcytidine-3'-phosphate
  modified_base 18: mod_base = OTHER; note = 2'-O-methylcytidine-3'-phosphate
  modified_base 19: mod_base = OTHER; note = 2'-O-methyladenosine-3'-phosphate
  modified_base 20: mod_base = OTHER; note = 2'-O-methylcytidine-3'-phosphate
  modified_base 21: mod_base = OTHER; note = 2'-O-methyladenosine-3'- phosphorothioate
  modified_base 22: mod_base = OTHER; note = 2'-O-methyluridine-3'-phosphorothioate
  modified_base 23: mod_base = OTHER; note = 2'-O-methyladenosine-3'-phosphate
gggtctattgctttagccacata

SEQ ID NO: 2142 - RNA, 21 nt, synthetic construct
  source 1..21: mol_type = other RNA
  modified_base 1: mod_base = OTHER; note = 2'-O-methylguanosine-3'- phosphorothioate
  modified_base 2: mod_base = OTHER; note = 2'-O-methylcytidine-3'- phosphorothioate
  modified_base 3: mod_base = OTHER; note = 2'-O-methyladenosine-3'-phosphate
  modified_base 4: mod_base = OTHER; note = 2'-O-methyluridine-3'-phosphate
  modified_base 5: mod_base = OTHER; note = 2'-O-methyladenosine-3'-phosphate
  modified_base 6: mod_base = OTHER; note = 2'-O-methyluridine-3'-phosphate
  modified_base 7: mod_base = OTHER; note = 2'-fluoroguanosine-3'-phosphate
  modified_base 8: mod_base = OTHER; note = 2'-O-methyluridine-3'-phosphate
  modified_base 9: mod_base = OTHER; note = 2'-fluoroguanosine-3'-phosphate
  modified_base 10: mod_base = OTHER; note = 2'-fluoroguanosine-3'-phosphate
  modified_base 11: mod_base = OTHER; note = 2'-fluorocytidine-3'-phosphate
  modified_base 12: mod_base = OTHER; note = 2'-O-methyluridine-3'-phosphate
  modified_base 13: mod_base = OTHER; note = 2'-O-methyladenosine-3'-phosphate
  modified_base 14: mod_base = OTHER; note = 2'-O-methyladenosine-3'-phosphate
  modified_base 15: mod_base = OTHER; note = 2'-O-methyladenosine-3'-phosphate
  modified_base 16: mod_base = OTHER; note = 2'-O-methylguanosine-3'-phosphate
  modified_base 17: mod_base = OTHER; note = 2'-O-methylcytidine-3'-phosphate
  modified_base 18: mod_base = OTHER; note = 2'-O-methyladenosine-3'-phosphate
  modified_base 19: mod_base = OTHER; note = 2'-O-methyladenosine-3'-phosphate
  modified_base 20: mod_base = OTHER; note = 2'-O-methyluridine-3'-phosphate
  modified_base 21: mod_base = OTHER; note 2'-O-methyladenosine-3'-phosphate-N-[tris(GalNAc-alkyl)-ami dodecanoyl)]-4-hydroxyprolinol (Hyp-(GalNAc-alkyl)3)
gcatatgtggctaaagcaata

SEQ ID NO: 2143 - RNA, 23 nt, synthetic construct
  source 1..23: mol_type = other RNA
  modified_base 1: mod_base = OTHER; note = 2'-O-methyluridine-3'-phosphorothioate
  modified_base 2: mod_base = OTHER; note = 2'-fluoroadenosine-3'-phosphorothioate
  modified_base 3: mod_base = OTHER; note = 2'-O-methyluridine-3'-phosphate
  modified_base 4: mod_base = OTHER; note = 2'-O-methyluridine-3'-phosphate
  modified_base 5: mod_base = OTHER; note = 2'-O-methylguanosine-3'-phosphate
  modified_base 6: mod_base = OTHER; note = 2'-fluorocytidine-3'-phosphate
  modified_base 7: mod_base = OTHER; note = 2'-O-methyluridine-3'-phosphate
  modified_base 8: mod_base = OTHER; note = 2'-fluorouridine-3'-phosphate
  modified_base 9: mod_base = OTHER; note = 2'-fluorouridine-3'-phosphate
  modified_base 10: mod_base = OTHER; note = 2'-O-methyladenosine-3'-phosphate
  modified_base 11: mod_base = OTHER; note = 2'-O-methylguanosine-3'-phosphate
  modified_base 12: mod_base = OTHER; note = 2'-O-methylcytidine-3'-phosphate
  modified_base 13: mod_base = OTHER; note = 2'-O-methylcytidine-3'-phosphate
  modified_base 14: mod_base = OTHER; note = 2'-fluoroadenosine-3'-phosphate
  modified_base 15: mod_base = OTHER; note = 2'-O-methylcytidine-3'-phosphate
  modified_base 16: mod_base = OTHER; note = 2'-fluoroadenosine-3'-phosphate
  modified_base 17: mod_base = OTHER; note = 2'-O-methyluridine-3'-phosphate
  modified_base 18: mod_base = OTHER; note = 2'-O-methyladenosine-3'-phosphate
  modified_base 19: mod_base = OTHER; note = 2'-O-methyluridine-3'-phosphate
  modified_base 20: mod_base = OTHER; note = 2'-O-methylguanosine-3'-phosphate
  modified_base 21: mod_base = OTHER; note = 2'-O-methylcytidine-3'- phosphorothioate
  modified_base 22: mod_base = OTHER; note = 2'-O-methyladenosine-3'- phosphorothioate
  modified_base 23: mod_base = OTHER; note = 2'-O-methylguanosine-3'-phosphate
tattgctttagccacatatgcag

SEQ ID NO: 2144 - RNA, 21 nt, synthetic construct
  source 1..21: mol_type = other RNA
  modified_base 1: mod_base = OTHER; note = 2'-O-methyluridine-3'-phosphorothioate
  modified_base 2: mod_base = OTHER; note = 2'-O-methylguanosine-3'- phosphorothioate
  modified_base 3: mod_base = OTHER; note = 2'-O-methylcytidine-3'-phosphate
  modified_base 4: mod_base = OTHER; note = 2'-O-methyladenosine-3'-phosphate
  modified_base 5: mod_base = OTHER; note = 2'-O-methyluridine-3'-phosphate
  modified_base 6: mod_base = OTHER; note = 2'-O-methyladenosine-3'-phosphate
  modified_base 7: mod_base = OTHER; note = 2'-fluorouridine-3'-phosphate
  modified_base 8: mod_base = OTHER; note = 2'-O-methylguanosine-3'-phosphate
  modified_base 9: mod_base = OTHER; note = 2'-fluorouridine-3'-phosphate
  modified_base 10: mod_base = OTHER; note = 2'-fluoroguanosine-3'-phosphate
  modified_base 11: mod_base = OTHER; note = 2'-fluoroguanosine-3'-phosphate
  modified_base 12: mod_base = OTHER; note = 2'-O-methylcytidine-3'-phosphate
  modified_base 13: mod_base = OTHER; note = 2'-O-methyluridine-3'-phosphate
  modified_base 14: mod_base = OTHER; note = 2'-O-methyladenosine-3'-phosphate
  modified_base 15: mod_base = OTHER; note = 2'-O-methyladenosine-3'-phosphate
  modified_base 16: mod_base = OTHER; note = 2'-O-methyladenosine-3'-phosphate
  modified_base 17: mod_base = OTHER; note = 2'-O-methylguanosine-3'-phosphate
  modified_base 18: mod_base = OTHER; note = 2'-O-methylcytidine-3'-phosphate
  modified_base 19: mod_base = OTHER; note = 2'-O-methyladenosine-3'-phosphate
  modified_base 20: mod_base = OTHER; note = 2'-O-methyladenosine-3'-phosphate
  modified_base 21: mod_base = OTHER; note 2'-O-methyluridine-3'-phosphate-N-[tris(GalNAc-alkyl)-amido decanoyl)]-4-hydroxyprolinol (Hyp-(GalNAc-alkyl)3)
tgcatatgtggctaaagcaat

SEQ ID NO: 2145 - RNA, 23 nt, synthetic construct
  source 1..23: mol_type = other RNA
  modified_base 1: mod_base = OTHER; note = 2'-O-methyladenosine-3'- phosphorothioate
  modified_base 2: mod_base = OTHER; note = 2'-fluorouridine -3'-phosphorothioate
  modified_base 3: mod_base = OTHER; note = 2'-O-methyluridine-3'-phosphate
  modified_base 4: mod_base = OTHER; note = 2'-O-methylguanosine-3'-phosphate
  modified_base 5: mod_base = OTHER; note = 2'-O-methylcytidine-3'-phosphate
  modified_base 6: mod_base = OTHER; note = 2'-fluorouridine-3'-phosphate
  modified_base 7: mod_base = OTHER; note = 2'-O-methyluridine-3'-phosphate
  modified_base 8: mod_base = OTHER; note = 2'-fluorouridine-3'-phosphate
  modified_base 9: mod_base = OTHER; note = 2'-fluoroadenosine-3'-phosphate
  modified_base 10: mod_base = OTHER; note = 2'-O-methylguanosine-3'-phosphate
  modified_base 11: mod_base = OTHER; note = 2'-O-methylcytidine-3'-phosphate
  modified_base 12: mod_base = OTHER; note = 2'-O-methylcytidine-3'-phosphate
  modified_base 13: mod_base = OTHER; note = 2'-O-methyladenosine-3'-phosphate
  modified_base 14: mod_base = OTHER; note = 2'-fluorocytidine-3'-phosphate
  modified_base 15: mod_base = OTHER; note = 2'-O-methyladenosine-3'-phosphate
  modified_base 16: mod_base = OTHER; note = 2'-fluorouridine-3'-phosphate
  modified_base 17: mod_base = OTHER; note = 2'-O-methyladenosine-3'-phosphate
  modified_base 18: mod_base = OTHER; note = 2'-O-methyluridine-3'-phosphate
  modified_base 19: mod_base = OTHER; note = 2'-O-methylguanosine-3'-phosphate
  modified_base 20: mod_base = OTHER; note = 2'-O-methylcytidine-3'-phosphate
  modified_base 21: mod_base = OTHER; note = 2'-O-methyladenosine-3'- phosphorothioate
  modified_base 22: mod_base = OTHER; note = 2'-O-methylguanosine-3'- phosphorothioate
  modified_base 23: mod_base = OTHER; note = 2'-O-methylcytidine-3'-phosphate
attgctttagccacatatgcagc

SEQ ID NO: 2146 - RNA, 21 nt, synthetic construct
  source 1..21: mol_type = other RNA
  modified_base 1: mod_base = OTHER; note = 2'-O-methyladenosine-3'- phosphorothioate
  modified_base 2: mod_base = OTHER; note = 2'-O-methylguanosine-3'- phosphorothioate
  modified_base 3: mod_base = OTHER; note = 2'-O-methylguanosine-3'-phosphate
  modified_base 4: mod_base = OTHER; note = 2'-O-methyladenosine-3'-phosphate
  modified_base 5: mod_base = OTHER; note = 2'-O-methyluridine-3'-phosphate
  modified_base 6: mod_base = OTHER; note = 2'-O-methylguanosine-3'-phosphate
  modified_base 7: mod_base = OTHER; note = 2'-fluorocytidine-3'-phosphate
  modified_base 8: mod_base = OTHER; note = 2'-O-methyluridine-3'-phosphate
  modified_base 9: mod_base = OTHER; note = 2'-fluorocytidine-3'-phosphate
  modified_base 10: mod_base = OTHER; note = 2'-fluorocytidine-3'-phosphate
  modified_base 11: mod_base = OTHER; note = 2'-fluoroguanosine-3'-phosphate
  modified_base 12: mod_base = OTHER; note = 2'-O-methylguanosine-3'-phosphate
  modified_base 13: mod_base = OTHER; note = 2'-O-methyladenosine-3'-phosphate
  modified_base 14: mod_base = OTHER; note = 2'-O-methyladenosine-3'-phosphate
  modified_base 15: mod_base = OTHER; note = 2'-O-methyluridine-3'-phosphate
  modified_base 16: mod_base = OTHER; note = 2'-O-methylguanosine-3'-phosphate
  modified_base 17: mod_base = OTHER; note = 2'-O-methyluridine-3'-phosphate
  modified_base 18: mod_base = OTHER; note = 2'-O-methyluridine-3'-phosphate
  modified_base 19: mod_base = OTHER; note = 2'-O-methylguanosine-3'-phosphate
  modified_base 20: mod_base = OTHER; note = 2'-O-methylcytidine-3'-phosphate
  modified_base 21: mod_base = OTHER; note 2'-O-methyluridine-3'-phosphate-N-[tris(GalNAc-alkyl)-amido decanoyl)]-4-hydroxyprolinol (Hyp-(GalNAc-alkyl)3)
aggatgctccggaatgttgct

SEQ ID NO: 2147 - RNA, 23 nt, synthetic construct
  source 1..23: mol_type = other RNA
  modified_base 1: mod_base = OTHER; note = 2'-O-methyladenosine-3'- phosphorothioate
  modified_base 2: mod_base = OTHER; note = 2'-fluoroguanosine-3'-phosphorothioate
  modified_base 3: mod_base = OTHER; note = 2'-O-methylcytidine-3'-phosphate
  modified_base 4: mod_base = OTHER; note = 2'-O-methyladenosine-3'-phosphate
  modified_base 5: mod_base = OTHER; note = 2'-O-methyladenosine-3'-phosphate
  modified_base 6: mod_base = OTHER; note = 2'-fluorocytidine-3'-phosphate
  modified_base 7: mod_base = OTHER; note = 2'-O-methyladenosine-3'-phosphate
  modified_base 8: mod_base = OTHER; note = 2'-fluorouridine-3'-phosphate
  modified_base 9: mod_base = OTHER; note = 2'-fluorouridine-3'-phosphate
  modified_base 10: mod_base = OTHER; note = 2'-O-methylcytidine-3'-phosphate
  modified_base 11: mod_base = OTHER; note = 2'-O-methylcytidine-3'-phosphate
  modified_base 12: mod_base = OTHER; note = 2'-O-methylguanosine-3'-phosphate
  modified_base 13: mod_base = OTHER; note = 2'-O-methylguanosine-3'-phosphate
  modified_base 14: mod_base = OTHER; note = 2'-fluoroadenosine-3'-phosphate
  modified_base 15: mod_base = OTHER; note = 2'-O-methylguanosine-3'-phosphate
  modified_base 16: mod_base = OTHER; note = 2'-fluorocytidine-3'-phosphate
  modified_base 17: mod_base = OTHER; note = 2'-O-methyladenosine-3'-phosphate
  modified_base 18: mod_base = OTHER; note = 2'-O-methyluridine-3'-phosphate
  modified_base 19: mod_base = OTHER; note = 2'-O-methylcytidine-3'-phosphate
  modified_base 20: mod_base = OTHER; note = 2'-O-methylcytidine-3'-phosphate
  modified_base 21: mod_base = OTHER; note = 2'-O-methyluridine-3'-phosphorothioate
  modified_base 22: mod_base = OTHER; note = 2'-O-methyluridine-3'-phosphorothioate
  modified_base 23: mod_base = OTHER; note = 2'-O-methylguanosine-3'-phosphate
agcaacattccggagcatccttg

SEQ ID NO: 2148 - RNA, 21 nt, synthetic construct
  source 1..21: mol_type = other RNA
  modified_base 1: mod_base = OTHER; note = 2'-O-methylguanosine-3'- phosphorothioate
  modified_base 2: mod_base = OTHER; note = 2'-O-methylguanosine-3'- phosphorothioate
  modified_base 3: mod_base = OTHER; note = 2'-O-methyladenosine-3'-phosphate
  modified_base 4: mod_base = OTHER; note = 2'-O-methyluridine-3'-phosphate
  modified_base 5: mod_base = OTHER; note = 2'-O-methylguanosine-3'-phosphate
  modified_base 6: mod_base = OTHER; note = 2'-O-methylcytidine-3'-phosphate
  modified_base 7: mod_base = OTHER; note = 2'-fluorouridine-3'-phosphate
  modified_base 8: mod_base = OTHER; note = 2'-O-methylcytidine-3'-phosphate
  modified_base 9: mod_base = OTHER; note = 2'-fluorocytidine-3'-phosphate
  modified_base 10: mod_base = OTHER; note = 2'-fluoroguanosine-3'-phosphate
  modified_base 11: mod_base = OTHER; note = 2'-fluoroguanosine-3'-phosphate
  modified_base 12: mod_base = OTHER; note = 2'-O-methyladenosine-3'-phosphate
  modified_base 13: mod_base = OTHER; note = 2'-O-methyladenosine-3'-phosphate
  modified_base 14: mod_base = OTHER; note = 2'-O-methyluridine-3'-phosphate
  modified_base 15: mod_base = OTHER; note = 2'-O-methylguanosine-3'-phosphate
  modified_base 16: mod_base = OTHER; note = 2'-O-methyluridine-3'-phosphate
  modified_base 17: mod_base = OTHER; note = 2'-O-methyluridine-3'-phosphate
  modified_base 18: mod_base = OTHER; note = 2'-O-methylguanosine-3'-phosphate
  modified_base 19: mod_base = OTHER; note = 2'-O-methylcytidine-3'-phosphate
  modified_base 20: mod_base = OTHER; note = 2'-O-methyluridine-3'-phosphate
  modified_base 21: mod_base = OTHER; note 2'-O-methylguanosine-3'-phosphate-N-[tris(GalNAc-alkyl)-ami dodecanoyl)]-4-hydroxyprolinol (Hyp-(GalNAc-alkyl)3)
ggatgctccggaatgttgctg

SEQ ID NO: 2149 - RNA, 23 nt, synthetic construct
  source 1..23: mol_type = other RNA
  modified_base 1: mod_base = OTHER; note = 2'-O-methylcytidine-3'- phosphorothioate
  modified_base 2: mod_base = OTHER; note = 2'-fluoroadenosine-3'-phosphorothioate
  modified_base 3: mod_base = OTHER; note = 2'-O-methylguanosine-3'-phosphate
  modified_base 4: mod_base = OTHER; note = 2'-O-methylcytidine-3'-phosphate
  modified_base 5: mod_base = OTHER; note = 2'-O-methyladenosine-3'-phosphate
  modified_base 6: mod_base = OTHER; note = 2'-fluoroadenosine-3'-phosphate
  modified_base 7: mod_base = OTHER; note = 2'-O-methylcytidine-3'-phosphate
  modified_base 8: mod_base = OTHER; note = 2'-fluoroadenosine-3'-phosphate
  modified_base 9: mod_base = OTHER; note = 2'-fluorouridine-3'-phosphate
  modified_base 10: mod_base = OTHER; note = 2'-O-methyluridine-3'-phosphate
  modified_base 11: mod_base = OTHER; note = 2'-O-methylcytidine-3'-phosphate
  modified_base 12: mod_base = OTHER; note = 2'-O-methylcytidine-3'-phosphate
  modified_base 13: mod_base = OTHER; note = 2'-O-methylguanosine-3'-phosphate
  modified_base 14: mod_base = OTHER; note = 2'-fluoroguanosine-3'-phosphate
  modified_base 15: mod_base = OTHER; note = 2'-O-methyladenosine-3'-phosphate
  modified_base 16: mod_base = OTHER; note = 2'-fluoroguanosine-3'-phosphate
  modified_base 17: mod_base = OTHER; note = 2'-O-methylcytidine-3'-phosphate
  modified_base 18: mod_base = OTHER; note = 2'-O-methyladenosine-3'-phosphate
  modified_base 19: mod_base = OTHER; note = 2'-O-methyluridine-3'-phosphate
  modified_base 20: mod_base = OTHER; note = 2'-O-methylcytidine-3'-phosphate
  modified_base 21: mod_base = OTHER; note = 2'-O-methylcytidine-3'- phosphorothioate
  modified_base 22: mod_base = OTHER; note = 2'-O-methyluridine-3'-phosphorothioate
  modified_base 23: mod_base = OTHER; note = 2'-O-methyluridine-3'-phosphate
cagcaacattccggagcatcctt

SEQ ID NO: 2150 - RNA, 21 nt, synthetic construct
  source 1..21: mol_type = other RNA
  modified_base 1: mod_base = OTHER; note = 2'-O-methyluridine-3'-phosphorothioate
  modified_base 2: mod_base = OTHER; note = 2'-O-methylcytidine-3'- phosphorothioate
  modified_base 3: mod_base = OTHER; note = 2'-O-methylcytidine-3'-phosphate
  modified_base 4: mod_base = OTHER; note = 2'-O-methyladenosine-3'-phosphate
  modified_base 5: mod_base = OTHER; note = 2'-O-methyladenosine-3'-phosphate
  modified_base 6: mod_base = OTHER; note = 2'-O-methylguanosine-3'-phosphate
  modified_base 7: mod_base = OTHER; note = 2'-fluoroguanosine-3'-phosphate
  modified_base 8: mod_base = OTHER; note = 2'-O-methyladenosine-3'-phosphate
  modified_base 9: mod_base = OTHER; note = 2'-fluorouridine-3'-phosphate
  modified_base 10: mod_base = OTHER; note = 2'-fluoroguanosine-3'-phosphate
  modified_base 11: mod_base = OTHER; note = 2'-fluorocytidine-3'-phosphate
  modified_base 12: mod_base = OTHER; note = 2'-O-methyluridine-3'-phosphate
  modified_base 13: mod_base = OTHER; note = 2'-O-methylcytidine-3'-phosphate
  modified_base 14: mod_base = OTHER; note = 2'-O-methylcytidine-3'-phosphate
  modified_base 15: mod_base = OTHER; note = 2'-O-methylguanosine-3'-phosphate
  modified_base 16: mod_base = OTHER; note = 2'-O-methylguanosine-3'-phosphate
  modified_base 17: mod_base = OTHER; note = 2'-O-methyladenosine-3'-phosphate
  modified_base 18: mod_base = OTHER; note = 2'-O-methyladenosine-3'-phosphate
  modified_base 19: mod_base = OTHER; note = 2'-O-methyluridine-3'-phosphate
  modified_base 20: mod_base = OTHER; note = 2'-O-methylguanosine-3'-phosphate
  modified_base 21: mod_base = OTHER; note 2'-O-methyluridine-3'-phosphate-N-[tris(GalNAc-alkyl)-amido decanoyl)]-4-hydroxyprolinol (Hyp-(GalNAc-alkyl)3)
tccaaggatgctccggaatgt

SEQ ID NO: 2151 - RNA, 23 nt, synthetic construct
  source 1..23: mol_type = other RNA
  modified_base 1: mod_base = OTHER; note = 2'-O-methyladenosine-3'- phosphorothioate
  modified_base 2: mod_base = OTHER; note = 2'-fluorocytidine-3'-phosphorothioate
  modified_base 3: mod_base = OTHER; note = 2'-O-methyladenosine-3'-phosphate
  modified_base 4: mod_base = OTHER; note = 2'-O-methyluridine-3'-phosphate
  modified_base 5: mod_base = OTHER; note = 2'-O-methyluridine-3'-phosphate
  modified_base 6: mod_base = OTHER; note = 2'-fluorocytidine-3'-phosphate
  modified_base 7: mod_base = OTHER; note = 2'-O-methylcytidine-3'-phosphate
  modified_base 8: mod_base = OTHER; note = 2'-fluoroguanosine-3'-phosphate
  modified_base 9: mod_base = OTHER; note = 2'-fluoroguanosine-3'-phosphate
  modified_base 10: mod_base = OTHER; note = 2'-O-methyladenosine-3'-phosphate
  modified_base 11: mod_base = OTHER; note = 2'-O-methylguanosine-3'-phosphate
  modified_base 12: mod_base = OTHER; note = 2'-O-methylcytidine-3'-phosphate
  modified_base 13: mod_base = OTHER; note = 2'-O-methyladenosine-3'-phosphate
  modified_base 14: mod_base = OTHER; note = 2'-fluorouridine-3'-phosphate
  modified_base 15: mod_base = OTHER; note = 2'-O-methylcytidine-3'-phosphate
  modified_base 16: mod_base = OTHER; note = 2'-fluorocytidine-3'-phosphate
  modified_base 17: mod_base = OTHER; note = 2'-O-methyluridine-3'-phosphate
  modified_base 18: mod_base = OTHER; note = 2'-O-methyluridine-3'-phosphate
  modified_base 19: mod_base = OTHER; note = 2'-O-methylguanosine-3'-phosphate
  modified_base 20: mod_base = OTHER; note = 2'-O-methylguanosine-3'-phosphate
  modified_base 21: mod_base = OTHER; note = 2'-O-methyladenosine-3'- phosphorothioate
  modified_base 22: mod_base = OTHER; note = 2'-O-methyluridine-3'-phosphorothioate
  modified_base 23: mod_base = OTHER; note = 2'-O-methyladenosine-3'-phosphate
acattccggagcatccttggata

SEQ ID NO: 2152 - RNA, 21 nt, synthetic construct
  source 1..21: mol_type = other RNA
  modified_base 1: mod_base = OTHER; note = 2'-O-methyladenosine-3'- phosphorothioate
  modified_base 2: mod_base = OTHER; note = 2'-O-methyluridine-3'-phosphorothioate
  modified_base 3: mod_base = OTHER; note = 2'-O-methylcytidine-3'-phosphate
  modified_base 4: mod_base = OTHER; note = 2'-O-methylcytidine-3'-phosphate
  modified_base 5: mod_base = OTHER; note = 2'-O-methyladenosine-3'-phosphate
  modified_base 6: mod_base = OTHER; note = 2'-O-methyladenosine-3'-phosphate
  modified_base 7: mod_base = OTHER; note = 2'-fluoroguanosine-3'-phosphate
  modified_base 8: mod_base = OTHER; note = 2'-O-methylguanosine-3'-phosphate
  modified_base 9: mod_base = OTHER; note = 2'-fluoroadenosine-3'-phosphate
  modified_base 10: mod_base = OTHER; note = 2'-fluorouridine-3'-phosphate
  modified_base 11: mod_base = OTHER; note = 2'-fluoroguanosine-3'-phosphate
  modified_base 12: mod_base = OTHER; note = 2'-O-methylcytidine-3'-phosphate
  modified_base 13: mod_base = OTHER; note = 2'-O-methyluridine-3'-phosphate
  modified_base 14: mod_base = OTHER; note = 2'-O-methylcytidine-3'-phosphate
  modified_base 15: mod_base = OTHER; note = 2'-O-methylcytidine-3'-phosphate
  modified_base 16: mod_base = OTHER; note = 2'-O-methylguanosine-3'-phosphate
  modified_base 17: mod_base = OTHER; note = 2'-O-methylguanosine-3'-phosphate
  modified_base 18: mod_base = OTHER; note = 2'-O-methyladenosine-3'-phosphate
  modified_base 19: mod_base = OTHER; note = 2'-O-methyladenosine-3'-phosphate
  modified_base 20: mod_base = OTHER; note = 2'-O-methyluridine-3'-phosphate
  modified_base 21: mod_base = OTHER; note 2'-O-methylguanosine-3'-phosphate-N-[tris(GalNAc-alkyl)-ami dodecanoyl)]-4-hydroxyprolinol (Hyp-(GalNAc-alkyl)3)
atccaaggatgctccggaatg

SEQ ID NO: 2153 - RNA, 23 nt, synthetic construct
  source 1..23: mol_type = other RNA
  modified_base 1: mod_base = OTHER; note = 2'-O-methylcytidine-3'- phosphorothioate
  modified_base 2: mod_base = OTHER; note = 2'-fluoroadenosine-3'-phosphorothioate
  modified_base 3: mod_base = OTHER; note = 2'-O-methyluridine-3'-phosphate
  modified_base 4: mod_base = OTHER; note = 2'-O-methyluridine-3'-phosphate
  modified_base 5: mod_base = OTHER; note = 2'-O-methylcytidine-3'-phosphate
  modified_base 6: mod_base = OTHER; note = 2'-fluorocytidine-3'-phosphate
  modified_base 7: mod_base = OTHER; note = 2'-O-methylguanosine-3'-phosphate
  modified_base 8: mod_base = OTHER; note = 2'-fluoroguanosine-3'-phosphate
  modified_base 9: mod_base = OTHER; note = 2'-fluoroadenosine-3'-phosphate
  modified_base 10: mod_base = OTHER; note = 2'-O-methylguanosine-3'-phosphate
  modified_base 11: mod_base = OTHER; note = 2'-O-methylcytidine-3'-phosphate
  modified_base 12: mod_base = OTHER; note = 2'-O-methyladenosine-3'-phosphate
  modified_base 13: mod_base = OTHER; note = 2'-O-methyluridine-3'-phosphate
  modified_base 14: mod_base = OTHER; note = 2'-fluorocytidine-3'-phosphate
  modified_base 15: mod_base = OTHER; note = 2'-O-methylcytidine-3'-phosphate
  modified_base 16: mod_base = OTHER; note = 2'-fluorouridine-3'-phosphate
  modified_base 17: mod_base = OTHER; note = 2'-O-methyluridine-3'-phosphate
  modified_base 18: mod_base = OTHER; note = 2'-O-methylguanosine-3'-phosphate
  modified_base 19: mod_base = OTHER; note = 2'-O-methylguanosine-3'-phosphate
  modified_base 20: mod_base = OTHER; note = 2'-O-methyladenosine-3'-phosphate
  modified_base 21: mod_base = OTHER; note = 2'-O-methyluridine-3'-phosphorothioate
  modified_base 22: mod_base = OTHER; note = 2'-O-methyladenosine-3'- phosphorothioate
  modified_base 23: mod_base = OTHER; note = 2'-O-methylcytidine-3'-phosphate
cattccggagcatccttggatac

SEQ ID NO: 2154 - RNA, 21 nt, synthetic construct
  source 1..21: mol_type = other RNA
  modified_base 1: mod_base = OTHER; note = 2'-O-methyluridine-3'-phosphorothioate
  modified_base 2: mod_base = OTHER; note = 2'-O-methylcytidine-3'- phosphorothioate
  modified_base 3: mod_base = OTHER; note = 2'-O-methyladenosine-3'-phosphate
  modified_base 4: mod_base = OTHER; note = 2'-O-methylcytidine-3'-phosphate
  modified_base 5: mod_base = OTHER; note = 2'-O-methyladenosine-3'-phosphate
  modified_base 6: mod_base = OTHER; note = 2'-O-methyluridine-3'-phosphate
  modified_base 7: mod_base = OTHER; note = 2'-fluorocytidine-3'-phosphate
  modified_base 8: mod_base = OTHER; note = 2'-O-methyluridine-3'-phosphate
  modified_base 9: mod_base = OTHER; note = 2'-fluorouridine-3'-phosphate
  modified_base 10: mod_base = OTHER; note = 2'-fluorouridine-3'-phosphate
  modified_base 11: mod_base = OTHER; note = 2'-fluoroadenosine-3'-phosphate
  modified_base 12: mod_base = OTHER; note = 2'-O-methylguanosine-3'-phosphate
  modified_base 13: mod_base = OTHER; note = 2'-O-methyluridine-3'-phosphate
  modified_base 14: mod_base = OTHER; note = 2'-O-methylguanosine-3'-phosphate
  modified_base 15: mod_base = OTHER; note = 2'-O-methyluridine-3'-phosphate
  modified_base 16: mod_base = OTHER; note = 2'-O-methylcytidine-3'-phosphate
  modified_base 17: mod_base = OTHER; note = 2'-O-methyluridine-3'-phosphate
  modified_base 18: mod_base = OTHER; note = 2'-O-methylguanosine-3'-phosphate
  modified_base 19: mod_base = OTHER; note = 2'-O-methyladenosine-3'-phosphate
  modified_base 20: mod_base = OTHER; note = 2'-O-methyladenosine-3'-phosphate
  modified_base 21: mod_base = OTHER; note 2'-O-methyluridine-3'-phosphate-N-[tris(GalNAc-alkyl)-amido decanoyl)]-4-hydroxyprolinol (Hyp-(GalNAc-alkyl)3)
tcacatctttagtgtctgaat

SEQ ID NO: 2155 - RNA, 23 nt, synthetic construct
  source 1..23: mol_type = other RNA
  modified_base 1: mod_base = OTHER; note = 2'-O-methyladenosine-3'- phosphorothioate
  modified_base 2: mod_base = OTHER; note = 2'-fluorouridine -3'-phosphorothioate
  modified_base 3: mod_base = OTHER; note = 2'-O-methyluridine-3'-phosphate
  modified_base 4: mod_base = OTHER; note = 2'-O-methylcytidine-3'-phosphate
  modified_base 5: mod_base = OTHER; note = 2'-O-methyladenosine-3'-phosphate
  modified_base 6: mod_base = OTHER; note = 2'-fluoroguanosine-3'-phosphate
  modified_base 7: mod_base = OTHER; note = 2'-O-methyladenosine-3'-phosphate
  modified_base 8: mod_base = OTHER; note = 2'-fluorocytidine-3'-phosphate
  modified_base 9: mod_base = OTHER; note = 2'-fluoroadenosine-3'-phosphate
  modified_base 10: mod_base = OTHER; note = 2'-O-methylcytidine-3'-phosphate
  modified_base 11: mod_base = OTHER; note = 2'-O-methyluridine-3'-phosphate
  modified_base 12: mod_base = OTHER; note = 2'-O-methyladenosine-3'-phosphate
  modified_base 13: mod_base = OTHER; note = 2'-O-methyladenosine-3'-phosphate
  modified_base 14: mod_base = OTHER; note = 2'-fluoroadenosine-3'-phosphate
  modified_base 15: mod_base = OTHER; note = 2'-O-methylguanosine-3'-phosphate
  modified_base 16: mod_base = OTHER; note = 2'-fluoroadenosine-3'-phosphate
  modified_base 17: mod_base = OTHER; note = 2'-O-methyluridine-3'-phosphate
  modified_base 18: mod_base = OTHER; note = 2'-O-methylguanosine-3'-phosphate
  modified_base 19: mod_base = OTHER; note = 2'-O-methyluridine-3'-phosphate
  modified_base 20: mod_base = OTHER; note = 2'-O-methylguanosine-3'-phosphate
  modified_base 21: mod_base = OTHER; note = 2'-O-methyladenosine-3'- phosphorothioate
  modified_base 22: mod_base = OTHER; note = 2'-O-methyluridine-3'-phosphorothioate
  modified_base 23: mod_base = OTHER; note = 2'-O-methyluridine-3'-phosphate
attcagacactaaagatgtgatt

SEQ ID NO: 2156 - RNA, 21 nt, synthetic construct
  source 1..21: mol_type = other RNA
  modified_base 1: mod_base = OTHER; note = 2'-O-methylcytidine-3'- phosphorothioate
  modified_base 2: mod_base = OTHER; note = 2'-O-methyladenosine-3'- phosphorothioate
  modified_base 3: mod_base = OTHER; note = 2'-O-methylcytidine-3'-phosphate
  modified_base 4: mod_base = OTHER; note = 2'-O-methyladenosine-3'-phosphate
  modified_base 5: mod_base = OTHER; note = 2'-O-methyluridine-3'-phosphate
  modified_base 6: mod_base = OTHER; note = 2'-O-methylcytidine-3'-phosphate
  modified_base 7: mod_base = OTHER; note = 2'-fluorouridine-3'-phosphate
  modified_base 8: mod_base = OTHER; note = 2'-O-methyluridine-3'-phosphate
  modified_base 9: mod_base = OTHER; note = 2'-fluorouridine-3'-phosphate
  modified_base 10: mod_base = OTHER; note = 2'-fluoroadenosine-3'-phosphate
  modified_base 11: mod_base = OTHER; note = 2'-fluoroguanosine-3'-phosphate
  modified_base 12: mod_base = OTHER; note = 2'-O-methyluridine-3'-phosphate
  modified_base 13: mod_base = OTHER; note = 2'-O-methylguanosine-3'-phosphate
  modified_base 14: mod_base = OTHER; note = 2'-O-methyluridine-3'-phosphate
  modified_base 15: mod_base = OTHER; note = 2'-O-methylcytidine-3'-phosphate
  modified_base 16: mod_base = OTHER; note = 2'-O-methyluridine-3'-phosphate
  modified_base 17: mod_base = OTHER; note = 2'-O-methylguanosine-3'-phosphate
  modified_base 18: mod_base = OTHER; note = 2'-O-methyladenosine-3'-phosphate
  modified_base 19: mod_base = OTHER; note = 2'-O-methyladenosine-3'-phosphate
  modified_base 20: mod_base = OTHER; note = 2'-O-methyluridine-3'-phosphate
  modified_base 21: mod_base = OTHER; note 2'-O-methyladenosine-3'-phosphate-N-[tris(GalNAc-alkyl)-ami dodecanoyl)]-4-hydroxyprolinol (Hyp-(GalNAc-alkyl)3)
cacatctttagtgtctgaata

SEQ ID NO: 2157 - RNA, 23 nt, synthetic construct
  source 1..23: mol_type = other RNA
  modified_base 1: mod_base = OTHER; note = 2'-O-methyluridine-3'-phosphorothioate
  modified_base 2: mod_base = OTHER; note = 2'-fluoroadenosine-3'-phosphorothioate
  modified_base 3: mod_base = OTHER; note = 2'-O-methyluridine-3'-phosphate
  modified_base 4: mod_base = OTHER; note = 2'-O-methyluridine-3'-phosphate
  modified_base 5: mod_base = OTHER; note = 2'-O-methylcytidine-3'-phosphate
  modified_base 6: mod_base = OTHER; note = 2'-fluoroadenosine-3'-phosphate
  modified_base 7: mod_base = OTHER; note = 2'-O-methylguanosine-3'-phosphate
  modified_base 8: mod_base = OTHER; note = 2'-fluoroadenosine-3'-phosphate
  modified_base 9: mod_base = OTHER; note = 2'-fluorocytidine-3'-phosphate
  modified_base 10: mod_base = OTHER; note = 2'-O-methyladenosine-3'-phosphate
  modified_base 11: mod_base = OTHER; note = 2'-O-methylcytidine-3'-phosphate
  modified_base 12: mod_base = OTHER; note = 2'-O-methyluridine-3'-phosphate
  modified_base 13: mod_base = OTHER; note = 2'-O-methyladenosine-3'-phosphate
  modified_base 14: mod_base = OTHER; note = 2'-fluoroadenosine-3'-phosphate
  modified_base 15: mod_base = OTHER; note = 2'-O-methyladenosine-3'-phosphate
  modified_base 16: mod_base = OTHER; note = 2'-fluoroguanosine-3'-phosphate
  modified_base 17: mod_base = OTHER; note = 2'-O-methyladenosine-3'-phosphate
  modified_base 18: mod_base = OTHER; note = 2'-O-methyluridine-3'-phosphate
  modified_base 19: mod_base = OTHER; note = 2'-O-methylguanosine-3'-phosphate
  modified_base 20: mod_base = OTHER; note = 2'-O-methyluridine-3'-phosphate
  modified_base 21: mod_base = OTHER; note = 2'-O-methylguanosine-3'- phosphorothioate
  modified_base 22: mod_base = OTHER; note = 2'-O-methyladenosine-3'- phosphorothioate
  modified_base 23: mod_base = OTHER; note = 2'-O-methyluridine-3'-phosphate
tattcagacactaaagatgtgat

SEQ ID NO: 2158 - RNA, 21 nt, synthetic construct
  source 1..21: mol_type = other RNA
  modified_base 1: mod_base = OTHER; note = 2'-O-methylcytidine-3'- phosphorothioate
  modified_base 2: mod_base = OTHER; note = 2'-O-methylcytidine-3'- phosphorothioate
  modified_base 3: mod_base = OTHER; note = 2'-O-methyladenosine-3'-phosphate
  modified_base 4: mod_base = OTHER; note = 2'-O-methyladenosine-3'-phosphate
  modified_base 5: mod_base = OTHER; note = 2'-O-methyluridine-3'-phosphate
  modified_base 6: mod_base = OTHER; note = 2'-O-methylcytidine-3'-phosphate
  modified_base 7: mod_base = OTHER; note = 2'-fluoroadenosine-3'-phosphate
  modified_base 8: mod_base = OTHER; note = 2'-O-methylcytidine-3'-phosphate
  modified_base 9: mod_base = OTHER; note = 2'-fluoroadenosine-3'-phosphate
  modified_base 10: mod_base = OTHER; note = 2'-fluorouridine-3'-phosphate
  modified_base 11: mod_base = OTHER; note = 2'-fluorocytidine-3'-phosphate
  modified_base 12: mod_base = OTHER; note = 2'-O-methyluridine-3'-phosphate
  modified_base 13: mod_base = OTHER; note = 2'-O-methyluridine-3'-phosphate
  modified_base 14: mod_base = OTHER; note = 2'-O-methyluridine-3'-phosphate
  modified_base 15: mod_base = OTHER; note = 2'-O-methyladenosine-3'-phosphate
  modified_base 16: mod_base = OTHER; note = 2'-O-methylguanosine-3'-phosphate
  modified_base 17: mod_base = OTHER; note = 2'-O-methyluridine-3'-phosphate
  modified_base 18: mod_base = OTHER; note = 2'-O-methylguanosine-3'-phosphate
  modified_base 19: mod_base = OTHER; note = 2'-O-methyluridine-3'-phosphate
  modified_base 20: mod_base = OTHER; note = 2'-O-methylcytidine-3'-phosphate
  modified_base 21: mod_base = OTHER; note 2'-O-methyluridine-3'-phosphate-N-[tris(GalNAc-alkyl)-amido decanoyl)]-4-hydroxyprolinol (Hyp-(GalNAc-alkyl)3)
ccaatcacatctttagtgtct

SEQ ID NO: 2159 - RNA, 23 nt, synthetic construct
  source 1..23: mol_type = other RNA
  modified_base 1: mod_base = OTHER; note = 2'-O-methyladenosine-3'- phosphorothioate
  modified_base 2: mod_base = OTHER; note = 2'-fluoroguanosine-3'-phosphorothioate
  modified_base 3: mod_base = OTHER; note = 2'-O-methyladenosine-3'-phosphate
  modified_base 4: mod_base = OTHER; note = 2'-O-methylcytidine-3'-phosphate
  modified_base 5: mod_base = OTHER; note = 2'-O-methyladenosine-3'-phosphate
  modified_base 6: mod_base = OTHER; note = 2'-fluorocytidine-3'-phosphate
  modified_base 7: mod_base = OTHER; note = 2'-O-methyluridine-3'-phosphate
  modified_base 8: mod_base = OTHER; note = 2'-fluoroadenosine-3'-phosphate
  modified_base 9: mod_base = OTHER; note = 2'-fluoroadenosine-3'-phosphate
  modified_base 10: mod_base = OTHER; note = 2'-O-methyladenosine-3'-phosphate
  modified_base 11: mod_base = OTHER; note = 2'-O-methylguanosine-3'-phosphate
  modified_base 12: mod_base = OTHER; note = 2'-O-methyladenosine-3'-phosphate
  modified_base 13: mod_base = OTHER; note = 2'-O-methyluridine-3'-phosphate
  modified_base 14: mod_base = OTHER; note = 2'-fluoroguanosine-3'-phosphate
  modified_base 15: mod_base = OTHER; note = 2'-O-methyluridine-3'-phosphate
  modified_base 16: mod_base = OTHER; note = 2'-fluoroguanosine-3'-phosphate
  modified_base 17: mod_base = OTHER; note = 2'-O-methyladenosine-3'-phosphate
  modified_base 18: mod_base = OTHER; note = 2'-O-methyluridine-3'-phosphate
  modified_base 19: mod_base = OTHER; note = 2'-O-methyluridine-3'-phosphate
  modified_base 20: mod_base = OTHER; note = 2'-O-methylguanosine-3'-phosphate
  modified_base 21: mod_base = OTHER; note = 2'-O-methylguanosine-3'- phosphorothioate
  modified_base 22: mod_base = OTHER; note = 2'-O-methyladenosine-3'- phosphorothioate
  modified_base 23: mod_base = OTHER; note = 2'-O-methyladenosine-3'-phosphate
agacactaaagatgtgattggaa

SEQ ID NO: 2160 - RNA, 21 nt, synthetic construct
  source 1..21: mol_type = other RNA
  modified_base 1: mod_base = OTHER; note = 2'-O-methyluridine-3'-phosphorothioate
  modified_base 2: mod_base = OTHER; note = 2'-O-methylcytidine-3'- phosphorothioate
  modified_base 3: mod_base = OTHER; note = 2'-O-methylcytidine-3'-phosphate
  modified_base 4: mod_base = OTHER; note = 2'-O-methyladenosine-3'-phosphate
  modified_base 5: mod_base = OTHER; note = 2'-O-methyladenosine-3'-phosphate
  modified_base 6: mod_base = OTHER; note = 2'-O-methyluridine-3'-phosphate
  modified_base 7: mod_base = OTHER; note = 2'-fluorocytidine-3'-phosphate
  modified_base 8: mod_base = OTHER; note = 2'-O-methyladenosine-3'-phosphate
  modified_base 9: mod_base = OTHER; note = 2'-fluorocytidine-3'-phosphate
  modified_base 10: mod_base = OTHER; note = 2'-fluoroadenosine-3'-phosphate
  modified_base 11: mod_base = OTHER; note = 2'-fluorouridine-3'-phosphate
  modified_base 12: mod_base = OTHER; note = 2'-O-methylcytidine-3'-phosphate
  modified_base 13: mod_base = OTHER; note = 2'-O-methyluridine-3'-phosphate
  modified_base 14: mod_base = OTHER; note = 2'-O-methyluridine-3'-phosphate
  modified_base 15: mod_base = OTHER; note = 2'-O-methyluridine-3'-phosphate
  modified_base 16: mod_base = OTHER; note = 2'-O-methyladenosine-3'-phosphate
  modified_base 17: mod_base = OTHER; note = 2'-O-methylguanosine-3'-phosphate
  modified_base 18: mod_base = OTHER; note = 2'-O-methyluridine-3'-phosphate
  modified_base 19: mod_base = OTHER; note = 2'-O-methylguanosine-3'-phosphate
  modified_base 20: mod_base = OTHER; note = 2'-O-methyluridine-3'-phosphate
  modified_base 21: mod_base = OTHER; note 2'-O-methylcytidine-3'-phosphate-N-[tris(GalNAc-alkyl)-amid odecanoyl)]-4-hydroxyprolinol (Hyp-(GalNAc-alkyl)3)
tccaatcacatctttagtgtc

SEQ ID NO: 2161 - RNA, 23 nt, synthetic construct
  source 1..23: mol_type = other RNA
  modified_base 1: mod_base = OTHER; note = 2'-O-methylguanosine-3'- phosphorothioate
  modified_base 2: mod_base = OTHER; note = 2'-fluoroadenosine-3'-phosphorothioate
  modified_base 3: mod_base = OTHER; note = 2'-O-methylcytidine-3'-phosphate
  modified_base 4: mod_base = OTHER; note = 2'-O-methyladenosine-3'-phosphate
  modified_base 5: mod_base = OTHER; note = 2'-O-methylcytidine-3'-phosphate
  modified_base 6: mod_base = OTHER; note = 2'-fluorouridine-3'-phosphate
  modified_base 7: mod_base = OTHER; note = 2'-O-methyladenosine-3'-phosphate
  modified_base 8: mod_base = OTHER; note = 2'-fluoroadenosine-3'-phosphate
  modified_base 9: mod_base = OTHER; note = 2'-fluoroadenosine-3'-phosphate
  modified_base 10: mod_base = OTHER; note = 2'-O-methylguanosine-3'-phosphate
  modified_base 11: mod_base = OTHER; note = 2'-O-methyladenosine-3'-phosphate
  modified_base 12: mod_base = OTHER; note = 2'-O-methyluridine-3'-phosphate
  modified_base 13: mod_base = OTHER; note = 2'-O-methylguanosine-3'-phosphate
  modified_base 14: mod_base = OTHER; note = 2'-fluorouridine-3'-phosphate
  modified_base 15: mod_base = OTHER; note = 2'-O-methylguanosine-3'-phosphate
  modified_base 16: mod_base = OTHER; note = 2'-fluoroadenosine-3'-phosphate
  modified_base 17: mod_base = OTHER; note = 2'-O-methyluridine-3'-phosphate
  modified_base 18: mod_base = OTHER; note = 2'-O-methyluridine-3'-phosphate
  modified_base 19: mod_base = OTHER; note = 2'-O-methylguanosine-3'-phosphate
  modified_base 20: mod_base = OTHER; note = 2'-O-methylguanosine-3'-phosphate
  modified_base 21: mod_base = OTHER; note = 2'-O-methyladenosine-3'- phosphorothioate
  modified_base 22: mod_base = OTHER; note = 2'-O-methyladenosine-3'- phosphorothioate
  modified_base 23: mod_base = OTHER; note = 2'-O-methyladenosine-3'-phosphate
gacactaaagatgtgattggaaa

SEQ ID NO: 2162 - RNA, 21 nt, synthetic construct
  source 1..21: mol_type = other RNA
  modified_base 1: mod_base = OTHER; note = 2'-O-methyladenosine-3'- phosphorothioate
  modified_base 2: mod_base = OTHER; note = 2'-O-methyladenosine-3'- phosphorothioate
  modified_base 3: mod_base = OTHER; note = 2'-O-methyladenosine-3'-phosphate
  modified_base 4: mod_base = OTHER; note = 2'-O-methyluridine-3'-phosphate
  modified_base 5: mod_base = OTHER; note = 2'-O-methylguanosine-3'-phosphate
  modified_base 6: mod_base = OTHER; note = 2'-O-methyluridine-3'-phosphate
  modified_base 7: mod_base = OTHER; note = 2'-fluoroguanosine-3'-phosphate
  modified_base 8: mod_base = OTHER; note = 2'-O-methyluridine-3'-phosphate
  modified_base 9: mod_base = OTHER; note = 2'-fluorouridine-3'-phosphate
  modified_base 10: mod_base = OTHER; note = 2'-fluorouridine-3'-phosphate
  modified_base 11: mod_base = OTHER; note = 2'-fluoroadenosine-3'-phosphate
  modified_base 12: mod_base = OTHER; note = 2'-O-methylguanosine-3'-phosphate
  modified_base 13: mod_base = OTHER; note = 2'-O-methyladenosine-3'-phosphate
  modified_base 14: mod_base = OTHER; note = 2'-O-methylcytidine-3'-phosphate
  modified_base 15: mod_base = OTHER; note = 2'-O-methyladenosine-3'-phosphate
  modified_base 16: mod_base = OTHER; note = 2'-O-methyladenosine-3'-phosphate
  modified_base 17: mod_base = OTHER; note = 2'-O-methylcytidine-3'-phosphate
  modified_base 18: mod_base = OTHER; note = 2'-O-methylguanosine-3'-phosphate
  modified_base 19: mod_base = OTHER; note = 2'-O-methyluridine-3'-phosphate
  modified_base 20: mod_base = OTHER; note = 2'-O-methylcytidine-3'-phosphate
  modified_base 21: mod_base = OTHER; note 2'-O-methyladenosine-3'-phosphate-N-[tris(GalNAc-alkyl)-ami dodecanoyl)]-4-hydroxyprolinol (Hyp-(GalNAc-alkyl)3)
aaatgtgtttagacaacgtca

SEQ ID NO: 2163 - RNA, 23 nt, synthetic construct
  source 1..23: mol_type = other RNA
  modified_base 1: mod_base = OTHER; note = 2'-O-methyluridine-3'-phosphorothioate
  modified_base 2: mod_base = OTHER; note = 2'-fluoroguanosine-3'-phosphorothioate
  modified_base 3: mod_base = OTHER; note = 2'-O-methyladenosine-3'-phosphate
  modified_base 4: mod_base = OTHER; note = 2'-O-methylcytidine-3'-phosphate
  modified_base 5: mod_base = OTHER; note = 2'-O-methylguanosine-3'-phosphate
  modified_base 6: mod_base = OTHER; note = 2'-fluorouridine-3'-phosphate
  modified_base 7: mod_base = OTHER; note = 2'-O-methyluridine-3'-phosphate
  modified_base 8: mod_base = OTHER; note = 2'-fluoroguanosine-3'-phosphate
  modified_base 9: mod_base = OTHER; note = 2'-fluorouridine-3'-phosphate
  modified_base 10: mod_base = OTHER; note = 2'-O-methylcytidine-3'-phosphate
  modified_base 11: mod_base = OTHER; note = 2'-O-methyluridine-3'-phosphate
  modified_base 12: mod_base = OTHER; note = 2'-O-methyladenosine-3'-phosphate
  modified_base 13: mod_base = OTHER; note = 2'-O-methyladenosine-3'-phosphate
  modified_base 14: mod_base = OTHER; note = 2'-fluoroadenosine-3'-phosphate
  modified_base 15: mod_base = OTHER; note = 2'-O-methylcytidine-3'-phosphate
  modified_base 16: mod_base = OTHER; note = 2'-fluoroadenosine-3'-phosphate
  modified_base 17: mod_base = OTHER; note = 2'-O-methylcytidine-3'-phosphate
  modified_base 18: mod_base = OTHER; note = 2'-O-methyladenosine-3'-phosphate
  modified_base 19: mod_base = OTHER; note = 2'-O-methyluridine-3'-phosphate
  modified_base 20: mod_base = OTHER; note = 2'-O-methyluridine-3'-phosphate
  modified_base 21: mod_base = OTHER; note = 2'-O-methyluridine-3'-phosphorothioate
  modified_base 22: mod_base = OTHER; note = 2'-O-methyluridine-3'-phosphorothioate
  modified_base 23: mod_base = OTHER; note = 2'-O-methylcytidine-3'-phosphate
tgacgttgtctaaacacattttc

SEQ ID NO: 2164 - RNA, 21 nt, synthetic construct
  source 1..21: mol_type = other RNA
  modified_base 1: mod_base = OTHER; note = 2'-O-methyladenosine-3'- phosphorothioate
  modified_base 2: mod_base = OTHER; note = 2'-O-methyladenosine-3'- phosphorothioate
  modified_base 3: mod_base = OTHER; note = 2'-O-methyluridine-3'-phosphate
  modified_base 4: mod_base = OTHER; note = 2'-O-methylguanosine-3'-phosphate
  modified_base 5: mod_base = OTHER; note = 2'-O-methyluridine-3'-phosphate
  modified_base 6: mod_base = OTHER; note = 2'-O-methylguanosine-3'-phosphate
  modified_base 7: mod_base = OTHER; note = 2'-fluorouridine-3'-phosphate
  modified_base 8: mod_base = OTHER; note = 2'-O-methyluridine-3'-phosphate
  modified_base 9: mod_base = OTHER; note = 2'-fluorouridine-3'-phosphate
  modified_base 10: mod_base = OTHER; note = 2'-fluoroadenosine-3'-phosphate
  modified_base 11: mod_base = OTHER; note = 2'-fluoroguanosine-3'-phosphate
  modified_base 12: mod_base = OTHER; note = 2'-O-methyladenosine-3'-phosphate
  modified_base 13: mod_base = OTHER; note = 2'-O-methylcytidine-3'-phosphate
  modified_base 14: mod_base = OTHER; note = 2'-O-methyladenosine-3'-phosphate
  modified_base 15: mod_base = OTHER; note = 2'-O-methyladenosine-3'-phosphate
  modified_base 16: mod_base = OTHER; note = 2'-O-methylcytidine-3'-phosphate
  modified_base 17: mod_base = OTHER; note = 2'-O-methylguanosine-3'-phosphate
  modified_base 18: mod_base = OTHER; note = 2'-O-methyluridine-3'-phosphate
  modified_base 19: mod_base = OTHER; note = 2'-O-methylcytidine-3'-phosphate
  modified_base 20: mod_base = OTHER; note = 2'-O-methyladenosine-3'-phosphate
  modified_base 21: mod_base = OTHER; note 2'-O-methyluridine-3'-phosphate-N-[tris(GalNAc-alkyl)-amido decanoyl)]-4-hydroxyprolinol (Hyp-(GalNAc-alkyl)3)
aatgtgtttagacaacgtcat

SEQ ID NO: 2165 - RNA, 23 nt, synthetic construct
  source 1..23: mol_type = other RNA
  modified_base 1: mod_base = OTHER; note = 2'-O-methyladenosine-3'- phosphorothioate
  modified_base 2: mod_base = OTHER; note = 2'-fluorouridine -3'-phosphorothioate
  modified_base 3: mod_base = OTHER; note = 2'-O-methylguanosine-3'-phosphate
  modified_base 4: mod_base = OTHER; note = 2'-O-methyladenosine-3'-phosphate
  modified_base 5: mod_base = OTHER; note = 2'-O-methylcytidine-3'-phosphate
  modified_base 6: mod_base = OTHER; note = 2'-fluoroguanosine-3'-phosphate
  modified_base 7: mod_base = OTHER; note = 2'-O-methyluridine-3'-phosphate
  modified_base 8: mod_base = OTHER; note = 2'-fluorouridine-3'-phosphate
  modified_base 9: mod_base = OTHER; note = 2'-fluoroguanosine-3'-phosphate
  modified_base 10: mod_base = OTHER; note = 2'-O-methyluridine-3'-phosphate
  modified_base 11: mod_base = OTHER; note = 2'-O-methylcytidine-3'-phosphate
  modified_base 12: mod_base = OTHER; note = 2'-O-methyluridine-3'-phosphate
  modified_base 13: mod_base = OTHER; note = 2'-O-methyladenosine-3'-phosphate
  modified_base 14: mod_base = OTHER; note = 2'-fluoroadenosine-3'-phosphate
  modified_base 15: mod_base = OTHER; note = 2'-O-methyladenosine-3'-phosphate
  modified_base 16: mod_base = OTHER; note = 2'-fluorocytidine-3'-phosphate
  modified_base 17: mod_base = OTHER; note = 2'-O-methyladenosine-3'-phosphate
  modified_base 18: mod_base = OTHER; note = 2'-O-methylcytidine-3'-phosphate
  modified_base 19: mod_base = OTHER; note = 2'-O-methyladenosine-3'-phosphate
  modified_base 20: mod_base = OTHER; note = 2'-O-methyluridine-3'-phosphate
  modified_base 21: mod_base = OTHER; note = 2'-O-methyluridine-3'-phosphorothioate
  modified_base 22: mod_base = OTHER; note = 2'-O-methyluridine-3'-phosphorothioate
  modified_base 23: mod_base = OTHER; note = 2'-O-methyluridine-3'-phosphate
atgacgttgtctaaacacatttt

SEQ ID NO: 2166 - RNA, 21 nt, synthetic construct
  source 1..21: mol_type = other RNA
  modified_base 1: mod_base = OTHER; note = 2'-O-methyluridine-3'-phosphorothioate
  modified_base 2: mod_base = OTHER; note = 2'-O-methyluridine-3'-phosphorothioate
  modified_base 3: mod_base = OTHER; note = 2'-O-methylguanosine-3'-phosphate
  modified_base 4: mod_base = OTHER; note = 2'-O-methyladenosine-3'-phosphate
  modified_base 5: mod_base = OTHER; note = 2'-O-methyladenosine-3'-phosphate
  modified_base 6: mod_base = OTHER; note = 2'-O-methyladenosine-3'-phosphate
  modified_base 7: mod_base = OTHER; note = 2'-fluoroadenosine-3'-phosphate
  modified_base 8: mod_base = OTHER; note = 2'-O-methyluridine-3'-phosphate
  modified_base 9: mod_base = OTHER; note = 2'-fluoroguanosine-3'-phosphate
  modified_base 10: mod_base = OTHER; note = 2'-fluorouridine-3'-phosphate
  modified_base 11: mod_base = OTHER; note = 2'-fluoroguanosine-3'-phosphate
  modified_base 12: mod_base = OTHER; note = 2'-O-methyluridine-3'-phosphate
  modified_base 13: mod_base = OTHER; note = 2'-O-methyluridine-3'-phosphate
  modified_base 14: mod_base = OTHER; note = 2'-O-methyluridine-3'-phosphate
  modified_base 15: mod_base = OTHER; note = 2'-O-methyladenosine-3'-phosphate
  modified_base 16: mod_base = OTHER; note = 2'-O-methylguanosine-3'-phosphate
  modified_base 17: mod_base = OTHER; note = 2'-O-methyladenosine-3'-phosphate
  modified_base 18: mod_base = OTHER; note = 2'-O-methylcytidine-3'-phosphate
  modified_base 19: mod_base = OTHER; note = 2'-O-methyladenosine-3'-phosphate
  modified_base 20: mod_base = OTHER; note = 2'-O-methyladenosine-3'-phosphate
  modified_base 21: mod_base = OTHER; note 2'-O-methylcytidine-3'-phosphate-N-[tris(GalNAc-alkyl)-amid odecanoyl)]-4-hydroxyprolinol (Hyp-(GalNAc-alkyl)3)
ttgaaaatgtgtttagacaac

SEQ ID NO: 2167 - RNA, 23 nt, synthetic construct
  source 1..23: mol_type = other RNA
  modified_base 1: mod_base = OTHER; note = 2'-O-methylguanosine-3'- phosphorothioate
  modified_base 2: mod_base = OTHER; note = 2'-fluorouridine -3'-phosphorothioate
  modified_base 3: mod_base = OTHER; note = 2'-O-methyluridine-3'-phosphate
  modified_base 4: mod_base = OTHER; note = 2'-O-methylguanosine-3'-phosphate
  modified_base 5: mod_base = OTHER; note = 2'-O-methyluridine-3'-phosphate
  modified_base 6: mod_base = OTHER; note = 2'-fluorocytidine-3'-phosphate
  modified_base 7: mod_base = OTHER; note = 2'-O-methyluridine-3'-phosphate
  modified_base 8: mod_base = OTHER; note = 2'-fluoroadenosine-3'-phosphate
  modified_base 9: mod_base = OTHER; note = 2'-fluoroadenosine-3'-phosphate
  modified_base 10: mod_base = OTHER; note = 2'-O-methyladenosine-3'-phosphate
  modified_base 11: mod_base = OTHER; note = 2'-O-methylcytidine-3'-phosphate
  modified_base 12: mod_base = OTHER; note = 2'-O-methyladenosine-3'-phosphate
  modified_base 13: mod_base = OTHER; note = 2'-O-methylcytidine-3'-phosphate
  modified_base 14: mod_base = OTHER; note = 2'-fluoroadenosine-3'-phosphate
  modified_base 15: mod_base = OTHER; note = 2'-O-methyluridine-3'-phosphate
  modified_base 16: mod_base = OTHER; note = 2'-fluorouridine-3'-phosphate
  modified_base 17: mod_base = OTHER; note = 2'-O-methyluridine-3'-phosphate
  modified_base 18: mod_base = OTHER; note = 2'-O-methyluridine-3'-phosphate
  modified_base 19: mod_base = OTHER; note = 2'-O-methylcytidine-3'-phosphate
  modified_base 20: mod_base = OTHER; note = 2'-O-methyladenosine-3'-phosphate
  modified_base 21: mod_base = OTHER; note = 2'-O-methyladenosine-3'- phosphorothioate
  modified_base 22: mod_base = OTHER; note = 2'-O-methyluridine-3'-phosphorothioate
  modified_base 23: mod_base = OTHER; note = 2'-O-methylguanosine-3'-phosphate
gttgtctaaacacattttcaatg

SEQ ID NO: 2168 - RNA, 21 nt, synthetic construct
  source 1..21: mol_type = other RNA
  modified_base 1: mod_base = OTHER; note = 2'-O-methyladenosine-3'- phosphorothioate
  modified_base 2: mod_base = OTHER; note = 2'-O-methyluridine-3'-phosphorothioate
  modified_base 3: mod_base = OTHER; note = 2'-O-methyluridine-3'-phosphate
  modified_base 4: mod_base = OTHER; note = 2'-O-methylguanosine-3'-phosphate
  modified_base 5: mod_base = OTHER; note = 2'-O-methyladenosine-3'-phosphate
  modified_base 6: mod_base = OTHER; note = 2'-O-methyladenosine-3'-phosphate
  modified_base 7: mod_base = OTHER; note = 2'-fluoroadenosine-3'-phosphate
  modified_base 8: mod_base = OTHER; note = 2'-O-methyladenosine-3'-phosphate
  modified_base 9: mod_base = OTHER; note = 2'-fluorouridine-3'-phosphate
  modified_base 10: mod_base = OTHER; note = 2'-fluoroguanosine-3'-phosphate
  modified_base 11: mod_base = OTHER; note = 2'-fluorouridine-3'-phosphate
  modified_base 12: mod_base = OTHER; note = 2'-O-methylguanosine-3'-phosphate
  modified_base 13: mod_base = OTHER; note = 2'-O-methyluridine-3'-phosphate
  modified_base 14: mod_base = OTHER; note = 2'-O-methyluridine-3'-phosphate
  modified_base 15: mod_base = OTHER; note = 2'-O-methyluridine-3'-phosphate
  modified_base 16: mod_base = OTHER; note = 2'-O-methyladenosine-3'-phosphate
  modified_base 17: mod_base = OTHER; note = 2'-O-methylguanosine-3'-phosphate
  modified_base 18: mod_base = OTHER; note = 2'-O-methyladenosine-3'-phosphate
  modified_base 19: mod_base = OTHER; note = 2'-O-methylcytidine-3'-phosphate
  modified_base 20: mod_base = OTHER; note = 2'-O-methyladenosine-3'-phosphate
  modified_base 21: mod_base = OTHER; note 2'-O-methyladenosine-3'-phosphate-N-[tris(GalNAc-alkyl)-ami dodecanoyl)]-4-hydroxyprolinol (Hyp-(GalNAc-alkyl)3)
attgaaaatgtgtttagacaa

SEQ ID NO: 2169 - RNA, 23 nt, synthetic construct
  source 1..23: mol_type = other RNA
  modified_base 1: mod_base = OTHER; note = 2'-O-methyluridine-3'-phosphorothioate
  modified_base 2: mod_base = OTHER; note = 2'-fluorouridine -3'-phosphorothioate
  modified_base 3: mod_base = OTHER; note = 2'-O-methylguanosine-3'-phosphate
  modified_base 4: mod_base = OTHER; note = 2'-O-methyluridine-3'-phosphate
  modified_base 5: mod_base = OTHER; note = 2'-O-methylcytidine-3'-phosphate
  modified_base 6: mod_base = OTHER; note = 2'-fluorouridine-3'-phosphate
  modified_base 7: mod_base = OTHER; note = 2'-O-methyladenosine-3'-phosphate
  modified_base 8: mod_base = OTHER; note = 2'-fluoroadenosine-3'-phosphate
  modified_base 9: mod_base = OTHER; note = 2'-fluoroadenosine-3'-phosphate
  modified_base 10: mod_base = OTHER; note = 2'-O-methylcytidine-3'-phosphate
  modified_base 11: mod_base = OTHER; note = 2'-O-methyladenosine-3'-phosphate
  modified_base 12: mod_base = OTHER; note = 2'-O-methylcytidine-3'-phosphate
  modified_base 13: mod_base = OTHER; note = 2'-O-methyladenosine-3'-phosphate
  modified_base 14: mod_base = OTHER; note = 2'-fluorouridine-3'-phosphate
  modified_base 15: mod_base = OTHER; note = 2'-O-methyluridine-3'-phosphate
  modified_base 16: mod_base = OTHER; note = 2'-fluorouridine-3'-phosphate
  modified_base 17: mod_base = OTHER; note = 2'-O-methyluridine-3'-phosphate
  modified_base 18: mod_base = OTHER; note = 2'-O-methylcytidine-3'-phosphate
  modified_base 19: mod_base = OTHER; note = 2'-O-methyladenosine-3'-phosphate
  modified_base 20: mod_base = OTHER; note = 2'-O-methyladenosine-3'-phosphate
  modified_base 21: mod_base = OTHER; note = 2'-O-methyluridine-3'-phosphorothioate
  modified_base 22: mod_base = OTHER; note = 2'-O-methylguanosine-3'- phosphorothioate
  modified_base 23: mod_base = OTHER; note = 2'-O-methyluridine-3'-phosphate
ttgtctaaacacattttcaatgt

SEQ ID NO: 2170 - RNA, 21 nt, synthetic construct
  source 1..21: mol_type = other RNA
  modified_base 1: mod_base = OTHER; note = 2'-O-methyluridine-3'-phosphorothioate
  modified_base 2: mod_base = OTHER; note = 2'-O-methyladenosine-3'- phosphorothioate
  modified_base 3: mod_base = OTHER; note = 2'-O-methylcytidine-3'-phosphate
  modified_base 4: mod_base = OTHER; note = 2'-O-methyluridine-3'-phosphate
  modified_base 5: mod_base = OTHER; note = 2'-O-methyladenosine-3'-phosphate
  modified_base 6: mod_base = OTHER; note = 2'-O-methyladenosine-3'-phosphate
  modified_base 7: mod_base = OTHER; note = 2'-fluoroadenosine-3'-phosphate
  modified_base 8: mod_base = OTHER; note = 2'-O-methylguanosine-3'-phosphate
  modified_base 9: mod_base = OTHER; note = 2'-fluoroguanosine-3'-phosphate
  modified_base 10: mod_base = OTHER; note = 2'-fluoroadenosine-3'-phosphate
  modified_base 11: mod_base = OTHER; note = 2'-fluoroadenosine-3'-phosphate
  modified_base 12: mod_base = OTHER; note = 2'-O-methylguanosine-3'-phosphate
  modified_base 13: mod_base = OTHER; note = 2'-O-methyladenosine-3'-phosphate
  modified_base 14: mod_base = OTHER; note = 2'-O-methyladenosine-3'-phosphate
  modified_base 15: mod_base = OTHER; note = 2'-O-methyluridine-3'-phosphate
  modified_base 16: mod_base = OTHER; note = 2'-O-methyluridine-3'-phosphate
  modified_base 17: mod_base = OTHER; note = 2'-O-methylcytidine-3'-phosphate
  modified_base 18: mod_base = OTHER; note = 2'-O-methylcytidine-3'-phosphate
  modified_base 19: mod_base = OTHER; note = 2'-O-methylguanosine-3'-phosphate
  modified_base 20: mod_base = OTHER; note = 2'-O-methylguanosine-3'-phosphate
  modified_base 21: mod_base = OTHER; note 2'-O-methyluridine-3'-phosphate-N-[tris(GalNAc-alkyl)-amido decanoyl)]-4-hydroxyprolinol (Hyp-(GalNAc-alkyl)3)
tactaaaggaagaattccggt

SEQ ID NO: 2171 - RNA, 23 nt, synthetic construct
  source 1..23: mol_type = other RNA
  modified_base 1: mod_base = OTHER; note = 2'-O-methyladenosine-3'- phosphorothioate
  modified_base 2: mod_base = OTHER; note = 2'-fluorocytidine-3'-phosphorothioate
  modified_base 3: mod_base = OTHER; note = 2'-O-methylcytidine-3'-phosphate
  modified_base 4: mod_base = OTHER; note = 2'-O-methylguanosine-3'-phosphate
  modified_base 5: mod_base = OTHER; note = 2'-O-methylguanosine-3'-phosphate
  modified_base 6: mod_base = OTHER; note = 2'-fluoroadenosine-3'-phosphate
  modified_base 7: mod_base = OTHER; note = 2'-O-methyladenosine-3'-phosphate
  modified_base 8: mod_base = OTHER; note = 2'-fluorouridine-3'-phosphate
  modified_base 9: mod_base = OTHER; note = 2'-fluorouridine-3'-phosphate
  modified_base 10: mod_base = OTHER; note = 2'-O-methylcytidine-3'-phosphate
  modified_base 11: mod_base = OTHER; note = 2'-O-methyluridine-3'-phosphate
  modified_base 12: mod_base = OTHER; note = 2'-O-methyluridine-3'-phosphate
  modified_base 13: mod_base = OTHER; note = 2'-O-methylcytidine-3'-phosphate
  modified_base 14: mod_base = OTHER; note = 2'-fluorocytidine-3'-phosphate
  modified_base 15: mod_base = OTHER; note = 2'-O-methyluridine-3'-phosphate
  modified_base 16: mod_base = OTHER; note = 2'-fluorouridine-3'-phosphate
  modified_base 17: mod_base = OTHER; note = 2'-O-methyluridine-3'-phosphate
  modified_base 18: mod_base = OTHER; note = 2'-O-methyladenosine-3'-phosphate
  modified_base 19: mod_base = OTHER; note = 2'-O-methylguanosine-3'-phosphate
  modified_base 20: mod_base = OTHER; note = 2'-O-methyluridine-3'-phosphate
  modified_base 21: mod_base = OTHER; note = 2'-O-methyladenosine-3'- phosphorothioate
  modified_base 22: mod_base = OTHER; note = 2'-O-methyluridine-3'-phosphorothioate
  modified_base 23: mod_base = OTHER; note = 2'-O-methylcytidine-3'-phosphate
accggaattcttcctttagtatc

SEQ ID NO: 2172 - RNA, 21 nt, synthetic construct
  source 1..21: mol_type = other RNA
  modified_base 1: mod_base = OTHER; note = 2'-O-methyladenosine-3'- phosphorothioate
  modified_base 2: mod_base = OTHER; note = 2'-O-methylcytidine-3'- phosphorothioate
  modified_base 3: mod_base = OTHER; note = 2'-O-methyluridine-3'-phosphate
  modified_base 4: mod_base = OTHER; note = 2'-O-methyladenosine-3'-phosphate
  modified_base 5: mod_base = OTHER; note = 2'-O-methyladenosine-3'-phosphate
  modified_base 6: mod_base = OTHER; note = 2'-O-methyladenosine-3'-phosphate
  modified_base 7: mod_base = OTHER; note = 2'-fluoroguanosine-3'-phosphate
  modified_base 8: mod_base = OTHER; note = 2'-O-methylguanosine-3'-phosphate
  modified_base 9: mod_base = OTHER; note = 2'-fluoroadenosine-3'-phosphate
  modified_base 10: mod_base = OTHER; note = 2'-fluoroadenosine-3'-phosphate
  modified_base 11: mod_base = OTHER; note = 2'-fluoroguanosine-3'-phosphate
  modified_base 12: mod_base = OTHER; note = 2'-O-methyladenosine-3'-phosphate
  modified_base 13: mod_base = OTHER; note = 2'-O-methyladenosine-3'-phosphate
  modified_base 14: mod_base = OTHER; note = 2'-O-methyluridine-3'-phosphate
  modified_base 15: mod_base = OTHER; note = 2'-O-methyluridine-3'-phosphate
  modified_base 16: mod_base = OTHER; note = 2'-O-methylcytidine-3'-phosphate
  modified_base 17: mod_base = OTHER; note = 2'-O-methylcytidine-3'-phosphate
  modified_base 18: mod_base = OTHER; note = 2'-O-methylguanosine-3'-phosphate
  modified_base 19: mod_base = OTHER; note = 2'-O-methylguanosine-3'-phosphate
  modified_base 20: mod_base = OTHER; note = 2'-O-methyluridine-3'-phosphate
  modified_base 21: mod_base = OTHER; note 2'-O-methyluridine-3'-phosphate-N-[tris(GalNAc-alkyl)-amido decanoyl)]-4-hydroxyprolinol (Hyp-(GalNAc-alkyl)3)
actaaaggaagaattccggtt

SEQ ID NO: 2173 - RNA, 23 nt, synthetic construct
  source 1..23: mol_type = other RNA
  modified_base 1: mod_base = OTHER; note = 2'-O-methyladenosine-3'- phosphorothioate
  modified_base 2: mod_base = OTHER; note = 2'-fluoroadenosine-3'-phosphorothioate
  modified_base 3: mod_base = OTHER; note = 2'-O-methylcytidine-3'-phosphate
  modified_base 4: mod_base = OTHER; note = 2'-O-methylcytidine-3'-phosphate
  modified_base 5: mod_base = OTHER; note = 2'-O-methylguanosine-3'-phosphate
  modified_base 6: mod_base = OTHER; note = 2'-fluoroguanosine-3'-phosphate
  modified_base 7: mod_base = OTHER; note = 2'-O-methyladenosine-3'-phosphate
  modified_base 8: mod_base = OTHER; note = 2'-fluoroadenosine-3'-phosphate
  modified_base 9: mod_base = OTHER; note = 2'-fluorouridine-3'-phosphate
  modified_base 10: mod_base = OTHER; note = 2'-O-methyluridine-3'-phosphate
  modified_base 11: mod_base = OTHER; note = 2'-O-methylcytidine-3'-phosphate
  modified_base 12: mod_base = OTHER; note = 2'-O-methyluridine-3'-phosphate
  modified_base 13: mod_base = OTHER; note = 2'-O-methyluridine-3'-phosphate
  modified_base 14: mod_base = OTHER; note = 2'-fluorocytidine-3'-phosphate
  modified_base 15: mod_base = OTHER; note = 2'-O-methylcytidine-3'-phosphate
  modified_base 16: mod_base = OTHER; note = 2'-fluorouridine-3'-phosphate
  modified_base 17: mod_base = OTHER; note = 2'-O-methyluridine-3'-phosphate
  modified_base 18: mod_base = OTHER; note = 2'-O-methyluridine-3'-phosphate
  modified_base 19: mod_base = OTHER; note = 2'-O-methyladenosine-3'-phosphate
  modified_base 20: mod_base = OTHER; note = 2'-O-methylguanosine-3'-phosphate
  modified_base 21: mod_base = OTHER; note = 2'-O-methyluridine-3'-phosphorothioate
  modified_base 22: mod_base = OTHER; note = 2'-O-methyladenosine-3'- phosphorothioate
  modified_base 23: mod_base = OTHER; note = 2'-O-methyluridine-3'-phosphate
aaccggaattcttcctttagtat

SEQ ID NO: 2174 - RNA, 21 nt, synthetic construct
  source 1..21: mol_type = other RNA
  modified_base 1: mod_base = OTHER; note = 2'-O-methylguanosine-3'- phosphorothioate
  modified_base 2: mod_base = OTHER; note = 2'-O-methyladenosine-3'- phosphorothioate
  modified_base 3: mod_base = OTHER; note = 2'-O-methylguanosine-3'-phosphate
  modified_base 4: mod_base = OTHER; note = 2'-O-methyladenosine-3'-phosphate
  modified_base 5: mod_base = OTHER; note = 2'-O-methyluridine-3'-phosphate
  modified_base 6: mod_base = OTHER; note = 2'-O-methyladenosine-3'-phosphate
  modified_base 7: mod_base = OTHER; note = 2'-fluorocytidine-3'-phosphate
  modified_base 8: mod_base = OTHER; note = 2'-O-methyluridine-3'-phosphate
  modified_base 9: mod_base = OTHER; note = 2'-fluoroadenosine-3'-phosphate
  modified_base 10: mod_base = OTHER; note = 2'-fluoroadenosine-3'-phosphate
  modified_base 11: mod_base = OTHER; note = 2'-fluoroadenosine-3'-phosphate
  modified_base 12: mod_base = OTHER; note = 2'-O-methylguanosine-3'-phosphate
  modified_base 13: mod_base = OTHER; note = 2'-O-methylguanosine-3'-phosphate
  modified_base 14: mod_base = OTHER; note = 2'-O-methyladenosine-3'-phosphate
  modified_base 15: mod_base = OTHER; note = 2'-O-methyladenosine-3'-phosphate
  modified_base 16: mod_base = OTHER; note = 2'-O-methylguanosine-3'-phosphate
  modified_base 17: mod_base = OTHER; note = 2'-O-methyladenosine-3'-phosphate
  modified_base 18: mod_base = OTHER; note = 2'-O-methyladenosine-3'-phosphate
  modified_base 19: mod_base = OTHER; note = 2'-O-methyluridine-3'-phosphate
  modified_base 20: mod_base = OTHER; note = 2'-O-methyluridine-3'-phosphate
  modified_base 21: mod_base = OTHER; note 2'-O-methylcytidine-3'-phosphate-N-[tris(GalNAc-alkyl)-amid odecanoyl)]-4-hydroxyprolinol (Hyp-(GalNAc-alkyl)3)
gagatactaaaggaagaattc

SEQ ID NO: 2175 - RNA, 23 nt, synthetic construct
  source 1..23: mol_type = other RNA
  modified_base 1: mod_base = OTHER; note = 2'-O-methylguanosine-3'- phosphorothioate
  modified_base 2: mod_base = OTHER; note = 2'-fluoroadenosine-3'-phosphorothioate
  modified_base 3: mod_base = OTHER; note = 2'-O-methyladenosine-3'-phosphate
  modified_base 4: mod_base = OTHER; note = 2'-O-methyluridine-3'-phosphate
  modified_base 5: mod_base = OTHER; note = 2'-O-methyluridine-3'-phosphate
  modified_base 6: mod_base = OTHER; note = 2'-fluorocytidine-3'-phosphate
  modified_base 7: mod_base = OTHER; note = 2'-O-methyluridine-3'-phosphate
  modified_base 8: mod_base = OTHER; note = 2'-fluorouridine-3'-phosphate
  modified_base 9: mod_base = OTHER; note = 2'-fluorocytidine-3'-phosphate
  modified_base 10: mod_base = OTHER; note = 2'-O-methylcytidine-3'-phosphate
  modified_base 11: mod_base = OTHER; note = 2'-O-methyluridine-3'-phosphate
  modified_base 12: mod_base = OTHER; note = 2'-O-methyluridine-3'-phosphate
  modified_base 13: mod_base = OTHER; note = 2'-O-methyluridine-3'-phosphate
  modified_base 14: mod_base = OTHER; note = 2'-fluoroadenosine-3'-phosphate
  modified_base 15: mod_base = OTHER; note = 2'-O-methylguanosine-3'-phosphate
  modified_base 16: mod_base = OTHER; note = 2'-fluorouridine-3'-phosphate
  modified_base 17: mod_base = OTHER; note = 2'-O-methyladenosine-3'-phosphate
  modified_base 18: mod_base = OTHER; note = 2'-O-methyluridine-3'-phosphate
  modified_base 19: mod_base = OTHER; note = 2'-O-methylcytidine-3'-phosphate
  modified_base 20: mod_base = OTHER; note = 2'-O-methyluridine-3'-phosphate
  modified_base 21: mod_base = OTHER; note = 2'-O-methylcytidine-3'- phosphorothioate
  modified_base 22: mod_base = OTHER; note = 2'-O-methylguanosine-3'- phosphorothioate
  modified_base 23: mod_base = OTHER; note = 2'-O-methyladenosine-3'-phosphate
gaattcttcctttagtatctcga

SEQ ID NO: 2176 - RNA, 21 nt, synthetic construct
  source 1..21: mol_type = other RNA
  modified_base 1: mod_base = OTHER; note = 2'-O-methylcytidine-3'- phosphorothioate
  modified_base 2: mod_base = OTHER; note = 2'-O-methylguanosine-3'- phosphorothioate
  modified_base 3: mod_base = OTHER; note = 2'-O-methyladenosine-3'-phosphate
  modified_base 4: mod_base = OTHER; note = 2'-O-methylguanosine-3'-phosphate
  modified_base 5: mod_base = OTHER; note = 2'-O-methyladenosine-3'-phosphate
  modified_base 6: mod_base = OTHER; note = 2'-O-methyluridine-3'-phosphate
  modified_base 7: mod_base = OTHER; note = 2'-fluoroadenosine-3'-phosphate
  modified_base 8: mod_base = OTHER; note = 2'-O-methylcytidine-3'-phosphate
  modified_base 9: mod_base = OTHER; note = 2'-fluorouridine-3'-phosphate
  modified_base 10: mod_base = OTHER; note = 2'-fluoroadenosine-3'-phosphate
  modified_base 11: mod_base = OTHER; note = 2'-fluoroadenosine-3'-phosphate
  modified_base 12: mod_base = OTHER; note = 2'-O-methyladenosine-3'-phosphate
  modified_base 13: mod_base = OTHER; note = 2'-O-methylguanosine-3'-phosphate
  modified_base 14: mod_base = OTHER; note = 2'-O-methylguanosine-3'-phosphate
  modified_base 15: mod_base = OTHER; note = 2'-O-methyladenosine-3'-phosphate
  modified_base 16: mod_base = OTHER; note = 2'-O-methyladenosine-3'-phosphate
  modified_base 17: mod_base = OTHER; note = 2'-O-methylguanosine-3'-phosphate
  modified_base 18: mod_base = OTHER; note = 2'-O-methyladenosine-3'-phosphate
  modified_base 19: mod_base = OTHER; note = 2'-O-methyladenosine-3'-phosphate
  modified_base 20: mod_base = OTHER; note = 2'-O-methyluridine-3'-phosphate
  modified_base 21: mod_base = OTHER; note 2'-O-methyluridine-3'-phosphate-N-[tris(GalNAc-alkyl)-amido decanoyl)]-4-hydroxyprolinol (Hyp-(GalNAc-alkyl)3)
cgagatactaaaggaagaatt

SEQ ID NO: 2177 - RNA, 23 nt, synthetic construct
  source 1..23: mol_type = other RNA
  modified_base 1: mod_base = OTHER; note = 2'-O-methyladenosine-3'- phosphorothioate
  modified_base 2: mod_base = OTHER; note = 2'-fluoroadenosine-3'-phosphorothioate
  modified_base 3: mod_base = OTHER; note = 2'-O-methyluridine-3'-phosphate
  modified_base 4: mod_base = OTHER; note = 2'-O-methyluridine-3'-phosphate
  modified_base 5: mod_base = OTHER; note = 2'-O-methylcytidine-3'-phosphate
  modified_base 6: mod_base = OTHER; note = 2'-fluorouridine-3'-phosphate
  modified_base 7: mod_base = OTHER; note = 2'-O-methyluridine-3'-phosphate
  modified_base 8: mod_base = OTHER; note = 2'-fluorocytidine-3'-phosphate
  modified_base 9: mod_base = OTHER; note = 2'-fluorocytidine-3'-phosphate
  modified_base 10: mod_base = OTHER; note = 2'-O-methyluridine-3'-phosphate
  modified_base 11: mod_base = OTHER; note = 2'-O-methyluridine-3'-phosphate
  modified_base 12: mod_base = OTHER; note = 2'-O-methyluridine-3'-phosphate
  modified_base 13: mod_base = OTHER; note = 2'-O-methyladenosine-3'-phosphate
  modified_base 14: mod_base = OTHER; note = 2'-fluoroguanosine-3'-phosphate
  modified_base 15: mod_base = OTHER; note = 2'-O-methyluridine-3'-phosphate
  modified_base 16: mod_base = OTHER; note = 2'-fluoroadenosine-3'-phosphate
  modified_base 17: mod_base = OTHER; note = 2'-O-methyluridine-3'-phosphate
  modified_base 18: mod_base = OTHER; note = 2'-O-methylcytidine-3'-phosphate
  modified_base 19: mod_base = OTHER; note = 2'-O-methyluridine-3'-phosphate
  modified_base 20: mod_base = OTHER; note = 2'-O-methylcytidine-3'-phosphate
  modified_base 21: mod_base = OTHER; note = 2'-O-methylguanosine-3'- phosphorothioate
  modified_base 22: mod_base = OTHER; note = 2'-O-methyladenosine-3'- phosphorothioate
  modified_base 23: mod_base = OTHER; note = 2'-O-methylguanosine-3'-phosphate
aattcttcctttagtatctcgag

SEQ ID NO: 2178 - RNA, 21 nt, synthetic construct
  source 1..21: mol_type = other RNA
  modified_base 1: mod_base = OTHER; note = 2'-O-methyladenosine-3'- phosphorothioate
  modified_base 2: mod_base = OTHER; note = 2'-O-methyladenosine-3'- phosphorothioate
  modified_base 3: mod_base = OTHER; note = 2'-O-methylcytidine-3'-phosphate
  modified_base 4: mod_base = OTHER; note = 2'-O-methyluridine-3'-phosphate
  modified_base 5: mod_base = OTHER; note = 2'-O-methyluridine-3'-phosphate
  modified_base 6: mod_base = OTHER; note = 2'-O-methyluridine-3'-phosphate
  modified_base 7: mod_base = OTHER; note = 2'-fluoroguanosine-3'-phosphate
  modified_base 8: mod_base = OTHER; note = 2'-O-methylguanosine-3'-phosphate
  modified_base 9: mod_base = OTHER; note = 2'-fluorocytidine-3'-phosphate
  modified_base 10: mod_base = OTHER; note = 2'-fluorouridine-3'-phosphate
  modified_base 11: mod_base = OTHER; note = 2'-fluoroguanosine-3'-phosphate
  modified_base 12: mod_base = OTHER; note = 2'-O-methyladenosine-3'-phosphate
  modified_base 13: mod_base = OTHER; note = 2'-O-methyluridine-3'-phosphate
  modified_base 14: mod_base = OTHER; note = 2'-O-methyladenosine-3'-phosphate
  modified_base 15: mod_base = OTHER; note = 2'-O-methyladenosine-3'-phosphate
  modified_base 16: mod_base = OTHER; note = 2'-O-methyluridine-3'-phosphate
  modified_base 17: mod_base = OTHER; note = 2'-O-methyladenosine-3'-phosphate
  modified_base 18: mod_base = OTHER; note = 2'-O-methyluridine-3'-phosphate
  modified_base 19: mod_base = OTHER; note = 2'-O-methyluridine-3'-phosphate
  modified_base 20: mod_base = OTHER; note = 2'-O-methylguanosine-3'-phosphate
  modified_base 21: mod_base = OTHER; note 2'-O-methylcytidine-3'-phosphate-N-[tris(GalNAc-alkyl)-amid odecanoyl)]-4-hydroxyprolinol (Hyp-(GalNAc-alkyl)3)
aactttggctgataatattgc

SEQ ID NO: 2179 - RNA, 23 nt, synthetic construct
  source 1..23: mol_type = other RNA
  modified_base 1: mod_base = OTHER; note = 2'-O-methylguanosine-3'- phosphorothioate
  modified_base 2: mod_base = OTHER; note = 2'-fluorocytidine-3'-phosphorothioate
  modified_base 3: mod_base = OTHER; note = 2'-O-methyladenosine-3'-phosphate
  modified_base 4: mod_base = OTHER; note = 2'-O-methyladenosine-3'-phosphate
  modified_base 5: mod_base = OTHER; note = 2'-O-methyluridine-3'-phosphate
  modified_base 6: mod_base = OTHER; note = 2'-fluoroadenosine-3'-phosphate
  modified_base 7: mod_base = OTHER; note = 2'-O-methyluridine-3'-phosphate
  modified_base 8: mod_base = OTHER; note = 2'-fluorouridine-3'-phosphate
  modified_base 9: mod_base = OTHER; note = 2'-fluoroadenosine-3'-phosphate
  modified_base 10: mod_base = OTHER; note = 2'-O-methyluridine-3'-phosphate
  modified_base 11: mod_base = OTHER; note = 2'-O-methylcytidine-3'-phosphate
  modified_base 12: mod_base = OTHER; note = 2'-O-methyladenosine-3'-phosphate
  modified_base 13: mod_base = OTHER; note = 2'-O-methylguanosine-3'-phosphate
  modified_base 14: mod_base = OTHER; note = 2'-fluorocytidine-3'-phosphate
  modified_base 15: mod_base = OTHER; note = 2'-O-methylcytidine-3'-phosphate
  modified_base 16: mod_base = OTHER; note = 2'-fluoroadenosine-3'-phosphate
  modified_base 17: mod_base = OTHER; note = 2'-O-methyladenosine-3'-phosphate
  modified_base 18: mod_base = OTHER; note = 2'-O-methyladenosine-3'-phosphate
  modified_base 19: mod_base = OTHER; note = 2'-O-methylguanosine-3'-phosphate
  modified_base 20: mod_base = OTHER; note = 2'-O-methyluridine-3'-phosphate
  modified_base 21: mod_base = OTHER; note = 2'-O-methyluridine-3'-phosphorothioate
  modified_base 22: mod_base = OTHER; note = 2'-O-methyluridine-3'-phosphorothioate
  modified_base 23: mod_base = OTHER; note = 2'-O-methylcytidine-3'-phosphate
gcaatattatcagccaaagtttc

SEQ ID NO: 2180 - RNA, 21 nt, synthetic construct
  source 1..21: mol_type = other RNA
  modified_base 1: mod_base = OTHER; note = 2'-O-methyladenosine-3'- phosphorothioate
  modified_base 2: mod_base = OTHER; note = 2'-O-methylcytidine-3'- phosphorothioate
  modified_base 3: mod_base = OTHER; note = 2'-O-methyluridine-3'-phosphate
  modified_base 4: mod_base = OTHER; note = 2'-O-methyluridine-3'-phosphate
  modified_base 5: mod_base = OTHER; note = 2'-O-methyluridine-3'-phosphate
  modified_base 6: mod_base = OTHER; note = 2'-O-methylguanosine-3'-phosphate
  modified_base 7: mod_base = OTHER; note = 2'-fluoroguanosine-3'-phosphate
  modified_base 8: mod_base = OTHER; note = 2'-O-methylcytidine-3'-phosphate
  modified_base 9: mod_base = OTHER; note = 2'-fluorouridine-3'-phosphate
  modified_base 10: mod_base = OTHER; note = 2'-fluoroguanosine-3'-phosphate
  modified_base 11: mod_base = OTHER; note = 2'-fluoroadenosine-3'-phosphate
  modified_base 12: mod_base = OTHER; note = 2'-O-methyluridine-3'-phosphate
  modified_base 13: mod_base = OTHER; note = 2'-O-methyladenosine-3'-phosphate
  modified_base 14: mod_base = OTHER; note = 2'-O-methyladenosine-3'-phosphate
  modified_base 15: mod_base = OTHER; note = 2'-O-methyluridine-3'-phosphate
  modified_base 16: mod_base = OTHER; note = 2'-O-methyladenosine-3'-phosphate
  modified_base 17: mod_base = OTHER; note = 2'-O-methyluridine-3'-phosphate
  modified_base 18: mod_base = OTHER; note = 2'-O-methyluridine-3'-phosphate
  modified_base 19: mod_base = OTHER; note = 2'-O-methylguanosine-3'-phosphate
  modified_base 20: mod_base = OTHER; note = 2'-O-methylcytidine-3'-phosphate
  modified_base 21: mod_base = OTHER; note 2'-O-methyladenosine-3'-phosphate-N-[tris(GalNAc-alkyl)-ami dodecanoyl)]-4-hydroxyprolinol (Hyp-(GalNAc-alkyl)3)
actttggctgataatattgca

SEQ ID NO: 2181 - RNA, 23 nt, synthetic construct
  source 1..23: mol_type = other RNA
  modified_base 1: mod_base = OTHER; note = 2'-O-methyluridine-3'-phosphorothioate
  modified_base 2: mod_base = OTHER; note = 2'-fluoroguanosine-3'-phosphorothioate
  modified_base 3: mod_base = OTHER; note = 2'-O-methylcytidine-3'-phosphate
  modified_base 4: mod_base = OTHER; note = 2'-O-methyladenosine-3'-phosphate
  modified_base 5: mod_base = OTHER; note = 2'-O-methyladenosine-3'-phosphate
  modified_base 6: mod_base = OTHER; note = 2'-fluorouridine-3'-phosphate
  modified_base 7: mod_base = OTHER; note = 2'-O-methyladenosine-3'-phosphate
  modified_base 8: mod_base = OTHER; note = 2'-fluorouridine-3'-phosphate
  modified_base 9: mod_base = OTHER; note = 2'-fluorouridine-3'-phosphate
  modified_base 10: mod_base = OTHER; note = 2'-O-methyladenosine-3'-phosphate
  modified_base 11: mod_base = OTHER; note = 2'-O-methyluridine-3'-phosphate
  modified_base 12: mod_base = OTHER; note = 2'-O-methylcytidine-3'-phosphate
  modified_base 13: mod_base = OTHER; note = 2'-O-methyladenosine-3'-phosphate
  modified_base 14: mod_base = OTHER; note = 2'-fluoroguanosine-3'-phosphate
  modified_base 15: mod_base = OTHER; note = 2'-O-methylcytidine-3'-phosphate
  modified_base 16: mod_base = OTHER; note = 2'-fluorocytidine-3'-phosphate
  modified_base 17: mod_base = OTHER; note = 2'-O-methyladenosine-3'-phosphate
  modified_base 18: mod_base = OTHER; note = 2'-O-methyladenosine-3'-phosphate
  modified_base 19: mod_base = OTHER; note = 2'-O-methyladenosine-3'-phosphate
  modified_base 20: mod_base = OTHER; note = 2'-O-methylguanosine-3'-phosphate
  modified_base 21: mod_base = OTHER; note = 2'-O-methyluridine-3'-phosphorothioate
  modified_base 22: mod_base = OTHER; note = 2'-O-methyluridine-3'-phosphorothioate
  modified_base 23: mod_base = OTHER; note = 2'-O-methyluridine-3'-phosphate
tgcaatattatcagccaaagttt

SEQ ID NO: 2182 - RNA, 21 nt, synthetic construct
  source 1..21: mol_type = other RNA
  modified_base 1: mod_base = OTHER; note = 2'-O-methyladenosine-3'- phosphorothioate
  modified_base 2: mod_base = OTHER; note = 2'-O-methyladenosine-3'- phosphorothioate
  modified_base 3: mod_base = OTHER; note = 2'-O-methylguanosine-3'-phosphate
  modified_base 4: mod_base = OTHER; note = 2'-O-methyladenosine-3'-phosphate
  modified_base 5: mod_base = OTHER; note = 2'-O-methyladenosine-3'-phosphate
  modified_base 6: mod_base = OTHER; note = 2'-O-methyladenosine-3'-phosphate
  modified_base 7: mod_base = OTHER; note = 2'-fluorocytidine-3'-phosphate
  modified_base 8: mod_base = OTHER; note = 2'-O-methyluridine-3'-phosphate
  modified_base 9: mod_base = OTHER; note = 2'-fluorouridine-3'-phosphate
  modified_base 10: mod_base = OTHER; note = 2'-fluorouridine-3'-phosphate
  modified_base 11: mod_base = OTHER; note = 2'-fluoroguanosine-3'-phosphate
  modified_base 12: mod_base = OTHER; note = 2'-O-methylguanosine-3'-phosphate
  modified_base 13: mod_base = OTHER; note = 2'-O-methylcytidine-3'-phosphate
  modified_base 14: mod_base = OTHER; note = 2'-O-methyluridine-3'-phosphate
  modified_base 15: mod_base = OTHER; note = 2'-O-methylguanosine-3'-phosphate
  modified_base 16: mod_base = OTHER; note = 2'-O-methyladenosine-3'-phosphate
  modified_base 17: mod_base = OTHER; note = 2'-O-methyluridine-3'-phosphate
  modified_base 18: mod_base = OTHER; note = 2'-O-methyladenosine-3'-phosphate
  modified_base 19: mod_base = OTHER; note = 2'-O-methyladenosine-3'-phosphate
  modified_base 20: mod_base = OTHER; note = 2'-O-methyluridine-3'-phosphate
  modified_base 21: mod_base = OTHER; note 2'-O-methyladenosine-3'-phosphate-N-[tris(GalNAc-alkyl)-ami dodecanoyl)]-4-hydroxyprolinol (Hyp-(GalNAc-alkyl)3)
aagaaactttggctgataata

SEQ ID NO: 2183 - RNA, 23 nt, synthetic construct
  source 1..23: mol_type = other RNA
  modified_base 1: mod_base = OTHER; note = 2'-O-methyluridine-3'-phosphorothioate
  modified_base 2: mod_base = OTHER; note = 2'-fluoroadenosine-3'-phosphorothioate
  modified_base 3: mod_base = OTHER; note = 2'-O-methyluridine-3'-phosphate
  modified_base 4: mod_base = OTHER; note = 2'-O-methyluridine-3'-phosphate
  modified_base 5: mod_base = OTHER; note = 2'-O-methyladenosine-3'-phosphate
  modified_base 6: mod_base = OTHER; note = 2'-fluorouridine-3'-phosphate
  modified_base 7: mod_base = OTHER; note = 2'-O-methylcytidine-3'-phosphate
  modified_base 8: mod_base = OTHER; note = 2'-fluoroadenosine-3'-phosphate
  modified_base 9: mod_base = OTHER; note = 2'-fluoroguanosine-3'-phosphate
  modified_base 10: mod_base = OTHER; note = 2'-O-methylcytidine-3'-phosphate
  modified_base 11: mod_base = OTHER; note = 2'-O-methylcytidine-3'-phosphate
  modified_base 12: mod_base = OTHER; note = 2'-O-methyladenosine-3'-phosphate
  modified_base 13: mod_base = OTHER; note = 2'-O-methyladenosine-3'-phosphate
  modified_base 14: mod_base = OTHER; note = 2'-fluoroadenosine-3'-phosphate
  modified_base 15: mod_base = OTHER; note = 2'-O-methylguanosine-3'-phosphate
  modified_base 16: mod_base = OTHER; note = 2'-fluorouridine-3'-phosphate
  modified_base 17: mod_base = OTHER; note = 2'-O-methyluridine-3'-phosphate
  modified_base 18: mod_base = OTHER; note = 2'-O-methyluridine-3'-phosphate
  modified_base 19: mod_base = OTHER; note = 2'-O-methylcytidine-3'-phosphate
  modified_base 20: mod_base = OTHER; note = 2'-O-methyluridine-3'-phosphate
  modified_base 21: mod_base = OTHER; note = 2'-O-methyluridine-3'-phosphorothioate
  modified_base 22: mod_base = OTHER; note = 2'-O-methylcytidine-3'- phosphorothioate
  modified_base 23: mod_base = OTHER; note = 2'-O-methyladenosine-3'-phosphate
tattatcagccaaagtttcttca

SEQ ID NO: 2184 - RNA, 21 nt, synthetic construct
  source 1..21: mol_type = other RNA
  modified_base 1: mod_base = OTHER; note = 2'-O-methylguanosine-3'- phosphorothioate
  modified_base 2: mod_base = OTHER; note = 2'-O-methyladenosine-3'- phosphorothioate
  modified_base 3: mod_base = OTHER; note = 2'-O-methyladenosine-3'-phosphate
  modified_base 4: mod_base = OTHER; note = 2'-O-methylguanosine-3'-phosphate
  modified_base 5: mod_base = OTHER; note = 2'-O-methyladenosine-3'-phosphate
  modified_base 6: mod_base = OTHER; note = 2'-O-methyladenosine-3'-phosphate
  modified_base 7: mod_base = OTHER; note = 2'-fluoroadenosine-3'-phosphate
  modified_base 8: mod_base = OTHER; note = 2'-O-methylcytidine-3'-phosphate
  modified_base 9: mod_base = OTHER; note = 2'-fluorouridine-3'-phosphate
  modified_base 10: mod_base = OTHER; note = 2'-fluorouridine-3'-phosphate
  modified_base 11: mod_base = OTHER; note = 2'-fluorouridine-3'-phosphate
  modified_base 12: mod_base = OTHER; note = 2'-O-methylguanosine-3'-phosphate
  modified_base 13: mod_base = OTHER; note = 2'-O-methylguanosine-3'-phosphate
  modified_base 14: mod_base = OTHER; note = 2'-O-methylcytidine-3'-phosphate
  modified_base 15: mod_base = OTHER; note = 2'-O-methyluridine-3'-phosphate
  modified_base 16: mod_base = OTHER; note = 2'-O-methylguanosine-3'-phosphate
  modified_base 17: mod_base = OTHER; note = 2'-O-methyladenosine-3'-phosphate
  modified_base 18: mod_base = OTHER; note = 2'-O-methyluridine-3'-phosphate
  modified_base 19: mod_base = OTHER; note = 2'-O-methyladenosine-3'-phosphate
  modified_base 20: mod_base = OTHER; note = 2'-O-methyladenosine-3'-phosphate
  modified_base 21: mod_base = OTHER; note 2'-O-methyluridine-3'-phosphate-N-[tris(GalNAc-alkyl)-amido decanoyl)]-4-hydroxyprolinol (Hyp-(GalNAc-alkyl)3)
gaagaaactttggctgataat

SEQ ID NO: 2185 - RNA, 23 nt, synthetic construct
  source 1..23: mol_type = other RNA
  modified_base 1: mod_base = OTHER; note = 2'-O-methyladenosine-3'- phosphorothioate
  modified_base 2: mod_base = OTHER; note = 2'-fluorouridine -3'-phosphorothioate
  modified_base 3: mod_base = OTHER; note = 2'-O-methyluridine-3'-phosphate
  modified_base 4: mod_base = OTHER; note = 2'-O-methyladenosine-3'-phosphate
  modified_base 5: mod_base = OTHER; note = 2'-O-methyluridine-3'-phosphate
  modified_base 6: mod_base = OTHER; note = 2'-fluorocytidine-3'-phosphate
  modified_base 7: mod_base = OTHER; note = 2'-O-methyladenosine-3'-phosphate
  modified_base 8: mod_base = OTHER; note = 2'-fluoroguanosine-3'-phosphate
  modified_base 9: mod_base = OTHER; note = 2'-fluorocytidine-3'-phosphate
  modified_base 10: mod_base = OTHER; note = 2'-O-methylcytidine-3'-phosphate
  modified_base 11: mod_base = OTHER; note = 2'-O-methyladenosine-3'-phosphate
  modified_base 12: mod_base = OTHER; note = 2'-O-methyladenosine-3'-phosphate
  modified_base 13: mod_base = OTHER; note = 2'-O-methyladenosine-3'-phosphate
  modified_base 14: mod_base = OTHER; note = 2'-fluoroguanosine-3'-phosphate
  modified_base 15: mod_base = OTHER; note = 2'-O-methyluridine-3'-phosphate
  modified_base 16: mod_base = OTHER; note = 2'-fluorouridine-3'-phosphate
  modified_base 17: mod_base = OTHER; note = 2'-O-methyluridine-3'-phosphate
  modified_base 18: mod_base = OTHER; note = 2'-O-methylcytidine-3'-phosphate
  modified_base 19: mod_base = OTHER; note = 2'-O-methyluridine-3'-phosphate
  modified_base 20: mod_base = OTHER; note = 2'-O-methyluridine-3'-phosphate
  modified_base 21: mod_base = OTHER; note = 2'-O-methylcytidine-3'- phosphorothioate
  modified_base 22: mod_base = OTHER; note = 2'-O-methyladenosine-3'- phosphorothioate
  modified_base 23: mod_base = OTHER; note = 2'-O-methyluridine-3'-phosphate
attatcagccaaagtttcttcat

SEQ ID NO: 2186 - RNA, 21 nt, synthetic construct
  source 1..21: mol_type = other RNA
  modified_base 1: mod_base = OTHER; note = 2'-O-methyladenosine-3'- phosphorothioate
  modified_base 2: mod_base = OTHER; note = 2'-O-methyladenosine-3'- phosphorothioate
  modified_base 3: mod_base = OTHER; note = 2'-O-methyladenosine-3'-phosphate
  modified_base 4: mod_base = OTHER; note = 2'-O-methyluridine-3'-phosphate
  modified_base 5: mod_base = OTHER; note = 2'-O-methylguanosine-3'-phosphate
  modified_base 6: mod_base = OTHER; note = 2'-O-methylguanosine-3'-phosphate
  modified_base 7: mod_base = OTHER; note = 2'-fluorocytidine-3'-phosphate
  modified_base 8: mod_base = OTHER; note = 2'-O-methyluridine-3'-phosphate
  modified_base 9: mod_base = OTHER; note = 2'-fluoroguanosine-3'-phosphate
  modified_base 10: mod_base = OTHER; note = 2'-fluoroadenosine-3'-phosphate
  modified_base 11: mod_base = OTHER; note = 2'-fluoroguanosine-3'-phosphate
  modified_base 12: mod_base = OTHER; note = 2'-O-methyladenosine-3'-phosphate
  modified_base 13: mod_base = OTHER; note = 2'-O-methyladenosine-3'-phosphate
  modified_base 14: mod_base = OTHER; note = 2'-O-methylguanosine-3'-phosphate
  modified_base 15: mod_base = OTHER; note = 2'-O-methyladenosine-3'-phosphate
  modified_base 16: mod_base = OTHER; note = 2'-O-methylcytidine-3'-phosphate
  modified_base 17: mod_base = OTHER; note = 2'-O-methyluridine-3'-phosphate
  modified_base 18: mod_base = OTHER; note = 2'-O-methylguanosine-3'-phosphate
  modified_base 19: mod_base = OTHER; note = 2'-O-methyladenosine-3'-phosphate
  modified_base 20: mod_base = OTHER; note = 2'-O-methylcytidine-3'-phosphate
  modified_base 21: mod_base = OTHER; note 2'-O-methyladenosine-3'-phosphate-N-[tris(GalNAc-alkyl)-ami dodecanoyl)]-4-hydroxyprolinol (Hyp-(GalNAc-alkyl)3)
aaatggctgagaagactgaca

SEQ ID NO: 2187 - RNA, 23 nt, synthetic construct
  source 1..23: mol_type = other RNA
  modified_base 1: mod_base = OTHER; note = 2'-O-methyluridine-3'-phosphorothioate
  modified_base 2: mod_base = OTHER; note = 2'-fluoroguanosine-3'-phosphorothioate
  modified_base 3: mod_base = OTHER; note = 2'-O-methyluridine-3'-phosphate
  modified_base 4: mod_base = OTHER; note = 2'-O-methylcytidine-3'-phosphate
  modified_base 5: mod_base = OTHER; note = 2'-O-methyladenosine-3'-phosphate
  modified_base 6: mod_base = OTHER; note = 2'-fluoroguanosine-3'-phosphate
  modified_base 7: mod_base = OTHER; note = 2'-O-methyluridine-3'-phosphate
  modified_base 8: mod_base = OTHER; note = 2'-fluorocytidine-3'-phosphate
  modified_base 9: mod_base = OTHER; note = 2'-fluorouridine-3'-phosphate
  modified_base 10: mod_base = OTHER; note = 2'-O-methyluridine-3'-phosphate
  modified_base 11: mod_base = OTHER; note = 2'-O-methylcytidine-3'-phosphate
  modified_base 12: mod_base = OTHER; note = 2'-O-methyluridine-3'-phosphate
  modified_base 13: mod_base = OTHER; note = 2'-O-methylcytidine-3'-phosphate
  modified_base 14: mod_base = OTHER; note = 2'-fluoroadenosine-3'-phosphate
  modified_base 15: mod_base = OTHER; note = 2'-O-methylguanosine-3'-phosphate
  modified_base 16: mod_base = OTHER; note = 2'-fluorocytidine-3'-phosphate
  modified_base 17: mod_base = OTHER; note = 2'-O-methylcytidine-3'-phosphate
  modified_base 18: mod_base = OTHER; note = 2'-O-methyladenosine-3'-phosphate
  modified_base 19: mod_base = OTHER; note = 2'-O-methyluridine-3'-phosphate
  modified_base 20: mod_base = OTHER; note = 2'-O-methyluridine-3'-phosphate
  modified_base 21: mod_base = OTHER; note = 2'-O-methyluridine-3'-phosphorothioate
  modified_base 22: mod_base = OTHER; note = 2'-O-methylguanosine-3'- phosphorothioate
  modified_base 23: mod_base = OTHER; note = 2'-O-methyladenosine-3'-phosphate
tgtcagtcttctcagccatttga

SEQ ID NO: 2188 - RNA, 21 nt, synthetic construct
  source 1..21: mol_type = other RNA
  modified_base 1: mod_base = OTHER; note = 2'-O-methyladenosine-3'- phosphorothioate
  modified_base 2: mod_base = OTHER; note = 2'-O-methyladenosine-3'- phosphorothioate
  modified_base 3: mod_base = OTHER; note = 2'-O-methyluridine-3'-phosphate
  modified_base 4: mod_base = OTHER; note = 2'-O-methylguanosine-3'-phosphate
  modified_base 5: mod_base = OTHER; note = 2'-O-methylguanosine-3'-phosphate
  modified_base 6: mod_base = OTHER; note = 2'-O-methylcytidine-3'-phosphate
  modified_base 7: mod_base = OTHER; note = 2'-fluorouridine-3'-phosphate
  modified_base 8: mod_base = OTHER; note = 2'-O-methylguanosine-3'-phosphate
  modified_base 9: mod_base = OTHER; note = 2'-fluoroadenosine-3'-phosphate
  modified_base 10: mod_base = OTHER; note = 2'-fluoroguanosine-3'-phosphate
  modified_base 11: mod_base = OTHER; note = 2'-fluoroadenosine-3'-phosphate
  modified_base 12: mod_base = OTHER; note = 2'-O-methyladenosine-3'-phosphate
  modified_base 13: mod_base = OTHER; note = 2'-O-methylguanosine-3'-phosphate
  modified_base 14: mod_base = OTHER; note = 2'-O-methyladenosine-3'-phosphate
  modified_base 15: mod_base = OTHER; note = 2'-O-methylcytidine-3'-phosphate
  modified_base 16: mod_base = OTHER; note = 2'-O-methyluridine-3'-phosphate
  modified_base 17: mod_base = OTHER; note = 2'-O-methylguanosine-3'-phosphate
  modified_base 18: mod_base = OTHER; note = 2'-O-methyladenosine-3'-phosphate
  modified_base 19: mod_base = OTHER; note = 2'-O-methylcytidine-3'-phosphate
  modified_base 20: mod_base = OTHER; note = 2'-O-methyladenosine-3'-phosphate
  modified_base 21: mod_base = OTHER; note 2'-O-methyluridine-3'-phosphate-N-[tris(GalNAc-alkyl)-amido decanoyl)]-4-hydroxyprolinol (Hyp-(GalNAc-alkyl)3)
aatggctgagaagactgacat

SEQ ID NO: 2189 - RNA, 23 nt, synthetic construct
  source 1..23: mol_type = other RNA
  modified_base 1: mod_base = OTHER; note = 2'-O-methyladenosine-3'- phosphorothioate
  modified_base 2: mod_base = OTHER; note = 2'-fluorouridine -3'-phosphorothioate
  modified_base 3: mod_base = OTHER; note = 2'-O-methylguanosine-3'-phosphate
  modified_base 4: mod_base = OTHER; note = 2'-O-methyluridine-3'-phosphate
  modified_base 5: mod_base = OTHER; note = 2'-O-methylcytidine-3'-phosphate
  modified_base 6: mod_base = OTHER; note = 2'-fluoroadenosine-3'-phosphate
  modified_base 7: mod_base = OTHER; note = 2'-O-methylguanosine-3'-phosphate
  modified_base 8: mod_base = OTHER; note = 2'-fluorouridine-3'-phosphate
  modified_base 9: mod_base = OTHER; note = 2'-fluorocytidine-3'-phosphate
  modified_base 10: mod_base = OTHER; note = 2'-O-methyluridine-3'-phosphate
  modified_base 11: mod_base = OTHER; note = 2'-O-methyluridine-3'-phosphate
  modified_base 12: mod_base = OTHER; note = 2'-O-methylcytidine-3'-phosphate
  modified_base 13: mod_base = OTHER; note = 2'-O-methyluridine-3'-phosphate
  modified_base 14: mod_base = OTHER; note = 2'-fluorocytidine-3'-phosphate
  modified_base 15: mod_base = OTHER; note = 2'-O-methyladenosine-3'-phosphate
  modified_base 16: mod_base = OTHER; note = 2'-fluoroguanosine-3'-phosphate
  modified_base 17: mod_base = OTHER; note = 2'-O-methylcytidine-3'-phosphate
  modified_base 18: mod_base = OTHER; note = 2'-O-methylcytidine-3'-phosphate
  modified_base 19: mod_base = OTHER; note = 2'-O-methyladenosine-3'-phosphate
  modified_base 20: mod_base = OTHER; note = 2'-O-methyluridine-3'-phosphate
  modified_base 21: mod_base = OTHER; note = 2'-O-methyluridine-3'-phosphorothioate
  modified_base 22: mod_base = OTHER; note = 2'-O-methyluridine-3'-phosphorothioate
  modified_base 23: mod_base = OTHER; note = 2'-O-methylguanosine-3'-phosphate
atgtcagtcttctcagccatttg

SEQ ID NO: 2190 - RNA, 21 nt, synthetic construct
  source 1..21: mol_type = other RNA
  modified_base 1: mod_base = OTHER; note = 2'-O-methyluridine-3'-phosphorothioate
  modified_base 2: mod_base = OTHER; note = 2'-O-methyladenosine-3'- phosphorothioate
  modified_base 3: mod_base = OTHER; note = 2'-O-methyluridine-3'-phosphate
  modified_base 4: mod_base = OTHER; note = 2'-O-methylcytidine-3'-phosphate
  modified_base 5: mod_base = OTHER; note = 2'-O-methyladenosine-3'-phosphate
  modified_base 6: mod_base = OTHER; note = 2'-O-methyladenosine-3'-phosphate
  modified_base 7: mod_base = OTHER; note = 2'-fluoroadenosine-3'-phosphate
  modified_base 8: mod_base = OTHER; note = 2'-O-methyluridine-3'-phosphate
  modified_base 9: mod_base = OTHER; note = 2'-fluoroguanosine-3'-phosphate
  modified_base 10: mod_base = OTHER; note = 2'-fluoroguanosine-3'-phosphate
  modified_base 11: mod_base = OTHER; note = 2'-fluorocytidine-3'-phosphate
  modified_base 12: mod_base = OTHER; note = 2'-O-methyluridine-3'-phosphate
  modified_base 13: mod_base = OTHER; note = 2'-O-methylguanosine-3'-phosphate
  modified_base 14: mod_base = OTHER; note = 2'-O-methyladenosine-3'-phosphate
  modified_base 15: mod_base = OTHER; note = 2'-O-methylguanosine-3'-phosphate
  modified_base 16: mod_base = OTHER; note = 2'-O-methyladenosine-3'-phosphate
  modified_base 17: mod_base = OTHER; note = 2'-O-methyladenosine-3'-phosphate
  modified_base 18: mod_base = OTHER; note = 2'-O-methylguanosine-3'-phosphate
  modified_base 19: mod_base = OTHER; note = 2'-O-methyladenosine-3'-phosphate
  modified_base 20: mod_base = OTHER; note = 2'-O-methylcytidine-3'-phosphate
  modified_base 21: mod_base = OTHER; note 2'-O-methyluridine-3'-phosphate-N-[tris(GalNAc-alkyl)-amido decanoyl)]-4-hydroxyprolinol (Hyp-(GalNAc-alkyl)3)
tatcaaatggctgagaagact

SEQ ID NO: 2191 - RNA, 23 nt, synthetic construct
  source 1..23: mol_type = other RNA
  modified_base 1: mod_base = OTHER; note = 2'-O-methyladenosine-3'- phosphorothioate
  modified_base 2: mod_base = OTHER; note = 2'-fluoroguanosine-3'-phosphorothioate
  modified_base 3: mod_base = OTHER; note = 2'-O-methyluridine-3'-phosphate
  modified_base 4: mod_base = OTHER; note = 2'-O-methylcytidine-3'-phosphate
  modified_base 5: mod_base = OTHER; note = 2'-O-methyluridine-3'-phosphate
  modified_base 6: mod_base = OTHER; note = 2'-fluorouridine-3'-phosphate
  modified_base 7: mod_base = OTHER; note = 2'-O-methylcytidine-3'-phosphate
  modified_base 8: mod_base = OTHER; note = 2'-fluorouridine-3'-phosphate
  modified_base 9: mod_base = OTHER; note = 2'-fluorocytidine-3'-phosphate
  modified_base 10: mod_base = OTHER; note = 2'-O-methyladenosine-3'-phosphate
  modified_base 11: mod_base = OTHER; note = 2'-O-methylguanosine-3'-phosphate
  modified_base 12: mod_base = OTHER; note = 2'-O-methylcytidine-3'-phosphate
  modified_base 13: mod_base = OTHER; note = 2'-O-methylcytidine-3'-phosphate
  modified_base 14: mod_base = OTHER; note = 2'-fluoroadenosine-3'-phosphate
  modified_base 15: mod_base = OTHER; note = 2'-O-methyluridine-3'-phosphate
  modified_base 16: mod_base = OTHER; note = 2'-fluorouridine-3'-phosphate
  modified_base 17: mod_base = OTHER; note = 2'-O-methyluridine-3'-phosphate
  modified_base 18: mod_base = OTHER; note = 2'-O-methylguanosine-3'-phosphate
  modified_base 19: mod_base = OTHER; note = 2'-O-methyladenosine-3'-phosphate
  modified_base 20: mod_base = OTHER; note = 2'-O-methyluridine-3'-phosphate
  modified_base 21: mod_base = OTHER; note = 2'-O-methyladenosine-3'- phosphorothioate
  modified_base 22: mod_base = OTHER; note = 2'-O-methyluridine-3'-phosphorothioate
  modified_base 23: mod_base = OTHER; note = 2'-O-methylcytidine-3'-phosphate
agtcttctcagccatttgatatc

SEQ ID NO: 2192 - RNA, 21 nt, synthetic construct
  source 1..21: mol_type = other RNA
  modified_base 1: mod_base = OTHER; note = 2'-O-methyladenosine-3'- phosphorothioate
  modified_base 2: mod_base = OTHER; note = 2'-O-methyluridine-3'-phosphorothioate
  modified_base 3: mod_base = OTHER; note = 2'-O-methyladenosine-3'-phosphate
  modified_base 4: mod_base = OTHER; note = 2'-O-methyluridine-3'-phosphate
  modified_base 5: mod_base = OTHER; note = 2'-O-methylcytidine-3'-phosphate
  modified_base 6: mod_base = OTHER; note = 2'-O-methyladenosine-3'-phosphate
  modified_base 7: mod_base = OTHER; note = 2'-fluoroadenosine-3'-phosphate
  modified_base 8: mod_base = OTHER; note = 2'-O-methyladenosine-3'-phosphate
  modified_base 9: mod_base = OTHER; note = 2'-fluorouridine-3'-phosphate
  modified_base 10: mod_base = OTHER; note = 2'-fluoroguanosine-3'-phosphate
  modified_base 11: mod_base = OTHER; note = 2'-fluoroguanosine-3'-phosphate
  modified_base 12: mod_base = OTHER; note = 2'-O-methylcytidine-3'-phosphate
  modified_base 13: mod_base = OTHER; note = 2'-O-methyluridine-3'-phosphate
  modified_base 14: mod_base = OTHER; note = 2'-O-methylguanosine-3'-phosphate
  modified_base 15: mod_base = OTHER; note = 2'-O-methyladenosine-3'-phosphate
  modified_base 16: mod_base = OTHER; note = 2'-O-methylguanosine-3'-phosphate
  modified_base 17: mod_base = OTHER; note = 2'-O-methyladenosine-3'-phosphate
  modified_base 18: mod_base = OTHER; note = 2'-O-methyladenosine-3'-phosphate
  modified_base 19: mod_base = OTHER; note = 2'-O-methylguanosine-3'-phosphate
  modified_base 20: mod_base = OTHER; note = 2'-O-methyladenosine-3'-phosphate
  modified_base 21: mod_base = OTHER; note 2'-O-methylcytidine-3'-phosphate-N-[tris(GalNAc-alkyl)-amid odecanoyl)]-4-hydroxyprolinol (Hyp-(GalNAc-alkyl)3)
atatcaaatggctgagaagac

SEQ ID NO: 2193 - RNA, 23 nt, synthetic construct
  source 1..23: mol_type = other RNA
  modified_base 1: mod_base = OTHER; note = 2'-O-methylguanosine-3'- phosphorothioate
  modified_base 2: mod_base = OTHER; note = 2'-fluorouridine -3'-phosphorothioate
  modified_base 3: mod_base = OTHER; note = 2'-O-methylcytidine-3'-phosphate
  modified_base 4: mod_base = OTHER; note = 2'-O-methyluridine-3'-phosphate
  modified_base 5: mod_base = OTHER; note = 2'-O-methyluridine-3'-phosphate
  modified_base 6: mod_base = OTHER; note = 2'-fluorocytidine-3'-phosphate
  modified_base 7: mod_base = OTHER; note = 2'-O-methyluridine-3'-phosphate
  modified_base 8: mod_base = OTHER; note = 2'-fluorocytidine-3'-phosphate
  modified_base 9: mod_base = OTHER; note = 2'-fluoroadenosine-3'-phosphate
  modified_base 10: mod_base = OTHER; note = 2'-O-methylguanosine-3'-phosphate
  modified_base 11: mod_base = OTHER; note = 2'-O-methylcytidine-3'-phosphate
  modified_base 12: mod_base = OTHER; note = 2'-O-methylcytidine-3'-phosphate
  modified_base 13: mod_base = OTHER; note = 2'-O-methyladenosine-3'-phosphate
  modified_base 14: mod_base = OTHER; note = 2'-fluorouridine-3'-phosphate
  modified_base 15: mod_base = OTHER; note = 2'-O-methyluridine-3'-phosphate
  modified_base 16: mod_base = OTHER; note = 2'-fluorouridine-3'-phosphate
  modified_base 17: mod_base = OTHER; note = 2'-O-methylguanosine-3'-phosphate
  modified_base 18: mod_base = OTHER; note = 2'-O-methyladenosine-3'-phosphate
  modified_base 19: mod_base = OTHER; note = 2'-O-methyluridine-3'-phosphate
  modified_base 20: mod_base = OTHER; note = 2'-O-methyladenosine-3'-phosphate
  modified_base 21: mod_base = OTHER; note = 2'-O-methyluridine-3'-phosphorothioate
  modified_base 22: mod_base = OTHER; note = 2'-O-methylcytidine-3'- phosphorothioate
  modified_base 23: mod_base = OTHER; note = 2'-O-methyluridine-3'-phosphate
gtcttctcagccatttgatatct

SEQ ID NO: 2194 - RNA, 21 nt, synthetic construct
  source 1..21: mol_type = other RNA
  modified_base 1: mod_base = OTHER; note = 2'-O-methylguanosine-3'- phosphorothioate
  modified_base 2: mod_base = OTHER; note = 2'-O-methyluridine-3'-phosphorothioate
  modified_base 3: mod_base = OTHER; note = 2'-O-methylguanosine-3'-phosphate
  modified_base 4: mod_base = OTHER; note = 2'-O-methylguanosine-3'-phosphate
  modified_base 5: mod_base = OTHER; note = 2'-O-methyluridine-3'-phosphate
  modified_base 6: mod_base = OTHER; note = 2'-O-methyluridine-3'-phosphate
  modified_base 7: mod_base = OTHER; note = 2'-fluorocytidine-3'-phosphate
  modified_base 8: mod_base = OTHER; note = 2'-O-methyluridine-3'-phosphate
  modified_base 9: mod_base = OTHER; note = 2'-fluorouridine-3'-phosphate
  modified_base 10: mod_base = OTHER; note = 2'-fluoroadenosine-3'-phosphate
  modified_base 11: mod_base = OTHER; note = 2'-fluoroadenosine-3'-phosphate
  modified_base 12: mod_base = OTHER; note = 2'-O-methyladenosine-3'-phosphate
  modified_base 13: mod_base = OTHER; note = 2'-O-methyluridine-3'-phosphate
  modified_base 14: mod_base = OTHER; note = 2'-O-methyluridine-3'-phosphate
  modified_base 15: mod_base = OTHER; note = 2'-O-methylguanosine-3'-phosphate
  modified_base 16: mod_base = OTHER; note = 2'-O-methyluridine-3'-phosphate
  modified_base 17: mod_base = OTHER; note = 2'-O-methyladenosine-3'-phosphate
  modified_base 18: mod_base = OTHER; note = 2'-O-methyladenosine-3'-phosphate
  modified_base 19: mod_base = OTHER; note = 2'-O-methylguanosine-3'-phosphate
  modified_base 20: mod_base = OTHER; note = 2'-O-methylcytidine-3'-phosphate
  modified_base 21: mod_base = OTHER; note 2'-O-methyluridine-3'-phosphate-N-[tris(GalNAc-alkyl)-amido decanoyl)]-4-hydroxyprolinol (Hyp-(GalNAc-alkyl)3)
gtggttcttaaattgtaagct

SEQ ID NO: 2195 - RNA, 23 nt, synthetic construct
  source 1..23: mol_type = other RNA
  modified_base 1: mod_base = OTHER; note = 2'-O-methyladenosine-3'- phosphorothioate
  modified_base 2: mod_base = OTHER; note = 2'-fluoroguanosine-3'-phosphorothioate
  modified_base 3: mod_base = OTHER; note = 2'-O-methylcytidine-3'-phosphate
  modified_base 4: mod_base = OTHER; note = 2'-O-methyluridine-3'-phosphate
  modified_base 5: mod_base = OTHER; note = 2'-O-methyluridine-3'-phosphate
  modified_base 6: mod_base = OTHER; note = 2'-fluoroadenosine-3'-phosphate
  modified_base 7: mod_base = OTHER; note = 2'-O-methylcytidine-3'-phosphate
  modified_base 8: mod_base = OTHER; note = 2'-fluoroadenosine-3'-phosphate
  modified_base 9: mod_base = OTHER; note = 2'-fluoroadenosine-3'-phosphate
  modified_base 10: mod_base = OTHER; note = 2'-O-methyluridine-3'-phosphate
  modified_base 11: mod_base = OTHER; note = 2'-O-methyluridine-3'-phosphate
  modified_base 12: mod_base = OTHER; note = 2'-O-methyluridine-3'-phosphate
  modified_base 13: mod_base = OTHER; note = 2'-O-methyladenosine-3'-phosphate
  modified_base 14: mod_base = OTHER; note = 2'-fluoroadenosine-3'-phosphate
  modified_base 15: mod_base = OTHER; note = 2'-O-methylguanosine-3'-phosphate
  modified_base 16: mod_base = OTHER; note = 2'-fluoroadenosine-3'-phosphate
  modified_base 17: mod_base = OTHER; note = 2'-O-methyladenosine-3'-phosphate
  modified_base 18: mod_base = OTHER; note = 2'-O-methylcytidine-3'-phosphate
  modified_base 19: mod_base = OTHER; note = 2'-O-methylcytidine-3'-phosphate
  modified_base 20: mod_base = OTHER; note = 2'-O-methyladenosine-3'-phosphate
  modified_base 21: mod_base = OTHER; note = 2'-O-methylcytidine-3'- phosphorothioate
  modified_base 22: mod_base = OTHER; note = 2'-O-methyluridine-3'-phosphorothioate
  modified_base 23: mod_base = OTHER; note = 2'-O-methylguanosine-3'-phosphate
agcttacaatttaagaaccactg

SEQ ID NO: 2196 - RNA, 21 nt, synthetic construct
  source 1..21: mol_type = other RNA
  modified_base 1: mod_base = OTHER; note = 2'-O-methyluridine-3'-phosphorothioate
  modified_base 2: mod_base = OTHER; note = 2'-O-methylguanosine-3'- phosphorothioate
  modified_base 3: mod_base = OTHER; note = 2'-O-methylguanosine-3'-phosphate
  modified_base 4: mod_base = OTHER; note = 2'-O-methyluridine-3'-phosphate
  modified_base 5: mod_base = OTHER; note = 2'-O-methyluridine-3'-phosphate
  modified_base 6: mod_base = OTHER; note = 2'-O-methylcytidine-3'-phosphate
  modified_base 7: mod_base = OTHER; note = 2'-fluorouridine-3'-phosphate
  modified_base 8: mod_base = OTHER; note = 2'-O-methyluridine-3'-phosphate
  modified_base 9: mod_base = OTHER; note = 2'-fluoroadenosine-3'-phosphate
  modified_base 10: mod_base = OTHER; note = 2'-fluoroadenosine-3'-phosphate
  modified_base 11: mod_base = OTHER; note = 2'-fluoroadenosine-3'-phosphate
  modified_base 12: mod_base = OTHER; note = 2'-O-methyluridine-3'-phosphate
  modified_base 13: mod_base = OTHER; note = 2'-O-methyluridine-3'-phosphate
  modified_base 14: mod_base = OTHER; note = 2'-O-methylguanosine-3'-phosphate
  modified_base 15: mod_base = OTHER; note = 2'-O-methyluridine-3'-phosphate
  modified_base 16: mod_base = OTHER; note = 2'-O-methyladenosine-3'-phosphate
  modified_base 17: mod_base = OTHER; note = 2'-O-methyladenosine-3'-phosphate
  modified_base 18: mod_base = OTHER; note = 2'-O-methylguanosine-3'-phosphate
  modified_base 19: mod_base = OTHER; note = 2'-O-methylcytidine-3'-phosphate
  modified_base 20: mod_base = OTHER; note = 2'-O-methyluridine-3'-phosphate
  modified_base 21: mod_base = OTHER; note 2'-O-methylcytidine-3'-phosphate-N-[tris(GalNAc-alkyl)-amid odecanoyl)]-4-hydroxyprolinol (Hyp-(GalNAc-alkyl)3)
tggttcttaaattgtaagctc

SEQ ID NO: 2197 - RNA, 23 nt, synthetic construct
  source 1..23: mol_type = other RNA
  modified_base 1: mod_base = OTHER; note = 2'-O-methylguanosine-3'- phosphorothioate
  modified_base 2: mod_base = OTHER; note = 2'-fluoroadenosine-3'-phosphorothioate
  modified_base 3: mod_base = OTHER; note = 2'-O-methylguanosine-3'-phosphate
  modified_base 4: mod_base = OTHER; note = 2'-O-methylcytidine-3'-phosphate
  modified_base 5: mod_base = OTHER; note = 2'-O-methyluridine-3'-phosphate
  modified_base 6: mod_base = OTHER; note = 2'-fluorouridine-3'-phosphate
  modified_base 7: mod_base = OTHER; note = 2'-O-methyladenosine-3'-phosphate
  modified_base 8: mod_base = OTHER; note = 2'-fluorocytidine-3'-phosphate
  modified_base 9: mod_base = OTHER; note = 2'-fluoroadenosine-3'-phosphate
  modified_base 10: mod_base = OTHER; note = 2'-O-methyladenosine-3'-phosphate
  modified_base 11: mod_base = OTHER; note = 2'-O-methyluridine-3'-phosphate
  modified_base 12: mod_base = OTHER; note = 2'-O-methyluridine-3'-phosphate
  modified_base 13: mod_base = OTHER; note = 2'-O-methyluridine-3'-phosphate
  modified_base 14: mod_base = OTHER; note = 2'-fluoroadenosine-3'-phosphate
  modified_base 15: mod_base = OTHER; note = 2'-O-methyladenosine-3'-phosphate
  modified_base 16: mod_base = OTHER; note = 2'-fluoroguanosine-3'-phosphate
  modified_base 17: mod_base = OTHER; note = 2'-O-methyladenosine-3'-phosphate
  modified_base 18: mod_base = OTHER; note = 2'-O-methyladenosine-3'-phosphate
  modified_base 19: mod_base = OTHER; note = 2'-O-methylcytidine-3'-phosphate
  modified_base 20: mod_base = OTHER; note = 2'-O-methylcytidine-3'-phosphate
  modified_base 21: mod_base = OTHER; note = 2'-O-methyladenosine-3'- phosphorothioate
  modified_base 22: mod_base = OTHER; note = 2'-O-methylcytidine-3'- phosphorothioate
  modified_base 23: mod_base = OTHER; note = 2'-O-methyluridine-3'-phosphate
gagcttacaatttaagaaccact

SEQ ID NO: 2198 - RNA, 21 nt, synthetic construct
  source 1..21: mol_type = other RNA
  modified_base 1: mod_base = OTHER; note = 2'-O-methyladenosine-3'- phosphorothioate
  modified_base 2: mod_base = OTHER; note = 2'-O-methyladenosine-3'- phosphorothioate
  modified_base 3: mod_base = OTHER; note = 2'-O-methylcytidine-3'-phosphate
  modified_base 4: mod_base = OTHER; note = 2'-O-methyladenosine-3'-phosphate
  modified_base 5: mod_base = OTHER; note = 2'-O-methylguanosine-3'-phosphate
  modified_base 6: mod_base = OTHER; note = 2'-O-methyluridine-3'-phosphate
  modified_base 7: mod_base = OTHER; note = 2'-fluoroguanosine-3'-phosphate
  modified_base 8: mod_base = OTHER; note = 2'-O-methylguanosine-3'-phosphate
  modified_base 9: mod_base = OTHER; note = 2'-fluorouridine-3'-phosphate
  modified_base 10: mod_base = OTHER; note = 2'-fluorouridine-3'-phosphate
  modified_base 11: mod_base = OTHER; note = 2'-fluorocytidine-3'-phosphate
  modified_base 12: mod_base = OTHER; note = 2'-O-methyluridine-3'-phosphate
  modified_base 13: mod_base = OTHER; note = 2'-O-methyluridine-3'-phosphate
  modified_base 14: mod_base = OTHER; note = 2'-O-methyladenosine-3'-phosphate
  modified_base 15: mod_base = OTHER; note = 2'-O-methyladenosine-3'-phosphate
  modified_base 16: mod_base = OTHER; note = 2'-O-methyladenosine-3'-phosphate
  modified_base 17: mod_base = OTHER; note = 2'-O-methyluridine-3'-phosphate
  modified_base 18: mod_base = OTHER; note = 2'-O-methyluridine-3'-phosphate
  modified_base 19: mod_base = OTHER; note = 2'-O-methylguanosine-3'-phosphate
  modified_base 20: mod_base = OTHER; note = 2'-O-methyluridine-3'-phosphate
  modified_base 21: mod_base = OTHER; note 2'-O-methyladenosine-3'-phosphate-N-[tris(GalNAc-alkyl)-ami dodecanoyl)]-4-hydroxyprolinol (Hyp-(GalNAc-alkyl)3)
aacagtggttcttaaattgta

SEQ ID NO: 2199 - RNA, 23 nt, synthetic construct
  source 1..23: mol_type = other RNA
  modified_base 1: mod_base = OTHER; note = 2'-O-methyluridine-3'-phosphorothioate
  modified_base 2: mod_base = OTHER; note = 2'-fluoroadenosine-3'-phosphorothioate
  modified_base 3: mod_base = OTHER; note = 2'-O-methylcytidine-3'-phosphate
  modified_base 4: mod_base = OTHER; note = 2'-O-methyladenosine-3'-phosphate
  modified_base 5: mod_base = OTHER; note = 2'-O-methyladenosine-3'-phosphate
  modified_base 6: mod_base = OTHER; note = 2'-fluorouridine-3'-phosphate
  modified_base 7: mod_base = OTHER; note = 2'-O-methyluridine-3'-phosphate
  modified_base 8: mod_base = OTHER; note = 2'-fluorouridine-3'-phosphate
  modified_base 9: mod_base = OTHER; note = 2'-fluoroadenosine-3'-phosphate
  modified_base 10: mod_base = OTHER; note = 2'-O-methyladenosine-3'-phosphate
  modified_base 11: mod_base = OTHER; note = 2'-O-methylguanosine-3'-phosphate
  modified_base 12: mod_base = OTHER; note = 2'-O-methyladenosine-3'-phosphate
  modified_base 13: mod_base = OTHER; note = 2'-O-methyladenosine-3'-phosphate
  modified_base 14: mod_base = OTHER; note = 2'-fluorocytidine-3'-phosphate
  modified_base 15: mod_base = OTHER; note = 2'-O-methylcytidine-3'-phosphate
  modified_base 16: mod_base = OTHER; note = 2'-fluoroadenosine-3'-phosphate
  modified_base 17: mod_base = OTHER; note = 2'-O-methylcytidine-3'-phosphate
  modified_base 18: mod_base = OTHER; note = 2'-O-methyluridine-3'-phosphate
  modified_base 19: mod_base = OTHER; note = 2'-O-methylguanosine-3'-phosphate
  modified_base 20: mod_base = OTHER; note = 2'-O-methyluridine-3'-phosphate
  modified_base 21: mod_base = OTHER; note = 2'-O-methyluridine-3'-phosphorothioate
  modified_base 22: mod_base = OTHER; note = 2'-O-methyluridine-3'-phosphorothioate
  modified_base 23: mod_base = OTHER; note = 2'-O-methyluridine-3'-phosphate
tacaatttaagaaccactgtttt

SEQ ID NO: 2200 - RNA, 21 nt, synthetic construct
  source 1..21: mol_type = other RNA
  modified_base 1: mod_base = OTHER; note = 2'-O-methyladenosine-3'- phosphorothioate
  modified_base 2: mod_base = OTHER; note = 2'-O-methyladenosine-3'- phosphorothioate
  modified_base 3: mod_base = OTHER; note = 2'-O-methyladenosine-3'-phosphate
  modified_base 4: mod_base = OTHER; note = 2'-O-methylcytidine-3'-phosphate
  modified_base 5: mod_base = OTHER; note = 2'-O-methyladenosine-3'-phosphate
  modified_base 6: mod_base = OTHER; note = 2'-O-methylguanosine-3'-phosphate
  modified_base 7: mod_base = OTHER; note = 2'-fluorouridine-3'-phosphate
  modified_base 8: mod_base = OTHER; note = 2'-O-methylguanosine-3'-phosphate
  modified_base 9: mod_base = OTHER; note = 2'-fluoroguanosine-3'-phosphate
  modified_base 10: mod_base = OTHER; note = 2'-fluorouridine-3'-phosphate
  modified_base 11: mod_base = OTHER; note = 2'-fluorouridine-3'-phosphate
  modified_base 12: mod_base = OTHER; note = 2'-O-methylcytidine-3'-phosphate
  modified_base 13: mod_base = OTHER; note = 2'-O-methyluridine-3'-phosphate
  modified_base 14: mod_base = OTHER; note = 2'-O-methyluridine-3'-phosphate
  modified_base 15: mod_base = OTHER; note = 2'-O-methyladenosine-3'-phosphate
  modified_base 16: mod_base = OTHER; note = 2'-O-methyladenosine-3'-phosphate
  modified_base 17: mod_base = OTHER; note = 2'-O-methyladenosine-3'-phosphate
  modified_base 18: mod_base = OTHER; note = 2'-O-methyluridine-3'-phosphate
  modified_base 19: mod_base = OTHER; note = 2'-O-methyluridine-3'-phosphate
  modified_base 20: mod_base = OTHER; note = 2'-O-methylguanosine-3'-phosphate
  modified_base 21: mod_base = OTHER; note 2'-O-methyluridine-3'-phosphate-N-[tris(GalNAc-alkyl)-amido decanoyl)]-4-hydroxyprolinol (Hyp-(GalNAc-alkyl)3)
aaacagtggttcttaaattgt

SEQ ID NO: 2201 - RNA, 23 nt, synthetic construct
  source 1..23: mol_type = other RNA
  modified_base 1: mod_base = OTHER; note = 2'-O-methyladenosine-3'- phosphorothioate
  modified_base 2: mod_base = OTHER; note = 2'-fluorocytidine-3'-phosphorothioate
  modified_base 3: mod_base = OTHER; note = 2'-O-methyladenosine-3'-phosphate
  modified_base 4: mod_base = OTHER; note = 2'-O-methyladenosine-3'-phosphate
  modified_base 5: mod_base = OTHER; note = 2'-O-methyluridine-3'-phosphate
  modified_base 6: mod_base = OTHER; note = 2'-fluorouridine-3'-phosphate
  modified_base 7: mod_base = OTHER; note = 2'-O-methyluridine-3'-phosphate
  modified_base 8: mod_base = OTHER; note = 2'-fluoroadenosine-3'-phosphate
  modified_base 9: mod_base = OTHER; note = 2'-fluoroadenosine-3'-phosphate
  modified_base 10: mod_base = OTHER; note = 2'-O-methylguanosine-3'-phosphate
  modified_base 11: mod_base = OTHER; note = 2'-O-methyladenosine-3'-phosphate
  modified_base 12: mod_base = OTHER; note = 2'-O-methyladenosine-3'-phosphate
  modified_base 13: mod_base = OTHER; note = 2'-O-methylcytidine-3'-phosphate
  modified_base 14: mod_base = OTHER; note = 2'-fluorocytidine-3'-phosphate
  modified_base 15: mod_base = OTHER; note = 2'-O-methyladenosine-3'-phosphate
  modified_base 16: mod_base = OTHER; note = 2'-fluorocytidine-3'-phosphate
  modified_base 17: mod_base = OTHER; note = 2'-O-methyluridine-3'-phosphate
  modified_base 18: mod_base = OTHER; note = 2'-O-methylguanosine-3'-phosphate
  modified_base 19: mod_base = OTHER; note = 2'-O-methyluridine-3'-phosphate
  modified_base 20: mod_base = OTHER; note = 2'-O-methyluridine-3'-phosphate
  modified_base 21: mod_base = OTHER; note = 2'-O-methyluridine-3'-phosphorothioate
  modified_base 22: mod_base = OTHER; note = 2'-O-methyluridine-3'-phosphorothioate
  modified_base 23: mod_base = OTHER; note = 2'-O-methyladenosine-3'-phosphate
acaatttaagaaccactgtttta

SEQ ID NO: 2202 - RNA, 21 nt, synthetic construct
  source 1..21: mol_type = other RNA
  modified_base 1: mod_base = OTHER; note = 2'-O-methyladenosine-3'- phosphorothioate
  modified_base 2: mod_base = OTHER; note = 2'-O-methyladenosine-3'- phosphorothioate
  modified_base 3: mod_base = OTHER; note = 2'-O-methylguanosine-3'-phosphate
  modified_base 4: mod_base = OTHER; note = 2'-O-methyluridine-3'-phosphate
  modified_base 5: mod_base = OTHER; note = 2'-O-methylcytidine-3'-phosphate
  modified_base 6: mod_base = OTHER; note = 2'-O-methyladenosine-3'-phosphate
  modified_base 7: mod_base = OTHER; note = 2'-fluorouridine-3'-phosphate
  modified_base 8: mod_base = OTHER; note = 2'-O-methylcytidine-3'-phosphate
  modified_base 9: mod_base = OTHER; note = 2'-fluoroguanosine-3'-phosphate
  modified_base 10: mod_base = OTHER; note = 2'-fluoroadenosine-3'-phosphate
  modified_base 11: mod_base = OTHER; note = 2'-fluorocytidine-3'-phosphate
  modified_base 12: mod_base = OTHER; note = 2'-O-methyladenosine-3'-phosphate
  modified_base 13: mod_base = OTHER; note = 2'-O-methyladenosine-3'-phosphate
  modified_base 14: mod_base = OTHER; note = 2'-O-methylguanosine-3'-phosphate
  modified_base 15: mod_base = OTHER; note = 2'-O-methyladenosine-3'-phosphate
  modified_base 16: mod_base = OTHER; note = 2'-O-methylcytidine-3'-phosphate
  modified_base 17: mod_base = OTHER; note = 2'-O-methyladenosine-3'-phosphate
  modified_base 18: mod_base = OTHER; note = 2'-O-methyluridine-3'-phosphate
  modified_base 19: mod_base = OTHER; note = 2'-O-methyluridine-3'-phosphate
  modified_base 20: mod_base = OTHER; note = 2'-O-methylguanosine-3'-phosphate
  modified_base 21: mod_base = OTHER; note 2'-O-methylguanosine-3'-phosphate-N-[tris(GalNAc-alkyl)-ami dodecanoyl)]-4-hydroxyprolinol (Hyp-(GalNAc-alkyl)3)
aagtcatcgacaagacattgg

SEQ ID NO: 2203 - RNA, 23 nt, synthetic construct
  source 1..23: mol_type = other RNA
  modified_base 1: mod_base = OTHER; note = 2'-O-methylcytidine-3'- phosphorothioate
  modified_base 2: mod_base = OTHER; note = 2'-fluorocytidine-3'-phosphorothioate
  modified_base 3: mod_base = OTHER; note = 2'-O-methyladenosine-3'-phosphate
  modified_base 4: mod_base = OTHER; note = 2'-O-methyladenosine-3'-phosphate
  modified_base 5: mod_base = OTHER; note = 2'-O-methyluridine-3'-phosphate
  modified_base 6: mod_base = OTHER; note = 2'-fluoroguanosine-3'-phosphate
  modified_base 7: mod_base = OTHER; note = 2'-O-methyluridine-3'-phosphate
  modified_base 8: mod_base = OTHER; note = 2'-fluorocytidine-3'-phosphate
  modified_base 9: mod_base = OTHER; note = 2'-fluorouridine-3'-phosphate
  modified_base 10: mod_base = OTHER; note = 2'-O-methyluridine-3'-phosphate
  modified_base 11: mod_base = OTHER; note = 2'-O-methylguanosine-3'-phosphate
  modified_base 12: mod_base = OTHER; note = 2'-O-methyluridine-3'-phosphate
  modified_base 13: mod_base = OTHER; note = 2'-O-methylcytidine-3'-phosphate
  modified_base 14: mod_base = OTHER; note = 2'-fluoroguanosine-3'-phosphate
  modified_base 15: mod_base = OTHER; note = 2'-O-methyladenosine-3'-phosphate
  modified_base 16: mod_base = OTHER; note = 2'-fluorouridine-3'-phosphate
  modified_base 17: mod_base = OTHER; note = 2'-O-methylguanosine-3'-phosphate
  modified_base 18: mod_base = OTHER; note = 2'-O-methyladenosine-3'-phosphate
  modified_base 19: mod_base = OTHER; note = 2'-O-methylcytidine-3'-phosphate
  modified_base 20: mod_base = OTHER; note = 2'-O-methyluridine-3'-phosphate
  modified_base 21: mod_base = OTHER; note = 2'-O-methyluridine-3'-phosphorothioate
  modified_base 22: mod_base = OTHER; note = 2'-O-methyluridine-3'-phosphorothioate
  modified_base 23: mod_base = OTHER; note = 2'-O-methylcytidine-3'-phosphate
ccaatgtcttgtcgatgactttc

SEQ ID NO: 2204 - RNA, 21 nt, synthetic construct
  source 1..21: mol_type = other RNA
  modified_base 1: mod_base = OTHER; note = 2'-O-methyladenosine-3'- phosphorothioate
  modified_base 2: mod_base = OTHER; note = 2'-O-methylguanosine-3'- phosphorothioate
  modified_base 3: mod_base = OTHER; note = 2'-O-methyluridine-3'-phosphate
  modified_base 4: mod_base = OTHER; note = 2'-O-methylcytidine-3'-phosphate
  modified_base 5: mod_base = OTHER; note = 2'-O-methyladenosine-3'-phosphate
  modified_base 6: mod_base = OTHER; note = 2'-O-methyluridine-3'-phosphate
  modified_base 7: mod_base = OTHER; note = 2'-fluorocytidine-3'-phosphate
  modified_base 8: mod_base = OTHER; note = 2'-O-methylguanosine-3'-phosphate
  modified_base 9: mod_base = OTHER; note = 2'-fluoroadenosine-3'-phosphate
  modified_base 10: mod_base = OTHER; note = 2'-fluorocytidine-3'-phosphate
  modified_base 11: mod_base = OTHER; note = 2'-fluoroadenosine-3'-phosphate
  modified_base 12: mod_base = OTHER; note = 2'-O-methyladenosine-3'-phosphate
  modified_base 13: mod_base = OTHER; note = 2'-O-methylguanosine-3'-phosphate
  modified_base 14: mod_base = OTHER; note = 2'-O-methyladenosine-3'-phosphate
  modified_base 15: mod_base = OTHER; note = 2'-O-methylcytidine-3'-phosphate
  modified_base 16: mod_base = OTHER; note = 2'-O-methyladenosine-3'-phosphate
  modified_base 17: mod_base = OTHER; note = 2'-O-methyluridine-3'-phosphate
  modified_base 18: mod_base = OTHER; note = 2'-O-methyluridine-3'-phosphate
  modified_base 19: mod_base = OTHER; note = 2'-O-methylguanosine-3'-phosphate
  modified_base 20: mod_base = OTHER; note = 2'-O-methylguanosine-3'-phosphate
  modified_base 21: mod_base = OTHER; note 2'-O-methyluridine-3'-phosphate-N-[tris(GalNAc-alkyl)-amido decanoyl)]-4-hydroxyprolinol (Hyp-(GalNAc-alkyl)3)
agtcatcgacaagacattggt

SEQ ID NO: 2205 - RNA, 23 nt, synthetic construct
  source 1..23: mol_type = other RNA
  modified_base 1: mod_base = OTHER; note = 2'-O-methyladenosine-3'- phosphorothioate
  modified_base 2: mod_base = OTHER; note = 2'-fluorocytidine-3'-phosphorothioate
  modified_base 3: mod_base = OTHER; note = 2'-O-methylcytidine-3'-phosphate
  modified_base 4: mod_base = OTHER; note = 2'-O-methyladenosine-3'-phosphate
  modified_base 5: mod_base = OTHER; note = 2'-O-methyladenosine-3'-phosphate
  modified_base 6: mod_base = OTHER; note = 2'-fluorouridine-3'-phosphate
  modified_base 7: mod_base = OTHER; note = 2'-O-methylguanosine-3'-phosphate
  modified_base 8: mod_base = OTHER; note = 2'-fluorouridine-3'-phosphate
  modified_base 9: mod_base = OTHER; note = 2'-fluorocytidine-3'-phosphate
  modified_base 10: mod_base = OTHER; note = 2'-O-methyluridine-3'-phosphate
  modified_base 11: mod_base = OTHER; note = 2'-O-methyluridine-3'-phosphate
  modified_base 12: mod_base = OTHER; note = 2'-O-methylguanosine-3'-phosphate
  modified_base 13: mod_base = OTHER; note = 2'-O-methyluridine-3'-phosphate
  modified_base 14: mod_base = OTHER; note = 2'-fluorocytidine-3'-phosphate
  modified_base 15: mod_base = OTHER; note = 2'-O-methylguanosine-3'-phosphate
  modified_base 16: mod_base = OTHER; note = 2'-fluoroadenosine-3'-phosphate
  modified_base 17: mod_base = OTHER; note = 2'-O-methyluridine-3'-phosphate
  modified_base 18: mod_base = OTHER; note = 2'-O-methylguanosine-3'-phosphate
  modified_base 19: mod_base = OTHER; note = 2'-O-methyladenosine-3'-phosphate
  modified_base 20: mod_base = OTHER; note = 2'-O-methylcytidine-3'-phosphate
  modified_base 21: mod_base = OTHER; note = 2'-O-methyluridine-3'-phosphorothioate
  modified_base 22: mod_base = OTHER; note = 2'-O-methyluridine-3'-phosphorothioate
  modified_base 23: mod_base = OTHER; note = 2'-O-methyluridine-3'-phosphate
accaatgtcttgtcgatgacttt

SEQ ID NO: 2206 - RNA, 21 nt, synthetic construct
  source 1..21: mol_type = other RNA
  modified_base 1: mod_base = OTHER; note = 2'-O-methylguanosine-3'- phosphorothioate
  modified_base 2: mod_base = OTHER; note = 2'-O-methyluridine-3'-phosphorothioate
  modified_base 3: mod_base = OTHER; note = 2'-O-methylguanosine-3'-phosphate
  modified_base 4: mod_base = OTHER; note = 2'-O-methyladenosine-3'-phosphate
  modified_base 5: mod_base = OTHER; note = 2'-O-methyladenosine-3'-phosphate
  modified_base 6: mod_base = OTHER; note = 2'-O-methyladenosine-3'-phosphate
  modified_base 7: mod_base = OTHER; note = 2'-fluoroguanosine-3'-phosphate
  modified_base 8: mod_base = OTHER; note = 2'-O-methyluridine-3'-phosphate
  modified_base 9: mod_base = OTHER; note = 2'-fluorocytidine-3'-phosphate
  modified_base 10: mod_base = OTHER; note = 2'-fluoroadenosine-3'-phosphate
  modified_base 11: mod_base = OTHER; note = 2'-fluorouridine-3'-phosphate
  modified_base 12: mod_base = OTHER; note = 2'-O-methylcytidine-3'-phosphate
  modified_base 13: mod_base = OTHER; note = 2'-O-methylguanosine-3'-phosphate
  modified_base 14: mod_base = OTHER; note = 2'-O-methyladenosine-3'-phosphate
  modified_base 15: mod_base = OTHER; note = 2'-O-methylcytidine-3'-phosphate
  modified_base 16: mod_base = OTHER; note = 2'-O-methyladenosine-3'-phosphate
  modified_base 17: mod_base = OTHER; note = 2'-O-methyladenosine-3'-phosphate
  modified_base 18: mod_base = OTHER; note = 2'-O-methylguanosine-3'-phosphate
  modified_base 19: mod_base = OTHER; note = 2'-O-methyladenosine-3'-phosphate
  modified_base 20: mod_base = OTHER; note = 2'-O-methylcytidine-3'-phosphate
  modified_base 21: mod_base = OTHER; note 2'-O-methyladenosine-3'-phosphate-N-[tris(GalNAc-alkyl)-ami dodecanoyl)]-4-hydroxyprolinol (Hyp-(GalNAc-alkyl)3)
gtgaaagtcatcgacaagaca

SEQ ID NO: 2207 - RNA, 23 nt, synthetic construct
  source 1..23: mol_type = other RNA
  modified_base 1: mod_base = OTHER; note = 2'-O-methyluridine-3'-phosphorothioate
  modified_base 2: mod_base = OTHER; note = 2'-fluoroguanosine-3'-phosphorothioate
  modified_base 3: mod_base = OTHER; note = 2'-O-methyluridine-3'-phosphate
  modified_base 4: mod_base = OTHER; note = 2'-O-methylcytidine-3'-phosphate
  modified_base 5: mod_base = OTHER; note = 2'-O-methyluridine-3'-phosphate
  modified_base 6: mod_base = OTHER; note = 2'-fluorouridine-3'-phosphate
  modified_base 7: mod_base = OTHER; note = 2'-O-methylguanosine-3'-phosphate
  modified_base 8: mod_base = OTHER; note = 2'-fluorouridine-3'-phosphate
  modified_base 9: mod_base = OTHER; note = 2'-fluorocytidine-3'-phosphate
  modified_base 10: mod_base = OTHER; note = 2'-O-methylguanosine-3'-phosphate
  modified_base 11: mod_base = OTHER; note = 2'-O-methyladenosine-3'-phosphate
  modified_base 12: mod_base = OTHER; note = 2'-O-methyluridine-3'-phosphate
  modified_base 13: mod_base = OTHER; note = 2'-O-methylguanosine-3'-phosphate
  modified_base 14: mod_base = OTHER; note = 2'-fluoroadenosine-3'-phosphate
  modified_base 15: mod_base = OTHER; note = 2'-O-methylcytidine-3'-phosphate
  modified_base 16: mod_base = OTHER; note = 2'-fluorouridine-3'-phosphate
  modified_base 17: mod_base = OTHER; note = 2'-O-methyluridine-3'-phosphate
  modified_base 18: mod_base = OTHER; note = 2'-O-methyluridine-3'-phosphate
  modified_base 19: mod_base = OTHER; note = 2'-O-methylcytidine-3'-phosphate
  modified_base 20: mod_base = OTHER; note = 2'-O-methyladenosine-3'-phosphate
  modified_base 21: mod_base = OTHER; note = 2'-O-methylcytidine-3'- phosphorothioate
  modified_base 22: mod_base = OTHER; note = 2'-O-methyladenosine-3'- phosphorothioate
  modified_base 23: mod_base = OTHER; note = 2'-O-methyluridine-3'-phosphate
tgtcttgtcgatgactttcacat

SEQ ID NO: 2208 - RNA, 21 nt, synthetic construct
  source 1..21: mol_type = other RNA
  modified_base 1: mod_base = OTHER; note = 2'-O-methyluridine-3'-phosphorothioate
  modified_base 2: mod_base = OTHER; note = 2'-O-methylguanosine-3'- phosphorothioate
  modified_base 3: mod_base = OTHER; note = 2'-O-methyluridine-3'-phosphate
  modified_base 4: mod_base = OTHER; note = 2'-O-methylguanosine-3'-phosphate
  modified_base 5: mod_base = OTHER; note = 2'-O-methyladenosine-3'-phosphate
  modified_base 6: mod_base = OTHER; note = 2'-O-methyladenosine-3'-phosphate
  modified_base 7: mod_base = OTHER; note = 2'-fluoroadenosine-3'-phosphate
  modified_base 8: mod_base = OTHER; note = 2'-O-methylguanosine-3'-phosphate
  modified_base 9: mod_base = OTHER; note = 2'-fluorouridine-3'-phosphate
  modified_base 10: mod_base = OTHER; note = 2'-fluorocytidine-3'-phosphate
  modified_base 11: mod_base = OTHER; note = 2'-fluoroadenosine-3'-phosphate
  modified_base 12: mod_base = OTHER; note = 2'-O-methyluridine-3'-phosphate
  modified_base 13: mod_base = OTHER; note = 2'-O-methylcytidine-3'-phosphate
  modified_base 14: mod_base = OTHER; note = 2'-O-methylguanosine-3'-phosphate
  modified_base 15: mod_base = OTHER; note = 2'-O-methyladenosine-3'-phosphate
  modified_base 16: mod_base = OTHER; note = 2'-O-methylcytidine-3'-phosphate
  modified_base 17: mod_base = OTHER; note = 2'-O-methyladenosine-3'-phosphate
  modified_base 18: mod_base = OTHER; note = 2'-O-methyladenosine-3'-phosphate
  modified_base 19: mod_base = OTHER; note = 2'-O-methylguanosine-3'-phosphate
  modified_base 20: mod_base = OTHER; note = 2'-O-methyladenosine-3'-phosphate
  modified_base 21: mod_base = OTHER; note 2'-O-methylcytidine-3'-phosphate-N-[tris(GalNAc-alkyl)-amid odecanoyl)]-4-hydroxyprolinol (Hyp-(GalNAc-alkyl)3)
tgtgaaagtcatcgacaagac

SEQ ID NO: 2209 - RNA, 23 nt, synthetic construct
  source 1..23: mol_type = other RNA
  modified_base 1: mod_base = OTHER; note = 2'-O-methylguanosine-3'- phosphorothioate
  modified_base 2: mod_base = OTHER; note = 2'-fluorouridine -3'-phosphorothioate
  modified_base 3: mod_base = OTHER; note = 2'-O-methylcytidine-3'-phosphate
  modified_base 4: mod_base = OTHER; note = 2'-O-methyluridine-3'-phosphate
  modified_base 5: mod_base = OTHER; note = 2'-O-methyluridine-3'-phosphate
  modified_base 6: mod_base = OTHER; note = 2'-fluoroguanosine-3'-phosphate
  modified_base 7: mod_base = OTHER; note = 2'-O-methyluridine-3'-phosphate
  modified_base 8: mod_base = OTHER; note = 2'-fluorocytidine-3'-phosphate
  modified_base 9: mod_base = OTHER; note = 2'-fluoroguanosine-3'-phosphate
  modified_base 10: mod_base = OTHER; note = 2'-O-methyladenosine-3'-phosphate
  modified_base 11: mod_base = OTHER; note = 2'-O-methyluridine-3'-phosphate
  modified_base 12: mod_base = OTHER; note = 2'-O-methylguanosine-3'-phosphate
  modified_base 13: mod_base = OTHER; note = 2'-O-methyladenosine-3'-phosphate
  modified_base 14: mod_base = OTHER; note = 2'-fluorocytidine-3'-phosphate
  modified_base 15: mod_base = OTHER; note = 2'-O-methyluridine-3'-phosphate
  modified_base 16: mod_base = OTHER; note = 2'-fluorouridine-3'-phosphate
  modified_base 17: mod_base = OTHER; note = 2'-O-methyluridine-3'-phosphate
  modified_base 18: mod_base = OTHER; note = 2'-O-methylcytidine-3'-phosphate
  modified_base 19: mod_base = OTHER; note = 2'-O-methyladenosine-3'-phosphate
  modified_base 20: mod_base = OTHER; note = 2'-O-methylcytidine-3'-phosphate
  modified_base 21: mod_base = OTHER; note = 2'-O-methyladenosine-3'- phosphorothioate
  modified_base 22: mod_base = OTHER; note = 2'-O-methyluridine-3'-phosphorothioate
  modified_base 23: mod_base = OTHER; note = 2'-O-methyluridine-3'-phosphate
gtcttgtcgatgactttcacatt

SEQ ID NO: 2210 - RNA, 21 nt, synthetic construct
  source 1..21: mol_type = other RNA
  modified_base 1: mod_base = OTHER; note = 2'-O-methylguanosine-3'- phosphorothioate
  modified_base 2: mod_base = OTHER; note = 2'-O-methyladenosine-3'- phosphorothioate
  modified_base 3: mod_base = OTHER; note = 2'-O-methyluridine-3'-phosphate
  modified_base 4: mod_base = OTHER; note = 2'-O-methyladenosine-3'-phosphate
  modified_base 5: mod_base = OTHER; note = 2'-O-methyladenosine-3'-phosphate
  modified_base 6: mod_base = OTHER; note = 2'-O-methyluridine-3'-phosphate
  modified_base 7: mod_base = OTHER; note = 2'-fluoroadenosine-3'-phosphate
  modified_base 8: mod_base = OTHER; note = 2'-O-methyluridine-3'-phosphate
  modified_base 9: mod_base = OTHER; note = 2'-fluorouridine-3'-phosphate
  modified_base 10: mod_base = OTHER; note = 2'-fluoroguanosine-3'-phosphate
  modified_base 11: mod_base = OTHER; note = 2'-fluorocytidine-3'-phosphate
  modified_base 12: mod_base = OTHER; note = 2'-O-methyladenosine-3'-phosphate
  modified_base 13: mod_base = OTHER; note = 2'-O-methylguanosine-3'-phosphate
  modified_base 14: mod_base = OTHER; note = 2'-O-methylcytidine-3'-phosphate
  modified_base 15: mod_base = OTHER; note = 2'-O-methyladenosine-3'-phosphate
  modified_base 16: mod_base = OTHER; note = 2'-O-methyluridine-3'-phosphate
  modified_base 17: mod_base = OTHER; note = 2'-O-methyluridine-3'-phosphate
  modified_base 18: mod_base = OTHER; note = 2'-O-methyluridine-3'-phosphate
  modified_base 19: mod_base = OTHER; note = 2'-O-methyluridine-3'-phosphate
  modified_base 20: mod_base = OTHER; note = 2'-O-methylcytidine-3'-phosphate
  modified_base 21: mod_base = OTHER; note 2'-O-methylcytidine-3'-phosphate-N-[tris(GalNAc-alkyl)-amid odecanoyl)]-4-hydroxyprolinol (Hyp-(GalNAc-alkyl)3)
gataatattgcagcattttcc

SEQ ID NO: 2211 - RNA, 23 nt, synthetic construct
  source 1..23: mol_type = other RNA
  modified_base 1: mod_base = OTHER; note = 2'-O-methylguanosine-3'- phosphorothioate
  modified_base 2: mod_base = OTHER; note = 2'-fluoroguanosine-3'-phosphorothioate
  modified_base 3: mod_base = OTHER; note = 2'-O-methyladenosine-3'-phosphate
  modified_base 4: mod_base = OTHER; note = 2'-O-methyladenosine-3'-phosphate
  modified_base 5: mod_base = OTHER; note = 2'-O-methyladenosine-3'-phosphate
  modified_base 6: mod_base = OTHER; note = 2'-fluoroadenosine-3'-phosphate
  modified_base 7: mod_base = OTHER; note = 2'-O-methyluridine-3'-phosphate
  modified_base 8: mod_base = OTHER; note = 2'-fluoroguanosine-3'-phosphate
  modified_base 9: mod_base = OTHER; note = 2'-fluorocytidine-3'-phosphate
  modified_base 10: mod_base = OTHER; note = 2'-O-methyluridine-3'-phosphate
  modified_base 11: mod_base = OTHER; note = 2'-O-methylguanosine-3'-phosphate
  modified_base 12: mod_base = OTHER; note = 2'-O-methylcytidine-3'-phosphate
  modified_base 13: mod_base = OTHER; note = 2'-O-methyladenosine-3'-phosphate
  modified_base 14: mod_base = OTHER; note = 2'-fluoroadenosine-3'-phosphate
  modified_base 15: mod_base = OTHER; note = 2'-O-methyluridine-3'-phosphate
  modified_base 16: mod_base = OTHER; note = 2'-fluoroadenosine-3'-phosphate
  modified_base 17: mod_base = OTHER; note = 2'-O-methyluridine-3'-phosphate
  modified_base 18: mod_base = OTHER; note = 2'-O-methyluridine-3'-phosphate
  modified_base 19: mod_base = OTHER; note = 2'-O-methyladenosine-3'-phosphate
  modified_base 20: mod_base = OTHER; note = 2'-O-methyluridine-3'-phosphate
  modified_base 21: mod_base = OTHER; note = 2'-O-methylcytidine-3'- phosphorothioate
  modified_base 22: mod_base = OTHER; note = 2'-O-methyladenosine-3'- phosphorothioate
  modified_base 23: mod_base = OTHER; note = 2'-O-methylguanosine-3'-phosphate
ggaaaatgctgcaatattatcag

SEQ ID NO: 2212 - RNA, 21 nt, synthetic construct
  source 1..21: mol_type = other RNA
  modified_base 1: mod_base = OTHER; note = 2'-O-methyladenosine-3'- phosphorothioate
  modified_base 2: mod_base = OTHER; note = 2'-O-methyluridine-3'-phosphorothioate
  modified_base 3: mod_base = OTHER; note = 2'-O-methyladenosine-3'-phosphate
  modified_base 4: mod_base = OTHER; note = 2'-O-methyladenosine-3'-phosphate
  modified_base 5: mod_base = OTHER; note = 2'-O-methyluridine-3'-phosphate
  modified_base 6: mod_base = OTHER; note = 2'-O-methyladenosine-3'-phosphate
  modified_base 7: mod_base = OTHER; note = 2'-fluorouridine-3'-phosphate
  modified_base 8: mod_base = OTHER; note = 2'-O-methyluridine-3'-phosphate
  modified_base 9: mod_base = OTHER; note = 2'-fluoroguanosine-3'-phosphate
  modified_base 10: mod_base = OTHER; note = 2'-fluorocytidine-3'-phosphate
  modified_base 11: mod_base = OTHER; note = 2'-fluoroadenosine-3'-phosphate
  modified_base 12: mod_base = OTHER; note = 2'-O-methylguanosine-3'-phosphate
  modified_base 13: mod_base = OTHER; note = 2'-O-methylcytidine-3'-phosphate
  modified_base 14: mod_base = OTHER; note = 2'-O-methyladenosine-3'-phosphate
  modified_base 15: mod_base = OTHER; note = 2'-O-methyluridine-3'-phosphate
  modified_base 16: mod_base = OTHER; note = 2'-O-methyluridine-3'-phosphate
  modified_base 17: mod_base = OTHER; note = 2'-O-methyluridine-3'-phosphate
  modified_base 18: mod_base = OTHER; note = 2'-O-methyluridine-3'-phosphate
  modified_base 19: mod_base = OTHER; note = 2'-O-methylcytidine-3'-phosphate
  modified_base 20: mod_base = OTHER; note = 2'-O-methylcytidine-3'-phosphate
  modified_base 21: mod_base = OTHER; note 2'-O-methyladenosine-3'-phosphate-N-[tris(GalNAc-alkyl)-ami dodecanoyl)]-4-hydroxyprolinol (Hyp-(GalNAc-alkyl)3)
ataatattgcagcattttcca

SEQ ID NO: 2213 - RNA, 23 nt, synthetic construct
  source 1..23: mol_type = other RNA
  modified_base 1: mod_base = OTHER; note = 2'-O-methyluridine-3'-phosphorothioate
  modified_base 2: mod_base = OTHER; note = 2'-fluoroguanosine-3'-phosphorothioate
  modified_base 3: mod_base = OTHER; note = 2'-O-methylguanosine-3'-phosphate
  modified_base 4: mod_base = OTHER; note = 2'-O-methyladenosine-3'-phosphate
  modified_base 5: mod_base = OTHER; note = 2'-O-methyladenosine-3'-phosphate
  modified_base 6: mod_base = OTHER; note = 2'-fluoroadenosine-3'-phosphate
  modified_base 7: mod_base = OTHER; note = 2'-O-methyladenosine-3'-phosphate
  modified_base 8: mod_base = OTHER; note = 2'-fluorouridine-3'-phosphate
  modified_base 9: mod_base = OTHER; note = 2'-fluoroguanosine-3'-phosphate
  modified_base 10: mod_base = OTHER; note = 2'-O-methylcytidine-3'-phosphate
  modified_base 11: mod_base = OTHER; note = 2'-O-methyluridine-3'-phosphate
  modified_base 12: mod_base = OTHER; note = 2'-O-methylguanosine-3'-phosphate
  modified_base 13: mod_base = OTHER; note = 2'-O-methylcytidine-3'-phosphate
  modified_base 14: mod_base = OTHER; note = 2'-fluoroadenosine-3'-phosphate
  modified_base 15: mod_base = OTHER; note = 2'-O-methyladenosine-3'-phosphate
  modified_base 16: mod_base = OTHER; note = 2'-fluorouridine-3'-phosphate
  modified_base 17: mod_base = OTHER; note = 2'-O-methyladenosine-3'-phosphate
  modified_base 18: mod_base = OTHER; note = 2'-O-methyluridine-3'-phosphate
  modified_base 19: mod_base = OTHER; note = 2'-O-methyluridine-3'-phosphate
  modified_base 20: mod_base = OTHER; note = 2'-O-methyladenosine-3'-phosphate
  modified_base 21: mod_base = OTHER; note = 2'-O-methyluridine-3'-phosphorothioate
  modified_base 22: mod_base = OTHER; note = 2'-O-methylcytidine-3'- phosphorothioate
  modified_base 23: mod_base = OTHER; note = 2'-O-methyladenosine-3'-phosphate
tggaaaatgctgcaatattatca

SEQ ID NO: 2214 - RNA, 21 nt, synthetic construct
  source 1..21: mol_type = other RNA
  modified_base 1: mod_base = OTHER; note = 2'-O-methylguanosine-3'- phosphorothioate
  modified_base 2: mod_base = OTHER; note = 2'-O-methylguanosine-3'- phosphorothioate
  modified_base 3: mod_base = OTHER; note = 2'-O-methylcytidine-3'-phosphate
  modified_base 4: mod_base = OTHER; note = 2'-O-methyluridine-3'-phosphate
  modified_base 5: mod_base = OTHER; note = 2'-O-methylguanosine-3'-phosphate
  modified_base 6: mod_base = OTHER; note = 2'-O-methyladenosine-3'-phosphate
  modified_base 7: mod_base = OTHER; note = 2'-fluorouridine-3'-phosphate
  modified_base 8: mod_base = OTHER; note = 2'-O-methyladenosine-3'-phosphate
  modified_base 9: mod_base = OTHER; note = 2'-fluoroadenosine-3'-phosphate
  modified_base 10: mod_base = OTHER; note = 2'-fluorouridine-3'-phosphate
  modified_base 11: mod_base = OTHER; note = 2'-fluoroadenosine-3'-phosphate
  modified_base 12: mod_base = OTHER; note = 2'-O-methyluridine-3'-phosphate
  modified_base 13: mod_base = OTHER; note = 2'-O-methyluridine-3'-phosphate
  modified_base 14: mod_base = OTHER; note = 2'-O-methylguanosine-3'-phosphate
  modified_base 15: mod_base = OTHER; note = 2'-O-methylcytidine-3'-phosphate
  modified_base 16: mod_base = OTHER; note = 2'-O-methyladenosine-3'-phosphate
  modified_base 17: mod_base = OTHER; note = 2'-O-methylguanosine-3'-phosphate
  modified_base 18: mod_base = OTHER; note = 2'-O-methylcytidine-3'-phosphate
  modified_base 19: mod_base = OTHER; note = 2'-O-methyladenosine-3'-phosphate
  modified_base 20: mod_base = OTHER; note = 2'-O-methyluridine-3'-phosphate
  modified_base 21: mod_base = OTHER; note 2'-O-methyluridine-3'-phosphate-N-[tris(GalNAc-alkyl)-amido decanoyl)]-4-hydroxyprolinol (Hyp-(GalNAc-alkyl)3)
ggctgataatattgcagcatt

SEQ ID NO: 2215 - RNA, 23 nt, synthetic construct
  source 1..23: mol_type = other RNA
  modified_base 1: mod_base = OTHER; note = 2'-O-methyladenosine-3'- phosphorothioate
  modified_base 2: mod_base = OTHER; note = 2'-fluoroadenosine-3'-phosphorothioate
  modified_base 3: mod_base = OTHER; note = 2'-O-methyluridine-3'-phosphate
  modified_base 4: mod_base = OTHER; note = 2'-O-methylguanosine-3'-phosphate
  modified_base 5: mod_base = OTHER; note = 2'-O-methylcytidine-3'-phosphate
  modified_base 6: mod_base = OTHER; note = 2'-fluorouridine-3'-phosphate
  modified_base 7: mod_base = OTHER; note = 2'-O-methylguanosine-3'-phosphate
  modified_base 8: mod_base = OTHER; note = 2'-fluorocytidine-3'-phosphate
  modified_base 9: mod_base = OTHER; note = 2'-fluoroadenosine-3'-phosphate
  modified_base 10: mod_base = OTHER; note = 2'-O-methyladenosine-3'-phosphate
  modified_base 11: mod_base = OTHER; note = 2'-O-methyluridine-3'-phosphate
  modified_base 12: mod_base = OTHER; note = 2'-O-methyladenosine-3'-phosphate
  modified_base 13: mod_base = OTHER; note = 2'-O-methyluridine-3'-phosphate
  modified_base 14: mod_base = OTHER; note = 2'-fluorouridine-3'-phosphate
  modified_base 15: mod_base = OTHER; note = 2'-O-methyladenosine-3'-phosphate
  modified_base 16: mod_base = OTHER; note = 2'-fluorouridine-3'-phosphate
  modified_base 17: mod_base = OTHER; note = 2'-O-methylcytidine-3'-phosphate
  modified_base 18: mod_base = OTHER; note = 2'-O-methyladenosine-3'-phosphate
  modified_base 19: mod_base = OTHER; note = 2'-O-methylguanosine-3'-phosphate
  modified_base 20: mod_base = OTHER; note = 2'-O-methylcytidine-3'-phosphate
  modified_base 21: mod_base = OTHER; note = 2'-O-methylcytidine-3'- phosphorothioate
  modified_base 22: mod_base = OTHER; note = 2'-O-methyladenosine-3'- phosphorothioate
  modified_base 23: mod_base = OTHER; note = 2'-O-methyladenosine-3'-phosphate
aatgctgcaatattatcagccaa

SEQ ID NO: 2216 - RNA, 21 nt, synthetic construct
  source 1..21: mol_type = other RNA
  modified_base 1: mod_base = OTHER; note = 2'-O-methyluridine-3'-phosphorothioate
  modified_base 2: mod_base = OTHER; note = 2'-O-methylguanosine-3'- phosphorothioate
  modified_base 3: mod_base = OTHER; note = 2'-O-methylguanosine-3'-phosphate
  modified_base 4: mod_base = OTHER; note = 2'-O-methylcytidine-3'-phosphate
  modified_base 5: mod_base = OTHER; note = 2'-O-methyluridine-3'-phosphate
  modified_base 6: mod_base = OTHER; note = 2'-O-methylguanosine-3'-phosphate
  modified_base 7: mod_base = OTHER; note = 2'-fluoroadenosine-3'-phosphate
  modified_base 8: mod_base = OTHER; note = 2'-O-methyluridine-3'-phosphate
  modified_base 9: mod_base = OTHER; note = 2'-fluoroadenosine-3'-phosphate
  modified_base 10: mod_base = OTHER; note = 2'-fluoroadenosine-3'-phosphate
  modified_base 11: mod_base = OTHER; note = 2'-fluorouridine-3'-phosphate
  modified_base 12: mod_base = OTHER; note = 2'-O-methyladenosine-3'-phosphate
  modified_base 13: mod_base = OTHER; note = 2'-O-methyluridine-3'-phosphate
  modified_base 14: mod_base = OTHER; note = 2'-O-methyluridine-3'-phosphate
  modified_base 15: mod_base = OTHER; note = 2'-O-methylguanosine-3'-phosphate
  modified_base 16: mod_base = OTHER; note = 2'-O-methylcytidine-3'-phosphate
  modified_base 17: mod_base = OTHER; note = 2'-O-methyladenosine-3'-phosphate
  modified_base 18: mod_base = OTHER; note = 2'-O-methylguanosine-3'-phosphate
  modified_base 19: mod_base = OTHER; note = 2'-O-methylcytidine-3'-phosphate
  modified_base 20: mod_base = OTHER; note = 2'-O-methyladenosine-3'-phosphate
  modified_base 21: mod_base = OTHER; note 2'-O-methyluridine-3'-phosphate-N-[tris(GalNAc-alkyl)-amido decanoyl)]-4-hydroxyprolinol (Hyp-(GalNAc-alkyl)3)
tggctgataatattgcagcat

SEQ ID NO: 2217 - RNA, 23 nt, synthetic construct
  source 1..23: mol_type = other RNA
  modified_base 1: mod_base = OTHER; note = 2'-O-methyladenosine-3'- phosphorothioate
  modified_base 2: mod_base = OTHER; note = 2'-fluorouridine -3'-phosphorothioate
  modified_base 3: mod_base = OTHER; note = 2'-O-methylguanosine-3'-phosphate
  modified_base 4: mod_base = OTHER; note = 2'-O-methylcytidine-3'-phosphate
  modified_base 5: mod_base = OTHER; note = 2'-O-methyluridine-3'-phosphate
  modified_base 6: mod_base = OTHER; note = 2'-fluoroguanosine-3'-phosphate
  modified_base 7: mod_base = OTHER; note = 2'-O-methylcytidine-3'-phosphate
  modified_base 8: mod_base = OTHER; note = 2'-fluoroadenosine-3'-phosphate
  modified_base 9: mod_base = OTHER; note = 2'-fluoroadenosine-3'-phosphate
  modified_base 10: mod_base = OTHER; note = 2'-O-methyluridine-3'-phosphate
  modified_base 11: mod_base = OTHER; note = 2'-O-methyladenosine-3'-phosphate
  modified_base 12: mod_base = OTHER; note = 2'-O-methyluridine-3'-phosphate
  modified_base 13: mod_base = OTHER; note = 2'-O-methyluridine-3'-phosphate
  modified_base 14: mod_base = OTHER; note = 2'-fluoroadenosine-3'-phosphate
  modified_base 15: mod_base = OTHER; note = 2'-O-methyluridine-3'-phosphate
  modified_base 16: mod_base = OTHER; note = 2'-fluorocytidine-3'-phosphate
  modified_base 17: mod_base = OTHER; note = 2'-O-methyladenosine-3'-phosphate
  modified_base 18: mod_base = OTHER; note = 2'-O-methylguanosine-3'-phosphate
  modified_base 19: mod_base = OTHER; note = 2'-O-methylcytidine-3'-phosphate
  modified_base 20: mod_base = OTHER; note = 2'-O-methylcytidine-3'-phosphate
  modified_base 21: mod_base = OTHER; note = 2'-O-methyladenosine-3'- phosphorothioate
  modified_base 22: mod_base = OTHER; note = 2'-O-methyladenosine-3'- phosphorothioate
  modified_base 23: mod_base = OTHER; note = 2'-O-methyladenosine-3'-phosphate
atgctgcaatattatcagccaaa

SEQ ID NO: 2218 - RNA, 21 nt, synthetic construct
  source 1..21: mol_type = other RNA
  modified_base 1: mod_base = OTHER; note = 2'-O-methylguanosine-3'- phosphorothioate
  modified_base 2: mod_base = OTHER; note = 2'-O-methylcytidine-3'- phosphorothioate
  modified_base 3: mod_base = OTHER; note = 2'-O-methyluridine-3'-phosphate
  modified_base 4: mod_base = OTHER; note = 2'-O-methyladenosine-3'-phosphate
  modified_base 5: mod_base = OTHER; note = 2'-O-methyladenosine-3'-phosphate
  modified_base 6: mod_base = OTHER; note = 2'-O-methyluridine-3'-phosphate
  modified_base 7: mod_base = OTHER; note = 2'-fluorouridine-3'-phosphate
  modified_base 8: mod_base = OTHER; note = 2'-O-methyluridine-3'-phosphate
  modified_base 9: mod_base = OTHER; note = 2'-fluoroguanosine-3'-phosphate
  modified_base 10: mod_base = OTHER; note = 2'-fluorouridine-3'-phosphate
  modified_base 11: mod_base = OTHER; note = 2'-fluoroadenosine-3'-phosphate
  modified_base 12: mod_base = OTHER; note = 2'-O-methyluridine-3'-phosphate
  modified_base 13: mod_base = OTHER; note = 2'-O-methylcytidine-3'-phosphate
  modified_base 14: mod_base = OTHER; note = 2'-O-methyladenosine-3'-phosphate
  modified_base 15: mod_base = OTHER; note = 2'-O-methyladenosine-3'-phosphate
  modified_base 16: mod_base = OTHER; note = 2'-O-methyluridine-3'-phosphate
  modified_base 17: mod_base = OTHER; note = 2'-O-methylguanosine-3'-phosphate
  modified_base 18: mod_base = OTHER; note = 2'-O-methyladenosine-3'-phosphate
  modified_base 19: mod_base = OTHER; note = 2'-O-methyluridine-3'-phosphate
  modified_base 20: mod_base = OTHER; note = 2'-O-methyluridine-3'-phosphate
  modified_base 21: mod_base = OTHER; note 2'-O-methyladenosine-3'-phosphate-N-[tris(GalNAc-alkyl)-ami dodecanoyl)]-4-hydroxyprolinol (Hyp-(GalNAc-alkyl)3)
gctaatttgtatcaatgatta

SEQ ID NO: 2219 - RNA, 23 nt, synthetic construct
  source 1..23: mol_type = other RNA
  modified_base 1: mod_base = OTHER; note = 2'-O-methyluridine-3'-phosphorothioate
  modified_base 2: mod_base = OTHER; note = 2'-fluoroadenosine-3'-phosphorothioate
  modified_base 3: mod_base = OTHER; note = 2'-O-methyladenosine-3'-phosphate
  modified_base 4: mod_base = OTHER; note = 2'-O-methyluridine-3'-phosphate
  modified_base 5: mod_base = OTHER; note = 2'-O-methylcytidine-3'-phosphate
  modified_base 6: mod_base = OTHER; note = 2'-fluoroadenosine-3'-phosphate
  modified_base 7: mod_base = OTHER; note = 2'-O-methyluridine-3'-phosphate
  modified_base 8: mod_base = OTHER; note = 2'-fluorouridine-3'-phosphate
  modified_base 9: mod_base = OTHER; note = 2'-fluoroguanosine-3'-phosphate
  modified_base 10: mod_base = OTHER; note = 2'-O-methyladenosine-3'-phosphate
  modified_base 11: mod_base = OTHER; note = 2'-O-methyluridine-3'-phosphate
  modified_base 12: mod_base = OTHER; note = 2'-O-methyladenosine-3'-phosphate
  modified_base 13: mod_base = OTHER; note = 2'-O-methylcytidine-3'-phosphate
  modified_base 14: mod_base = OTHER; note = 2'-fluoroadenosine-3'-phosphate
  modified_base 15: mod_base = OTHER; note = 2'-O-methyladenosine-3'-phosphate
  modified_base 16: mod_base = OTHER; note = 2'-fluoroadenosine-3'-phosphate
  modified_base 17: mod_base = OTHER; note = 2'-O-methyluridine-3'-phosphate
  modified_base 18: mod_base = OTHER; note = 2'-O-methyluridine-3'-phosphate
  modified_base 19: mod_base = OTHER; note = 2'-O-methyladenosine-3'-phosphate
  modified_base 20: mod_base = OTHER; note = 2'-O-methylguanosine-3'-phosphate
  modified_base 21: mod_base = OTHER; note = 2'-O-methylcytidine-3'- phosphorothioate
  modified_base 22: mod_base = OTHER; note = 2'-O-methylcytidine-3'- phosphorothioate
  modified_base 23: mod_base = OTHER; note = 2'-O-methylguanosine-3'-phosphate
taatcattgatacaaattagccg

SEQ ID NO: 2220 - RNA, 21 nt, synthetic construct
  source 1..21: mol_type = other RNA
  modified_base 1: mod_base = OTHER; note = 2'-O-methylcytidine-3'- phosphorothioate
  modified_base 2: mod_base = OTHER; note = 2'-O-methyluridine-3'-phosphorothioate
  modified_base 3: mod_base = OTHER; note = 2'-O-methyladenosine-3'-phosphate
  modified_base 4: mod_base = OTHER; note = 2'-O-methyladenosine-3'-phosphate
  modified_base 5: mod_base = OTHER; note = 2'-O-methyluridine-3'-phosphate
  modified_base 6: mod_base = OTHER; note = 2'-O-methyluridine-3'-phosphate
  modified_base 7: mod_base = OTHER; note = 2'-fluorouridine-3'-phosphate
  modified_base 8: mod_base = OTHER; note = 2'-O-methylguanosine-3'-phosphate
  modified_base 9: mod_base = OTHER; note = 2'-fluorouridine-3'-phosphate
  modified_base 10: mod_base = OTHER; note = 2'-fluoroadenosine-3'-phosphate
  modified_base 11: mod_base = OTHER; note = 2'-fluorouridine-3'-phosphate
  modified_base 12: mod_base = OTHER; note = 2'-O-methylcytidine-3'-phosphate
  modified_base 13: mod_base = OTHER; note = 2'-O-methyladenosine-3'-phosphate
  modified_base 14: mod_base = OTHER; note = 2'-O-methyladenosine-3'-phosphate
  modified_base 15: mod_base = OTHER; note = 2'-O-methyluridine-3'-phosphate
  modified_base 16: mod_base = OTHER; note = 2'-O-methylguanosine-3'-phosphate
  modified_base 17: mod_base = OTHER; note = 2'-O-methyladenosine-3'-phosphate
  modified_base 18: mod_base = OTHER; note = 2'-O-methyluridine-3'-phosphate
  modified_base 19: mod_base = OTHER; note = 2'-O-methyluridine-3'-phosphate
  modified_base 20: mod_base = OTHER; note = 2'-O-methyladenosine-3'-phosphate
  modified_base 21: mod_base = OTHER; note 2'-O-methyluridine-3'-phosphate-N-[tris(GalNAc-alkyl)-amido decanoyl)]-4-hydroxyprolinol (Hyp-(GalNAc-alkyl)3)
ctaatttgtatcaatgattat

SEQ ID NO: 2221 - RNA, 23 nt, synthetic construct
  source 1..23: mol_type = other RNA
  modified_base 1: mod_base = OTHER; note = 2'-O-methyladenosine-3'- phosphorothioate
  modified_base 2: mod_base = OTHER; note = 2'-fluorouridine -3'-phosphorothioate
  modified_base 3: mod_base = OTHER; note = 2'-O-methyladenosine-3'-phosphate
  modified_base 4: mod_base = OTHER; note = 2'-O-methyladenosine-3'-phosphate
  modified_base 5: mod_base = OTHER; note = 2'-O-methyluridine-3'-phosphate
  modified_base 6: mod_base = OTHER; note = 2'-fluorocytidine-3'-phosphate
  modified_base 7: mod_base = OTHER; note = 2'-O-methyladenosine-3'-phosphate
  modified_base 8: mod_base = OTHER; note = 2'-fluorouridine-3'-phosphate
  modified_base 9: mod_base = OTHER; note = 2'-fluorouridine-3'-phosphate
  modified_base 10: mod_base = OTHER; note = 2'-O-methylguanosine-3'-phosphate
  modified_base 11: mod_base = OTHER; note = 2'-O-methyladenosine-3'-phosphate
  modified_base 12: mod_base = OTHER; note = 2'-O-methyluridine-3'-phosphate
  modified_base 13: mod_base = OTHER; note = 2'-O-methyladenosine-3'-phosphate
  modified_base 14: mod_base = OTHER; note = 2'-fluorocytidine-3'-phosphate
  modified_base 15: mod_base = OTHER; note = 2'-O-methyladenosine-3'-phosphate
  modified_base 16: mod_base = OTHER; note = 2'-fluoroadenosine-3'-phosphate
  modified_base 17: mod_base = OTHER; note = 2'-O-methyladenosine-3'-phosphate
  modified_base 18: mod_base = OTHER; note = 2'-O-methyluridine-3'-phosphate
  modified_base 19: mod_base = OTHER; note = 2'-O-methyluridine-3'-phosphate
  modified_base 20: mod_base = OTHER; note = 2'-O-methyladenosine-3'-phosphate
  modified_base 21: mod_base = OTHER; note = 2'-O-methylguanosine-3'- phosphorothioate
  modified_base 22: mod_base = OTHER; note = 2'-O-methylcytidine-3'- phosphorothioate
  modified_base 23: mod_base = OTHER; note = 2'-O-methylcytidine-3'-phosphate
ataatcattgatacaaattagcc

SEQ ID NO: 2222 - RNA, 21 nt, synthetic construct
  source 1..21: mol_type = other RNA
  modified_base 1: mod_base = OTHER; note = 2'-O-methylcytidine-3'- phosphorothioate
  modified_base 2: mod_base = OTHER; note = 2'-O-methylcytidine-3'- phosphorothioate
  modified_base 3: mod_base = OTHER; note = 2'-O-methylcytidine-3'-phosphate
  modified_base 4: mod_base = OTHER; note = 2'-O-methylguanosine-3'-phosphate
  modified_base 5: mod_base = OTHER; note = 2'-O-methylguanosine-3'-phosphate
  modified_base 6: mod_base = OTHER; note = 2'-O-methylcytidine-3'-phosphate
  modified_base 7: mod_base = OTHER; note = 2'-fluorouridine-3'-phosphate
  modified_base 8: mod_base = OTHER; note = 2'-O-methyladenosine-3'-phosphate
  modified_base 9: mod_base = OTHER; note = 2'-fluoroadenosine-3'-phosphate
  modified_base 10: mod_base = OTHER; note = 2'-fluorouridine-3'-phosphate
  modified_base 11: mod_base = OTHER; note = 2'-fluorouridine-3'-phosphate
  modified_base 12: mod_base = OTHER; note = 2'-O-methyluridine-3'-phosphate
  modified_base 13: mod_base = OTHER; note = 2'-O-methylguanosine-3'-phosphate
  modified_base 14: mod_base = OTHER; note = 2'-O-methyluridine-3'-phosphate
  modified_base 15: mod_base = OTHER; note = 2'-O-methyladenosine-3'-phosphate
  modified_base 16: mod_base = OTHER; note = 2'-O-methyluridine-3'-phosphate
  modified_base 17: mod_base = OTHER; note = 2'-O-methylcytidine-3'-phosphate
  modified_base 18: mod_base = OTHER; note = 2'-O-methyladenosine-3'-phosphate
  modified_base 19: mod_base = OTHER; note = 2'-O-methyladenosine-3'-phosphate
  modified_base 20: mod_base = OTHER; note = 2'-O-methyluridine-3'-phosphate
  modified_base 21: mod_base = OTHER; note 2'-O-methylguanosine-3'-phosphate-N-[tris(GalNAc-alkyl)-ami dodecanoyl)]-4-hydroxyprolinol (Hyp-(GalNAc-alkyl)3)
cccggctaatttgtatcaatg

SEQ ID NO: 2223 - RNA, 23 nt, synthetic construct
  source 1..23: mol_type = other RNA
  modified_base 1: mod_base = OTHER; note = 2'-O-methylcytidine-3'- phosphorothioate
  modified_base 2: mod_base = OTHER; note = 2'-fluoroadenosine-3'-phosphorothioate
  modified_base 3: mod_base = OTHER; note = 2'-O-methyluridine-3'-phosphate
  modified_base 4: mod_base = OTHER; note = 2'-O-methyluridine-3'-phosphate
  modified_base 5: mod_base = OTHER; note = 2'-O-methylguanosine-3'-phosphate
  modified_base 6: mod_base = OTHER; note = 2'-fluoroadenosine-3'-phosphate
  modified_base 7: mod_base = OTHER; note = 2'-O-methyluridine-3'-phosphate
  modified_base 8: mod_base = OTHER; note = 2'-fluoroadenosine-3'-phosphate
  modified_base 9: mod_base = OTHER; note = 2'-fluorocytidine-3'-phosphate
  modified_base 10: mod_base = OTHER; note = 2'-O-methyladenosine-3'-phosphate
  modified_base 11: mod_base = OTHER; note = 2'-O-methyladenosine-3'-phosphate
  modified_base 12: mod_base = OTHER; note = 2'-O-methyladenosine-3'-phosphate
  modified_base 13: mod_base = OTHER; note = 2'-O-methyluridine-3'-phosphate
  modified_base 14: mod_base = OTHER; note = 2'-fluorouridine-3'-phosphate
  modified_base 15: mod_base = OTHER; note = 2'-O-methyladenosine-3'-phosphate
  modified_base 16: mod_base = OTHER; note = 2'-fluoroguanosine-3'-phosphate
  modified_base 17: mod_base = OTHER; note = 2'-O-methylcytidine-3'-phosphate
  modified_base 18: mod_base = OTHER; note = 2'-O-methylcytidine-3'-phosphate
  modified_base 19: mod_base = OTHER; note = 2'-O-methylguanosine-3'-phosphate
  modified_base 20: mod_base = OTHER; note = 2'-O-methylguanosine-3'-phosphate
  modified_base 21: mod_base = OTHER; note = 2'-O-methylguanosine-3'- phosphorothioate
  modified_base 22: mod_base = OTHER; note = 2'-O-methylguanosine-3'- phosphorothioate
  modified_base 23: mod_base = OTHER; note = 2'-O-methylguanosine-3'-phosphate
cattgatacaaattagccggggg

SEQ ID NO: 2224 - RNA, 21 nt, synthetic construct
  source 1..21: mol_type = other RNA
  modified_base 1: mod_base = OTHER; note = 2'-O-methylcytidine-3'- phosphorothioate
  modified_base 2: mod_base = OTHER; note = 2'-O-methylcytidine-3'- phosphorothioate
  modified_base 3: mod_base = OTHER; note = 2'-O-methylcytidine-3'-phosphate
  modified_base 4: mod_base = OTHER; note = 2'-O-methylcytidine-3'-phosphate
  modified_base 5: mod_base = OTHER; note = 2'-O-methylguanosine-3'-phosphate
  modified_base 6: mod_base = OTHER; note = 2'-O-methylguanosine-3'-phosphate
  modified_base 7: mod_base = OTHER; note = 2'-fluorocytidine-3'-phosphate
  modified_base 8: mod_base = OTHER; note = 2'-O-methyluridine-3'-phosphate
  modified_base 9: mod_base = OTHER; note = 2'-fluoroadenosine-3'-phosphate
  modified_base 10: mod_base = OTHER; note = 2'-fluoroadenosine-3'-phosphate
  modified_base 11: mod_base = OTHER; note = 2'-fluorouridine-3'-phosphate
  modified_base 12: mod_base = OTHER; note = 2'-O-methyluridine-3'-phosphate
  modified_base 13: mod_base = OTHER; note = 2'-O-methyluridine-3'-phosphate
  modified_base 14: mod_base = OTHER; note = 2'-O-methylguanosine-3'-phosphate
  modified_base 15: mod_base = OTHER; note = 2'-O-methyluridine-3'-phosphate
  modified_base 16: mod_base = OTHER; note = 2'-O-methyladenosine-3'-phosphate
  modified_base 17: mod_base = OTHER; note = 2'-O-methyluridine-3'-phosphate
  modified_base 18: mod_base = OTHER; note = 2'-O-methylcytidine-3'-phosphate
  modified_base 19: mod_base = OTHER; note = 2'-O-methyladenosine-3'-phosphate
  modified_base 20: mod_base = OTHER; note = 2'-O-methyladenosine-3'-phosphate
  modified_base 21: mod_base = OTHER; note 2'-O-methyluridine-3'-phosphate-N-[tris(GalNAc-alkyl)-amido decanoyl)]-4-hydroxyprolinol (Hyp-(GalNAc-alkyl)3)
ccccggctaatttgtatcaat

SEQ ID NO: 2225 - RNA, 23 nt, synthetic construct
  source 1..23: mol_type = other RNA
  modified_base 1: mod_base = OTHER; note = 2'-O-methyladenosine-3'- phosphorothioate
  modified_base 2: mod_base = OTHER; note = 2'-fluorouridine -3'-phosphorothioate
  modified_base 3: mod_base = OTHER; note = 2'-O-methyluridine-3'-phosphate
  modified_base 4: mod_base = OTHER; note = 2'-O-methylguanosine-3'-phosphate
  modified_base 5: mod_base = OTHER; note = 2'-O-methyladenosine-3'-phosphate
  modified_base 6: mod_base = OTHER; note = 2'-fluorouridine-3'-phosphate
  modified_base 7: mod_base = OTHER; note = 2'-O-methyladenosine-3'-phosphate
  modified_base 8: mod_base = OTHER; note = 2'-fluorocytidine-3'-phosphate
  modified_base 9: mod_base = OTHER; note = 2'-fluoroadenosine-3'-phosphate
  modified_base 10: mod_base = OTHER; note = 2'-O-methyladenosine-3'-phosphate
  modified_base 11: mod_base = OTHER; note = 2'-O-methyladenosine-3'-phosphate
  modified_base 12: mod_base = OTHER; note = 2'-O-methyluridine-3'-phosphate
  modified_base 13: mod_base = OTHER; note = 2'-O-methyluridine-3'-phosphate
  modified_base 14: mod_base = OTHER; note = 2'-fluoroadenosine-3'-phosphate
  modified_base 15: mod_base = OTHER; note = 2'-O-methylguanosine-3'-phosphate
  modified_base 16: mod_base = OTHER; note = 2'-fluorocytidine-3'-phosphate
  modified_base 17: mod_base = OTHER; note = 2'-O-methylcytidine-3'-phosphate
  modified_base 18: mod_base = OTHER; note = 2'-O-methylguanosine-3'-phosphate
  modified_base 19: mod_base = OTHER; note = 2'-O-methylguanosine-3'-phosphate
  modified_base 20: mod_base = OTHER; note = 2'-O-methylguanosine-3'-phosphate
  modified_base 21: mod_base = OTHER; note = 2'-O-methylguanosine-3'- phosphorothioate
  modified_base 22: mod_base = OTHER; note = 2'-O-methylguanosine-3'- phosphorothioate
  modified_base 23: mod_base = OTHER; note = 2'-O-methyladenosine-3'-phosphate
attgatacaaattagccggggga

SEQ ID NO: 2226 - RNA, 21 nt, synthetic construct
  source 1..21: mol_type = other RNA
  modified_base 1: mod_base = OTHER; note = 2'-O-methyluridine-3'-phosphorothioate
  modified_base 2: mod_base = OTHER; note = 2'-O-methyladenosine-3'- phosphorothioate
  modified_base 3: mod_base = OTHER; note = 2'-O-methyladenosine-3'-phosphate
  modified_base 4: mod_base = OTHER; note = 2'-O-methyluridine-3'-phosphate
  modified_base 5: mod_base = OTHER; note = 2'-O-methyluridine-3'-phosphate
  modified_base 6: mod_base = OTHER; note = 2'-O-methylguanosine-3'-phosphate
  modified_base 7: mod_base = OTHER; note = 2'-fluoroguanosine-3'-phosphate
  modified_base 8: mod_base = OTHER; note = 2'-O-methyluridine-3'-phosphate
  modified_base 9: mod_base = OTHER; note = 2'-fluoroguanosine-3'-phosphate
  modified_base 10: mod_base = OTHER; note = 2'-fluoroadenosine-3'-phosphate
  modified_base 11: mod_base = OTHER; note = 2'-fluorouridine-3'-phosphate
  modified_base 12: mod_base = OTHER; note = 2'-O-methyladenosine-3'-phosphate
  modified_base 13: mod_base = OTHER; note = 2'-O-methylcytidine-3'-phosphate
  modified_base 14: mod_base = OTHER; note = 2'-O-methyluridine-3'-phosphate
  modified_base 15: mod_base = OTHER; note = 2'-O-methyluridine-3'-phosphate
  modified_base 16: mod_base = OTHER; note = 2'-O-methylcytidine-3'-phosphate
  modified_base 17: mod_base = OTHER; note = 2'-O-methyluridine-3'-phosphate
  modified_base 18: mod_base = OTHER; note = 2'-O-methyluridine-3'-phosphate
  modified_base 19: mod_base = OTHER; note = 2'-O-methyluridine-3'-phosphate
  modified_base 20: mod_base = OTHER; note = 2'-O-methylguanosine-3'-phosphate
  modified_base 21: mod_base = OTHER; note 2'-O-methyladenosine-3'-phosphate-N-[tris(GalNAc-alkyl)-ami dodecanoyl)]-4-hydroxyprolinol (Hyp-(GalNAc-alkyl)3)
taattggtgatacttctttga

SEQ ID NO: 2227 - RNA, 23 nt, synthetic construct
  source 1..23: mol_type = other RNA
  modified_base 1: mod_base = OTHER; note = 2'-O-methyluridine-3'-phosphorothioate
  modified_base 2: mod_base = OTHER; note = 2'-fluorocytidine-3'-phosphorothioate
  modified_base 3: mod_base = OTHER; note = 2'-O-methyladenosine-3'-phosphate
  modified_base 4: mod_base = OTHER; note = 2'-O-methyladenosine-3'-phosphate
  modified_base 5: mod_base = OTHER; note = 2'-O-methyladenosine-3'-phosphate
  modified_base 6: mod_base = OTHER; note = 2'-fluoroguanosine-3'-phosphate
  modified_base 7: mod_base = OTHER; note = 2'-O-methyladenosine-3'-phosphate
  modified_base 8: mod_base = OTHER; note = 2'-fluoroadenosine-3'-phosphate
  modified_base 9: mod_base = OTHER; note = 2'-fluoroguanosine-3'-phosphate
  modified_base 10: mod_base = OTHER; note = 2'-O-methyluridine-3'-phosphate
  modified_base 11: mod_base = OTHER; note = 2'-O-methyladenosine-3'-phosphate
  modified_base 12: mod_base = OTHER; note = 2'-O-methyluridine-3'-phosphate
  modified_base 13: mod_base = OTHER; note = 2'-O-methylcytidine-3'-phosphate
  modified_base 14: mod_base = OTHER; note = 2'-fluoroadenosine-3'-phosphate
  modified_base 15: mod_base = OTHER; note = 2'-O-methylcytidine-3'-phosphate
  modified_base 16: mod_base = OTHER; note = 2'-fluorocytidine-3'-phosphate
  modified_base 17: mod_base = OTHER; note = 2'-O-methyladenosine-3'-phosphate
  modified_base 18: mod_base = OTHER; note = 2'-O-methyladenosine-3'-phosphate
  modified_base 19: mod_base = OTHER; note = 2'-O-methyluridine-3'-phosphate
  modified_base 20: mod_base = OTHER; note = 2'-O-methyluridine-3'-phosphate
  modified_base 21: mod_base = OTHER; note = 2'-O-methyladenosine-3'- phosphorothioate
  modified_base 22: mod_base = OTHER; note = 2'-O-methylcytidine-3'- phosphorothioate
  modified_base 23: mod_base = OTHER; note = 2'-O-methylcytidine-3'-phosphate
tcaaagaagtatcaccaattacc

SEQ ID NO: 2228 - RNA, 21 nt, synthetic construct
  source 1..21: mol_type = other RNA
  modified_base 1: mod_base = OTHER; note = 2'-O-methyladenosine-3'- phosphorothioate
  modified_base 2: mod_base = OTHER; note = 2'-O-methyladenosine-3'- phosphorothioate
  modified_base 3: mod_base = OTHER; note = 2'-O-methyluridine-3'-phosphate
  modified_base 4: mod_base = OTHER; note = 2'-O-methyluridine-3'-phosphate
  modified_base 5: mod_base = OTHER; note = 2'-O-methylguanosine-3'-phosphate
  modified_base 6: mod_base = OTHER; note = 2'-O-methylguanosine-3'-phosphate
  modified_base 7: mod_base = OTHER; note = 2'-fluorouridine-3'-phosphate
  modified_base 8: mod_base = OTHER; note = 2'-O-methylguanosine-3'-phosphate
  modified_base 9: mod_base = OTHER; note = 2'-fluoroadenosine-3'-phosphate
  modified_base 10: mod_base = OTHER; note = 2'-fluorouridine-3'-phosphate
  modified_base 11: mod_base = OTHER; note = 2'-fluoroadenosine-3'-phosphate
  modified_base 12: mod_base = OTHER; note = 2'-O-methylcytidine-3'-phosphate
  modified_base 13: mod_base = OTHER; note = 2'-O-methyluridine-3'-phosphate
  modified_base 14: mod_base = OTHER; note = 2'-O-methyluridine-3'-phosphate
  modified_base 15: mod_base = OTHER; note = 2'-O-methylcytidine-3'-phosphate
  modified_base 16: mod_base = OTHER; note = 2'-O-methyluridine-3'-phosphate
  modified_base 17: mod_base = OTHER; note = 2'-O-methyluridine-3'-phosphate
  modified_base 18: mod_base = OTHER; note = 2'-O-methyluridine-3'-phosphate
  modified_base 19: mod_base = OTHER; note = 2'-O-methylguanosine-3'-phosphate
  modified_base 20: mod_base = OTHER; note = 2'-O-methyladenosine-3'-phosphate
  modified_base 21: mod_base = OTHER; note 2'-O-methyladenosine-3'-phosphate-N-[tris(GalNAc-alkyl)-ami dodecanoyl)]-4-hydroxyprolinol (Hyp-(GalNAc-alkyl)3)
aattggtgatacttctttgaa

SEQ ID NO: 2229 - RNA, 23 nt, synthetic construct
  source 1..23: mol_type = other RNA
  modified_base 1: mod_base = OTHER; note = 2'-O-methyluridine-3'-phosphorothioate
  modified_base 2: mod_base = OTHER; note = 2'-fluorouridine -3'-phosphorothioate
  modified_base 3: mod_base = OTHER; note = 2'-O-methylcytidine-3'-phosphate
  modified_base 4: mod_base = OTHER; note = 2'-O-methyladenosine-3'-phosphate
  modified_base 5: mod_base = OTHER; note = 2'-O-methyladenosine-3'-phosphate
  modified_base 6: mod_base = OTHER; note = 2'-fluoroadenosine-3'-phosphate
  modified_base 7: mod_base = OTHER; note = 2'-O-methylguanosine-3'-phosphate
  modified_base 8: mod_base = OTHER; note = 2'-fluoroadenosine-3'-phosphate
  modified_base 9: mod_base = OTHER; note = 2'-fluoroadenosine-3'-phosphate
  modified_base 10: mod_base = OTHER; note = 2'-O-methylguanosine-3'-phosphate
  modified_base 11: mod_base = OTHER; note = 2'-O-methyluridine-3'-phosphate
  modified_base 12: mod_base = OTHER; note = 2'-O-methyladenosine-3'-phosphate
  modified_base 13: mod_base = OTHER; note = 2'-O-methyluridine-3'-phosphate
  modified_base 14: mod_base = OTHER; note = 2'-fluorocytidine-3'-phosphate
  modified_base 15: mod_base = OTHER; note = 2'-O-methyladenosine-3'-phosphate
  modified_base 16: mod_base = OTHER; note = 2'-fluorocytidine-3'-phosphate
  modified_base 17: mod_base = OTHER; note = 2'-O-methylcytidine-3'-phosphate
  modified_base 18: mod_base = OTHER; note = 2'-O-methyladenosine-3'-phosphate
  modified_base 19: mod_base = OTHER; note = 2'-O-methyladenosine-3'-phosphate
  modified_base 20: mod_base = OTHER; note = 2'-O-methyluridine-3'-phosphate
  modified_base 21: mod_base = OTHER; note = 2'-O-methyluridine-3'-phosphorothioate
  modified_base 22: mod_base = OTHER; note = 2'-O-methyladenosine-3'- phosphorothioate
  modified_base 23: mod_base = OTHER; note = 2'-O-methylcytidine-3'-phosphate
ttcaaagaagtatcaccaattac

SEQ ID NO: 2230 - RNA, 21 nt, synthetic construct
  source 1..21: mol_type = other RNA
  modified_base 1: mod_base = OTHER; note = 2'-O-methylguanosine-3'- phosphorothioate
  modified_base 2: mod_base = OTHER; note = 2'-O-methylcytidine-3'- phosphorothioate
  modified_base 3: mod_base = OTHER; note = 2'-O-methylguanosine-3'-phosphate
  modified_base 4: mod_base = OTHER; note = 2'-O-methylguanosine-3'-phosphate
  modified_base 5: mod_base = OTHER; note = 2'-O-methyluridine-3'-phosphate
  modified_base 6: mod_base = OTHER; note = 2'-O-methyladenosine-3'-phosphate
  modified_base 7: mod_base = OTHER; note = 2'-fluoroadenosine-3'-phosphate
  modified_base 8: mod_base = OTHER; note = 2'-O-methyluridine-3'-phosphate
  modified_base 9: mod_base = OTHER; note = 2'-fluorouridine-3'-phosphate
  modified_base 10: mod_base = OTHER; note = 2'-fluoroguanosine-3'-phosphate
  modified_base 11: mod_base = OTHER; note = 2'-fluoroguanosine-3'-phosphate
  modified_base 12: mod_base = OTHER; note = 2'-O-methyluridine-3'-phosphate
  modified_base 13: mod_base = OTHER; note = 2'-O-methylguanosine-3'-phosphate
  modified_base 14: mod_base = OTHER; note = 2'-O-methyladenosine-3'-phosphate
  modified_base 15: mod_base = OTHER; note = 2'-O-methyluridine-3'-phosphate
  modified_base 16: mod_base = OTHER; note = 2'-O-methyladenosine-3'-phosphate
  modified_base 17: mod_base = OTHER; note = 2'-O-methylcytidine-3'-phosphate
  modified_base 18: mod_base = OTHER; note = 2'-O-methyluridine-3'-phosphate
  modified_base 19: mod_base = OTHER; note = 2'-O-methyluridine-3'-phosphate
  modified_base 20: mod_base = OTHER; note = 2'-O-methylcytidine-3'-phosphate
  modified_base 21: mod_base = OTHER; note 2'-O-methyluridine-3'-phosphate-N-[tris(GalNAc-alkyl)-amido decanoyl)]-4-hydroxyprolinol (Hyp-(GalNAc-alkyl)3)
gcggtaattggtgatacttct

SEQ ID NO: 2231 - RNA, 23 nt, synthetic construct
  source 1..23: mol_type = other RNA
  modified_base 1: mod_base = OTHER; note = 2'-O-methyladenosine-3'- phosphorothioate
  modified_base 2: mod_base = OTHER; note = 2'-fluoroguanosine-3'-phosphorothioate
  modified_base 3: mod_base = OTHER; note = 2'-O-methyladenosine-3'-phosphate
  modified_base 4: mod_base = OTHER; note = 2'-O-methyladenosine-3'-phosphate
  modified_base 5: mod_base = OTHER; note = 2'-O-methylguanosine-3'-phosphate
  modified_base 6: mod_base = OTHER; note = 2'-fluorouridine-3'-phosphate
  modified_base 7: mod_base = OTHER; note = 2'-O-methyladenosine-3'-phosphate
  modified_base 8: mod_base = OTHER; note = 2'-fluorouridine-3'-phosphate
  modified_base 9: mod_base = OTHER; note = 2'-fluorocytidine-3'-phosphate
  modified_base 10: mod_base = OTHER; note = 2'-O-methyladenosine-3'-phosphate
  modified_base 11: mod_base = OTHER; note = 2'-O-methylcytidine-3'-phosphate
  modified_base 12: mod_base = OTHER; note = 2'-O-methylcytidine-3'-phosphate
  modified_base 13: mod_base = OTHER; note = 2'-O-methyladenosine-3'-phosphate
  modified_base 14: mod_base = OTHER; note = 2'-fluoroadenosine-3'-phosphate
  modified_base 15: mod_base = OTHER; note = 2'-O-methyluridine-3'-phosphate
  modified_base 16: mod_base = OTHER; note = 2'-fluorouridine-3'-phosphate
  modified_base 17: mod_base = OTHER; note = 2'-O-methyladenosine-3'-phosphate
  modified_base 18: mod_base = OTHER; note = 2'-O-methylcytidine-3'-phosphate
  modified_base 19: mod_base = OTHER; note = 2'-O-methylcytidine-3'-phosphate
  modified_base 20: mod_base = OTHER; note = 2'-O-methylguanosine-3'-phosphate
  modified_base 21: mod_base = OTHER; note = 2'-O-methylcytidine-3'- phosphorothioate
  modified_base 22: mod_base = OTHER; note = 2'-O-methylcytidine-3'- phosphorothioate
  modified_base 23: mod_base = OTHER; note = 2'-O-methyladenosine-3'-phosphate
agaagtatcaccaattaccgcca

SEQ ID NO: 2232 - RNA, 21 nt, synthetic construct
  source 1..21: mol_type = other RNA
  modified_base 1: mod_base = OTHER; note = 2'-O-methylguanosine-3'- phosphorothioate
  modified_base 2: mod_base = OTHER; note = 2'-O-methylguanosine-3'- phosphorothioate
  modified_base 3: mod_base = OTHER; note = 2'-O-methylcytidine-3'-phosphate
  modified_base 4: mod_base = OTHER; note = 2'-O-methylguanosine-3'-phosphate
  modified_base 5: mod_base = OTHER; note = 2'-O-methylguanosine-3'-phosphate
  modified_base 6: mod_base = OTHER; note = 2'-O-methyluridine-3'-phosphate
  modified_base 7: mod_base = OTHER; note = 2'-fluoroadenosine-3'-phosphate
  modified_base 8: mod_base = OTHER; note = 2'-O-methyladenosine-3'-phosphate
  modified_base 9: mod_base = OTHER; note = 2'-fluorouridine-3'-phosphate
  modified_base 10: mod_base = OTHER; note = 2'-fluorouridine-3'-phosphate
  modified_base 11: mod_base = OTHER; note = 2'-fluoroguanosine-3'-phosphate
  modified_base 12: mod_base = OTHER; note = 2'-O-methylguanosine-3'-phosphate
  modified_base 13: mod_base = OTHER; note = 2'-O-methyluridine-3'-phosphate
  modified_base 14: mod_base = OTHER; note = 2'-O-methylguanosine-3'-phosphate
  modified_base 15: mod_base = OTHER; note = 2'-O-methyladenosine-3'-phosphate
  modified_base 16: mod_base = OTHER; note = 2'-O-methyluridine-3'-phosphate
  modified_base 17: mod_base = OTHER; note = 2'-O-methyladenosine-3'-phosphate
  modified_base 18: mod_base = OTHER; note = 2'-O-methylcytidine-3'-phosphate
  modified_base 19: mod_base = OTHER; note = 2'-O-methyluridine-3'-phosphate
  modified_base 20: mod_base = OTHER; note = 2'-O-methyluridine-3'-phosphate
  modified_base 21: mod_base = OTHER; note 2'-O-methylcytidine-3'-phosphate-N-[tris(GalNAc-alkyl)-amid odecanoyl)]-4-hydroxyprolinol (Hyp-(GalNAc-alkyl)3)
ggcggtaattggtgatacttc

SEQ ID NO: 2233 - RNA, 23 nt, synthetic construct
  source 1..23: mol_type = other RNA
  modified_base 1: mod_base = OTHER; note = 2'-O-methylguanosine-3'- phosphorothioate
  modified_base 2: mod_base = OTHER; note = 2'-fluoroadenosine-3'-phosphorothioate
  modified_base 3: mod_base = OTHER; note = 2'-O-methyladenosine-3'-phosphate
  modified_base 4: mod_base = OTHER; note = 2'-O-methylguanosine-3'-phosphate
  modified_base 5: mod_base = OTHER; note = 2'-O-methyluridine-3'-phosphate
  modified_base 6: mod_base = OTHER; note = 2'-fluoroadenosine-3'-phosphate
  modified_base 7: mod_base = OTHER; note = 2'-O-methyluridine-3'-phosphate
  modified_base 8: mod_base = OTHER; note = 2'-fluorocytidine-3'-phosphate
  modified_base 9: mod_base = OTHER; note = 2'-fluoroadenosine-3'-phosphate
  modified_base 10: mod_base = OTHER; note = 2'-O-methylcytidine-3'-phosphate
  modified_base 11: mod_base = OTHER; note = 2'-O-methylcytidine-3'-phosphate
  modified_base 12: mod_base = OTHER; note = 2'-O-methyladenosine-3'-phosphate
  modified_base 13: mod_base = OTHER; note = 2'-O-methyladenosine-3'-phosphate
  modified_base 14: mod_base = OTHER; note = 2'-fluorouridine-3'-phosphate
  modified_base 15: mod_base = OTHER; note = 2'-O-methyluridine-3'-phosphate
  modified_base 16: mod_base = OTHER; note = 2'-fluoroadenosine-3'-phosphate
  modified_base 17: mod_base = OTHER; note = 2'-O-methylcytidine-3'-phosphate
  modified_base 18: mod_base = OTHER; note = 2'-O-methylcytidine-3'-phosphate
  modified_base 19: mod_base = OTHER; note = 2'-O-methylguanosine-3'-phosphate
  modified_base 20: mod_base = OTHER; note = 2'-O-methylcytidine-3'-phosphate
  modified_base 21: mod_base = OTHER; note = 2'-O-methylcytidine-3'- phosphorothioate
  modified_base 22: mod_base = OTHER; note = 2'-O-methyladenosine-3'- phosphorothioate
  modified_base 23: mod_base = OTHER; note = 2'-O-methylcytidine-3'-phosphate
gaagtatcaccaattaccgccac

SEQ ID NO: 2234 - RNA, 21 nt, synthetic construct
  source 1..21: mol_type = other RNA
  modified_base 1: mod_base = OTHER; note = 2'-O-methylcytidine-3'- phosphorothioate
  modified_base 2: mod_base = OTHER; note = 2'-O-methyladenosine-3'- phosphorothioate
  modified_base 3: mod_base = OTHER; note = 2'-O-methylguanosine-3'-phosphate
  modified_base 4: mod_base = OTHER; note = 2'-O-methyluridine-3'-phosphate
  modified_base 5: mod_base = OTHER; note = 2'-O-methylguanosine-3'-phosphate
  modified_base 6: mod_base = OTHER; note = 2'-O-methylguanosine-3'-phosphate
  modified_base 7: mod_base = OTHER; note = 2'-fluorouridine-3'-phosphate
  modified_base 8: mod_base = OTHER; note = 2'-O-methyluridine-3'-phosphate
  modified_base 9: mod_base = OTHER; note = 2'-fluorocytidine-3'-phosphate
  modified_base 10: mod_base = OTHER; note = 2'-fluorouridine-3'-phosphate
  modified_base 11: mod_base = OTHER; note = 2'-fluorouridine-3'-phosphate
  modified_base 12: mod_base = OTHER; note = 2'-O-methyladenosine-3'-phosphate
  modified_base 13: mod_base = OTHER; note = 2'-O-methyladenosine-3'-phosphate
  modified_base 14: mod_base = OTHER; note = 2'-O-methyladenosine-3'-phosphate
  modified_base 15: mod_base = OTHER; note = 2'-O-methyluridine-3'-phosphate
  modified_base 16: mod_base = OTHER; note = 2'-O-methyluridine-3'-phosphate
  modified_base 17: mod_base = OTHER; note = 2'-O-methylguanosine-3'-phosphate
  modified_base 18: mod_base = OTHER; note = 2'-O-methyluridine-3'-phosphate
  modified_base 19: mod_base = OTHER; note = 2'-O-methyladenosine-3'-phosphate
  modified_base 20: mod_base = OTHER; note = 2'-O-methyladenosine-3'-phosphate
  modified_base 21: mod_base = OTHER; note 2'-O-methylguanosine-3'-phosphate-N-[tris(GalNAc-alkyl)-ami dodecanoyl)]-4-hydroxyprolinol (Hyp-(GalNAc-alkyl)3)
cagtggttcttaaattgtaag

SEQ ID NO: 2235 - RNA, 23 nt, synthetic construct
  source 1..23: mol_type = other RNA
  modified_base 1: mod_base = OTHER; note = 2'-O-methylcytidine-3'- phosphorothioate
  modified_base 2: mod_base = OTHER; note = 2'-fluorouridine -3'-phosphorothioate
  modified_base 3: mod_base = OTHER; note = 2'-O-methyluridine-3'-phosphate
  modified_base 4: mod_base = OTHER; note = 2'-O-methyladenosine-3'-phosphate
  modified_base 5: mod_base = OTHER; note = 2'-O-methylcytidine-3'-phosphate
  modified_base 6: mod_base = OTHER; note = 2'-fluoroadenosine-3'-phosphate
  modified_base 7: mod_base = OTHER; note = 2'-O-methyladenosine-3'-phosphate
  modified_base 8: mod_base = OTHER; note = 2'-fluorouridine-3'-phosphate
  modified_base 9: mod_base = OTHER; note = 2'-fluorouridine-3'-phosphate
  modified_base 10: mod_base = OTHER; note = 2'-O-methyluridine-3'-phosphate
  modified_base 11: mod_base = OTHER; note = 2'-O-methyladenosine-3'-phosphate
  modified_base 12: mod_base = OTHER; note = 2'-O-methyladenosine-3'-phosphate
  modified_base 13: mod_base = OTHER; note = 2'-O-methylguanosine-3'-phosphate
  modified_base 14: mod_base = OTHER; note = 2'-fluoroadenosine-3'-phosphate
  modified_base 15: mod_base = OTHER; note = 2'-O-methyladenosine-3'-phosphate
  modified_base 16: mod_base = OTHER; note = 2'-fluorocytidine-3'-phosphate
  modified_base 17: mod_base = OTHER; note = 2'-O-methylcytidine-3'-phosphate
  modified_base 18: mod_base = OTHER; note = 2'-O-methyladenosine-3'-phosphate
  modified_base 19: mod_base = OTHER; note = 2'-O-methylcytidine-3'-phosphate
  modified_base 20: mod_base = OTHER; note = 2'-O-methyluridine-3'-phosphate
  modified_base 21: mod_base = OTHER; note = 2'-O-methylguanosine-3'- phosphorothioate
  modified_base 22: mod_base = OTHER; note = 2'-O-methyluridine-3'-phosphorothioate
  modified_base 23: mod_base = OTHER; note = 2'-O-methyluridine-3'-phosphate
cttacaatttaagaaccactgtt

SEQ ID NO: 2236 - RNA, 21 nt, synthetic construct
  source 1..21: mol_type = other RNA
  modified_base 1: mod_base = OTHER; note = 2'-O-methyladenosine-3'- phosphorothioate
  modified_base 2: mod_base = OTHER; note = 2'-O-methylguanosine-3'- phosphorothioate
  modified_base 3: mod_base = OTHER; note = 2'-O-methyluridine-3'-phosphate
  modified_base 4: mod_base = OTHER; note = 2'-O-methylguanosine-3'-phosphate
  modified_base 5: mod_base = OTHER; note = 2'-O-methylguanosine-3'-phosphate
  modified_base 6: mod_base = OTHER; note = 2'-O-methyluridine-3'-phosphate
  modified_base 7: mod_base = OTHER; note = 2'-fluorouridine-3'-phosphate
  modified_base 8: mod_base = OTHER; note = 2'-O-methylcytidine-3'-phosphate
  modified_base 9: mod_base = OTHER; note = 2'-fluorouridine-3'-phosphate
  modified_base 10: mod_base = OTHER; note = 2'-fluorouridine-3'-phosphate
  modified_base 11: mod_base = OTHER; note = 2'-fluoroadenosine-3'-phosphate
  modified_base 12: mod_base = OTHER; note = 2'-O-methyladenosine-3'-phosphate
  modified_base 13: mod_base = OTHER; note = 2'-O-methyladenosine-3'-phosphate
  modified_base 14: mod_base = OTHER; note = 2'-O-methyluridine-3'-phosphate
  modified_base 15: mod_base = OTHER; note = 2'-O-methyluridine-3'-phosphate
  modified_base 16: mod_base = OTHER; note = 2'-O-methylguanosine-3'-phosphate
  modified_base 17: mod_base = OTHER; note = 2'-O-methyluridine-3'-phosphate
  modified_base 18: mod_base = OTHER; note = 2'-O-methyladenosine-3'-phosphate
  modified_base 19: mod_base = OTHER; note = 2'-O-methyladenosine-3'-phosphate
  modified_base 20: mod_base = OTHER; note = 2'-O-methylguanosine-3'-phosphate
  modified_base 21: mod_base = OTHER; note 2'-O-methylcytidine-3'-phosphate-N-[tris(GalNAc-alkyl)-amid odecanoyl)]-4-hydroxyprolinol (Hyp-(GalNAc-alkyl)3)
agtggttcttaaattgtaagc

SEQ ID NO: 2237 - RNA, 23 nt, synthetic construct
  source 1..23: mol_type = other RNA
  modified_base 1: mod_base = OTHER; note = 2'-O-methylguanosine-3'- phosphorothioate
  modified_base 2: mod_base = OTHER; note = 2'-fluorocytidine-3'-phosphorothioate
  modified_base 3: mod_base = OTHER; note = 2'-O-methyluridine-3'-phosphate
  modified_base 4: mod_base = OTHER; note = 2'-O-methyluridine-3'-phosphate
  modified_base 5: mod_base = OTHER; note = 2'-O-methyladenosine-3'-phosphate
  modified_base 6: mod_base = OTHER; note = 2'-fluorocytidine-3'-phosphate
  modified_base 7: mod_base = OTHER; note = 2'-O-methyladenosine-3'-phosphate
  modified_base 8: mod_base = OTHER; note = 2'-fluoroadenosine-3'-phosphate
  modified_base 9: mod_base = OTHER; note = 2'-fluorouridine-3'-phosphate
  modified_base 10: mod_base = OTHER; note = 2'-O-methyluridine-3'-phosphate
  modified_base 11: mod_base = OTHER; note = 2'-O-methyluridine-3'-phosphate
  modified_base 12: mod_base = OTHER; note = 2'-O-methyladenosine-3'-phosphate
  modified_base 13: mod_base = OTHER; note = 2'-O-methyladenosine-3'-phosphate
  modified_base 14: mod_base = OTHER; note = 2'-fluoroguanosine-3'-phosphate
  modified_base 15: mod_base = OTHER; note = 2'-O-methyladenosine-3'-phosphate
  modified_base 16: mod_base = OTHER; note = 2'-fluoroadenosine-3'-phosphate
  modified_base 17: mod_base = OTHER; note = 2'-O-methylcytidine-3'-phosphate
  modified_base 18: mod_base = OTHER; note = 2'-O-methylcytidine-3'-phosphate
  modified_base 19: mod_base = OTHER; note = 2'-O-methyladenosine-3'-phosphate
  modified_base 20: mod_base = OTHER; note = 2'-O-methylcytidine-3'-phosphate
  modified_base 21: mod_base = OTHER; note = 2'-O-methyluridine-3'-phosphorothioate
  modified_base 22: mod_base = OTHER; note = 2'-O-methylguanosine-3'- phosphorothioate
  modified_base 23: mod_base = OTHER; note = 2'-O-methyluridine-3'-phosphate
gcttacaatttaagaaccactgt

SEQ ID NO: 2238 - RNA, 21 nt, synthetic construct
  source 1..21: mol_type = other RNA
  modified_base 1: mod_base = OTHER; note = 2'-O-methyladenosine-3'- phosphorothioate
  modified_base 2: mod_base = OTHER; note = 2'-O-methyladenosine-3'- phosphorothioate
  modified_base 3: mod_base = OTHER; note = 2'-O-methyladenosine-3'-phosphate
  modified_base 4: mod_base = OTHER; note = 2'-O-methyladenosine-3'-phosphate
  modified_base 5: mod_base = OTHER; note = 2'-O-methylcytidine-3'-phosphate
  modified_base 6: mod_base = OTHER; note = 2'-O-methyladenosine-3'-phosphate
  modified_base 7: mod_base = OTHER; note = 2'-fluoroguanosine-3'-phosphate
  modified_base 8: mod_base = OTHER; note = 2'-O-methyluridine-3'-phosphate
  modified_base 9: mod_base = OTHER; note = 2'-fluoroguanosine-3'-phosphate
  modified_base 10: mod_base = OTHER; note = 2'-fluoroguanosine-3'-phosphate
  modified_base 11: mod_base = OTHER; note = 2'-fluorouridine-3'-phosphate
  modified_base 12: mod_base = OTHER; note = 2'-O-methyluridine-3'-phosphate
  modified_base 13: mod_base = OTHER; note = 2'-O-methylcytidine-3'-phosphate
  modified_base 14: mod_base = OTHER; note = 2'-O-methyluridine-3'-phosphate
  modified_base 15: mod_base = OTHER; note = 2'-O-methyluridine-3'-phosphate
  modified_base 16: mod_base = OTHER; note = 2'-O-methyladenosine-3'-phosphate
  modified_base 17: mod_base = OTHER; note = 2'-O-methyladenosine-3'-phosphate
  modified_base 18: mod_base = OTHER; note = 2'-O-methyladenosine-3'-phosphate
  modified_base 19: mod_base = OTHER; note = 2'-O-methyluridine-3'-phosphate
  modified_base 20: mod_base = OTHER; note = 2'-O-methyluridine-3'-phosphate
  modified_base 21: mod_base = OTHER; note 2'-O-methylguanosine-3'-phosphate-N-[tris(GalNAc-alkyl)-ami dodecanoyl)]-4-hydroxyprolinol (Hyp-(GalNAc-alkyl)3)
aaaacagtggttcttaaattg

SEQ ID NO: 2239 - RNA, 23 nt, synthetic construct
  source 1..23: mol_type = other RNA
  modified_base 1: mod_base = OTHER; note = 2'-O-methylcytidine-3'- phosphorothioate
  modified_base 2: mod_base = OTHER; note = 2'-fluoroadenosine-3'-phosphorothioate
  modified_base 3: mod_base = OTHER; note = 2'-O-methyladenosine-3'-phosphate
  modified_base 4: mod_base = OTHER; note = 2'-O-methyluridine-3'-phosphate
  modified_base 5: mod_base = OTHER; note = 2'-O-methyluridine-3'-phosphate
  modified_base 6: mod_base = OTHER; note = 2'-fluorouridine-3'-phosphate
  modified_base 7: mod_base = OTHER; note = 2'-O-methyladenosine-3'-phosphate
  modified_base 8: mod_base = OTHER; note = 2'-fluoroadenosine-3'-phosphate
  modified_base 9: mod_base = OTHER; note = 2'-fluoroguanosine-3'-phosphate
  modified_base 10: mod_base = OTHER; note = 2'-O-methyladenosine-3'-phosphate
  modified_base 11: mod_base = OTHER; note = 2'-O-methyladenosine-3'-phosphate
  modified_base 12: mod_base = OTHER; note = 2'-O-methylcytidine-3'-phosphate
  modified_base 13: mod_base = OTHER; note = 2'-O-methylcytidine-3'-phosphate
  modified_base 14: mod_base = OTHER; note = 2'-fluoroadenosine-3'-phosphate
  modified_base 15: mod_base = OTHER; note = 2'-O-methylcytidine-3'-phosphate
  modified_base 16: mod_base = OTHER; note = 2'-fluorouridine-3'-phosphate
  modified_base 17: mod_base = OTHER; note = 2'-O-methylguanosine-3'-phosphate
  modified_base 18: mod_base = OTHER; note = 2'-O-methyluridine-3'-phosphate
  modified_base 19: mod_base = OTHER; note = 2'-O-methyluridine-3'-phosphate
  modified_base 20: mod_base = OTHER; note = 2'-O-methyluridine-3'-phosphate
  modified_base 21: mod_base = OTHER; note = 2'-O-methyluridine-3'-phosphorothioate
  modified_base 22: mod_base = OTHER; note = 2'-O-methyladenosine-3'- phosphorothioate
  modified_base 23: mod_base = OTHER; note = 2'-O-methyladenosine-3'-phosphate
caatttaagaaccactgttttaa

SEQ ID NO: 2240 - RNA, 21 nt, synthetic construct
  source 1..21: mol_type = other RNA
  modified_base 1: mod_base = OTHER; note = 2'-O-methyluridine-3'-phosphorothioate
  modified_base 2: mod_base = OTHER; note = 2'-O-methyladenosine-3'- phosphorothioate
  modified_base 3: mod_base = OTHER; note = 2'-O-methyladenosine-3'-phosphate
  modified_base 4: mod_base = OTHER; note = 2'-O-methyladenosine-3'-phosphate
  modified_base 5: mod_base = OTHER; note = 2'-O-methyladenosine-3'-phosphate
  modified_base 6: mod_base = OTHER; note = 2'-O-methylcytidine-3'-phosphate
  modified_base 7: mod_base = OTHER; note = 2'-fluoroadenosine-3'-phosphate
  modified_base 8: mod_base = OTHER; note = 2'-O-methylguanosine-3'-phosphate
  modified_base 9: mod_base = OTHER; note = 2'-fluorouridine-3'-phosphate
  modified_base 10: mod_base = OTHER; note = 2'-fluoroguanosine-3'-phosphate
  modified_base 11: mod_base = OTHER; note = 2'-fluoroguanosine-3'-phosphate
  modified_base 12: mod_base = OTHER; note = 2'-O-methyluridine-3'-phosphate
  modified_base 13: mod_base = OTHER; note = 2'-O-methyluridine-3'-phosphate
  modified_base 14: mod_base = OTHER; note = 2'-O-methylcytidine-3'-phosphate
  modified_base 15: mod_base = OTHER; note = 2'-O-methyluridine-3'-phosphate
  modified_base 16: mod_base = OTHER; note = 2'-O-methyluridine-3'-phosphate
  modified_base 17: mod_base = OTHER; note = 2'-O-methyladenosine-3'-phosphate
  modified_base 18: mod_base = OTHER; note = 2'-O-methyladenosine-3'-phosphate
  modified_base 19: mod_base = OTHER; note = 2'-O-methyladenosine-3'-phosphate
  modified_base 20: mod_base = OTHER; note = 2'-O-methyluridine-3'-phosphate
  modified_base 21: mod_base = OTHER; note 2'-O-methyluridine-3'-phosphate-N-[tris(GalNAc-alkyl)-amido decanoyl)]-4-hydroxyprolinol (Hyp-(GalNAc-alkyl)3)
taaaacagtggttcttaaatt

SEQ ID NO: 2241 - RNA, 23 nt, synthetic construct
  source 1..23: mol_type = other RNA
  modified_base 1: mod_base = OTHER; note = 2'-O-methyladenosine-3'- phosphorothioate
  modified_base 2: mod_base = OTHER; note = 2'-fluoroadenosine-3'-phosphorothioate
  modified_base 3: mod_base = OTHER; note = 2'-O-methyluridine-3'-phosphate
  modified_base 4: mod_base = OTHER; note = 2'-O-methyluridine-3'-phosphate
  modified_base 5: mod_base = OTHER; note = 2'-O-methyluridine-3'-phosphate
  modified_base 6: mod_base = OTHER; note = 2'-fluoroadenosine-3'-phosphate
  modified_base 7: mod_base = OTHER; note = 2'-O-methyladenosine-3'-phosphate
  modified_base 8: mod_base = OTHER; note = 2'-fluoroguanosine-3'-phosphate
  modified_base 9: mod_base = OTHER; note = 2'-fluoroadenosine-3'-phosphate
  modified_base 10: mod_base = OTHER; note = 2'-O-methyladenosine-3'-phosphate
  modified_base 11: mod_base = OTHER; note = 2'-O-methylcytidine-3'-phosphate
  modified_base 12: mod_base = OTHER; note = 2'-O-methylcytidine-3'-phosphate
  modified_base 13: mod_base = OTHER; note = 2'-O-methyladenosine-3'-phosphate
  modified_base 14: mod_base = OTHER; note = 2'-fluorocytidine-3'-phosphate
  modified_base 15: mod_base = OTHER; note = 2'-O-methyluridine-3'-phosphate
  modified_base 16: mod_base = OTHER; note = 2'-fluoroguanosine-3'-phosphate
  modified_base 17: mod_base = OTHER; note = 2'-O-methyluridine-3'-phosphate
  modified_base 18: mod_base = OTHER; note = 2'-O-methyluridine-3'-phosphate
  modified_base 19: mod_base = OTHER; note = 2'-O-methyluridine-3'-phosphate
  modified_base 20: mod_base = OTHER; note = 2'-O-methyluridine-3'-phosphate
  modified_base 21: mod_base = OTHER; note = 2'-O-methyladenosine-3'- phosphorothioate
  modified_base 22: mod_base = OTHER; note = 2'-O-methyladenosine-3'- phosphorothioate
  modified_base 23: mod_base = OTHER; note = 2'-O-methyladenosine-3'-phosphate
aatttaagaaccactgttttaaa

SEQ ID NO: 2242 - RNA, 21 nt, synthetic construct
  source 1..21: mol_type = other RNA
  modified_base 1: mod_base = OTHER; note = 2'-O-methyladenosine-3'- phosphorothioate
  modified_base 2: mod_base = OTHER; note = 2'-O-methylcytidine-3'- phosphorothioate
  modified_base 3: mod_base = OTHER; note = 2'-O-methylcytidine-3'-phosphate
  modified_base 4: mod_base = OTHER; note = 2'-O-methyluridine-3'-phosphate
  modified_base 5: mod_base = OTHER; note = 2'-O-methylguanosine-3'-phosphate
  modified_base 6: mod_base = OTHER; note = 2'-O-methyluridine-3'-phosphate
  modified_base 7: mod_base = OTHER; note = 2'-fluoroadenosine-3'-phosphate
  modified_base 8: mod_base = OTHER; note = 2'-O-methyluridine-3'-phosphate
  modified_base 9: mod_base = OTHER; note = 2'-fluorouridine-3'-phosphate
  modified_base 10: mod_base = OTHER; note = 2'-fluorocytidine-3'-phosphate
  modified_base 11: mod_base = OTHER; note = 2'-fluorouridine-3'-phosphate
  modified_base 12: mod_base = OTHER; note = 2'-O-methylguanosine-3'-phosphate
  modified_base 13: mod_base = OTHER; note = 2'-O-methyluridine-3'-phosphate
  modified_base 14: mod_base = OTHER; note = 2'-O-methyluridine-3'-phosphate
  modified_base 15: mod_base = OTHER; note = 2'-O-methyluridine-3'-phosphate
  modified_base 16: mod_base = OTHER; note = 2'-O-methyladenosine-3'-phosphate
  modified_base 17: mod_base = OTHER; note = 2'-O-methylcytidine-3'-phosphate
  modified_base 18: mod_base = OTHER; note = 2'-O-methyladenosine-3'-phosphate
  modified_base 19: mod_base = OTHER; note = 2'-O-methyluridine-3'-phosphate
  modified_base 20: mod_base = OTHER; note = 2'-O-methylguanosine-3'-phosphate
  modified_base 21: mod_base = OTHER; note 2'-O-methyluridine-3'-phosphate-N-[tris(GalNAc-alkyl)-amido decanoyl)]-4-hydroxyprolinol (Hyp-(GalNAc-alkyl)3)
acctgtattctgtttacatgt

SEQ ID NO: 2243 - RNA, 23 nt, synthetic construct
  source 1..23: mol_type = other RNA
  modified_base 1: mod_base = OTHER; note = 2'-O-methyladenosine-3'- phosphorothioate
  modified_base 2: mod_base = OTHER; note = 2'-fluorocytidine-3'-phosphorothioate
  modified_base 3: mod_base = OTHER; note = 2'-O-methyladenosine-3'-phosphate
  modified_base 4: mod_base = OTHER; note = 2'-O-methyluridine-3'-phosphate
  modified_base 5: mod_base = OTHER; note = 2'-O-methylguanosine-3'-phosphate
  modified_base 6: mod_base = OTHER; note = 2'-fluorouridine-3'-phosphate
  modified_base 7: mod_base = OTHER; note = 2'-O-methyladenosine-3'-phosphate
  modified_base 8: mod_base = OTHER; note = 2'-fluoroadenosine-3'-phosphate
  modified_base 9: mod_base = OTHER; note = 2'-fluoroadenosine-3'-phosphate
  modified_base 10: mod_base = OTHER; note = 2'-O-methylcytidine-3'-phosphate
  modified_base 11: mod_base = OTHER; note = 2'-O-methyladenosine-3'-phosphate
  modified_base 12: mod_base = OTHER; note = 2'-O-methylguanosine-3'-phosphate
  modified_base 13: mod_base = OTHER; note = 2'-O-methyladenosine-3'-phosphate
  modified_base 14: mod_base = OTHER; note = 2'-fluoroadenosine-3'-phosphate
  modified_base 15: mod_base = OTHER; note = 2'-O-methyluridine-3'-phosphate
  modified_base 16: mod_base = OTHER; note = 2'-fluoroadenosine-3'-phosphate
  modified_base 17: mod_base = OTHER; note = 2'-O-methylcytidine-3'-phosphate
  modified_base 18: mod_base = OTHER; note = 2'-O-methyladenosine-3'-phosphate
  modified_base 19: mod_base = OTHER; note = 2'-O-methylguanosine-3'-phosphate
  modified_base 20: mod_base = OTHER; note = 2'-O-methylguanosine-3'-phosphate
  modified_base 21: mod_base = OTHER; note = 2'-O-methyluridine-3'-phosphorothioate
  modified_base 22: mod_base = OTHER; note = 2'-O-methyluridine-3'-phosphorothioate
  modified_base 23: mod_base = OTHER; note = 2'-O-methyladenosine-3'-phosphate
acatgtaaacagaatacaggtta

SEQ ID NO: 2244 - RNA, 21 nt, synthetic construct
  source 1..21: mol_type = other RNA
  modified_base 1: mod_base = OTHER; note = 2'-O-methylcytidine-3'- phosphorothioate
  modified_base 2: mod_base = OTHER; note = 2'-O-methylcytidine-3'- phosphorothioate
  modified_base 3: mod_base = OTHER; note = 2'-O-methyluridine-3'-phosphate
  modified_base 4: mod_base = OTHER; note = 2'-O-methylguanosine-3'-phosphate
  modified_base 5: mod_base = OTHER; note = 2'-O-methyluridine-3'-phosphate
  modified_base 6: mod_base = OTHER; note = 2'-O-methyladenosine-3'-phosphate
  modified_base 7: mod_base = OTHER; note = 2'-fluorouridine-3'-phosphate
  modified_base 8: mod_base = OTHER; note = 2'-O-methyluridine-3'-phosphate
  modified_base 9: mod_base = OTHER; note = 2'-fluorocytidine-3'-phosphate
  modified_base 10: mod_base = OTHER; note = 2'-fluorouridine-3'-phosphate
  modified_base 11: mod_base = OTHER; note = 2'-fluoroguanosine-3'-phosphate
  modified_base 12: mod_base = OTHER; note = 2'-O-methyluridine-3'-phosphate
  modified_base 13: mod_base = OTHER; note = 2'-O-methyluridine-3'-phosphate
  modified_base 14: mod_base = OTHER; note = 2'-O-methyluridine-3'-phosphate
  modified_base 15: mod_base = OTHER; note = 2'-O-methyladenosine-3'-phosphate
  modified_base 16: mod_base = OTHER; note = 2'-O-methylcytidine-3'-phosphate
  modified_base 17: mod_base = OTHER; note = 2'-O-methyladenosine-3'-phosphate
  modified_base 18: mod_base = OTHER; note = 2'-O-methyluridine-3'-phosphate
  modified_base 19: mod_base = OTHER; note = 2'-O-methylguanosine-3'-phosphate
  modified_base 20: mod_base = OTHER; note = 2'-O-methyluridine-3'-phosphate
  modified_base 21: mod_base = OTHER; note 2'-O-methylcytidine-3'-phosphate-N-[tris(GalNAc-alkyl)-amid odecanoyl)]-4-hydroxyprolinol (Hyp-(GalNAc-alkyl)3)
cctgtattctgtttacatgtc

SEQ ID NO: 2245 - RNA, 23 nt, synthetic construct
  source 1..23: mol_type = other RNA
  modified_base 1: mod_base = OTHER; note = 2'-O-methylguanosine-3'- phosphorothioate
  modified_base 2: mod_base = OTHER; note = 2'-fluoroadenosine-3'-phosphorothioate
  modified_base 3: mod_base = OTHER; note = 2'-O-methylcytidine-3'-phosphate
  modified_base 4: mod_base = OTHER; note = 2'-O-methyladenosine-3'-phosphate
  modified_base 5: mod_base = OTHER; note = 2'-O-methyluridine-3'-phosphate
  modified_base 6: mod_base = OTHER; note = 2'-fluoroguanosine-3'-phosphate
  modified_base 7: mod_base = OTHER; note = 2'-O-methyluridine-3'-phosphate
  modified_base 8: mod_base = OTHER; note = 2'-fluoroadenosine-3'-phosphate
  modified_base 9: mod_base = OTHER; note = 2'-fluoroadenosine-3'-phosphate
  modified_base 10: mod_base = OTHER; note = 2'-O-methyladenosine-3'-phosphate
  modified_base 11: mod_base = OTHER; note = 2'-O-methylcytidine-3'-phosphate
  modified_base 12: mod_base = OTHER; note = 2'-O-methyladenosine-3'-phosphate
  modified_base 13: mod_base = OTHER; note = 2'-O-methylguanosine-3'-phosphate
  modified_base 14: mod_base = OTHER; note = 2'-fluoroadenosine-3'-phosphate
  modified_base 15: mod_base = OTHER; note = 2'-O-methyladenosine-3'-phosphate
  modified_base 16: mod_base = OTHER; note = 2'-fluorouridine-3'-phosphate
  modified_base 17: mod_base = OTHER; note = 2'-O-methyladenosine-3'-phosphate
  modified_base 18: mod_base = OTHER; note = 2'-O-methylcytidine-3'-phosphate
  modified_base 19: mod_base = OTHER; note = 2'-O-methyladenosine-3'-phosphate
  modified_base 20: mod_base = OTHER; note = 2'-O-methylguanosine-3'-phosphate
  modified_base 21: mod_base = OTHER; note = 2'-O-methylguanosine-3'- phosphorothioate
  modified_base 22: mod_base = OTHER; note = 2'-O-methyluridine-3'-phosphorothioate
  modified_base 23: mod_base = OTHER; note = 2'-O-methyluridine-3'-phosphate
gacatgtaaacagaatacaggtt

SEQ ID NO: 2246 - RNA, 21 nt, synthetic construct
  source 1..21: mol_type = other RNA
  modified_base 1: mod_base = OTHER; note = 2'-O-methyladenosine-3'- phosphorothioate
  modified_base 2: mod_base = OTHER; note = 2'-O-methyluridine-3'-phosphorothioate
  modified_base 3: mod_base = OTHER; note = 2'-O-methyluridine-3'-phosphate
  modified_base 4: mod_base = OTHER; note = 2'-O-methyladenosine-3'-phosphate
  modified_base 5: mod_base = OTHER; note = 2'-O-methyladenosine-3'-phosphate
  modified_base 6: mod_base = OTHER; note = 2'-O-methylcytidine-3'-phosphate
  modified_base 7: mod_base = OTHER; note = 2'-fluorocytidine-3'-phosphate
  modified_base 8: mod_base = OTHER; note = 2'-O-methyluridine-3'-phosphate
  modified_base 9: mod_base = OTHER; note = 2'-fluoroguanosine-3'-phosphate
  modified_base 10: mod_base = OTHER; note = 2'-fluorouridine-3'-phosphate
  modified_base 11: mod_base = OTHER; note = 2'-fluoroadenosine-3'-phosphate
  modified_base 12: mod_base = OTHER; note = 2'-O-methyluridine-3'-phosphate
  modified_base 13: mod_base = OTHER; note = 2'-O-methyluridine-3'-phosphate
  modified_base 14: mod_base = OTHER; note = 2'-O-methylcytidine-3'-phosphate
  modified_base 15: mod_base = OTHER; note = 2'-O-methyluridine-3'-phosphate
  modified_base 16: mod_base = OTHER; note = 2'-O-methylguanosine-3'-phosphate
  modified_base 17: mod_base = OTHER; note = 2'-O-methyluridine-3'-phosphate
  modified_base 18: mod_base = OTHER; note = 2'-O-methyluridine-3'-phosphate
  modified_base 19: mod_base = OTHER; note = 2'-O-methyluridine-3'-phosphate
  modified_base 20: mod_base = OTHER; note = 2'-O-methyladenosine-3'-phosphate
  modified_base 21: mod_base = OTHER; note 2'-O-methylcytidine-3'-phosphate-N-[tris(GalNAc-alkyl)-amid odecanoyl)]-4-hydroxyprolinol (Hyp-(GalNAc-alkyl)3)
attaacctgtattctgtttac

SEQ ID NO: 2247 - RNA, 23 nt, synthetic construct
  source 1..23: mol_type = other RNA
  modified_base 1: mod_base = OTHER; note = 2'-O-methylguanosine-3'- phosphorothioate
  modified_base 2: mod_base = OTHER; note = 2'-fluorouridine -3'-phosphorothioate
  modified_base 3: mod_base = OTHER; note = 2'-O-methyladenosine-3'-phosphate
  modified_base 4: mod_base = OTHER; note = 2'-O-methyladenosine-3'-phosphate
  modified_base 5: mod_base = OTHER; note = 2'-O-methyladenosine-3'-phosphate
  modified_base 6: mod_base = OTHER; note = 2'-fluorocytidine-3'-phosphate
  modified_base 7: mod_base = OTHER; note = 2'-O-methyladenosine-3'-phosphate
  modified_base 8: mod_base = OTHER; note = 2'-fluoroguanosine-3'-phosphate
  modified_base 9: mod_base = OTHER; note = 2'-fluoroadenosine-3'-phosphate
  modified_base 10: mod_base = OTHER; note = 2'-O-methyladenosine-3'-phosphate
  modified_base 11: mod_base = OTHER; note = 2'-O-methyluridine-3'-phosphate
  modified_base 12: mod_base = OTHER; note = 2'-O-methyladenosine-3'-phosphate
  modified_base 13: mod_base = OTHER; note = 2'-O-methylcytidine-3'-phosphate
  modified_base 14: mod_base = OTHER; note = 2'-fluoroadenosine-3'-phosphate
  modified_base 15: mod_base = OTHER; note = 2'-O-methylguanosine-3'-phosphate
  modified_base 16: mod_base = OTHER; note = 2'-fluoroguanosine-3'-phosphate
  modified_base 17: mod_base = OTHER; note = 2'-O-methyluridine-3'-phosphate
  modified_base 18: mod_base = OTHER; note = 2'-O-methyluridine-3'-phosphate
  modified_base 19: mod_base = OTHER; note = 2'-O-methyladenosine-3'-phosphate
  modified_base 20: mod_base = OTHER; note = 2'-O-methyladenosine-3'-phosphate
  modified_base 21: mod_base = OTHER; note = 2'-O-methyluridine-3'-phosphorothioate
  modified_base 22: mod_base = OTHER; note = 2'-O-methyladenosine-3'- phosphorothioate
  modified_base 23: mod_base = OTHER; note = 2'-O-methyladenosine-3'-phosphate
gtaaacagaatacaggttaataa

SEQ ID NO: 2248 - RNA, 21 nt, synthetic construct
  source 1..21: mol_type = other RNA
  modified_base 1: mod_base = OTHER; note = 2'-O-methyluridine-3'-phosphorothioate
  modified_base 2: mod_base = OTHER; note = 2'-O-methyladenosine-3'- phosphorothioate
  modified_base 3: mod_base = OTHER; note = 2'-O-methyluridine-3'-phosphate
  modified_base 4: mod_base = OTHER; note = 2'-O-methyluridine-3'-phosphate
  modified_base 5: mod_base = OTHER; note = 2'-O-methyladenosine-3'-phosphate
  modified_base 6: mod_base = OTHER; note = 2'-O-methyladenosine-3'-phosphate
  modified_base 7: mod_base = OTHER; note = 2'-fluorocytidine-3'-phosphate
  modified_base 8: mod_base = OTHER; note = 2'-O-methylcytidine-3'-phosphate
  modified_base 9: mod_base = OTHER; note = 2'-fluorouridine-3'-phosphate
  modified_base 10: mod_base = OTHER; note = 2'-fluoroguanosine-3'-phosphate
  modified_base 11: mod_base = OTHER; note = 2'-fluorouridine-3'-phosphate
  modified_base 12: mod_base = OTHER; note = 2'-O-methyladenosine-3'-phosphate
  modified_base 13: mod_base = OTHER; note = 2'-O-methyluridine-3'-phosphate
  modified_base 14: mod_base = OTHER; note = 2'-O-methyluridine-3'-phosphate
  modified_base 15: mod_base = OTHER; note = 2'-O-methylcytidine-3'-phosphate
  modified_base 16: mod_base = OTHER; note = 2'-O-methyluridine-3'-phosphate
  modified_base 17: mod_base = OTHER; note = 2'-O-methylguanosine-3'-phosphate
  modified_base 18: mod_base = OTHER; note = 2'-O-methyluridine-3'-phosphate
  modified_base 19: mod_base = OTHER; note = 2'-O-methyluridine-3'-phosphate
  modified_base 20: mod_base = OTHER; note = 2'-O-methyluridine-3'-phosphate
  modified_base 21: mod_base = OTHER; note 2'-O-methyladenosine-3'-phosphate-N-[tris(GalNAc-alkyl)-ami dodecanoyl)]-4-hydroxyprolinol (Hyp-(GalNAc-alkyl)3)
tattaacctgtattctgttta

SEQ ID NO: 2249 - RNA, 23 nt, synthetic construct
  source 1..23: mol_type = other RNA
  modified_base 1: mod_base = OTHER; note = 2'-O-methyluridine-3'-phosphorothioate
  modified_base 2: mod_base = OTHER; note = 2'-fluoroadenosine-3'-phosphorothioate
  modified_base 3: mod_base = OTHER; note = 2'-O-methyladenosine-3'-phosphate
  modified_base 4: mod_base = OTHER; note = 2'-O-methyladenosine-3'-phosphate
  modified_base 5: mod_base = OTHER; note = 2'-O-methylcytidine-3'-phosphate
  modified_base 6: mod_base = OTHER; note = 2'-fluoroadenosine-3'-phosphate
  modified_base 7: mod_base = OTHER; note = 2'-O-methylguanosine-3'-phosphate
  modified_base 8: mod_base = OTHER; note = 2'-fluoroadenosine-3'-phosphate
  modified_base 9: mod_base = OTHER; note = 2'-fluoroadenosine-3'-phosphate
  modified_base 10: mod_base = OTHER; note = 2'-O-methyluridine-3'-phosphate
  modified_base 11: mod_base = OTHER; note = 2'-O-methyladenosine-3'-phosphate
  modified_base 12: mod_base = OTHER; note = 2'-O-methylcytidine-3'-phosphate
  modified_base 13: mod_base = OTHER; note = 2'-O-methyladenosine-3'-phosphate
  modified_base 14: mod_base = OTHER; note = 2'-fluoroguanosine-3'-phosphate
  modified_base 15: mod_base = OTHER; note = 2'-O-methylguanosine-3'-phosphate
  modified_base 16: mod_base = OTHER; note = 2'-fluorouridine-3'-phosphate
  modified_base 17: mod_base = OTHER; note = 2'-O-methyluridine-3'-phosphate
  modified_base 18: mod_base = OTHER; note = 2'-O-methyladenosine-3'-phosphate
  modified_base 19: mod_base = OTHER; note = 2'-O-methyladenosine-3'-phosphate
  modified_base 20: mod_base = OTHER; note = 2'-O-methyluridine-3'-phosphate
  modified_base 21: mod_base = OTHER; note = 2'-O-methyladenosine-3'- phosphorothioate
  modified_base 22: mod_base = OTHER; note = 2'-O-methyladenosine-3'- phosphorothioate
  modified_base 23: mod_base = OTHER; note = 2'-O-methyladenosine-3'-phosphate
taaacagaatacaggttaataaa

SEQ ID NO: 2250 - RNA, 21 nt, synthetic construct
  source 1..21: mol_type = other RNA
  modified_base 1: mod_base = OTHER; note = 2'-O-methyladenosine-3'- phosphorothioate
  modified_base 2: mod_base = OTHER; note = 2'-O-methyladenosine-3'- phosphorothioate
  modified_base 3: mod_base = OTHER; note = 2'-O-methylguanosine-3'-phosphate
  modified_base 4: mod_base = OTHER; note = 2'-O-methyladenosine-3'-phosphate
  modified_base 5: mod_base = OTHER; note = 2'-O-methyladenosine-3'-phosphate
  modified_base 6: mod_base = OTHER; note = 2'-O-methyladenosine-3'-phosphate
  modified_base 7: mod_base = OTHER; note = 2'-fluorocytidine-3'-phosphate
  modified_base 8: mod_base = OTHER; note = 2'-O-methyluridine-3'-phosphate
  modified_base 9: mod_base = OTHER; note = 2'-fluorouridine-3'-phosphate
  modified_base 10: mod_base = OTHER; note = 2'-fluorouridine-3'-phosphate
  modified_base 11: mod_base = OTHER; note = 2'-fluoroguanosine-3'-phosphate
  modified_base 12: mod_base = OTHER; note = 2'-O-methylguanosine-3'-phosphate
  modified_base 13: mod_base = OTHER; note = 2'-O-methylcytidine-3'-phosphate
  modified_base 14: mod_base = OTHER; note = 2'-O-methyluridine-3'-phosphate
  modified_base 15: mod_base = OTHER; note = 2'-O-methylguanosine-3'-phosphate
  modified_base 16: mod_base = OTHER; note = 2'-O-methyladenosine-3'-phosphate
  modified_base 17: mod_base = OTHER; note = 2'-O-methyluridine-3'-phosphate
  modified_base 18: mod_base = OTHER; note = 2'-O-methyladenosine-3'-phosphate
  modified_base 19: mod_base = OTHER; note = 2'-O-methyladenosine-3'-phosphate
  modified_base 20: mod_base = OTHER; note = 2'-O-methyluridine-3'-phosphate
  modified_base 21: mod_base = OTHER; note 2'-O-methyladenosine-3'-phosphate-N-[tris(GalNAc-alkyl)-ami dodecanoyl)]-4-hydroxyprolinol (Hyp-(GalNAc-alkyl)3)
aagaaactttggctgataata

SEQ ID NO: 2251 - RNA, 23 nt, synthetic construct
  source 1..23: mol_type = other RNA
  modified_base 1: mod_base = OTHER; note = 2'-O-methyluridine-3'-phosphorothioate
  modified_base 2: mod_base = OTHER; note = 2'-fluoroadenosine-3'-phosphorothioate
  modified_base 3: mod_base = OTHER; note = 2'-O-methyluridine-3'-phosphate
  modified_base 4: mod_base = OTHER; note = 2'-O-methyluridine-3'-phosphate
  modified_base 5: mod_base = OTHER; note = 2'-O-methyladenosine-3'-phosphate
  modified_base 6: mod_base = OTHER; note = 2'-fluorouridine-3'-phosphate
  modified_base 7: mod_base = OTHER; note = 2'-O-methylcytidine-3'-phosphate
  modified_base 8: mod_base = OTHER; note = 2'-fluoroadenosine-3'-phosphate
  modified_base 9: mod_base = OTHER; note = 2'-fluoroguanosine-3'-phosphate
  modified_base 10: mod_base = OTHER; note = 2'-O-methylcytidine-3'-phosphate
  modified_base 11: mod_base = OTHER; note = 2'-O-methylcytidine-3'-phosphate
  modified_base 12: mod_base = OTHER; note = 2'-O-methyladenosine-3'-phosphate
  modified_base 13: mod_base = OTHER; note = 2'-O-methyladenosine-3'-phosphate
  modified_base 14: mod_base = OTHER; note = 2'-fluoroadenosine-3'-phosphate
  modified_base 15: mod_base = OTHER; note = 2'-O-methylguanosine-3'-phosphate
  modified_base 16: mod_base = OTHER; note = 2'-fluorouridine-3'-phosphate
  modified_base 17: mod_base = OTHER; note = 2'-O-methyluridine-3'-phosphate
  modified_base 18: mod_base = OTHER; note = 2'-O-methyluridine-3'-phosphate
  modified_base 19: mod_base = OTHER; note = 2'-O-methylcytidine-3'-phosphate
  modified_base 20: mod_base = OTHER; note = 2'-O-methyluridine-3'-phosphate
  modified_base 21: mod_base = OTHER; note = 2'-O-methyluridine-3'-phosphorothioate
  modified_base 22: mod_base = OTHER; note = 2'-O-methylcytidine-3'- phosphorothioate
  modified_base 23: mod_base = OTHER; note = 2'-O-methyladenosine-3'-phosphate
tattatcagccaaagtttcttca

SEQ ID NO: 2252 - RNA, 21 nt, synthetic construct
  source 1..21: mol_type = other RNA
  modified_base 1: mod_base = OTHER; note = 2'-O-methyladenosine-3'- phosphorothioate
  modified_base 2: mod_base = OTHER; note = 2'-O-methylguanosine-3'- phosphorothioate
  modified_base 3: mod_base = OTHER; note = 2'-O-methyladenosine-3'-phosphate
  modified_base 4: mod_base = OTHER; note = 2'-O-methyladenosine-3'-phosphate
  modified_base 5: mod_base = OTHER; note = 2'-O-methyladenosine-3'-phosphate
  modified_base 6: mod_base = OTHER; note = 2'-O-methylcytidine-3'-phosphate
  modified_base 7: mod_base = OTHER; note = 2'-fluorouridine-3'-phosphate
  modified_base 8: mod_base = OTHER; note = 2'-O-methyluridine-3'-phosphate
  modified_base 9: mod_base = OTHER; note = 2'-fluorouridine-3'-phosphate
  modified_base 10: mod_base = OTHER; note = 2'-fluoroguanosine-3'-phosphate
  modified_base 11: mod_base = OTHER; note = 2'-fluoroguanosine-3'-phosphate
  modified_base 12: mod_base = OTHER; note = 2'-O-methylcytidine-3'-phosphate
  modified_base 13: mod_base = OTHER; note = 2'-O-methyluridine-3'-phosphate
  modified_base 14: mod_base = OTHER; note = 2'-O-methylguanosine-3'-phosphate
  modified_base 15: mod_base = OTHER; note = 2'-O-methyladenosine-3'-phosphate
  modified_base 16: mod_base = OTHER; note = 2'-O-methyluridine-3'-phosphate
  modified_base 17: mod_base = OTHER; note = 2'-O-methyladenosine-3'-phosphate
  modified_base 18: mod_base = OTHER; note = 2'-O-methyladenosine-3'-phosphate
  modified_base 19: mod_base = OTHER; note = 2'-O-methyluridine-3'-phosphate
  modified_base 20: mod_base = OTHER; note = 2'-O-methyladenosine-3'-phosphate
  modified_base 21: mod_base = OTHER; note 2'-O-methyluridine-3'-phosphate-N-[tris(GalNAc-alkyl)-amido decanoyl)]-4-hydroxyprolinol (Hyp-(GalNAc-alkyl)3)
agaaactttggctgataatat

SEQ ID NO: 2253 - RNA, 23 nt, synthetic construct
  source 1..23: mol_type = other RNA
  modified_base 1: mod_base = OTHER; note = 2'-O-methyladenosine-3'- phosphorothioate
  modified_base 2: mod_base = OTHER; note = 2'-fluorouridine -3'-phosphorothioate
  modified_base 3: mod_base = OTHER; note = 2'-O-methyladenosine-3'-phosphate
  modified_base 4: mod_base = OTHER; note = 2'-O-methyluridine-3'-phosphate
  modified_base 5: mod_base = OTHER; note = 2'-O-methyluridine-3'-phosphate
  modified_base 6: mod_base = OTHER; note = 2'-fluoroadenosine-3'-phosphate
  modified_base 7: mod_base = OTHER; note = 2'-O-methyluridine-3'-phosphate
  modified_base 8: mod_base = OTHER; note = 2'-fluorocytidine-3'-phosphate
  modified_base 9: mod_base = OTHER; note = 2'-fluoroadenosine-3'-phosphate
  modified_base 10: mod_base = OTHER; note = 2'-O-methylguanosine-3'-phosphate
  modified_base 11: mod_base = OTHER; note = 2'-O-methylcytidine-3'-phosphate
  modified_base 12: mod_base = OTHER; note = 2'-O-methylcytidine-3'-phosphate
  modified_base 13: mod_base = OTHER; note = 2'-O-methyladenosine-3'-phosphate
  modified_base 14: mod_base = OTHER; note = 2'-fluoroadenosine-3'-phosphate
  modified_base 15: mod_base = OTHER; note = 2'-O-methyladenosine-3'-phosphate
  modified_base 16: mod_base = OTHER; note = 2'-fluoroguanosine-3'-phosphate
  modified_base 17: mod_base = OTHER; note = 2'-O-methyluridine-3'-phosphate
  modified_base 18: mod_base = OTHER; note = 2'-O-methyluridine-3'-phosphate
  modified_base 19: mod_base = OTHER; note = 2'-O-methyluridine-3'-phosphate
  modified_base 20: mod_base = OTHER; note = 2'-O-methylcytidine-3'-phosphate
  modified_base 21: mod_base = OTHER; note = 2'-O-methyluridine-3'-phosphorothioate
  modified_base 22: mod_base = OTHER; note = 2'-O-methyluridine-3'-phosphorothioate
  modified_base 23: mod_base = OTHER; note = 2'-O-methylcytidine-3'-phosphate
atattatcagccaaagtttcttc

SEQ ID NO: 2254 - RNA, 21 nt, synthetic construct
  source 1..21: mol_type = other RNA
  modified_base 1: mod_base = OTHER; note = 2'-O-methylguanosine-3'- phosphorothioate
  modified_base 2: mod_base = OTHER; note = 2'-O-methyladenosine-3'- phosphorothioate
  modified_base 3: mod_base = OTHER; note = 2'-O-methyluridine-3'-phosphate
  modified_base 4: mod_base = OTHER; note = 2'-O-methylguanosine-3'-phosphate
  modified_base 5: mod_base = OTHER; note = 2'-O-methyladenosine-3'-phosphate
  modified_base 6: mod_base = OTHER; note = 2'-O-methyladenosine-3'-phosphate
  modified_base 7: mod_base = OTHER; note = 2'-fluoroguanosine-3'-phosphate
  modified_base 8: mod_base = OTHER; note = 2'-O-methyladenosine-3'-phosphate
  modified_base 9: mod_base = OTHER; note = 2'-fluoroadenosine-3'-phosphate
  modified_base 10: mod_base = OTHER; note = 2'-fluoroadenosine-3'-phosphate
  modified_base 11: mod_base = OTHER; note = 2'-fluorocytidine-3'-phosphate
  modified_base 12: mod_base = OTHER; note = 2'-O-methyluridine-3'-phosphate
  modified_base 13: mod_base = OTHER; note = 2'-O-methyluridine-3'-phosphate
  modified_base 14: mod_base = OTHER; note = 2'-O-methyluridine-3'-phosphate
  modified_base 15: mod_base = OTHER; note = 2'-O-methylguanosine-3'-phosphate
  modified_base 16: mod_base = OTHER; note = 2'-O-methylguanosine-3'-phosphate
  modified_base 17: mod_base = OTHER; note = 2'-O-methylcytidine-3'-phosphate
  modified_base 18: mod_base = OTHER; note = 2'-O-methyluridine-3'-phosphate
  modified_base 19: mod_base = OTHER; note = 2'-O-methylguanosine-3'-phosphate
  modified_base 20: mod_base = OTHER; note = 2'-O-methyladenosine-3'-phosphate
  modified_base 21: mod_base = OTHER; note 2'-O-methyluridine-3'-phosphate-N-[tris(GalNAc-alkyl)-amido decanoyl)]-4-hydroxyprolinol (Hyp-(GalNAc-alkyl)3)
gatgaagaaactttggctgat

SEQ ID NO: 2255 - RNA, 23 nt, synthetic construct
  source 1..23: mol_type = other RNA
  modified_base 1: mod_base = OTHER; note = 2'-O-methyladenosine-3'- phosphorothioate
  modified_base 2: mod_base = OTHER; note = 2'-fluorouridine -3'-phosphorothioate
  modified_base 3: mod_base = OTHER; note = 2'-O-methylcytidine-3'-phosphate
  modified_base 4: mod_base = OTHER; note = 2'-O-methyladenosine-3'-phosphate
  modified_base 5: mod_base = OTHER; note = 2'-O-methylguanosine-3'-phosphate
  modified_base 6: mod_base = OTHER; note = 2'-fluorocytidine-3'-phosphate
  modified_base 7: mod_base = OTHER; note = 2'-O-methylcytidine-3'-phosphate
  modified_base 8: mod_base = OTHER; note = 2'-fluoroadenosine-3'-phosphate
  modified_base 9: mod_base = OTHER; note = 2'-fluoroadenosine-3'-phosphate
  modified_base 10: mod_base = OTHER; note = 2'-O-methyladenosine-3'-phosphate
  modified_base 11: mod_base = OTHER; note = 2'-O-methylguanosine-3'-phosphate
  modified_base 12: mod_base = OTHER; note = 2'-O-methyluridine-3'-phosphate
  modified_base 13: mod_base = OTHER; note = 2'-O-methyluridine-3'-phosphate
  modified_base 14: mod_base = OTHER; note = 2'-fluorouridine-3'-phosphate
  modified_base 15: mod_base = OTHER; note = 2'-O-methylcytidine-3'-phosphate
  modified_base 16: mod_base = OTHER; note = 2'-fluorouridine-3'-phosphate
  modified_base 17: mod_base = OTHER; note = 2'-O-methyluridine-3'-phosphate
  modified_base 18: mod_base = OTHER; note = 2'-O-methylcytidine-3'-phosphate
  modified_base 19: mod_base = OTHER; note = 2'-O-methyladenosine-3'-phosphate
  modified_base 20: mod_base = OTHER; note = 2'-O-methyluridine-3'-phosphate
  modified_base 21: mod_base = OTHER; note = 2'-O-methylcytidine-3'- phosphorothioate
  modified_base 22: mod_base = OTHER; note = 2'-O-methyladenosine-3'- phosphorothioate
  modified_base 23: mod_base = OTHER; note = 2'-O-methyluridine-3'-phosphate
atcagccaaagtttcttcatcat

SEQ ID NO: 2256 - RNA, 21 nt, synthetic construct
  source 1..21: mol_type = other RNA
  modified_base 1: mod_base = OTHER; note = 2'-O-methyluridine-3'-phosphorothioate
  modified_base 2: mod_base = OTHER; note = 2'-O-methylguanosine-3'- phosphorothioate
  modified_base 3: mod_base = OTHER; note = 2'-O-methyladenosine-3'-phosphate
  modified_base 4: mod_base = OTHER; note = 2'-O-methyluridine-3'-phosphate
  modified_base 5: mod_base = OTHER; note = 2'-O-methylguanosine-3'-phosphate
  modified_base 6: mod_base = OTHER; note = 2'-O-methyladenosine-3'-phosphate
  modified_base 7: mod_base = OTHER; note = 2'-fluoroadenosine-3'-phosphate
  modified_base 8: mod_base = OTHER; note = 2'-O-methylguanosine-3'-phosphate
  modified_base 9: mod_base = OTHER; note = 2'-fluoroadenosine-3'-phosphate
  modified_base 10: mod_base = OTHER; note = 2'-fluoroadenosine-3'-phosphate
  modified_base 11: mod_base = OTHER; note = 2'-fluoroadenosine-3'-phosphate
  modified_base 12: mod_base = OTHER; note = 2'-O-methylcytidine-3'-phosphate
  modified_base 13: mod_base = OTHER; note = 2'-O-methyluridine-3'-phosphate
  modified_base 14: mod_base = OTHER; note = 2'-O-methyluridine-3'-phosphate
  modified_base 15: mod_base = OTHER; note = 2'-O-methyluridine-3'-phosphate
  modified_base 16: mod_base = OTHER; note = 2'-O-methylguanosine-3'-phosphate
  modified_base 17: mod_base = OTHER; note = 2'-O-methylguanosine-3'-phosphate
  modified_base 18: mod_base = OTHER; note = 2'-O-methylcytidine-3'-phosphate
  modified_base 19: mod_base = OTHER; note = 2'-O-methyluridine-3'-phosphate
  modified_base 20: mod_base = OTHER; note = 2'-O-methylguanosine-3'-phosphate
  modified_base 21: mod_base = OTHER; note 2'-O-methyladenosine-3'-phosphate-N-[tris(GalNAc-alkyl)-ami dodecanoyl)]-4-hydroxyprolinol (Hyp-(GalNAc-alkyl)3)
tgatgaagaaactttggctga

SEQ ID NO: 2257 - RNA, 23 nt, synthetic construct
  source 1..23: mol_type = other RNA
  modified_base 1: mod_base = OTHER; note = 2'-O-methyluridine-3'-phosphorothioate
  modified_base 2: mod_base = OTHER; note = 2'-fluorocytidine-3'-phosphorothioate
  modified_base 3: mod_base = OTHER; note = 2'-O-methyladenosine-3'-phosphate
  modified_base 4: mod_base = OTHER; note = 2'-O-methylguanosine-3'-phosphate
  modified_base 5: mod_base = OTHER; note = 2'-O-methylcytidine-3'-phosphate
  modified_base 6: mod_base = OTHER; note = 2'-fluorocytidine-3'-phosphate
  modified_base 7: mod_base = OTHER; note = 2'-O-methyladenosine-3'-phosphate
  modified_base 8: mod_base = OTHER; note = 2'-fluoroadenosine-3'-phosphate
  modified_base 9: mod_base = OTHER; note = 2'-fluoroadenosine-3'-phosphate
  modified_base 10: mod_base = OTHER; note = 2'-O-methylguanosine-3'-phosphate
  modified_base 11: mod_base = OTHER; note = 2'-O-methyluridine-3'-phosphate
  modified_base 12: mod_base = OTHER; note = 2'-O-methyluridine-3'-phosphate
  modified_base 13: mod_base = OTHER; note = 2'-O-methyluridine-3'-phosphate
  modified_base 14: mod_base = OTHER; note = 2'-fluorocytidine-3'-phosphate
  modified_base 15: mod_base = OTHER; note = 2'-O-methyluridine-3'-phosphate
  modified_base 16: mod_base = OTHER; note = 2'-fluorouridine-3'-phosphate
  modified_base 17: mod_base = OTHER; note = 2'-O-methylcytidine-3'-phosphate
  modified_base 18: mod_base = OTHER; note = 2'-O-methyladenosine-3'-phosphate
  modified_base 19: mod_base = OTHER; note = 2'-O-methyluridine-3'-phosphate
  modified_base 20: mod_base = OTHER; note = 2'-O-methylcytidine-3'-phosphate
  modified_base 21: mod_base = OTHER; note = 2'-O-methyladenosine-3'- phosphorothioate
  modified_base 22: mod_base = OTHER; note = 2'-O-methyluridine-3'-phosphorothioate
  modified_base 23: mod_base = OTHER; note = 2'-O-methyluridine-3'-phosphate
tcagccaaagtttcttcatcatt

SEQ ID NO: 2258 - RNA, 21 nt, synthetic construct
  source 1..21: mol_type = other RNA
  modified_base 1: mod_base = OTHER; note = 2'-O-methylguanosine-3'- phosphorothioate
  modified_base 2: mod_base = OTHER; note = 2'-O-methyladenosine-3'- phosphorothioate
  modified_base 3: mod_base = OTHER; note = 2'-O-methyladenosine-3'-phosphate
  modified_base 4: mod_base = OTHER; note = 2'-O-methyladenosine-3'-phosphate
  modified_base 5: mod_base = OTHER; note = 2'-O-methylguanosine-3'-phosphate
  modified_base 6: mod_base = OTHER; note = 2'-O-methylguanosine-3'-phosphate
  modified_base 7: mod_base = OTHER; note = 2'-fluorouridine-3'-phosphate
  modified_base 8: mod_base = OTHER; note = 2'-O-methylguanosine-3'-phosphate
  modified_base 9: mod_base = OTHER; note = 2'-fluorouridine-3'-phosphate
  modified_base 10: mod_base = OTHER; note = 2'-fluorouridine-3'-phosphate
  modified_base 11: mod_base = OTHER; note = 2'-fluorocytidine-3'-phosphate
  modified_base 12: mod_base = OTHER; note = 2'-O-methyladenosine-3'-phosphate
  modified_base 13: mod_base = OTHER; note = 2'-O-methyladenosine-3'-phosphate
  modified_base 14: mod_base = OTHER; note = 2'-O-methylguanosine-3'-phosphate
  modified_base 15: mod_base = OTHER; note = 2'-O-methyladenosine-3'-phosphate
  modified_base 16: mod_base = OTHER; note = 2'-O-methyluridine-3'-phosphate
  modified_base 17: mod_base = OTHER; note = 2'-O-methylguanosine-3'-phosphate
  modified_base 18: mod_base = OTHER; note = 2'-O-methyluridine-3'-phosphate
  modified_base 19: mod_base = OTHER; note = 2'-O-methylcytidine-3'-phosphate
  modified_base 20: mod_base = OTHER; note = 2'-O-methylcytidine-3'-phosphate
  modified_base 21: mod_base = OTHER; note 2'-O-methyluridine-3'-phosphate-N-[tris(GalNAc-alkyl)-amido decanoyl)]-4-hydroxyprolinol (Hyp-(GalNAc-alkyl)3)
gaaaggtgttcaagatgtcct

SEQ ID NO: 2259 - RNA, 23 nt, synthetic construct
  source 1..23: mol_type = other RNA
  modified_base 1: mod_base = OTHER; note = 2'-O-methyladenosine-3'- phosphorothioate
  modified_base 2: mod_base = OTHER; note = 2'-fluoroguanosine-3'-phosphorothioate
  modified_base 3: mod_base = OTHER; note = 2'-O-methylguanosine-3'-phosphate
  modified_base 4: mod_base = OTHER; note = 2'-O-methyladenosine-3'-phosphate
  modified_base 5: mod_base = OTHER; note = 2'-O-methylcytidine-3'-phosphate
  modified_base 6: mod_base = OTHER; note = 2'-fluoroadenosine-3'-phosphate
  modified_base 7: mod_base = OTHER; note = 2'-O-methyluridine-3'-phosphate
  modified_base 8: mod_base = OTHER; note = 2'-fluorocytidine-3'-phosphate
  modified_base 9: mod_base = OTHER; note = 2'-fluorouridine-3'-phosphate
  modified_base 10: mod_base = OTHER; note = 2'-O-methyluridine-3'-phosphate
  modified_base 11: mod_base = OTHER; note = 2'-O-methylguanosine-3'-phosphate
  modified_base 12: mod_base = OTHER; note = 2'-O-methyladenosine-3'-phosphate
  modified_base 13: mod_base = OTHER; note = 2'-O-methyladenosine-3'-phosphate
  modified_base 14: mod_base = OTHER; note = 2'-fluorocytidine-3'-phosphate
  modified_base 15: mod_base = OTHER; note = 2'-O-methyladenosine-3'-phosphate
  modified_base 16: mod_base = OTHER; note = 2'-fluorocytidine-3'-phosphate
  modified_base 17: mod_base = OTHER; note = 2'-O-methylcytidine-3'-phosphate
  modified_base 18: mod_base = OTHER; note = 2'-O-methyluridine-3'-phosphate
  modified_base 19: mod_base = OTHER; note = 2'-O-methyluridine-3'-phosphate
  modified_base 20: mod_base = OTHER; note = 2'-O-methyluridine-3'-phosphate
  modified_base 21: mod_base = OTHER; note = 2'-O-methylcytidine-3'- phosphorothioate
  modified_base 22: mod_base = OTHER; note = 2'-O-methyluridine-3'-phosphorothioate
  modified_base 23: mod_base = OTHER; note = 2'-O-methylcytidine-3'-phosphate
aggacatcttgaacacctttctc

SEQ ID NO: 2260 - RNA, 21 nt, synthetic construct
  source 1..21: mol_type = other RNA
  modified_base 1: mod_base = OTHER; note = 2'-O-methyladenosine-3'- phosphorothioate
  modified_base 2: mod_base = OTHER; note = 2'-O-methyladenosine-3'- phosphorothioate
  modified_base 3: mod_base = OTHER; note = 2'-O-methyladenosine-3'-phosphate
  modified_base 4: mod_base = OTHER; note = 2'-O-methylguanosine-3'-phosphate
  modified_base 5: mod_base = OTHER; note = 2'-O-methylguanosine-3'-phosphate
  modified_base 6: mod_base = OTHER; note = 2'-O-methyluridine-3'-phosphate
  modified_base 7: mod_base = OTHER; note = 2'-fluoroguanosine-3'-phosphate
  modified_base 8: mod_base = OTHER; note = 2'-O-methyluridine-3'-phosphate
  modified_base 9: mod_base = OTHER; note = 2'-fluorouridine-3'-phosphate
  modified_base 10: mod_base = OTHER; note = 2'-fluorocytidine-3'-phosphate
  modified_base 11: mod_base = OTHER; note = 2'-fluoroadenosine-3'-phosphate
  modified_base 12: mod_base = OTHER; note = 2'-O-methyladenosine-3'-phosphate
  modified_base 13: mod_base = OTHER; note = 2'-O-methylguanosine-3'-phosphate
  modified_base 14: mod_base = OTHER; note = 2'-O-methyladenosine-3'-phosphate
  modified_base 15: mod_base = OTHER; note = 2'-O-methyluridine-3'-phosphate
  modified_base 16: mod_base = OTHER; note = 2'-O-methylguanosine-3'-phosphate
  modified_base 17: mod_base = OTHER; note = 2'-O-methyluridine-3'-phosphate
  modified_base 18: mod_base = OTHER; note = 2'-O-methylcytidine-3'-phosphate
  modified_base 19: mod_base = OTHER; note = 2'-O-methylcytidine-3'-phosphate
  modified_base 20: mod_base = OTHER; note = 2'-O-methyluridine-3'-phosphate
  modified_base 21: mod_base = OTHER; note 2'-O-methylcytidine-3'-phosphate-N-[tris(GalNAc-alkyl)-amid odecanoyl)]-4-hydroxyprolinol (Hyp-(GalNAc-alkyl)3)
aaaggtgttcaagatgtcctc

SEQ ID NO: 2261 - RNA, 23 nt, synthetic construct
  source 1..23: mol_type = other RNA
  modified_base 1: mod_base = OTHER; note = 2'-O-methylguanosine-3'- phosphorothioate
  modified_base 2: mod_base = OTHER; note = 2'-fluoroadenosine-3'-phosphorothioate
  modified_base 3: mod_base = OTHER; note = 2'-O-methylguanosine-3'-phosphate
  modified_base 4: mod_base = OTHER; note = 2'-O-methylguanosine-3'-phosphate
  modified_base 5: mod_base = OTHER; note = 2'-O-methyladenosine-3'-phosphate
  modified_base 6: mod_base = OTHER; note = 2'-fluorocytidine-3'-phosphate
  modified_base 7: mod_base = OTHER; note = 2'-O-methyladenosine-3'-phosphate
  modified_base 8: mod_base = OTHER; note = 2'-fluorouridine-3'-phosphate
  modified_base 9: mod_base = OTHER; note = 2'-fluorocytidine-3'-phosphate
  modified_base 10: mod_base = OTHER; note = 2'-O-methyluridine-3'-phosphate
  modified_base 11: mod_base = OTHER; note = 2'-O-methyluridine-3'-phosphate
  modified_base 12: mod_base = OTHER; note = 2'-O-methylguanosine-3'-phosphate
  modified_base 13: mod_base = OTHER; note = 2'-O-methyladenosine-3'-phosphate
  modified_base 14: mod_base = OTHER; note = 2'-fluoroadenosine-3'-phosphate
  modified_base 15: mod_base = OTHER; note = 2'-O-methylcytidine-3'-phosphate
  modified_base 16: mod_base = OTHER; note = 2'-fluoroadenosine-3'-phosphate
  modified_base 17: mod_base = OTHER; note = 2'-O-methylcytidine-3'-phosphate
  modified_base 18: mod_base = OTHER; note = 2'-O-methylcytidine-3'-phosphate
  modified_base 19: mod_base = OTHER; note = 2'-O-methyluridine-3'-phosphate
  modified_base 20: mod_base = OTHER; note = 2'-O-methyluridine-3'-phosphate
  modified_base 21: mod_base = OTHER; note = 2'-O-methyluridine-3'-phosphorothioate
  modified_base 22: mod_base = OTHER; note = 2'-O-methylcytidine-3'- phosphorothioate
  modified_base 23: mod_base = OTHER; note = 2'-O-methyluridine-3'-phosphate
gaggacatcttgaacacctttct

SEQ ID NO: 2262 - RNA, 21 nt, synthetic construct
  source 1..21: mol_type = other RNA
  modified_base 1: mod_base = OTHER; note = 2'-O-methylguanosine-3'- phosphorothioate
  modified_base 2: mod_base = OTHER; note = 2'-O-methylguanosine-3'- phosphorothioate
  modified_base 3: mod_base = OTHER; note = 2'-O-methylguanosine-3'-phosphate
  modified_base 4: mod_base = OTHER; note = 2'-O-methyladenosine-3'-phosphate
  modified_base 5: mod_base = OTHER; note = 2'-O-methylguanosine-3'-phosphate
  modified_base 6: mod_base = OTHER; note = 2'-O-methyladenosine-3'-phosphate
  modified_base 7: mod_base = OTHER; note = 2'-fluoroadenosine-3'-phosphate
  modified_base 8: mod_base = OTHER; note = 2'-O-methyladenosine-3'-phosphate
  modified_base 9: mod_base = OTHER; note = 2'-fluoroguanosine-3'-phosphate
  modified_base 10: mod_base = OTHER; note = 2'-fluoroguanosine-3'-phosphate
  modified_base 11: mod_base = OTHER; note = 2'-fluorouridine-3'-phosphate
  modified_base 12: mod_base = OTHER; note = 2'-O-methylguanosine-3'-phosphate
  modified_base 13: mod_base = OTHER; note = 2'-O-methyluridine-3'-phosphate
  modified_base 14: mod_base = OTHER; note = 2'-O-methyluridine-3'-phosphate
  modified_base 15: mod_base = OTHER; note = 2'-O-methylcytidine-3'-phosphate
  modified_base 16: mod_base = OTHER; note = 2'-O-methyladenosine-3'-phosphate
  modified_base 17: mod_base = OTHER; note = 2'-O-methyladenosine-3'-phosphate
  modified_base 18: mod_base = OTHER; note = 2'-O-methylguanosine-3'-phosphate
  modified_base 19: mod_base = OTHER; note = 2'-O-methyladenosine-3'-phosphate
  modified_base 20: mod_base = OTHER; note = 2'-O-methyluridine-3'-phosphate
  modified_base 21: mod_base = OTHER; note 2'-O-methylguanosine-3'-phosphate-N-[tris(GalNAc-alkyl)-ami dodecanoyl)]-4-hydroxyprolinol (Hyp-(GalNAc-alkyl)3)
gggagaaaggtgttcaagatg

SEQ ID NO: 2263 - RNA, 23 nt, synthetic construct
  source 1..23: mol_type = other RNA
  modified_base 1: mod_base = OTHER; note = 2'-O-methylcytidine-3'- phosphorothioate
  modified_base 2: mod_base = OTHER; note = 2'-fluoroadenosine-3'-phosphorothioate
  modified_base 3: mod_base = OTHER; note = 2'-O-methyluridine-3'-phosphate
  modified_base 4: mod_base = OTHER; note = 2'-O-methylcytidine-3'-phosphate
  modified_base 5: mod_base = OTHER; note = 2'-O-methyluridine-3'-phosphate
  modified_base 6: mod_base = OTHER; note = 2'-fluorouridine-3'-phosphate
  modified_base 7: mod_base = OTHER; note = 2'-O-methylguanosine-3'-phosphate
  modified_base 8: mod_base = OTHER; note = 2'-fluoroadenosine-3'-phosphate
  modified_base 9: mod_base = OTHER; note = 2'-fluoroadenosine-3'-phosphate
  modified_base 10: mod_base = OTHER; note = 2'-O-methylcytidine-3'-phosphate
  modified_base 11: mod_base = OTHER; note = 2'-O-methyladenosine-3'-phosphate
  modified_base 12: mod_base = OTHER; note = 2'-O-methylcytidine-3'-phosphate
  modified_base 13: mod_base = OTHER; note = 2'-O-methylcytidine-3'-phosphate
  modified_base 14: mod_base = OTHER; note = 2'-fluorouridine-3'-phosphate
  modified_base 15: mod_base = OTHER; note = 2'-O-methyluridine-3'-phosphate
  modified_base 16: mod_base = OTHER; note = 2'-fluorouridine-3'-phosphate
  modified_base 17: mod_base = OTHER; note = 2'-O-methylcytidine-3'-phosphate
  modified_base 18: mod_base = OTHER; note = 2'-O-methyluridine-3'-phosphate
  modified_base 19: mod_base = OTHER; note = 2'-O-methylcytidine-3'-phosphate
  modified_base 20: mod_base = OTHER; note = 2'-O-methylcytidine-3'-phosphate
  modified_base 21: mod_base = OTHER; note = 2'-O-methylcytidine-3'- phosphorothioate
  modified_base 22: mod_base = OTHER; note = 2'-O-methylcytidine-3'- phosphorothioate
  modified_base 23: mod_base = OTHER; note = 2'-O-methylcytidine-3'-phosphate
catcttgaacacctttctccccc

SEQ ID NO: 2264 - RNA, 21 nt, synthetic construct
  source 1..21: mol_type = other RNA
  modified_base 1: mod_base = OTHER; note = 2'-O-methylguanosine-3'- phosphorothioate
  modified_base 2: mod_base = OTHER; note = 2'-O-methylguanosine-3'- phosphorothioate
  modified_base 3: mod_base = OTHER; note = 2'-O-methylguanosine-3'-phosphate
  modified_base 4: mod_base = OTHER; note = 2'-O-methylguanosine-3'-phosphate
  modified_base 5: mod_base = OTHER; note = 2'-O-methyladenosine-3'-phosphate
  modified_base 6: mod_base = OTHER; note = 2'-O-methylguanosine-3'-phosphate
  modified_base 7: mod_base = OTHER; note = 2'-fluoroadenosine-3'-phosphate
  modified_base 8: mod_base = OTHER; note = 2'-O-methyladenosine-3'-phosphate
  modified_base 9: mod_base = OTHER; note = 2'-fluoroadenosine-3'-phosphate
  modified_base 10: mod_base = OTHER; note = 2'-fluoroguanosine-3'-phosphate
  modified_base 11: mod_base = OTHER; note = 2'-fluoroguanosine-3'-phosphate
  modified_base 12: mod_base = OTHER; note = 2'-O-methyluridine-3'-phosphate
  modified_base 13: mod_base = OTHER; note = 2'-O-methylguanosine-3'-phosphate
  modified_base 14: mod_base = OTHER; note = 2'-O-methyluridine-3'-phosphate
  modified_base 15: mod_base = OTHER; note = 2'-O-methyluridine-3'-phosphate
  modified_base 16: mod_base = OTHER; note = 2'-O-methylcytidine-3'-phosphate
  modified_base 17: mod_base = OTHER; note = 2'-O-methyladenosine-3'-phosphate
  modified_base 18: mod_base = OTHER; note = 2'-O-methyladenosine-3'-phosphate
  modified_base 19: mod_base = OTHER; note = 2'-O-methylguanosine-3'-phosphate
  modified_base 20: mod_base = OTHER; note = 2'-O-methyladenosine-3'-phosphate
  modified_base 21: mod_base = OTHER; note 2'-O-methyluridine-3'-phosphate-N-[tris(GalNAc-alkyl)-amido decanoyl)]-4-hydroxyprolinol (Hyp-(GalNAc-alkyl)3)
ggggagaaaggtgttcaagat

SEQ ID NO: 2265 - RNA, 23 nt, synthetic construct
  source 1..23: mol_type = other RNA
  modified_base 1: mod_base = OTHER; note = 2'-O-methyladenosine-3'- phosphorothioate
  modified_base 2: mod_base = OTHER; note = 2'-fluorouridine -3'-phosphorothioate
  modified_base 3: mod_base = OTHER; note = 2'-O-methylcytidine-3'-phosphate
  modified_base 4: mod_base = OTHER; note = 2'-O-methyluridine-3'-phosphate
  modified_base 5: mod_base = OTHER; note = 2'-O-methyluridine-3'-phosphate
  modified_base 6: mod_base = OTHER; note = 2'-fluoroguanosine-3'-phosphate
  modified_base 7: mod_base = OTHER; note = 2'-O-methyladenosine-3'-phosphate
  modified_base 8: mod_base = OTHER; note = 2'-fluoroadenosine-3'-phosphate
  modified_base 9: mod_base = OTHER; note = 2'-fluorocytidine-3'-phosphate
  modified_base 10: mod_base = OTHER; note = 2'-O-methyladenosine-3'-phosphate
  modified_base 11: mod_base = OTHER; note = 2'-O-methylcytidine-3'-phosphate
  modified_base 12: mod_base = OTHER; note = 2'-O-methylcytidine-3'-phosphate
  modified_base 13: mod_base = OTHER; note = 2'-O-methyluridine-3'-phosphate
  modified_base 14: mod_base = OTHER; note = 2'-fluorouridine-3'-phosphate
  modified_base 15: mod_base = OTHER; note = 2'-O-methyluridine-3'-phosphate
  modified_base 16: mod_base = OTHER; note = 2'-fluorocytidine-3'-phosphate
  modified_base 17: mod_base = OTHER; note = 2'-O-methyluridine-3'-phosphate
  modified_base 18: mod_base = OTHER; note = 2'-O-methylcytidine-3'-phosphate
  modified_base 19: mod_base = OTHER; note = 2'-O-methylcytidine-3'-phosphate
  modified_base 20: mod_base = OTHER; note = 2'-O-methylcytidine-3'-phosphate
  modified_base 21: mod_base = OTHER; note = 2'-O-methylcytidine-3'- phosphorothioate
  modified_base 22: mod_base = OTHER; note = 2'-O-methylcytidine-3'- phosphorothioate
  modified_base 23: mod_base = OTHER; note = 2'-O-methyluridine-3'-phosphate
atcttgaacacctttctccccct

SEQ ID NO: 2266 - RNA, 21 nt, synthetic construct
  source 1..21: mol_type = other RNA
  modified_base 1: mod_base = OTHER; note = 2'-O-methyladenosine-3'- phosphorothioate
  modified_base 2: mod_base = OTHER; note = 2'-O-methyluridine-3'-phosphorothioate
  modified_base 3: mod_base = OTHER; note = 2'-O-methylcytidine-3'-phosphate
  modified_base 4: mod_base = OTHER; note = 2'-O-methyluridine-3'-phosphate
  modified_base 5: mod_base = OTHER; note = 2'-O-methyluridine-3'-phosphate
  modified_base 6: mod_base = OTHER; note = 2'-O-methylguanosine-3'-phosphate
  modified_base 7: mod_base = OTHER; note = 2'-fluoroguanosine-3'-phosphate
  modified_base 8: mod_base = OTHER; note = 2'-O-methyluridine-3'-phosphate
  modified_base 9: mod_base = OTHER; note = 2'-fluoroguanosine-3'-phosphate
  modified_base 10: mod_base = OTHER; note = 2'-fluorouridine-3'-phosphate
  modified_base 11: mod_base = OTHER; note = 2'-fluorocytidine-3'-phosphate
  modified_base 12: mod_base = OTHER; note = 2'-O-methylguanosine-3'-phosphate
  modified_base 13: mod_base = OTHER; note = 2'-O-methyladenosine-3'-phosphate
  modified_base 14: mod_base = OTHER; note = 2'-O-methyladenosine-3'-phosphate
  modified_base 15: mod_base = OTHER; note = 2'-O-methyluridine-3'-phosphate
  modified_base 16: mod_base = OTHER; note = 2'-O-methylcytidine-3'-phosphate
  modified_base 17: mod_base = OTHER; note = 2'-O-methyladenosine-3'-phosphate
  modified_base 18: mod_base = OTHER; note = 2'-O-methyluridine-3'-phosphate
  modified_base 19: mod_base = OTHER; note = 2'-O-methylguanosine-3'-phosphate
  modified_base 20: mod_base = OTHER; note = 2'-O-methylguanosine-3'-phosphate
  modified_base 21: mod_base = OTHER; note 2'-O-methylguanosine-3'-phosphate-N-[tris(GalNAc-alkyl)-ami dodecanoyl)]-4-hydroxyprolinol (Hyp-(GalNAc-alkyl)3)
atcttggtgtcgaatcatggg

SEQ ID NO: 2267 - RNA, 23 nt, synthetic construct
  source 1..23: mol_type = other RNA
  modified_base 1: mod_base = OTHER; note = 2'-O-methylcytidine-3'- phosphorothioate
  modified_base 2: mod_base = OTHER; note = 2'-fluorocytidine-3'-phosphorothioate
  modified_base 3: mod_base = OTHER; note = 2'-O-methylcytidine-3'-phosphate
  modified_base 4: mod_base = OTHER; note = 2'-O-methyladenosine-3'-phosphate
  modified_base 5: mod_base = OTHER; note = 2'-O-methyluridine-3'-phosphate
  modified_base 6: mod_base = OTHER; note = 2'-fluoroguanosine-3'-phosphate
  modified_base 7: mod_base = OTHER; note = 2'-O-methyladenosine-3'-phosphate
  modified_base 8: mod_base = OTHER; note = 2'-fluorouridine-3'-phosphate
  modified_base 9: mod_base = OTHER; note = 2'-fluorouridine-3'-phosphate
  modified_base 10: mod_base = OTHER; note = 2'-O-methylcytidine-3'-phosphate
  modified_base 11: mod_base = OTHER; note = 2'-O-methylguanosine-3'-phosphate
  modified_base 12: mod_base = OTHER; note = 2'-O-methyladenosine-3'-phosphate
  modified_base 13: mod_base = OTHER; note = 2'-O-methylcytidine-3'-phosphate
  modified_base 14: mod_base = OTHER; note = 2'-fluoroadenosine-3'-phosphate
  modified_base 15: mod_base = OTHER; note = 2'-O-methylcytidine-3'-phosphate
  modified_base 16: mod_base = OTHER; note = 2'-fluorocytidine-3'-phosphate
  modified_base 17: mod_base = OTHER; note = 2'-O-methyladenosine-3'-phosphate
  modified_base 18: mod_base = OTHER; note = 2'-O-methyladenosine-3'-phosphate
  modified_base 19: mod_base = OTHER; note = 2'-O-methylguanosine-3'-phosphate
  modified_base 20: mod_base = OTHER; note = 2'-O-methyladenosine-3'-phosphate
  modified_base 21: mod_base = OTHER; note = 2'-O-methyluridine-3'-phosphorothioate
  modified_base 22: mod_base = OTHER; note = 2'-O-methylcytidine-3'- phosphorothioate
  modified_base 23: mod_base = OTHER; note = 2'-O-methylcytidine-3'-phosphate
cccatgattcgacaccaagatcc

SEQ ID NO: 2268 - RNA, 21 nt, synthetic construct
  source 1..21: mol_type = other RNA
  modified_base 1: mod_base = OTHER; note = 2'-O-methyluridine-3'-phosphorothioate
  modified_base 2: mod_base = OTHER; note = 2'-O-methylcytidine-3'- phosphorothioate
  modified_base 3: mod_base = OTHER; note = 2'-O-methyluridine-3'-phosphate
  modified_base 4: mod_base = OTHER; note = 2'-O-methyluridine-3'-phosphate
  modified_base 5: mod_base = OTHER; note = 2'-O-methylguanosine-3'-phosphate
  modified_base 6: mod_base = OTHER; note = 2'-O-methylguanosine-3'-phosphate
  modified_base 7: mod_base = OTHER; note = 2'-fluorouridine-3'-phosphate
  modified_base 8: mod_base = OTHER; note = 2'-O-methylguanosine-3'-phosphate
  modified_base 9: mod_base = OTHER; note = 2'-fluorouridine-3'-phosphate
  modified_base 10: mod_base = OTHER; note = 2'-fluorocytidine-3'-phosphate
  modified_base 11: mod_base = OTHER; note = 2'-fluoroguanosine-3'-phosphate
  modified_base 12: mod_base = OTHER; note = 2'-O-methyladenosine-3'-phosphate
  modified_base 13: mod_base = OTHER; note = 2'-O-methyladenosine-3'-phosphate
  modified_base 14: mod_base = OTHER; note = 2'-O-methyluridine-3'-phosphate
  modified_base 15: mod_base = OTHER; note = 2'-O-methylcytidine-3'-phosphate
  modified_base 16: mod_base = OTHER; note = 2'-O-methyladenosine-3'-phosphate
  modified_base 17: mod_base = OTHER; note = 2'-O-methyluridine-3'-phosphate
  modified_base 18: mod_base = OTHER; note = 2'-O-methylguanosine-3'-phosphate
  modified_base 19: mod_base = OTHER; note = 2'-O-methylguanosine-3'-phosphate
  modified_base 20: mod_base = OTHER; note = 2'-O-methylguanosine-3'-phosphate
  modified_base 21: mod_base = OTHER; note 2'-O-methylguanosine-3'-phosphate-N-[tris(GalNAc-alkyl)-ami dodecanoyl)]-4-hydroxyprolinol (Hyp-(GalNAc-alkyl)3)
tcttggtgtcgaatcatgggg

SEQ ID NO: 2269 - RNA, 23 nt, synthetic construct
  source 1..23: mol_type = other RNA
  modified_base 1: mod_base = OTHER; note = 2'-O-methylcytidine-3'- phosphorothioate
  modified_base 2: mod_base = OTHER; note = 2'-fluorocytidine-3'-phosphorothioate
  modified_base 3: mod_base = OTHER; note = 2'-O-methylcytidine-3'-phosphate
  modified_base 4: mod_base = OTHER; note = 2'-O-methylcytidine-3'-phosphate
  modified_base 5: mod_base = OTHER; note = 2'-O-methyladenosine-3'-phosphate
  modified_base 6: mod_base = OTHER; note = 2'-fluorouridine-3'-phosphate
  modified_base 7: mod_base = OTHER; note = 2'-O-methylguanosine-3'-phosphate
  modified_base 8: mod_base = OTHER; note = 2'-fluoroadenosine-3'-phosphate
  modified_base 9: mod_base = OTHER; note = 2'-fluorouridine-3'-phosphate
  modified_base 10: mod_base = OTHER; note = 2'-O-methyluridine-3'-phosphate
  modified_base 11: mod_base = OTHER; note = 2'-O-methylcytidine-3'-phosphate
  modified_base 12: mod_base = OTHER; note = 2'-O-methylguanosine-3'-phosphate
  modified_base 13: mod_base = OTHER; note = 2'-O-methyladenosine-3'-phosphate
  modified_base 14: mod_base = OTHER; note = 2'-fluorocytidine-3'-phosphate
  modified_base 15: mod_base = OTHER; note = 2'-O-methyladenosine-3'-phosphate
  modified_base 16: mod_base = OTHER; note = 2'-fluorocytidine-3'-phosphate
  modified_base 17: mod_base = OTHER; note = 2'-O-methylcytidine-3'-phosphate
  modified_base 18: mod_base = OTHER; note = 2'-O-methyladenosine-3'-phosphate
  modified_base 19: mod_base = OTHER; note = 2'-O-methyladenosine-3'-phosphate
  modified_base 20: mod_base = OTHER; note = 2'-O-methylguanosine-3'-phosphate
  modified_base 21: mod_base = OTHER; note = 2'-O-methyladenosine-3'- phosphorothioate
  modified_base 22: mod_base = OTHER; note = 2'-O-methyluridine-3'-phosphorothioate
  modified_base 23: mod_base = OTHER; note = 2'-O-methylcytidine-3'-phosphate
ccccatgattcgacaccaagatc

SEQ ID NO: 2270 - RNA, 21 nt, synthetic construct
  source 1..21: mol_type = other RNA
  modified_base 1: mod_base = OTHER; note = 2'-O-methyluridine-3'-phosphorothioate
  modified_base 2: mod_base = OTHER; note = 2'-O-methylguanosine-3'- phosphorothioate
  modified_base 3: mod_base = OTHER; note = 2'-O-methylguanosine-3'-phosphate
  modified_base 4: mod_base = OTHER; note = 2'-O-methylguanosine-3'-phosphate
  modified_base 5: mod_base = OTHER; note = 2'-O-methyladenosine-3'-phosphate
  modified_base 6: mod_base = OTHER; note = 2'-O-methyluridine-3'-phosphate
  modified_base 7: mod_base = OTHER; note = 2'-fluorocytidine-3'-phosphate
  modified_base 8: mod_base = OTHER; note = 2'-O-methyluridine-3'-phosphate
  modified_base 9: mod_base = OTHER; note = 2'-fluorouridine-3'-phosphate
  modified_base 10: mod_base = OTHER; note = 2'-fluoroguanosine-3'-phosphate
  modified_base 11: mod_base = OTHER; note = 2'-fluoroguanosine-3'-phosphate
  modified_base 12: mod_base = OTHER; note = 2'-O-methyluridine-3'-phosphate
  modified_base 13: mod_base = OTHER; note = 2'-O-methylguanosine-3'-phosphate
  modified_base 14: mod_base = OTHER; note = 2'-O-methyluridine-3'-phosphate
  modified_base 15: mod_base = OTHER; note = 2'-O-methylcytidine-3'-phosphate
  modified_base 16: mod_base = OTHER; note = 2'-O-methylguanosine-3'-phosphate
  modified_base 17: mod_base = OTHER; note = 2'-O-methyladenosine-3'-phosphate
  modified_base 18: mod_base = OTHER; note = 2'-O-methyladenosine-3'-phosphate
  modified_base 19: mod_base = OTHER; note = 2'-O-methyluridine-3'-phosphate
  modified_base 20: mod_base = OTHER; note = 2'-O-methylcytidine-3'-phosphate
  modified_base 21: mod_base = OTHER; note 2'-O-methyladenosine-3'-phosphate-N-[tris(GalNAc-alkyl)-ami dodecanoyl)]-4-hydroxyprolinol (Hyp-(GalNAc-alkyl)3)
tgggatcttggtgtcgaatca

SEQ ID NO: 2271 - RNA, 23 nt, synthetic construct
  source 1..23: mol_type = other RNA
  modified_base 1: mod_base = OTHER; note = 2'-O-methyluridine-3'-phosphorothioate
  modified_base 2: mod_base = OTHER; note = 2'-fluoroguanosine-3'-phosphorothioate
  modified_base 3: mod_base = OTHER; note = 2'-O-methyladenosine-3'-phosphate
  modified_base 4: mod_base = OTHER; note = 2'-O-methyluridine-3'-phosphate
  modified_base 5: mod_base = OTHER; note = 2'-O-methyluridine-3'-phosphate
  modified_base 6: mod_base = OTHER; note = 2'-fluorocytidine-3'-phosphate
  modified_base 7: mod_base = OTHER; note = 2'-O-methylguanosine-3'-phosphate
  modified_base 8: mod_base = OTHER; note = 2'-fluoroadenosine-3'-phosphate
  modified_base 9: mod_base = OTHER; note = 2'-fluorocytidine-3'-phosphate
  modified_base 10: mod_base = OTHER; note = 2'-O-methyladenosine-3'-phosphate
  modified_base 11: mod_base = OTHER; note = 2'-O-methylcytidine-3'-phosphate
  modified_base 12: mod_base = OTHER; note = 2'-O-methylcytidine-3'-phosphate
  modified_base 13: mod_base = OTHER; note = 2'-O-methyladenosine-3'-phosphate
  modified_base 14: mod_base = OTHER; note = 2'-fluoroadenosine-3'-phosphate
  modified_base 15: mod_base = OTHER; note = 2'-O-methylguanosine-3'-phosphate
  modified_base 16: mod_base = OTHER; note = 2'-fluoroadenosine-3'-phosphate
  modified_base 17: mod_base = OTHER; note = 2'-O-methyluridine-3'-phosphate
  modified_base 18: mod_base = OTHER; note = 2'-O-methylcytidine-3'-phosphate
  modified_base 19: mod_base = OTHER; note = 2'-O-methylcytidine-3'-phosphate
  modified_base 20: mod_base = OTHER; note = 2'-O-methylcytidine-3'-phosphate
  modified_base 21: mod_base = OTHER; note = 2'-O-methyladenosine-3'- phosphorothioate
  modified_base 22: mod_base = OTHER; note = 2'-O-methyluridine-3'-phosphorothioate
  modified_base 23: mod_base = OTHER; note = 2'-O-methyluridine-3'-phosphate
tgattcgacaccaagatcccatt

SEQ ID NO: 2272 - RNA, 21 nt, synthetic construct
  source 1..21: mol_type = other RNA
  modified_base 1: mod_base = OTHER; note = 2'-O-methyladenosine-3'- phosphorothioate
  modified_base 2: mod_base = OTHER; note = 2'-O-methyluridine-3'-phosphorothioate
  modified_base 3: mod_base = OTHER; note = 2'-O-methylguanosine-3'-phosphate
  modified_base 4: mod_base = OTHER; note = 2'-O-methylguanosine-3'-phosphate
  modified_base 5: mod_base = OTHER; note = 2'-O-methylguanosine-3'-phosphate
  modified_base 6: mod_base = OTHER; note = 2'-O-methyladenosine-3'-phosphate
  modified_base 7: mod_base = OTHER; note = 2'-fluorouridine-3'-phosphate
  modified_base 8: mod_base = OTHER; note = 2'-O-methylcytidine-3'-phosphate
  modified_base 9: mod_base = OTHER; note = 2'-fluorouridine-3'-phosphate
  modified_base 10: mod_base = OTHER; note = 2'-fluorouridine-3'-phosphate
  modified_base 11: mod_base = OTHER; note = 2'-fluoroguanosine-3'-phosphate
  modified_base 12: mod_base = OTHER; note = 2'-O-methylguanosine-3'-phosphate
  modified_base 13: mod_base = OTHER; note = 2'-O-methyluridine-3'-phosphate
  modified_base 14: mod_base = OTHER; note = 2'-O-methylguanosine-3'-phosphate
  modified_base 15: mod_base = OTHER; note = 2'-O-methyluridine-3'-phosphate
  modified_base 16: mod_base = OTHER; note = 2'-O-methylcytidine-3'-phosphate
  modified_base 17: mod_base = OTHER; note = 2'-O-methylguanosine-3'-phosphate
  modified_base 18: mod_base = OTHER; note = 2'-O-methyladenosine-3'-phosphate
  modified_base 19: mod_base = OTHER; note = 2'-O-methyladenosine-3'-phosphate
  modified_base 20: mod_base = OTHER; note = 2'-O-methyluridine-3'-phosphate
  modified_base 21: mod_base = OTHER; note 2'-O-methylcytidine-3'-phosphate-N-[tris(GalNAc-alkyl)-amid odecanoyl)]-4-hydroxyprolinol (Hyp-(GalNAc-alkyl)3)
atgggatcttggtgtcgaatc

SEQ ID NO: 2273 - RNA, 23 nt, synthetic construct
  source 1..23: mol_type = other RNA
  modified_base 1: mod_base = OTHER; note = 2'-O-methylguanosine-3'- phosphorothioate
  modified_base 2: mod_base = OTHER; note = 2'-fluoroadenosine-3'-phosphorothioate
  modified_base 3: mod_base = OTHER; note = 2'-O-methyluridine-3'-phosphate
  modified_base 4: mod_base = OTHER; note = 2'-O-methyluridine-3'-phosphate
  modified_base 5: mod_base = OTHER; note = 2'-O-methylcytidine-3'-phosphate
  modified_base 6: mod_base = OTHER; note = 2'-fluoroguanosine-3'-phosphate
  modified_base 7: mod_base = OTHER; note = 2'-O-methyladenosine-3'-phosphate
  modified_base 8: mod_base = OTHER; note = 2'-fluorocytidine-3'-phosphate
  modified_base 9: mod_base = OTHER; note = 2'-fluoroadenosine-3'-phosphate
  modified_base 10: mod_base = OTHER; note = 2'-O-methylcytidine-3'-phosphate
  modified_base 11: mod_base = OTHER; note = 2'-O-methylcytidine-3'-phosphate
  modified_base 12: mod_base = OTHER; note = 2'-O-methyladenosine-3'-phosphate
  modified_base 13: mod_base = OTHER; note = 2'-O-methyladenosine-3'-phosphate
  modified_base 14: mod_base = OTHER; note = 2'-fluoroguanosine-3'-phosphate
  modified_base 15: mod_base = OTHER; note = 2'-O-methyladenosine-3'-phosphate
  modified_base 16: mod_base = OTHER; note = 2'-fluorouridine-3'-phosphate
  modified_base 17: mod_base = OTHER; note = 2'-O-methylcytidine-3'-phosphate
  modified_base 18: mod_base = OTHER; note = 2'-O-methylcytidine-3'-phosphate
  modified_base 19: mod_base = OTHER; note = 2'-O-methylcytidine-3'-phosphate
  modified_base 20: mod_base = OTHER; note = 2'-O-methyladenosine-3'-phosphate
  modified_base 21: mod_base = OTHER; note = 2'-O-methyluridine-3'-phosphorothioate
  modified_base 22: mod_base = OTHER; note = 2'-O-methyluridine-3'-phosphorothioate
  modified_base 23: mod_base = OTHER; note = 2'-O-methylcytidine-3'-phosphate
gattcgacaccaagatcccattc

SEQ ID NO: 2274 - RNA, 21 nt, synthetic construct
  source 1..21: mol_type = other RNA
  modified_base 1: mod_base = OTHER; note = 2'-O-methylguanosine-3'- phosphorothioate
  modified_base 2: mod_base = OTHER; note = 2'-O-methylcytidine-3'- phosphorothioate
  modified_base 3: mod_base = OTHER; note = 2'-O-methyluridine-3'-phosphate
  modified_base 4: mod_base = OTHER; note = 2'-O-methyladenosine-3'-phosphate
  modified_base 5: mod_base = OTHER; note = 2'-O-methylcytidine-3'-phosphate
  modified_base 6: mod_base = OTHER; note = 2'-O-methyladenosine-3'-phosphate
  modified_base 7: mod_base = OTHER; note = 2'-fluoroadenosine-3'-phosphate
  modified_base 8: mod_base = OTHER; note = 2'-O-methylguanosine-3'-phosphate
  modified_base 9: mod_base = OTHER; note = 2'-fluoroguanosine-3'-phosphate
  modified_base 10: mod_base = OTHER; note = 2'-fluorocytidine-3'-phosphate
  modified_base 11: mod_base = OTHER; note = 2'-fluorocytidine-3'-phosphate
  modified_base 12: mod_base = OTHER; note = 2'-O-methyladenosine-3'-phosphate
  modified_base 13: mod_base = OTHER; note = 2'-O-methyluridine-3'-phosphate
  modified_base 14: mod_base = OTHER; note = 2'-O-methyladenosine-3'-phosphate
  modified_base 15: mod_base = OTHER; note = 2'-O-methyluridine-3'-phosphate
  modified_base 16: mod_base = OTHER; note = 2'-O-methyluridine-3'-phosphate
  modified_base 17: mod_base = OTHER; note = 2'-O-methyluridine-3'-phosphate
  modified_base 18: mod_base = OTHER; note = 2'-O-methylguanosine-3'-phosphate
  modified_base 19: mod_base = OTHER; note = 2'-O-methyluridine-3'-phosphate
  modified_base 20: mod_base = OTHER; note = 2'-O-methylguanosine-3'-phosphate
  modified_base 21: mod_base = OTHER; note 2'-O-methyladenosine-3'-phosphate-N-[tris(GalNAc-alkyl)-ami dodecanoyl)]-4-hydroxyprolinol (Hyp-(GalNAc-alkyl)3)
gctacaaggccatatttgtga

SEQ ID NO: 2275 - RNA, 23 nt, synthetic construct
  source 1..23: mol_type = other RNA
  modified_base 1: mod_base = OTHER; note = 2'-O-methyluridine-3'-phosphorothioate
  modified_base 2: mod_base = OTHER; note = 2'-fluorocytidine-3'-phosphorothioate
  modified_base 3: mod_base = OTHER; note = 2'-O-methyladenosine-3'-phosphate
  modified_base 4: mod_base = OTHER; note = 2'-O-methylcytidine-3'-phosphate
  modified_base 5: mod_base = OTHER; note = 2'-O-methyladenosine-3'-phosphate
  modified_base 6: mod_base = OTHER; note = 2'-fluoroadenosine-3'-phosphate
  modified_base 7: mod_base = OTHER; note = 2'-O-methyladenosine-3'-phosphate
  modified_base 8: mod_base = OTHER; note = 2'-fluorouridine-3'-phosphate
  modified_base 9: mod_base = OTHER; note = 2'-fluoroadenosine-3'-phosphate
  modified_base 10: mod_base = OTHER; note = 2'-O-methyluridine-3'-phosphate
  modified_base 11: mod_base = OTHER; note = 2'-O-methylguanosine-3'-phosphate
  modified_base 12: mod_base = OTHER; note = 2'-O-methylguanosine-3'-phosphate
  modified_base 13: mod_base = OTHER; note = 2'-O-methylcytidine-3'-phosphate
  modified_base 14: mod_base = OTHER; note = 2'-fluorocytidine-3'-phosphate
  modified_base 15: mod_base = OTHER; note = 2'-O-methyluridine-3'-phosphate
  modified_base 16: mod_base = OTHER; note = 2'-fluorouridine-3'-phosphate
  modified_base 17: mod_base = OTHER; note = 2'-O-methylguanosine-3'-phosphate
  modified_base 18: mod_base = OTHER; note = 2'-O-methyluridine-3'-phosphate
  modified_base 19: mod_base = OTHER; note = 2'-O-methyladenosine-3'-phosphate
  modified_base 20: mod_base = OTHER; note = 2'-O-methylguanosine-3'-phosphate
  modified_base 21: mod_base = OTHER; note = 2'-O-methylcytidine-3'- phosphorothioate
  modified_base 22: mod_base = OTHER; note = 2'-O-methylcytidine-3'- phosphorothioate
  modified_base 23: mod_base = OTHER; note = 2'-O-methylcytidine-3'-phosphate
tcacaaatatggccttgtagccc

SEQ ID NO: 2276 - RNA, 21 nt, synthetic construct
  source 1..21: mol_type = other RNA
  modified_base 1: mod_base = OTHER; note = 2'-O-methylcytidine-3'- phosphorothioate
  modified_base 2: mod_base = OTHER; note = 2'-O-methyluridine-3'-phosphorothioate
  modified_base 3: mod_base = OTHER; note = 2'-O-methyladenosine-3'-phosphate
  modified_base 4: mod_base = OTHER; note = 2'-O-methylcytidine-3'-phosphate
  modified_base 5: mod_base = OTHER; note = 2'-O-methyladenosine-3'-phosphate
  modified_base 6: mod_base = OTHER; note = 2'-O-methyladenosine-3'-phosphate
  modified_base 7: mod_base = OTHER; note = 2'-fluoroguanosine-3'-phosphate
  modified_base 8: mod_base = OTHER; note = 2'-O-methylguanosine-3'-phosphate
  modified_base 9: mod_base = OTHER; note = 2'-fluorocytidine-3'-phosphate
  modified_base 10: mod_base = OTHER; note = 2'-fluorocytidine-3'-phosphate
  modified_base 11: mod_base = OTHER; note = 2'-fluoroadenosine-3'-phosphate
  modified_base 12: mod_base = OTHER; note = 2'-O-methyluridine-3'-phosphate
  modified_base 13: mod_base = OTHER; note = 2'-O-methyladenosine-3'-phosphate
  modified_base 14: mod_base = OTHER; note = 2'-O-methyluridine-3'-phosphate
  modified_base 15: mod_base = OTHER; note = 2'-O-methyluridine-3'-phosphate
  modified_base 16: mod_base = OTHER; note = 2'-O-methyluridine-3'-phosphate
  modified_base 17: mod_base = OTHER; note = 2'-O-methylguanosine-3'-phosphate
  modified_base 18: mod_base = OTHER; note = 2'-O-methyluridine-3'-phosphate
  modified_base 19: mod_base = OTHER; note = 2'-O-methylguanosine-3'-phosphate
  modified_base 20: mod_base = OTHER; note = 2'-O-methyladenosine-3'-phosphate
  modified_base 21: mod_base = OTHER; note 2'-O-methylcytidine-3'-phosphate-N-[tris(GalNAc-alkyl)-amid odecanoyl)]-4-hydroxyprolinol (Hyp-(GalNAc-alkyl)3)
ctacaaggccatatttgtgac

SEQ ID NO: 2277 - RNA, 23 nt, synthetic construct
  source 1..23: mol_type = other RNA
  modified_base 1: mod_base = OTHER; note = 2'-O-methylguanosine-3'- phosphorothioate
  modified_base 2: mod_base = OTHER; note = 2'-fluorouridine -3'-phosphorothioate
  modified_base 3: mod_base = OTHER; note = 2'-O-methylcytidine-3'-phosphate
  modified_base 4: mod_base = OTHER; note = 2'-O-methyladenosine-3'-phosphate
  modified_base 5: mod_base = OTHER; note = 2'-O-methylcytidine-3'-phosphate
  modified_base 6: mod_base = OTHER; note = 2'-fluoroadenosine-3'-phosphate
  modified_base 7: mod_base = OTHER; note = 2'-O-methyladenosine-3'-phosphate
  modified_base 8: mod_base = OTHER; note = 2'-fluoroadenosine-3'-phosphate
  modified_base 9: mod_base = OTHER; note = 2'-fluorouridine-3'-phosphate
  modified_base 10: mod_base = OTHER; note = 2'-O-methyladenosine-3'-phosphate
  modified_base 11: mod_base = OTHER; note = 2'-O-methyluridine-3'-phosphate
  modified_base 12: mod_base = OTHER; note = 2'-O-methylguanosine-3'-phosphate
  modified_base 13: mod_base = OTHER; note = 2'-O-methylguanosine-3'-phosphate
  modified_base 14: mod_base = OTHER; note = 2'-fluorocytidine-3'-phosphate
  modified_base 15: mod_base = OTHER; note = 2'-O-methylcytidine-3'-phosphate
  modified_base 16: mod_base = OTHER; note = 2'-fluorouridine-3'-phosphate
  modified_base 17: mod_base = OTHER; note = 2'-O-methyluridine-3'-phosphate
  modified_base 18: mod_base = OTHER; note = 2'-O-methylguanosine-3'-phosphate
  modified_base 19: mod_base = OTHER; note = 2'-O-methyluridine-3'-phosphate
  modified_base 20: mod_base = OTHER; note = 2'-O-methyladenosine-3'-phosphate
  modified_base 21: mod_base = OTHER; note = 2'-O-methylguanosine-3'- phosphorothioate
  modified_base 22: mod_base = OTHER; note = 2'-O-methylcytidine-3'- phosphorothioate
  modified_base 23: mod_base = OTHER; note = 2'-O-methylcytidine-3'-phosphate
gtcacaaatatggccttgtagcc

SEQ ID NO: 2278 - RNA, 21 nt, synthetic construct
  source 1..21: mol_type = other RNA
  modified_base 1: mod_base = OTHER; note = 2'-O-methyladenosine-3'- phosphorothioate
  modified_base 2: mod_base = OTHER; note = 2'-O-methyluridine-3'-phosphorothioate
  modified_base 3: mod_base = OTHER; note = 2'-O-methylguanosine-3'-phosphate
  modified_base 4: mod_base = OTHER; note = 2'-O-methylguanosine-3'-phosphate
  modified_base 5: mod_base = OTHER; note = 2'-O-methylguanosine-3'-phosphate
  modified_base 6: mod_base = OTHER; note = 2'-O-methylcytidine-3'-phosphate
  modified_base 7: mod_base = OTHER; note = 2'-fluorouridine-3'-phosphate
  modified_base 8: mod_base = OTHER; note = 2'-O-methyladenosine-3'-phosphate
  modified_base 9: mod_base = OTHER; note = 2'-fluorocytidine-3'-phosphate
  modified_base 10: mod_base = OTHER; note = 2'-fluoroadenosine-3'-phosphate
  modified_base 11: mod_base = OTHER; note = 2'-fluoroadenosine-3'-phosphate
  modified_base 12: mod_base = OTHER; note = 2'-O-methylguanosine-3'-phosphate
  modified_base 13: mod_base = OTHER; note = 2'-O-methylguanosine-3'-phosphate
  modified_base 14: mod_base = OTHER; note = 2'-O-methylcytidine-3'-phosphate
  modified_base 15: mod_base = OTHER; note = 2'-O-methylcytidine-3'-phosphate
  modified_base 16: mod_base = OTHER; note = 2'-O-methyladenosine-3'-phosphate
  modified_base 17: mod_base = OTHER; note = 2'-O-methyluridine-3'-phosphate
  modified_base 18: mod_base = OTHER; note = 2'-O-methyladenosine-3'-phosphate
  modified_base 19: mod_base = OTHER; note = 2'-O-methyluridine-3'-phosphate
  modified_base 20: mod_base = OTHER; note = 2'-O-methyluridine-3'-phosphate
  modified_base 21: mod_base = OTHER; note 2'-O-methyluridine-3'-phosphate-N-[tris(GalNAc-alkyl)-amido decanoyl)]-4-hydroxyprolinol (Hyp-(GalNAc-alkyl)3)
atgggctacaaggccatattt

SEQ ID NO: 2279 - RNA, 23 nt, synthetic construct
  source 1..23: mol_type = other RNA
  modified_base 1: mod_base = OTHER; note = 2'-O-methyladenosine-3'- phosphorothioate
  modified_base 2: mod_base = OTHER; note = 2'-fluoroadenosine-3'-phosphorothioate
  modified_base 3: mod_base = OTHER; note = 2'-O-methyladenosine-3'-phosphate
  modified_base 4: mod_base = OTHER; note = 2'-O-methyluridine-3'-phosphate
  modified_base 5: mod_base = OTHER; note = 2'-O-methyladenosine-3'-phosphate
  modified_base 6: mod_base = OTHER; note = 2'-fluorouridine-3'-phosphate
  modified_base 7: mod_base = OTHER; note = 2'-O-methylguanosine-3'-phosphate
  modified_base 8: mod_base = OTHER; note = 2'-fluoroguanosine-3'-phosphate
  modified_base 9: mod_base = OTHER; note = 2'-fluorocytidine-3'-phosphate
  modified_base 10: mod_base = OTHER; note = 2'-O-methylcytidine-3'-phosphate
  modified_base 11: mod_base = OTHER; note = 2'-O-methyluridine-3'-phosphate
  modified_base 12: mod_base = OTHER; note = 2'-O-methyluridine-3'-phosphate
  modified_base 13: mod_base = OTHER; note = 2'-O-methylguanosine-3'-phosphate
  modified_base 14: mod_base = OTHER; note = 2'-fluorouridine-3'-phosphate
  modified_base 15: mod_base = OTHER; note = 2'-O-methyladenosine-3'-phosphate
  modified_base 16: mod_base = OTHER; note = 2'-fluoroguanosine-3'-phosphate
  modified_base 17: mod_base = OTHER; note = 2'-O-methylcytidine-3'-phosphate
  modified_base 18: mod_base = OTHER; note = 2'-O-methylcytidine-3'-phosphate
  modified_base 19: mod_base = OTHER; note = 2'-O-methylcytidine-3'-phosphate
  modified_base 20: mod_base = OTHER; note = 2'-O-methyladenosine-3'-phosphate
  modified_base 21: mod_base = OTHER; note = 2'-O-methyluridine-3'-phosphorothioate
  modified_base 22: mod_base = OTHER; note = 2'-O-methylcytidine-3'- phosphorothioate
  modified_base 23: mod_base = OTHER; note = 2'-O-methyluridine-3'-phosphate
aaatatggccttgtagcccatct

SEQ ID NO: 2280 - RNA, 21 nt, synthetic construct
  source 1..21: mol_type = other RNA
  modified_base 1: mod_base = OTHER; note = 2'-O-methylguanosine-3'- phosphorothioate
  modified_base 2: mod_base = OTHER; note = 2'-O-methyladenosine-3'- phosphorothioate
  modified_base 3: mod_base = OTHER; note = 2'-O-methyluridine-3'-phosphate
  modified_base 4: mod_base = OTHER; note = 2'-O-methylguanosine-3'-phosphate
  modified_base 5: mod_base = OTHER; note = 2'-O-methylguanosine-3'-phosphate
  modified_base 6: mod_base = OTHER; note = 2'-O-methylguanosine-3'-phosphate
  modified_base 7: mod_base = OTHER; note = 2'-fluorocytidine-3'-phosphate
  modified_base 8: mod_base = OTHER; note = 2'-O-methyluridine-3'-phosphate
  modified_base 9: mod_base = OTHER; note = 2'-fluoroadenosine-3'-phosphate
  modified_base 10: mod_base = OTHER; note = 2'-fluorocytidine-3'-phosphate
  modified_base 11: mod_base = OTHER; note = 2'-fluoroadenosine-3'-phosphate
  modified_base 12: mod_base = OTHER; note = 2'-O-methyladenosine-3'-phosphate
  modified_base 13: mod_base = OTHER; note = 2'-O-methylguanosine-3'-phosphate
  modified_base 14: mod_base = OTHER; note = 2'-O-methylguanosine-3'-phosphate
  modified_base 15: mod_base = OTHER; note = 2'-O-methylcytidine-3'-phosphate
  modified_base 16: mod_base = OTHER; note = 2'-O-methylcytidine-3'-phosphate
  modified_base 17: mod_base = OTHER; note = 2'-O-methyladenosine-3'-phosphate
  modified_base 18: mod_base = OTHER; note = 2'-O-methyluridine-3'-phosphate
  modified_base 19: mod_base = OTHER; note = 2'-O-methyladenosine-3'-phosphate
  modified_base 20: mod_base = OTHER; note = 2'-O-methyluridine-3'-phosphate
  modified_base 21: mod_base = OTHER; note 2'-O-methyluridine-3'-phosphate-N-[tris(GalNAc-alkyl)-amido decanoyl)]-4-hydroxyprolinol (Hyp-(GalNAc-alkyl)3)
gatgggctacaaggccatatt

SEQ ID NO: 2281 - RNA, 23 nt, synthetic construct
  source 1..23: mol_type = other RNA
  modified_base 1: mod_base = OTHER; note = 2'-O-methyladenosine-3'- phosphorothioate
  modified_base 2: mod_base = OTHER; note = 2'-fluoroadenosine-3'-phosphorothioate
  modified_base 3: mod_base = OTHER; note = 2'-O-methyluridine-3'-phosphate
  modified_base 4: mod_base = OTHER; note = 2'-O-methyladenosine-3'-phosphate
  modified_base 5: mod_base = OTHER; note = 2'-O-methyluridine-3'-phosphate
  modified_base 6: mod_base = OTHER; note = 2'-fluoroguanosine-3'-phosphate
  modified_base 7: mod_base = OTHER; note = 2'-O-methylguanosine-3'-phosphate
  modified_base 8: mod_base = OTHER; note = 2'-fluorocytidine-3'-phosphate
  modified_base 9: mod_base = OTHER; note = 2'-fluorocytidine-3'-phosphate
  modified_base 10: mod_base = OTHER; note = 2'-O-methyluridine-3'-phosphate
  modified_base 11: mod_base = OTHER; note = 2'-O-methyluridine-3'-phosphate
  modified_base 12: mod_base = OTHER; note = 2'-O-methylguanosine-3'-phosphate
  modified_base 13: mod_base = OTHER; note = 2'-O-methyluridine-3'-phosphate
  modified_base 14: mod_base = OTHER; note = 2'-fluoroadenosine-3'-phosphate
  modified_base 15: mod_base = OTHER; note = 2'-O-methylguanosine-3'-phosphate
  modified_base 16: mod_base = OTHER; note = 2'-fluorocytidine-3'-phosphate
  modified_base 17: mod_base = OTHER; note = 2'-O-methylcytidine-3'-phosphate
  modified_base 18: mod_base = OTHER; note = 2'-O-methylcytidine-3'-phosphate
  modified_base 19: mod_base = OTHER; note = 2'-O-methyladenosine-3'-phosphate
  modified_base 20: mod_base = OTHER; note = 2'-O-methyluridine-3'-phosphate
  modified_base 21: mod_base = OTHER; note = 2'-O-methylcytidine-3'- phosphorothioate
  modified_base 22: mod_base = OTHER; note = 2'-O-methyluridine-3'-phosphorothioate
  modified_base 23: mod_base = OTHER; note = 2'-O-methyluridine-3'-phosphate
aatatggccttgtagcccatctt

SEQ ID NO: 2282 - RNA, 21 nt, synthetic construct
  source 1..21: mol_type = other RNA
  modified_base 1: mod_base = OTHER; note = 2'-O-methyladenosine-3'- phosphorothioate
  modified_base 2: mod_base = OTHER; note = 2'-O-methylcytidine-3'- phosphorothioate
  modified_base 3: mod_base = OTHER; note = 2'-O-methyluridine-3'-phosphate
  modified_base 4: mod_base = OTHER; note = 2'-O-methylguanosine-3'-phosphate
  modified_base 5: mod_base = OTHER; note = 2'-O-methylguanosine-3'-phosphate
  modified_base 6: mod_base = OTHER; note = 2'-O-methyladenosine-3'-phosphate
  modified_base 7: mod_base = OTHER; note = 2'-fluoroguanosine-3'-phosphate
  modified_base 8: mod_base = OTHER; note = 2'-O-methyladenosine-3'-phosphate
  modified_base 9: mod_base = OTHER; note = 2'-fluoroguanosine-3'-phosphate
  modified_base 10: mod_base = OTHER; note = 2'-fluoroadenosine-3'-phosphate
  modified_base 11: mod_base = OTHER; note = 2'-fluoroadenosine-3'-phosphate
  modified_base 12: mod_base = OTHER; note = 2'-O-methyluridine-3'-phosphate
  modified_base 13: mod_base = OTHER; note = 2'-O-methyluridine-3'-phosphate
  modified_base 14: mod_base = OTHER; note = 2'-O-methylguanosine-3'-phosphate
  modified_base 15: mod_base = OTHER; note = 2'-O-methylguanosine-3'-phosphate
  modified_base 16: mod_base = OTHER; note = 2'-O-methyladenosine-3'-phosphate
  modified_base 17: mod_base = OTHER; note = 2'-O-methyladenosine-3'-phosphate
  modified_base 18: mod_base = OTHER; note = 2'-O-methyluridine-3'-phosphate
  modified_base 19: mod_base = OTHER; note = 2'-O-methylguanosine-3'-phosphate
  modified_base 20: mod_base = OTHER; note = 2'-O-methylguanosine-3'-phosphate
  modified_base 21: mod_base = OTHER; note 2'-O-methylguanosine-3'-phosphate-N-[tris(GalNAc-alkyl)-ami dodecanoyl)]-4-hydroxyprolinol (Hyp-(GalNAc-alkyl)3)
actggagagaattggaatggg

SEQ ID NO: 2283 - RNA, 23 nt, synthetic construct
  source 1..23: mol_type = other RNA
  modified_base 1: mod_base = OTHER; note = 2'-O-methylcytidine-3'- phosphorothioate
  modified_base 2: mod_base = OTHER; note = 2'-fluorocytidine-3'-phosphorothioate
  modified_base 3: mod_base = OTHER; note = 2'-O-methylcytidine-3'-phosphate
  modified_base 4: mod_base = OTHER; note = 2'-O-methyladenosine-3'-phosphate
  modified_base 5: mod_base = OTHER; note = 2'-O-methyluridine-3'-phosphate
  modified_base 6: mod_base = OTHER; note = 2'-fluorouridine-3'-phosphate
  modified_base 7: mod_base = OTHER; note = 2'-O-methylcytidine-3'-phosphate
  modified_base 8: mod_base = OTHER; note = 2'-fluorocytidine-3'-phosphate
  modified_base 9: mod_base = OTHER; note = 2'-fluoroadenosine-3'-phosphate
  modified_base 10: mod_base = OTHER; note = 2'-O-methyladenosine-3'-phosphate
  modified_base 11: mod_base = OTHER; note = 2'-O-methyluridine-3'-phosphate
  modified_base 12: mod_base = OTHER; note = 2'-O-methyluridine-3'-phosphate
  modified_base 13: mod_base = OTHER; note = 2'-O-methylcytidine-3'-phosphate
  modified_base 14: mod_base = OTHER; note = 2'-fluorouridine-3'-phosphate
  modified_base 15: mod_base = OTHER; note = 2'-O-methylcytidine-3'-phosphate
  modified_base 16: mod_base = OTHER; note = 2'-fluorouridine-3'-phosphate
  modified_base 17: mod_base = OTHER; note = 2'-O-methylcytidine-3'-phosphate
  modified_base 18: mod_base = OTHER; note = 2'-O-methylcytidine-3'-phosphate
  modified_base 19: mod_base = OTHER; note = 2'-O-methyladenosine-3'-phosphate
  modified_base 20: mod_base = OTHER; note = 2'-O-methylguanosine-3'-phosphate
  modified_base 21: mod_base = OTHER; note = 2'-O-methyluridine-3'-phosphorothioate
  modified_base 22: mod_base = OTHER; note = 2'-O-methylguanosine-3'- phosphorothioate
  modified_base 23: mod_base = OTHER; note = 2'-O-methylcytidine-3'-phosphate
cccattccaattctctccagtgc

SEQ ID NO: 2284 - RNA, 21 nt, synthetic construct
  source 1..21: mol_type = other RNA
  modified_base 1: mod_base = OTHER; note = 2'-O-methylcytidine-3'- phosphorothioate
  modified_base 2: mod_base = OTHER; note = 2'-O-methyluridine-3'-phosphorothioate
  modified_base 3: mod_base = OTHER; note = 2'-O-methylguanosine-3'-phosphate
  modified_base 4: mod_base = OTHER; note = 2'-O-methylguanosine-3'-phosphate
  modified_base 5: mod_base = OTHER; note = 2'-O-methyladenosine-3'-phosphate
  modified_base 6: mod_base = OTHER; note = 2'-O-methylguanosine-3'-phosphate
  modified_base 7: mod_base = OTHER; note = 2'-fluoroadenosine-3'-phosphate
  modified_base 8: mod_base = OTHER; note = 2'-O-methylguanosine-3'-phosphate
  modified_base 9: mod_base = OTHER; note = 2'-fluoroadenosine-3'-phosphate
  modified_base 10: mod_base = OTHER; note = 2'-fluoroadenosine-3'-phosphate
  modified_base 11: mod_base = OTHER; note = 2'-fluorouridine-3'-phosphate
  modified_base 12: mod_base = OTHER; note = 2'-O-methyluridine-3'-phosphate
  modified_base 13: mod_base = OTHER; note = 2'-O-methylguanosine-3'-phosphate
  modified_base 14: mod_base = OTHER; note = 2'-O-methylguanosine-3'-phosphate
  modified_base 15: mod_base = OTHER; note = 2'-O-methyladenosine-3'-phosphate
  modified_base 16: mod_base = OTHER; note = 2'-O-methyladenosine-3'-phosphate
  modified_base 17: mod_base = OTHER; note = 2'-O-methyluridine-3'-phosphate
  modified_base 18: mod_base = OTHER; note = 2'-O-methylguanosine-3'-phosphate
  modified_base 19: mod_base = OTHER; note = 2'-O-methylguanosine-3'-phosphate
  modified_base 20: mod_base = OTHER; note = 2'-O-methylguanosine-3'-phosphate
  modified_base 21: mod_base = OTHER; note 2'-O-methyluridine-3'-phosphate-N-[tris(GalNAc-alkyl)-amido decanoyl)]-4-hydroxyprolinol (Hyp-(GalNAc-alkyl)3)
ctggagagaattggaatgggt

SEQ ID NO: 2285 - RNA, 23 nt, synthetic construct
  source 1..23: mol_type = other RNA
  modified_base 1: mod_base = OTHER; note = 2'-O-methyladenosine-3'- phosphorothioate
  modified_base 2: mod_base = OTHER; note = 2'-fluorocytidine-3'-phosphorothioate
  modified_base 3: mod_base = OTHER; note = 2'-O-methylcytidine-3'-phosphate
  modified_base 4: mod_base = OTHER; note = 2'-O-methylcytidine-3'-phosphate
  modified_base 5: mod_base = OTHER; note = 2'-O-methyladenosine-3'-phosphate
  modified_base 6: mod_base = OTHER; note = 2'-fluorouridine-3'-phosphate
  modified_base 7: mod_base = OTHER; note = 2'-O-methyluridine-3'-phosphate
  modified_base 8: mod_base = OTHER; note = 2'-fluorocytidine-3'-phosphate
  modified_base 9: mod_base = OTHER; note = 2'-fluorocytidine-3'-phosphate
  modified_base 10: mod_base = OTHER; note = 2'-O-methyladenosine-3'-phosphate
  modified_base 11: mod_base = OTHER; note = 2'-O-methyladenosine-3'-phosphate
  modified_base 12: mod_base = OTHER; note = 2'-O-methyluridine-3'-phosphate
  modified_base 13: mod_base = OTHER; note = 2'-O-methyluridine-3'-phosphate
  modified_base 14: mod_base = OTHER; note = 2'-fluorocytidine-3'-phosphate
  modified_base 15: mod_base = OTHER; note = 2'-O-methyluridine-3'-phosphate
  modified_base 16: mod_base = OTHER; note = 2'-fluorocytidine-3'-phosphate
  modified_base 17: mod_base = OTHER; note = 2'-O-methyluridine-3'-phosphate
  modified_base 18: mod_base = OTHER; note = 2'-O-methylcytidine-3'-phosphate
  modified_base 19: mod_base = OTHER; note = 2'-O-methylcytidine-3'-phosphate
  modified_base 20: mod_base = OTHER; note = 2'-O-methyladenosine-3'-phosphate
  modified_base 21: mod_base = OTHER; note = 2'-O-methylguanosine-3'- phosphorothioate
  modified_base 22: mod_base = OTHER; note = 2'-O-methyluridine-3'-phosphorothioate
  modified_base 23: mod_base = OTHER; note = 2'-O-methylguanosine-3'-phosphate
acccattccaattctctccagtg

SEQ ID NO: 2286 - RNA, 21 nt, synthetic construct
  source 1..21: mol_type = other RNA
  modified_base 1: mod_base = OTHER; note = 2'-O-methyluridine-3'-phosphorothioate
  modified_base 2: mod_base = OTHER; note = 2'-O-methyladenosine-3'- phosphorothioate
  modified_base 3: mod_base = OTHER; note = 2'-O-methylguanosine-3'-phosphate
  modified_base 4: mod_base = OTHER; note = 2'-O-methylcytidine-3'-phosphate
  modified_base 5: mod_base = OTHER; note = 2'-O-methyladenosine-3'-phosphate
  modified_base 6: mod_base = OTHER; note = 2'-O-methylcytidine-3'-phosphate
  modified_base 7: mod_base = OTHER; note = 2'-fluorouridine-3'-phosphate
  modified_base 8: mod_base = OTHER; note = 2'-O-methylguanosine-3'-phosphate
  modified_base 9: mod_base = OTHER; note = 2'-fluoroguanosine-3'-phosphate
  modified_base 10: mod_base = OTHER; note = 2'-fluoroadenosine-3'-phosphate
  modified_base 11: mod_base = OTHER; note = 2'-fluoroguanosine-3'-phosphate
  modified_base 12: mod_base = OTHER; note = 2'-O-methyladenosine-3'-phosphate
  modified_base 13: mod_base = OTHER; note = 2'-O-methylguanosine-3'-phosphate
  modified_base 14: mod_base = OTHER; note = 2'-O-methyladenosine-3'-phosphate
  modified_base 15: mod_base = OTHER; note = 2'-O-methyladenosine-3'-phosphate
  modified_base 16: mod_base = OTHER; note = 2'-O-methyluridine-3'-phosphate
  modified_base 17: mod_base = OTHER; note = 2'-O-methyluridine-3'-phosphate
  modified_base 18: mod_base = OTHER; note = 2'-O-methylguanosine-3'-phosphate
  modified_base 19: mod_base = OTHER; note = 2'-O-methylguanosine-3'-phosphate
  modified_base 20: mod_base = OTHER; note = 2'-O-methyladenosine-3'-phosphate
  modified_base 21: mod_base = OTHER; note 2'-O-methyladenosine-3'-phosphate-N-[tris(GalNAc-alkyl)-ami dodecanoyl)]-4-hydroxyprolinol (Hyp-(GalNAc-alkyl)3)
tagcactggagagaattggaa

SEQ ID NO: 2287 - RNA, 23 nt, synthetic construct
  source 1..23: mol_type = other RNA
  modified_base 1: mod_base = OTHER; note = 2'-O-methyluridine-3'-phosphorothioate
  modified_base 2: mod_base = OTHER; note = 2'-fluorouridine -3'-phosphorothioate
  modified_base 3: mod_base = OTHER; note = 2'-O-methylcytidine-3'-phosphate
  modified_base 4: mod_base = OTHER; note = 2'-O-methylcytidine-3'-phosphate
  modified_base 5: mod_base = OTHER; note = 2'-O-methyladenosine-3'-phosphate
  modified_base 6: mod_base = OTHER; note = 2'-fluoroadenosine-3'-phosphate
  modified_base 7: mod_base = OTHER; note = 2'-O-methyluridine-3'-phosphate
  modified_base 8: mod_base = OTHER; note = 2'-fluorouridine-3'-phosphate
  modified_base 9: mod_base = OTHER; note = 2'-fluorocytidine-3'-phosphate
  modified_base 10: mod_base = OTHER; note = 2'-O-methyluridine-3'-phosphate
  modified_base 11: mod_base = OTHER; note = 2'-O-methylcytidine-3'-phosphate
  modified_base 12: mod_base = OTHER; note = 2'-O-methyluridine-3'-phosphate
  modified_base 13: mod_base = OTHER; note = 2'-O-methylcytidine-3'-phosphate
  modified_base 14: mod_base = OTHER; note = 2'-fluorocytidine-3'-phosphate
  modified_base 15: mod_base = OTHER; note = 2'-O-methyladenosine-3'-phosphate
  modified_base 16: mod_base = OTHER; note = 2'-fluoroguanosine-3'-phosphate
  modified_base 17: mod_base = OTHER; note = 2'-O-methyluridine-3'-phosphate
  modified_base 18: mod_base = OTHER; note = 2'-O-methylguanosine-3'-phosphate
  modified_base 19: mod_base = OTHER; note = 2'-O-methylcytidine-3'-phosphate
  modified_base 20: mod_base = OTHER; note = 2'-O-methyluridine-3'-phosphate
  modified_base 21: mod_base = OTHER; note = 2'-O-methyladenosine-3'- phosphorothioate
  modified_base 22: mod_base = OTHER; note = 2'-O-methylcytidine-3'- phosphorothioate
  modified_base 23: mod_base = OTHER; note = 2'-O-methylcytidine-3'-phosphate
ttccaattctctccagtgctacc

SEQ ID NO: 2288 - RNA, 21 nt, synthetic construct
  source 1..21: mol_type = other RNA
  modified_base 1: mod_base = OTHER; note = 2'-O-methylguanosine-3'- phosphorothioate
  modified_base 2: mod_base = OTHER; note = 2'-O-methyluridine-3'-phosphorothioate
  modified_base 3: mod_base = OTHER; note = 2'-O-methyladenosine-3'-phosphate
  modified_base 4: mod_base = OTHER; note = 2'-O-methylguanosine-3'-phosphate
  modified_base 5: mod_base = OTHER; note = 2'-O-methylcytidine-3'-phosphate
  modified_base 6: mod_base = OTHER; note = 2'-O-methyladenosine-3'-phosphate
  modified_base 7: mod_base = OTHER; note = 2'-fluorocytidine-3'-phosphate
  modified_base 8: mod_base = OTHER; note = 2'-O-methyluridine-3'-phosphate
  modified_base 9: mod_base = OTHER; note = 2'-fluoroguanosine-3'-phosphate
  modified_base 10: mod_base = OTHER; note = 2'-fluoroguanosine-3'-phosphate
  modified_base 11: mod_base = OTHER; note = 2'-fluoroadenosine-3'-phosphate
  modified_base 12: mod_base = OTHER; note = 2'-O-methylguanosine-3'-phosphate
  modified_base 13: mod_base = OTHER; note = 2'-O-methyladenosine-3'-phosphate
  modified_base 14: mod_base = OTHER; note = 2'-O-methylguanosine-3'-phosphate
  modified_base 15: mod_base = OTHER; note = 2'-O-methyladenosine-3'-phosphate
  modified_base 16: mod_base = OTHER; note = 2'-O-methyladenosine-3'-phosphate
  modified_base 17: mod_base = OTHER; note = 2'-O-methyluridine-3'-phosphate
  modified_base 18: mod_base = OTHER; note = 2'-O-methyluridine-3'-phosphate
  modified_base 19: mod_base = OTHER; note = 2'-O-methylguanosine-3'-phosphate
  modified_base 20: mod_base = OTHER; note = 2'-O-methylguanosine-3'-phosphate
  modified_base 21: mod_base = OTHER; note 2'-O-methyladenosine-3'-phosphate-N-[tris(GalNAc-alkyl)-ami dodecanoyl)]-4-hydroxyprolinol (Hyp-(GalNAc-alkyl)3)
gtagcactggagagaattgga

SEQ ID NO: 2289 - RNA, 23 nt, synthetic construct
  source 1..23: mol_type = other RNA
  modified_base 1: mod_base = OTHER; note = 2'-O-methyluridine-3'-phosphorothioate
  modified_base 2: mod_base = OTHER; note = 2'-fluorocytidine-3'-phosphorothioate
  modified_base 3: mod_base = OTHER; note = 2'-O-methylcytidine-3'-phosphate
  modified_base 4: mod_base = OTHER; note = 2'-O-methyladenosine-3'-phosphate
  modified_base 5: mod_base = OTHER; note = 2'-O-methyladenosine-3'-phosphate
  modified_base 6: mod_base = OTHER; note = 2'-fluorouridine-3'-phosphate
  modified_base 7: mod_base = OTHER; note = 2'-O-methyluridine-3'-phosphate
  modified_base 8: mod_base = OTHER; note = 2'-fluorocytidine-3'-phosphate
  modified_base 9: mod_base = OTHER; note = 2'-fluorouridine-3'-phosphate
  modified_base 10: mod_base = OTHER; note = 2'-O-methylcytidine-3'-phosphate
  modified_base 11: mod_base = OTHER; note = 2'-O-methyluridine-3'-phosphate
  modified_base 12: mod_base = OTHER; note = 2'-O-methylcytidine-3'-phosphate
  modified_base 13: mod_base = OTHER; note = 2'-O-methylcytidine-3'-phosphate
  modified_base 14: mod_base = OTHER; note = 2'-fluoroadenosine-3'-phosphate
  modified_base 15: mod_base = OTHER; note = 2'-O-methylguanosine-3'-phosphate
  modified_base 16: mod_base = OTHER; note = 2'-fluorouridine-3'-phosphate
  modified_base 17: mod_base = OTHER; note = 2'-O-methylguanosine-3'-phosphate
  modified_base 18: mod_base = OTHER; note = 2'-O-methylcytidine-3'-phosphate
  modified_base 19: mod_base = OTHER; note = 2'-O-methyluridine-3'-phosphate
  modified_base 20: mod_base = OTHER; note = 2'-O-methyladenosine-3'-phosphate
  modified_base 21: mod_base = OTHER; note = 2'-O-methylcytidine-3'- phosphorothioate
  modified_base 22: mod_base = OTHER; note = 2'-O-methylcytidine-3'- phosphorothioate
  modified_base 23: mod_base = OTHER; note = 2'-O-methyluridine-3'-phosphate
tccaattctctccagtgctacct

SEQ ID NO: 2290 - RNA, 21 nt, synthetic construct
  source 1..21: mol_type = other RNA
  modified_base 1: mod_base = OTHER; note = 2'-O-methyladenosine-3'- phosphorothioate
  modified_base 2: mod_base = OTHER; note = 2'-O-methylcytidine-3'- phosphorothioate
  modified_base 3: mod_base = OTHER; note = 2'-O-methyladenosine-3'-phosphate
  modified_base 4: mod_base = OTHER; note = 2'-O-methylguanosine-3'-phosphate
  modified_base 5: mod_base = OTHER; note = 2'-O-methyluridine-3'-phosphate
  modified_base 6: mod_base = OTHER; note = 2'-O-methylguanosine-3'-phosphate
  modified_base 7: mod_base = OTHER; note = 2'-fluoroguanosine-3'-phosphate
  modified_base 8: mod_base = OTHER; note = 2'-O-methyladenosine-3'-phosphate
  modified_base 9: mod_base = OTHER; note = 2'-fluorocytidine-3'-phosphate
  modified_base 10: mod_base = OTHER; note = 2'-fluoroadenosine-3'-phosphate
  modified_base 11: mod_base = OTHER; note = 2'-fluorocytidine-3'-phosphate
  modified_base 12: mod_base = OTHER; note = 2'-O-methyladenosine-3'-phosphate
  modified_base 13: mod_base = OTHER; note = 2'-O-methylcytidine-3'-phosphate
  modified_base 14: mod_base = OTHER; note = 2'-O-methylcytidine-3'-phosphate
  modified_base 15: mod_base = OTHER; note = 2'-O-methyluridine-3'-phosphate
  modified_base 16: mod_base = OTHER; note = 2'-O-methyluridine-3'-phosphate
  modified_base 17: mod_base = OTHER; note = 2'-O-methyladenosine-3'-phosphate
  modified_base 18: mod_base = OTHER; note = 2'-O-methylcytidine-3'-phosphate
  modified_base 19: mod_base = OTHER; note = 2'-O-methylcytidine-3'-phosphate
  modified_base 20: mod_base = OTHER; note = 2'-O-methyluridine-3'-phosphate
  modified_base 21: mod_base = OTHER; note 2'-O-methylguanosine-3'-phosphate-N-[tris(GalNAc-alkyl)-ami dodecanoyl)]-4-hydroxyprolinol (Hyp-(GalNAc-alkyl)3)
acagtggacacaccttacctg

SEQ ID NO: 2291 - RNA, 23 nt, synthetic construct
  source 1..23: mol_type = other RNA
  modified_base 1: mod_base = OTHER; note = 2'-O-methylcytidine-3'- phosphorothioate
  modified_base 2: mod_base = OTHER; note = 2'-fluoroadenosine-3'-phosphorothioate
  modified_base 3: mod_base = OTHER; note = 2'-O-methylguanosine-3'-phosphate
  modified_base 4: mod_base = OTHER; note = 2'-O-methylguanosine-3'-phosphate
  modified_base 5: mod_base = OTHER; note = 2'-O-methyluridine-3'-phosphate
  modified_base 6: mod_base = OTHER; note = 2'-fluoroadenosine-3'-phosphate
  modified_base 7: mod_base = OTHER; note = 2'-O-methyladenosine-3'-phosphate
  modified_base 8: mod_base = OTHER; note = 2'-fluoroguanosine-3'-phosphate
  modified_base 9: mod_base = OTHER; note = 2'-fluoroguanosine-3'-phosphate
  modified_base 10: mod_base = OTHER; note = 2'-O-methyluridine-3'-phosphate
  modified_base 11: mod_base = OTHER; note = 2'-O-methylguanosine-3'-phosphate
  modified_base 12: mod_base = OTHER; note = 2'-O-methyluridine-3'-phosphate
  modified_base 13: mod_base = OTHER; note = 2'-O-methylguanosine-3'-phosphate
  modified_base 14: mod_base = OTHER; note = 2'-fluorouridine-3'-phosphate
  modified_base 15: mod_base = OTHER; note = 2'-O-methylcytidine-3'-phosphate
  modified_base 16: mod_base = OTHER; note = 2'-fluorocytidine-3'-phosphate
  modified_base 17: mod_base = OTHER; note = 2'-O-methyladenosine-3'-phosphate
  modified_base 18: mod_base = OTHER; note = 2'-O-methylcytidine-3'-phosphate
  modified_base 19: mod_base = OTHER; note = 2'-O-methyluridine-3'-phosphate
  modified_base 20: mod_base = OTHER; note = 2'-O-methylguanosine-3'-phosphate
  modified_base 21: mod_base = OTHER; note = 2'-O-methyluridine-3'-phosphorothioate
  modified_base 22: mod_base = OTHER; note = 2'-O-methylcytidine-3'- phosphorothioate
  modified_base 23: mod_base = OTHER; note = 2'-O-methyladenosine-3'-phosphate
caggtaaggtgtgtccactgtca

SEQ ID NO: 2292 - RNA, 21 nt, synthetic construct
  source 1..21: mol_type = other RNA
  modified_base 1: mod_base = OTHER; note = 2'-O-methylcytidine-3'- phosphorothioate
  modified_base 2: mod_base = OTHER; note = 2'-O-methyladenosine-3'- phosphorothioate
  modified_base 3: mod_base = OTHER; note = 2'-O-methylguanosine-3'-phosphate
  modified_base 4: mod_base = OTHER; note = 2'-O-methyluridine-3'-phosphate
  modified_base 5: mod_base = OTHER; note = 2'-O-methylguanosine-3'-phosphate
  modified_base 6: mod_base = OTHER; note = 2'-O-methylguanosine-3'-phosphate
  modified_base 7: mod_base = OTHER; note = 2'-fluoroadenosine-3'-phosphate
  modified_base 8: mod_base = OTHER; note = 2'-O-methylcytidine-3'-phosphate
  modified_base 9: mod_base = OTHER; note = 2'-fluoroadenosine-3'-phosphate
  modified_base 10: mod_base = OTHER; note = 2'-fluorocytidine-3'-phosphate
  modified_base 11: mod_base = OTHER; note = 2'-fluoroadenosine-3'-phosphate
  modified_base 12: mod_base = OTHER; note = 2'-O-methylcytidine-3'-phosphate
  modified_base 13: mod_base = OTHER; note = 2'-O-methylcytidine-3'-phosphate
  modified_base 14: mod_base = OTHER; note = 2'-O-methyluridine-3'-phosphate
  modified_base 15: mod_base = OTHER; note = 2'-O-methyluridine-3'-phosphate
  modified_base 16: mod_base = OTHER; note = 2'-O-methyladenosine-3'-phosphate
  modified_base 17: mod_base = OTHER; note = 2'-O-methylcytidine-3'-phosphate
  modified_base 18: mod_base = OTHER; note = 2'-O-methylcytidine-3'-phosphate
  modified_base 19: mod_base = OTHER; note = 2'-O-methyluridine-3'-phosphate
  modified_base 20: mod_base = OTHER; note = 2'-O-methylguanosine-3'-phosphate
  modified_base 21: mod_base = OTHER; note 2'-O-methylguanosine-3'-phosphate-N-[tris(GalNAc-alkyl)-ami dodecanoyl)]-4-hydroxyprolinol (Hyp-(GalNAc-alkyl)3)
cagtggacacaccttacctgg

SEQ ID NO: 2293 - RNA, 23 nt, synthetic construct
  source 1..23: mol_type = other RNA
  modified_base 1: mod_base = OTHER; note = 2'-O-methylcytidine-3'- phosphorothioate
  modified_base 2: mod_base = OTHER; note = 2'-fluorocytidine-3'-phosphorothioate
  modified_base 3: mod_base = OTHER; note = 2'-O-methyladenosine-3'-phosphate
  modified_base 4: mod_base = OTHER; note = 2'-O-methylguanosine-3'-phosphate
  modified_base 5: mod_base = OTHER; note = 2'-O-methylguanosine-3'-phosphate
  modified_base 6: mod_base = OTHER; note = 2'-fluorouridine-3'-phosphate
  modified_base 7: mod_base = OTHER; note = 2'-O-methyladenosine-3'-phosphate
  modified_base 8: mod_base = OTHER; note = 2'-fluoroadenosine-3'-phosphate
  modified_base 9: mod_base = OTHER; note = 2'-fluoroguanosine-3'-phosphate
  modified_base 10: mod_base = OTHER; note = 2'-O-methylguanosine-3'-phosphate
  modified_base 11: mod_base = OTHER; note = 2'-O-methyluridine-3'-phosphate
  modified_base 12: mod_base = OTHER; note = 2'-O-methylguanosine-3'-phosphate
  modified_base 13: mod_base = OTHER; note = 2'-O-methyluridine-3'-phosphate
  modified_base 14: mod_base = OTHER; note = 2'-fluoroguanosine-3'-phosphate
  modified_base 15: mod_base = OTHER; note = 2'-O-methyluridine-3'-phosphate
  modified_base 16: mod_base = OTHER; note = 2'-fluorocytidine-3'-phosphate
  modified_base 17: mod_base = OTHER; note = 2'-O-methylcytidine-3'-phosphate
  modified_base 18: mod_base = OTHER; note = 2'-O-methyladenosine-3'-phosphate
  modified_base 19: mod_base = OTHER; note = 2'-O-methylcytidine-3'-phosphate
  modified_base 20: mod_base = OTHER; note = 2'-O-methyluridine-3'-phosphate
  modified_base 21: mod_base = OTHER; note = 2'-O-methylguanosine-3'- phosphorothioate
  modified_base 22: mod_base = OTHER; note = 2'-O-methyluridine-3'-phosphorothioate
  modified_base 23: mod_base = OTHER; note = 2'-O-methylcytidine-3'-phosphate
ccaggtaaggtgtgtccactgtc

SEQ ID NO: 2294 - RNA, 21 nt, synthetic construct
  source 1..21: mol_type = other RNA
  modified_base 1: mod_base = OTHER; note = 2'-O-methyluridine-3'-phosphorothioate
  modified_base 2: mod_base = OTHER; note = 2'-O-methylguanosine-3'- phosphorothioate
  modified_base 3: mod_base = OTHER; note = 2'-O-methyluridine-3'-phosphate
  modified_base 4: mod_base = OTHER; note = 2'-O-methylguanosine-3'-phosphate
  modified_base 5: mod_base = OTHER; note = 2'-O-methyladenosine-3'-phosphate
  modified_base 6: mod_base = OTHER; note = 2'-O-methylcytidine-3'-phosphate
  modified_base 7: mod_base = OTHER; note = 2'-fluoroadenosine-3'-phosphate
  modified_base 8: mod_base = OTHER; note = 2'-O-methylguanosine-3'-phosphate
  modified_base 9: mod_base = OTHER; note = 2'-fluorouridine-3'-phosphate
  modified_base 10: mod_base = OTHER; note = 2'-fluoroguanosine-3'-phosphate
  modified_base 11: mod_base = OTHER; note = 2'-fluoroguanosine-3'-phosphate
  modified_base 12: mod_base = OTHER; note = 2'-O-methyladenosine-3'-phosphate
  modified_base 13: mod_base = OTHER; note = 2'-O-methylcytidine-3'-phosphate
  modified_base 14: mod_base = OTHER; note = 2'-O-methyladenosine-3'-phosphate
  modified_base 15: mod_base = OTHER; note = 2'-O-methylcytidine-3'-phosphate
  modified_base 16: mod_base = OTHER; note = 2'-O-methyladenosine-3'-phosphate
  modified_base 17: mod_base = OTHER; note = 2'-O-methylcytidine-3'-phosphate
  modified_base 18: mod_base = OTHER; note = 2'-O-methylcytidine-3'-phosphate
  modified_base 19: mod_base = OTHER; note = 2'-O-methyluridine-3'-phosphate
  modified_base 20: mod_base = OTHER; note = 2'-O-methyluridine-3'-phosphate
  modified_base 21: mod_base = OTHER; note 2'-O-methyladenosine-3'-phosphate-N-[tris(GalNAc-alkyl)-ami dodecanoyl)]-4-hydroxyprolinol (Hyp-(GalNAc-alkyl)3)
tgtgacagtggacacacctta

SEQ ID NO: 2295 - RNA, 23 nt, synthetic construct
  source 1..23: mol_type = other RNA
  modified_base 1: mod_base = OTHER; note = 2'-O-methyluridine-3'-phosphorothioate
  modified_base 2: mod_base = OTHER; note = 2'-fluoroadenosine-3'-phosphorothioate
  modified_base 3: mod_base = OTHER; note = 2'-O-methyladenosine-3'-phosphate
  modified_base 4: mod_base = OTHER; note = 2'-O-methylguanosine-3'-phosphate
  modified_base 5: mod_base = OTHER; note = 2'-O-methylguanosine-3'-phosphate
  modified_base 6: mod_base = OTHER; note = 2'-fluorouridine-3'-phosphate
  modified_base 7: mod_base = OTHER; note = 2'-O-methylguanosine-3'-phosphate
  modified_base 8: mod_base = OTHER; note = 2'-fluorouridine-3'-phosphate
  modified_base 9: mod_base = OTHER; note = 2'-fluoroguanosine-3'-phosphate
  modified_base 10: mod_base = OTHER; note = 2'-O-methyluridine-3'-phosphate
  modified_base 11: mod_base = OTHER; note = 2'-O-methylcytidine-3'-phosphate
  modified_base 12: mod_base = OTHER; note = 2'-O-methylcytidine-3'-phosphate
  modified_base 13: mod_base = OTHER; note = 2'-O-methyladenosine-3'-phosphate
  modified_base 14: mod_base = OTHER; note = 2'-fluorocytidine-3'-phosphate
  modified_base 15: mod_base = OTHER; note = 2'-O-methyluridine-3'-phosphate
  modified_base 16: mod_base = OTHER; note = 2'-fluoroguanosine-3'-phosphate
  modified_base 17: mod_base = OTHER; note = 2'-O-methyluridine-3'-phosphate
  modified_base 18: mod_base = OTHER; note = 2'-O-methylcytidine-3'-phosphate
  modified_base 19: mod_base = OTHER; note = 2'-O-methyladenosine-3'-phosphate
  modified_base 20: mod_base = OTHER; note = 2'-O-methylcytidine-3'-phosphate
  modified_base 21: mod_base = OTHER; note = 2'-O-methyladenosine-3'- phosphorothioate
  modified_base 22: mod_base = OTHER; note = 2'-O-methyladenosine-3'- phosphorothioate
  modified_base 23: mod_base = OTHER; note = 2'-O-methyladenosine-3'-phosphate
taaggtgtgtccactgtcacaaa

SEQ ID NO: 2296 - RNA, 21 nt, synthetic construct
  source 1..21: mol_type = other RNA
  modified_base 1: mod_base = OTHER; note = 2'-O-methyluridine-3'-phosphorothioate
  modified_base 2: mod_base = OTHER; note = 2'-O-methyluridine-3'-phosphorothioate
  modified_base 3: mod_base = OTHER; note = 2'-O-methylguanosine-3'-phosphate
  modified_base 4: mod_base = OTHER; note = 2'-O-methyluridine-3'-phosphate
  modified_base 5: mod_base = OTHER; note = 2'-O-methylguanosine-3'-phosphate
  modified_base 6: mod_base = OTHER; note = 2'-O-methyladenosine-3'-phosphate
  modified_base 7: mod_base = OTHER; note = 2'-fluorocytidine-3'-phosphate
  modified_base 8: mod_base = OTHER; note = 2'-O-methyladenosine-3'-phosphate
  modified_base 9: mod_base = OTHER; note = 2'-fluoroguanosine-3'-phosphate
  modified_base 10: mod_base = OTHER; note = 2'-fluorouridine-3'-phosphate
  modified_base 11: mod_base = OTHER; note = 2'-fluoroguanosine-3'-phosphate
  modified_base 12: mod_base = OTHER; note = 2'-O-methylguanosine-3'-phosphate
  modified_base 13: mod_base = OTHER; note = 2'-O-methyladenosine-3'-phosphate
  modified_base 14: mod_base = OTHER; note = 2'-O-methylcytidine-3'-phosphate
  modified_base 15: mod_base = OTHER; note = 2'-O-methyladenosine-3'-phosphate
  modified_base 16: mod_base = OTHER; note = 2'-O-methylcytidine-3'-phosphate
  modified_base 17: mod_base = OTHER; note = 2'-O-methyladenosine-3'-phosphate
  modified_base 18: mod_base = OTHER; note = 2'-O-methylcytidine-3'-phosphate
  modified_base 19: mod_base = OTHER; note = 2'-O-methylcytidine-3'-phosphate
  modified_base 20: mod_base = OTHER; note = 2'-O-methyluridine-3'-phosphate
  modified_base 21: mod_base = OTHER; note 2'-O-methyluridine-3'-phosphate-N-[tris(GalNAc-alkyl)-amido decanoyl)]-4-hydroxyprolinol (Hyp-(GalNAc-alkyl)3)
ttgtgacagtggacacacctt

SEQ ID NO: 2297 - RNA, 23 nt, synthetic construct
  source 1..23: mol_type = other RNA
  modified_base 1: mod_base = OTHER; note = 2'-O-methyladenosine-3'- phosphorothioate
  modified_base 2: mod_base = OTHER; note = 2'-fluoroadenosine-3'-phosphorothioate
  modified_base 3: mod_base = OTHER; note = 2'-O-methylguanosine-3'-phosphate
  modified_base 4: mod_base = OTHER; note = 2'-O-methylguanosine-3'-phosphate
  modified_base 5: mod_base = OTHER; note = 2'-O-methyluridine-3'-phosphate
  modified_base 6: mod_base = OTHER; note = 2'-fluoroguanosine-3'-phosphate
  modified_base 7: mod_base = OTHER; note = 2'-O-methyluridine-3'-phosphate
  modified_base 8: mod_base = OTHER; note = 2'-fluoroguanosine-3'-phosphate
  modified_base 9: mod_base = OTHER; note = 2'-fluorouridine-3'-phosphate
  modified_base 10: mod_base = OTHER; note = 2'-O-methylcytidine-3'-phosphate
  modified_base 11: mod_base = OTHER; note = 2'-O-methylcytidine-3'-phosphate
  modified_base 12: mod_base = OTHER; note = 2'-O-methyladenosine-3'-phosphate
  modified_base 13: mod_base = OTHER; note = 2'-O-methylcytidine-3'-phosphate
  modified_base 14: mod_base = OTHER; note = 2'-fluorouridine-3'-phosphate
  modified_base 15: mod_base = OTHER; note = 2'-O-methylguanosine-3'-phosphate
  modified_base 16: mod_base = OTHER; note = 2'-fluorouridine-3'-phosphate
  modified_base 17: mod_base = OTHER; note = 2'-O-methylcytidine-3'-phosphate
  modified_base 18: mod_base = OTHER; note = 2'-O-methyladenosine-3'-phosphate
  modified_base 19: mod_base = OTHER; note = 2'-O-methylcytidine-3'-phosphate
  modified_base 20: mod_base = OTHER; note = 2'-O-methyladenosine-3'-phosphate
  modified_base 21: mod_base = OTHER; note = 2'-O-methyladenosine-3'- phosphorothioate
  modified_base 22: mod_base = OTHER; note = 2'-O-methyladenosine-3'- phosphorothioate
  modified_base 23: mod_base = OTHER; note = 2'-O-methyluridine-3'-phosphate
aaggtgtgtccactgtcacaaat

SEQ ID NO: 2298 - RNA, 21 nt, synthetic construct
  source 1..21: mol_type = other RNA
  modified_base 1: mod_base = OTHER; note = 2'-O-methylguanosine-3'- phosphorothioate
  modified_base 2: mod_base = OTHER; note = 2'-O-methyladenosine-3'- phosphorothioate
  modified_base 3: mod_base = OTHER; note = 2'-O-methyladenosine-3'-phosphate
  modified_base 4: mod_base = OTHER; note = 2'-O-methylguanosine-3'-phosphate
  modified_base 5: mod_base = OTHER; note = 2'-O-methyladenosine-3'-phosphate
  modified_base 6: mod_base = OTHER; note = 2'-O-methylcytidine-3'-phosphate
  modified_base 7: mod_base = OTHER; note = 2'-fluorouridine-3'-phosphate
  modified_base 8: mod_base = OTHER; note = 2'-O-methylguanosine-3'-phosphate
  modified_base 9: mod_base = OTHER; note = 2'-fluoroadenosine-3'-phosphate
  modified_base 10: mod_base = OTHER; note = 2'-fluorocytidine-3'-phosphate
  modified_base 11: mod_base = OTHER; note = 2'-fluoroadenosine-3'-phosphate
  modified_base 12: mod_base = OTHER; note = 2'-O-methyluridine-3'-phosphate
  modified_base 13: mod_base = OTHER; note = 2'-O-methylcytidine-3'-phosphate
  modified_base 14: mod_base = OTHER; note = 2'-O-methyladenosine-3'-phosphate
  modified_base 15: mod_base = OTHER; note = 2'-O-methyluridine-3'-phosphate
  modified_base 16: mod_base = OTHER; note = 2'-O-methyluridine-3'-phosphate
  modified_base 17: mod_base = OTHER; note = 2'-O-methylguanosine-3'-phosphate
  modified_base 18: mod_base = OTHER; note = 2'-O-methylcytidine-3'-phosphate
  modified_base 19: mod_base = OTHER; note = 2'-O-methylcytidine-3'-phosphate
  modified_base 20: mod_base = OTHER; note = 2'-O-methyladenosine-3'-phosphate
  modified_base 21: mod_base = OTHER; note 2'-O-methyladenosine-3'-phosphate-N-[tris(GalNAc-alkyl)-ami dodecanoyl)]-4-hydroxyprolinol (Hyp-(GalNAc-alkyl)3)
gaagactgacatcattgccaa

SEQ ID NO: 2299 - RNA, 23 nt, synthetic construct
  source 1..23: mol_type = other RNA
  modified_base 1: mod_base = OTHER; note = 2'-O-methyluridine-3'-phosphorothioate
  modified_base 2: mod_base = OTHER; note = 2'-fluorouridine -3'-phosphorothioate
  modified_base 3: mod_base = OTHER; note = 2'-O-methylguanosine-3'-phosphate
  modified_base 4: mod_base = OTHER; note = 2'-O-methylguanosine-3'-phosphate
  modified_base 5: mod_base = OTHER; note = 2'-O-methylcytidine-3'-phosphate
  modified_base 6: mod_base = OTHER; note = 2'-fluoroadenosine-3'-phosphate
  modified_base 7: mod_base = OTHER; note = 2'-O-methyladenosine-3'-phosphate
  modified_base 8: mod_base = OTHER; note = 2'-fluorouridine-3'-phosphate
  modified_base 9: mod_base = OTHER; note = 2'-fluoroguanosine-3'-phosphate
  modified_base 10: mod_base = OTHER; note = 2'-O-methyladenosine-3'-phosphate
  modified_base 11: mod_base = OTHER; note = 2'-O-methyluridine-3'-phosphate
  modified_base 12: mod_base = OTHER; note = 2'-O-methylguanosine-3'-phosphate
  modified_base 13: mod_base = OTHER; note = 2'-O-methyluridine-3'-phosphate
  modified_base 14: mod_base = OTHER; note = 2'-fluorocytidine-3'-phosphate
  modified_base 15: mod_base = OTHER; note = 2'-O-methyladenosine-3'-phosphate
  modified_base 16: mod_base = OTHER; note = 2'-fluoroguanosine-3'-phosphate
  modified_base 17: mod_base = OTHER; note = 2'-O-methyluridine-3'-phosphate
  modified_base 18: mod_base = OTHER; note = 2'-O-methylcytidine-3'-phosphate
  modified_base 19: mod_base = OTHER; note = 2'-O-methyluridine-3'-phosphate
  modified_base 20: mod_base = OTHER; note = 2'-O-methyluridine-3'-phosphate
  modified_base 21: mod_base = OTHER; note = 2'-O-methylcytidine-3'- phosphorothioate
  modified_base 22: mod_base = OTHER; note = 2'-O-methyluridine-3'-phosphorothioate
  modified_base 23: mod_base = OTHER; note = 2'-O-methylcytidine-3'-phosphate
ttggcaatgatgtcagtcttctc

SEQ ID NO: 2300 - RNA, 21 nt, synthetic construct
  source 1..21: mol_type = other RNA
  modified_base 1: mod_base = OTHER; note = 2'-O-methyladenosine-3'- phosphorothioate
  modified_base 2: mod_base = OTHER; note = 2'-O-methyladenosine-3'- phosphorothioate
  modified_base 3: mod_base = OTHER; note = 2'-O-methylguanosine-3'-phosphate
  modified_base 4: mod_base = OTHER; note = 2'-O-methyladenosine-3'-phosphate
  modified_base 5: mod_base = OTHER; note = 2'-O-methylcytidine-3'-phosphate
  modified_base 6: mod_base = OTHER; note = 2'-O-methyluridine-3'-phosphate
  modified_base 7: mod_base = OTHER; note = 2'-fluoroguanosine-3'-phosphate
  modified_base 8: mod_base = OTHER; note = 2'-O-methyladenosine-3'-phosphate
  modified_base 9: mod_base = OTHER; note = 2'-fluorocytidine-3'-phosphate
  modified_base 10: mod_base = OTHER; note = 2'-fluoroadenosine-3'-phosphate
  modified_base 11: mod_base = OTHER; note = 2'-fluorouridine-3'-phosphate
  modified_base 12: mod_base = OTHER; note = 2'-O-methylcytidine-3'-phosphate
  modified_base 13: mod_base = OTHER; note = 2'-O-methyladenosine-3'-phosphate
  modified_base 14: mod_base = OTHER; note = 2'-O-methyluridine-3'-phosphate
  modified_base 15: mod_base = OTHER; note = 2'-O-methyluridine-3'-phosphate
  modified_base 16: mod_base = OTHER; note = 2'-O-methylguanosine-3'-phosphate
  modified_base 17: mod_base = OTHER; note = 2'-O-methylcytidine-3'-phosphate
  modified_base 18: mod_base = OTHER; note = 2'-O-methylcytidine-3'-phosphate
  modified_base 19: mod_base = OTHER; note = 2'-O-methyladenosine-3'-phosphate
  modified_base 20: mod_base = OTHER; note = 2'-O-methyladenosine-3'-phosphate
  modified_base 21: mod_base = OTHER; note 2'-O-methyluridine-3'-phosphate-N-[tris(GalNAc-alkyl)-amido decanoyl)]-4-hydroxyprolinol (Hyp-(GalNAc-alkyl)3)
aagactgacatcattgccaat

SEQ ID NO: 2301 - RNA, 23 nt, synthetic construct
  source 1..23: mol_type = other RNA
  modified_base 1: mod_base = OTHER; note = 2'-O-methyladenosine-3'- phosphorothioate
  modified_base 2: mod_base = OTHER; note = 2'-fluorouridine -3'-phosphorothioate
  modified_base 3: mod_base = OTHER; note = 2'-O-methyluridine-3'-phosphate
  modified_base 4: mod_base = OTHER; note = 2'-O-methylguanosine-3'-phosphate
  modified_base 5: mod_base = OTHER; note = 2'-O-methylguanosine-3'-phosphate
  modified_base 6: mod_base = OTHER; note = 2'-fluorocytidine-3'-phosphate
  modified_base 7: mod_base = OTHER; note = 2'-O-methyladenosine-3'-phosphate
  modified_base 8: mod_base = OTHER; note = 2'-fluoroadenosine-3'-phosphate
  modified_base 9: mod_base = OTHER; note = 2'-fluorouridine-3'-phosphate
  modified_base 10: mod_base = OTHER; note = 2'-O-methylguanosine-3'-phosphate
  modified_base 11: mod_base = OTHER; note = 2'-O-methyladenosine-3'-phosphate
  modified_base 12: mod_base = OTHER; note = 2'-O-methyluridine-3'-phosphate
  modified_base 13: mod_base = OTHER; note = 2'-O-methylguanosine-3'-phosphate
  modified_base 14: mod_base = OTHER; note = 2'-fluorouridine-3'-phosphate
  modified_base 15: mod_base = OTHER; note = 2'-O-methylcytidine-3'-phosphate
  modified_base 16: mod_base = OTHER; note = 2'-fluoroadenosine-3'-phosphate
  modified_base 17: mod_base = OTHER; note = 2'-O-methylguanosine-3'-phosphate
  modified_base 18: mod_base = OTHER; note = 2'-O-methyluridine-3'-phosphate
  modified_base 19: mod_base = OTHER; note = 2'-O-methylcytidine-3'-phosphate
  modified_base 20: mod_base = OTHER; note = 2'-O-methyluridine-3'-phosphate
  modified_base 21: mod_base = OTHER; note = 2'-O-methyluridine-3'-phosphorothioate
  modified_base 22: mod_base = OTHER; note = 2'-O-methylcytidine-3'- phosphorothioate
  modified_base 23: mod_base = OTHER; note = 2'-O-methyluridine-3'-phosphate
attggcaatgatgtcagtcttct

SEQ ID NO: 2302 - RNA, 21 nt, synthetic construct
  source 1..21: mol_type = other RNA
  modified_base 1: mod_base = OTHER; note = 2'-O-methylcytidine-3'- phosphorothioate
  modified_base 2: mod_base = OTHER; note = 2'-O-methyluridine-3'-phosphorothioate
  modified_base 3: mod_base = OTHER; note = 2'-O-methylguanosine-3'-phosphate
  modified_base 4: mod_base = OTHER; note = 2'-O-methyladenosine-3'-phosphate
  modified_base 5: mod_base = OTHER; note = 2'-O-methylguanosine-3'-phosphate
  modified_base 6: mod_base = OTHER; note = 2'-O-methyladenosine-3'-phosphate
  modified_base 7: mod_base = OTHER; note = 2'-fluoroadenosine-3'-phosphate
  modified_base 8: mod_base = OTHER; note = 2'-O-methylguanosine-3'-phosphate
  modified_base 9: mod_base = OTHER; note = 2'-fluoroadenosine-3'-phosphate
  modified_base 10: mod_base = OTHER; note = 2'-fluorocytidine-3'-phosphate
  modified_base 11: mod_base = OTHER; note = 2'-fluorouridine-3'-phosphate
  modified_base 12: mod_base = OTHER; note = 2'-O-methylguanosine-3'-phosphate
  modified_base 13: mod_base = OTHER; note = 2'-O-methyladenosine-3'-phosphate
  modified_base 14: mod_base = OTHER; note = 2'-O-methylcytidine-3'-phosphate
  modified_base 15: mod_base = OTHER; note = 2'-O-methyladenosine-3'-phosphate
  modified_base 16: mod_base = OTHER; note = 2'-O-methyluridine-3'-phosphate
  modified_base 17: mod_base = OTHER; note = 2'-O-methylcytidine-3'-phosphate
  modified_base 18: mod_base = OTHER; note = 2'-O-methyladenosine-3'-phosphate
  modified_base 19: mod_base = OTHER; note = 2'-O-methyluridine-3'-phosphate
  modified_base 20: mod_base = OTHER; note = 2'-O-methyluridine-3'-phosphate
  modified_base 21: mod_base = OTHER; note 2'-O-methylguanosine-3'-phosphate-N-[tris(GalNAc-alkyl)-ami dodecanoyl)]-4-hydroxyprolinol (Hyp-(GalNAc-alkyl)3)
ctgagaagactgacatcattg

SEQ ID NO: 2303 - RNA, 23 nt, synthetic construct
  source 1..23: mol_type = other RNA
  modified_base 1: mod_base = OTHER; note = 2'-O-methylcytidine-3'- phosphorothioate
  modified_base 2: mod_base = OTHER; note = 2'-fluoroadenosine-3'-phosphorothioate
  modified_base 3: mod_base = OTHER; note = 2'-O-methyladenosine-3'-phosphate
  modified_base 4: mod_base = OTHER; note = 2'-O-methyluridine-3'-phosphate
  modified_base 5: mod_base = OTHER; note = 2'-O-methylguanosine-3'-phosphate
  modified_base 6: mod_base = OTHER; note = 2'-fluoroadenosine-3'-phosphate
  modified_base 7: mod_base = OTHER; note = 2'-O-methyluridine-3'-phosphate
  modified_base 8: mod_base = OTHER; note = 2'-fluoroguanosine-3'-phosphate
  modified_base 9: mod_base = OTHER; note = 2'-fluorouridine-3'-phosphate
  modified_base 10: mod_base = OTHER; note = 2'-O-methylcytidine-3'-phosphate
  modified_base 11: mod_base = OTHER; note = 2'-O-methyladenosine-3'-phosphate
  modified_base 12: mod_base = OTHER; note = 2'-O-methylguanosine-3'-phosphate
  modified_base 13: mod_base = OTHER; note = 2'-O-methyluridine-3'-phosphate
  modified_base 14: mod_base = OTHER; note = 2'-fluorocytidine-3'-phosphate
  modified_base 15: mod_base = OTHER; note = 2'-O-methyluridine-3'-phosphate
  modified_base 16: mod_base = OTHER; note = 2'-fluorouridine-3'-phosphate
  modified_base 17: mod_base = OTHER; note = 2'-O-methylcytidine-3'-phosphate
  modified_base 18: mod_base = OTHER; note = 2'-O-methyluridine-3'-phosphate
  modified_base 19: mod_base = OTHER; note = 2'-O-methylcytidine-3'-phosphate
  modified_base 20: mod_base = OTHER; note = 2'-O-methyladenosine-3'-phosphate
  modified_base 21: mod_base = OTHER; note = 2'-O-methylguanosine-3'- phosphorothioate
  modified_base 22: mod_base = OTHER; note = 2'-O-methylcytidine-3'- phosphorothioate
  modified_base 23: mod_base = OTHER; note = 2'-O-methylcytidine-3'-phosphate
caatgatgtcagtcttctcagcc

SEQ ID NO: 2304 - RNA, 21 nt, synthetic construct
  source 1..21: mol_type = other RNA
  modified_base 1: mod_base = OTHER; note = 2'-O-methylguanosine-3'- phosphorothioate
  modified_base 2: mod_base = OTHER; note = 2'-O-methylcytidine-3'- phosphorothioate
  modified_base 3: mod_base = OTHER; note = 2'-O-methyluridine-3'-phosphate
  modified_base 4: mod_base = OTHER; note = 2'-O-methylguanosine-3'-phosphate
  modified_base 5: mod_base = OTHER; note = 2'-O-methyladenosine-3'-phosphate
  modified_base 6: mod_base = OTHER; note = 2'-O-methylguanosine-3'-phosphate
  modified_base 7: mod_base = OTHER; note = 2'-fluoroadenosine-3'-phosphate
  modified_base 8: mod_base = OTHER; note = 2'-O-methyladenosine-3'-phosphate
  modified_base 9: mod_base = OTHER; note = 2'-fluoroguanosine-3'-phosphate
  modified_base 10: mod_base = OTHER; note = 2'-fluoroadenosine-3'-phosphate
  modified_base 11: mod_base = OTHER; note = 2'-fluorocytidine-3'-phosphate
  modified_base 12: mod_base = OTHER; note = 2'-O-methyluridine-3'-phosphate
  modified_base 13: mod_base = OTHER; note = 2'-O-methylguanosine-3'-phosphate
  modified_base 14: mod_base = OTHER; note = 2'-O-methyladenosine-3'-phosphate
  modified_base 15: mod_base = OTHER; note = 2'-O-methylcytidine-3'-phosphate
  modified_base 16: mod_base = OTHER; note = 2'-O-methyladenosine-3'-phosphate
  modified_base 17: mod_base = OTHER; note = 2'-O-methyluridine-3'-phosphate
  modified_base 18: mod_base = OTHER; note = 2'-O-methylcytidine-3'-phosphate
  modified_base 19: mod_base = OTHER; note = 2'-O-methyladenosine-3'-phosphate
  modified_base 20: mod_base = OTHER; note = 2'-O-methyluridine-3'-phosphate
  modified_base 21: mod_base = OTHER; note 2'-O-methyluridine-3'-phosphate-N-[tris(GalNAc-alkyl)-amido decanoyl)]-4-hydroxyprolinol (Hyp-(GalNAc-alkyl)3)
gctgagaagactgacatcatt

SEQ ID NO: 2305 - RNA, 23 nt, synthetic construct
  source 1..23: mol_type = other RNA
  modified_base 1: mod_base = OTHER; note = 2'-O-methyladenosine-3'- phosphorothioate
  modified_base 2: mod_base = OTHER; note = 2'-fluoroadenosine-3'-phosphorothioate
  modified_base 3: mod_base = OTHER; note = 2'-O-methyluridine-3'-phosphate
  modified_base 4: mod_base = OTHER; note = 2'-O-methylguanosine-3'-phosphate
  modified_base 5: mod_base = OTHER; note = 2'-O-methyladenosine-3'-phosphate
  modified_base 6: mod_base = OTHER; note = 2'-fluorouridine-3'-phosphate
  modified_base 7: mod_base = OTHER; note = 2'-O-methylguanosine-3'-phosphate
  modified_base 8: mod_base = OTHER; note = 2'-fluorouridine-3'-phosphate
  modified_base 9: mod_base = OTHER; note = 2'-fluorocytidine-3'-phosphate
  modified_base 10: mod_base = OTHER; note = 2'-O-methyladenosine-3'-phosphate
  modified_base 11: mod_base = OTHER; note = 2'-O-methylguanosine-3'-phosphate
  modified_base 12: mod_base = OTHER; note = 2'-O-methyluridine-3'-phosphate
  modified_base 13: mod_base = OTHER; note = 2'-O-methylcytidine-3'-phosphate
  modified_base 14: mod_base = OTHER; note = 2'-fluorouridine-3'-phosphate
  modified_base 15: mod_base = OTHER; note = 2'-O-methyluridine-3'-phosphate
  modified_base 16: mod_base = OTHER; note = 2'-fluorocytidine-3'-phosphate
  modified_base 17: mod_base = OTHER; note = 2'-O-methyluridine-3'-phosphate
  modified_base 18: mod_base = OTHER; note = 2'-O-methylcytidine-3'-phosphate
  modified_base 19: mod_base = OTHER; note = 2'-O-methyladenosine-3'-phosphate
  modified_base 20: mod_base = OTHER; note = 2'-O-methylguanosine-3'-phosphate
  modified_base 21: mod_base = OTHER; note = 2'-O-methylcytidine-3'- phosphorothioate
  modified_base 22: mod_base = OTHER; note = 2'-O-methylcytidine-3'- phosphorothioate
  modified_base 23: mod_base = OTHER; note = 2'-O-methyladenosine-3'-phosphate
aatgatgtcagtcttctcagcca

SEQ ID NO: 2306 - RNA, 21 nt, synthetic construct
  source 1..21: mol_type = other RNA
  modified_base 1: mod_base = OTHER; note = 2'-O-methylguanosine-3'- phosphorothioate
  modified_base 2: mod_base = OTHER; note = 2'-O-methylcytidine-3'- phosphorothioate
  modified_base 3: mod_base = OTHER; note = 2'-O-methyluridine-3'-phosphate
  modified_base 4: mod_base = OTHER; note = 2'-O-methylcytidine-3'-phosphate
  modified_base 5: mod_base = OTHER; note = 2'-O-methyladenosine-3'-phosphate
  modified_base 6: mod_base = OTHER; note = 2'-O-methylguanosine-3'-phosphate
  modified_base 7: mod_base = OTHER; note = 2'-fluoroguanosine-3'-phosphate
  modified_base 8: mod_base = OTHER; note = 2'-O-methyluridine-3'-phosphate
  modified_base 9: mod_base = OTHER; note = 2'-fluorouridine-3'-phosphate
  modified_base 10: mod_base = OTHER; note = 2'-fluorocytidine-3'-phosphate
  modified_base 11: mod_base = OTHER; note = 2'-fluoroadenosine-3'-phosphate
  modified_base 12: mod_base = OTHER; note = 2'-O-methyladenosine-3'-phosphate
  modified_base 13: mod_base = OTHER; note = 2'-O-methyladenosine-3'-phosphate
  modified_base 14: mod_base = OTHER; note = 2'-O-methylguanosine-3'-phosphate
  modified_base 15: mod_base = OTHER; note = 2'-O-methyluridine-3'-phosphate
  modified_base 16: mod_base = OTHER; note = 2'-O-methylguanosine-3'-phosphate
  modified_base 17: mod_base = OTHER; note = 2'-O-methyluridine-3'-phosphate
  modified_base 18: mod_base = OTHER; note = 2'-O-methyluridine-3'-phosphate
  modified_base 19: mod_base = OTHER; note = 2'-O-methylguanosine-3'-phosphate
  modified_base 20: mod_base = OTHER; note = 2'-O-methylguanosine-3'-phosphate
  modified_base 21: mod_base = OTHER; note 2'-O-methyluridine-3'-phosphate-N-[tris(GalNAc-alkyl)-amido decanoyl)]-4-hydroxyprolinol (Hyp-(GalNAc-alkyl)3)
gctcaggttcaaagtgttggt

SEQ ID NO: 2307 - RNA, 23 nt, synthetic construct
  source 1..23: mol_type = other RNA
  modified_base 1: mod_base = OTHER; note = 2'-O-methyladenosine-3'- phosphorothioate
  modified_base 2: mod_base = OTHER; note = 2'-fluorocytidine-3'-phosphorothioate
  modified_base 3: mod_base = OTHER; note = 2'-O-methylcytidine-3'-phosphate
  modified_base 4: mod_base = OTHER; note = 2'-O-methyladenosine-3'-phosphate
  modified_base 5: mod_base = OTHER; note = 2'-O-methyladenosine-3'-phosphate
  modified_base 6: mod_base = OTHER; note = 2'-fluorocytidine-3'-phosphate
  modified_base 7: mod_base = OTHER; note = 2'-O-methyladenosine-3'-phosphate
  modified_base 8: mod_base = OTHER; note = 2'-fluorocytidine-3'-phosphate
  modified_base 9: mod_base = OTHER; note = 2'-fluorouridine-3'-phosphate
  modified_base 10: mod_base = OTHER; note = 2'-O-methyluridine-3'-phosphate
  modified_base 11: mod_base = OTHER; note = 2'-O-methyluridine-3'-phosphate
  modified_base 12: mod_base = OTHER; note = 2'-O-methylguanosine-3'-phosphate
  modified_base 13: mod_base = OTHER; note = 2'-O-methyladenosine-3'-phosphate
  modified_base 14: mod_base = OTHER; note = 2'-fluoroadenosine-3'-phosphate
  modified_base 15: mod_base = OTHER; note = 2'-O-methylcytidine-3'-phosphate
  modified_base 16: mod_base = OTHER; note = 2'-fluorocytidine-3'-phosphate
  modified_base 17: mod_base = OTHER; note = 2'-O-methyluridine-3'-phosphate
  modified_base 18: mod_base = OTHER; note = 2'-O-methylguanosine-3'-phosphate
  modified_base 19: mod_base = OTHER; note = 2'-O-methyladenosine-3'-phosphate
  modified_base 20: mod_base = OTHER; note = 2'-O-methylguanosine-3'-phosphate
  modified_base 21: mod_base = OTHER; note = 2'-O-methylcytidine-3'- phosphorothioate
  modified_base 22: mod_base = OTHER; note = 2'-O-methyluridine-3'-phosphorothioate
  modified_base 23: mod_base = OTHER; note = 2'-O-methyluridine-3'-phosphate
accaacactttgaacctgagctt

SEQ ID NO: 2308 - RNA, 21 nt, synthetic construct
  source 1..21: mol_type = other RNA
  modified_base 1: mod_base = OTHER; note = 2'-O-methylcytidine-3'- phosphorothioate
  modified_base 2: mod_base = OTHER; note = 2'-O-methyluridine-3'-phosphorothioate
  modified_base 3: mod_base = OTHER; note = 2'-O-methylcytidine-3'-phosphate
  modified_base 4: mod_base = OTHER; note = 2'-O-methyladenosine-3'-phosphate
  modified_base 5: mod_base = OTHER; note = 2'-O-methylguanosine-3'-phosphate
  modified_base 6: mod_base = OTHER; note = 2'-O-methylguanosine-3'-phosphate
  modified_base 7: mod_base = OTHER; note = 2'-fluorouridine-3'-phosphate
  modified_base 8: mod_base = OTHER; note = 2'-O-methyluridine-3'-phosphate
  modified_base 9: mod_base = OTHER; note = 2'-fluorocytidine-3'-phosphate
  modified_base 10: mod_base = OTHER; note = 2'-fluoroadenosine-3'-phosphate
  modified_base 11: mod_base = OTHER; note = 2'-fluoroadenosine-3'-phosphate
  modified_base 12: mod_base = OTHER; note = 2'-O-methyladenosine-3'-phosphate
  modified_base 13: mod_base = OTHER; note = 2'-O-methylguanosine-3'-phosphate
  modified_base 14: mod_base = OTHER; note = 2'-O-methyluridine-3'-phosphate
  modified_base 15: mod_base = OTHER; note = 2'-O-methylguanosine-3'-phosphate
  modified_base 16: mod_base = OTHER; note = 2'-O-methyluridine-3'-phosphate
  modified_base 17: mod_base = OTHER; note = 2'-O-methyluridine-3'-phosphate
  modified_base 18: mod_base = OTHER; note = 2'-O-methylguanosine-3'-phosphate
  modified_base 19: mod_base = OTHER; note = 2'-O-methylguanosine-3'-phosphate
  modified_base 20: mod_base = OTHER; note = 2'-O-methyluridine-3'-phosphate
  modified_base 21: mod_base = OTHER; note 2'-O-methyladenosine-3'-phosphate-N-[tris(GalNAc-alkyl)-ami dodecanoyl)]-4-hydroxyprolinol (Hyp-(GalNAc-alkyl)3)
ctcaggttcaaagtgttggta

SEQ ID NO: 2309 - RNA, 23 nt, synthetic construct
  source 1..23: mol_type = other RNA
  modified_base 1: mod_base = OTHER; note = 2'-O-methyluridine-3'-phosphorothioate
  modified_base 2: mod_base = OTHER; note = 2'-fluoroadenosine-3'-phosphorothioate
  modified_base 3: mod_base = OTHER; note = 2'-O-methylcytidine-3'-phosphate
  modified_base 4: mod_base = OTHER; note = 2'-O-methylcytidine-3'-phosphate
  modified_base 5: mod_base = OTHER; note = 2'-O-methyladenosine-3'-phosphate
  modified_base 6: mod_base = OTHER; note = 2'-fluoroadenosine-3'-phosphate
  modified_base 7: mod_base = OTHER; note = 2'-O-methylcytidine-3'-phosphate
  modified_base 8: mod_base = OTHER; note = 2'-fluoroadenosine-3'-phosphate
  modified_base 9: mod_base = OTHER; note = 2'-fluorocytidine-3'-phosphate
  modified_base 10: mod_base = OTHER; note = 2'-O-methyluridine-3'-phosphate
  modified_base 11: mod_base = OTHER; note = 2'-O-methyluridine-3'-phosphate
  modified_base 12: mod_base = OTHER; note = 2'-O-methyluridine-3'-phosphate
  modified_base 13: mod_base = OTHER; note = 2'-O-methylguanosine-3'-phosphate
  modified_base 14: mod_base = OTHER; note = 2'-fluoroadenosine-3'-phosphate
  modified_base 15: mod_base = OTHER; note = 2'-O-methyladenosine-3'-phosphate
  modified_base 16: mod_base = OTHER; note = 2'-fluorocytidine-3'-phosphate
  modified_base 17: mod_base = OTHER; note = 2'-O-methylcytidine-3'-phosphate
  modified_base 18: mod_base = OTHER; note = 2'-O-methyluridine-3'-phosphate
  modified_base 19: mod_base = OTHER; note = 2'-O-methylguanosine-3'-phosphate
  modified_base 20: mod_base = OTHER; note = 2'-O-methyladenosine-3'-phosphate
  modified_base 21: mod_base = OTHER; note = 2'-O-methylguanosine-3'- phosphorothioate
  modified_base 22: mod_base = OTHER; note = 2'-O-methylcytidine-3'- phosphorothioate
  modified_base 23: mod_base = OTHER; note = 2'-O-methyluridine-3'-phosphate
taccaacactttgaacctgagct

SEQ ID NO: 2310 - RNA, 21 nt, synthetic construct
  source 1..21: mol_type = other RNA
  modified_base 1: mod_base = OTHER; note = 2'-O-methylguanosine-3'- phosphorothioate
  modified_base 2: mod_base = OTHER; note = 2'-O-methyluridine-3'-phosphorothioate
  modified_base 3: mod_base = OTHER; note = 2'-O-methyladenosine-3'-phosphate
  modified_base 4: mod_base = OTHER; note = 2'-O-methyladenosine-3'-phosphate
  modified_base 5: mod_base = OTHER; note = 2'-O-methylguanosine-3'-phosphate
  modified_base 6: mod_base = OTHER; note = 2'-O-methylcytidine-3'-phosphate
  modified_base 7: mod_base = OTHER; note = 2'-fluorouridine-3'-phosphate
  modified_base 8: mod_base = OTHER; note = 2'-O-methylcytidine-3'-phosphate
  modified_base 9: mod_base = OTHER; note = 2'-fluoroadenosine-3'-phosphate
  modified_base 10: mod_base = OTHER; note = 2'-fluoroguanosine-3'-phosphate
  modified_base 11: mod_base = OTHER; note = 2'-fluoroguanosine-3'-phosphate
  modified_base 12: mod_base = OTHER; note = 2'-O-methyluridine-3'-phosphate
  modified_base 13: mod_base = OTHER; note = 2'-O-methyluridine-3'-phosphate
  modified_base 14: mod_base = OTHER; note = 2'-O-methylcytidine-3'-phosphate
  modified_base 15: mod_base = OTHER; note = 2'-O-methyladenosine-3'-phosphate
  modified_base 16: mod_base = OTHER; note = 2'-O-methyladenosine-3'-phosphate
  modified_base 17: mod_base = OTHER; note = 2'-O-methyladenosine-3'-phosphate
  modified_base 18: mod_base = OTHER; note = 2'-O-methylguanosine-3'-phosphate
  modified_base 19: mod_base = OTHER; note = 2'-O-methyluridine-3'-phosphate
  modified_base 20: mod_base = OTHER; note = 2'-O-methylguanosine-3'-phosphate
  modified_base 21: mod_base = OTHER; note 2'-O-methyluridine-3'-phosphate-N-[tris(GalNAc-alkyl)-amido decanoyl)]-4-hydroxyprolinol (Hyp-(GalNAc-alkyl)3)
gtaagctcaggttcaaagtgt

SEQ ID NO: 2311 - RNA, 23 nt, synthetic construct
  source 1..23: mol_type = other RNA
  modified_base 1: mod_base = OTHER; note = 2'-O-methyladenosine-3'- phosphorothioate
  modified_base 2: mod_base = OTHER; note = 2'-fluorocytidine-3'-phosphorothioate
  modified_base 3: mod_base = OTHER; note = 2'-O-methyladenosine-3'-phosphate
  modified_base 4: mod_base = OTHER; note = 2'-O-methylcytidine-3'-phosphate
  modified_base 5: mod_base = OTHER; note = 2'-O-methyluridine-3'-phosphate
  modified_base 6: mod_base = OTHER; note = 2'-fluorouridine-3'-phosphate
  modified_base 7: mod_base = OTHER; note = 2'-O-methyluridine-3'-phosphate
  modified_base 8: mod_base = OTHER; note = 2'-fluoroguanosine-3'-phosphate
  modified_base 9: mod_base = OTHER; note = 2'-fluoroadenosine-3'-phosphate
  modified_base 10: mod_base = OTHER; note = 2'-O-methyladenosine-3'-phosphate
  modified_base 11: mod_base = OTHER; note = 2'-O-methylcytidine-3'-phosphate
  modified_base 12: mod_base = OTHER; note = 2'-O-methylcytidine-3'-phosphate
  modified_base 13: mod_base = OTHER; note = 2'-O-methyluridine-3'-phosphate
  modified_base 14: mod_base = OTHER; note = 2'-fluoroguanosine-3'-phosphate
  modified_base 15: mod_base = OTHER; note = 2'-O-methyladenosine-3'-phosphate
  modified_base 16: mod_base = OTHER; note = 2'-fluoroguanosine-3'-phosphate
  modified_base 17: mod_base = OTHER; note = 2'-O-methylcytidine-3'-phosphate
  modified_base 18: mod_base = OTHER; note = 2'-O-methyluridine-3'-phosphate
  modified_base 19: mod_base = OTHER; note = 2'-O-methyluridine-3'-phosphate
  modified_base 20: mod_base = OTHER; note = 2'-O-methyladenosine-3'-phosphate
  modified_base 21: mod_base = OTHER; note = 2'-O-methylcytidine-3'- phosphorothioate
  modified_base 22: mod_base = OTHER; note = 2'-O-methyladenosine-3'- phosphorothioate
  modified_base 23: mod_base = OTHER; note = 2'-O-methyladenosine-3'-phosphate
acactttgaacctgagcttacaa

SEQ ID NO: 2312 - RNA, 21 nt, synthetic construct
  source 1..21: mol_type = other RNA
  modified_base 1: mod_base = OTHER; note = 2'-O-methyluridine-3'-phosphorothioate
  modified_base 2: mod_base = OTHER; note = 2'-O-methylguanosine-3'- phosphorothioate
  modified_base 3: mod_base = OTHER; note = 2'-O-methyluridine-3'-phosphate
  modified_base 4: mod_base = OTHER; note = 2'-O-methyladenosine-3'-phosphate
  modified_base 5: mod_base = OTHER; note = 2'-O-methyladenosine-3'-phosphate
  modified_base 6: mod_base = OTHER; note = 2'-O-methylguanosine-3'-phosphate
  modified_base 7: mod_base = OTHER; note = 2'-fluorocytidine-3'-phosphate
  modified_base 8: mod_base = OTHER; note = 2'-O-methyluridine-3'-phosphate
  modified_base 9: mod_base = OTHER; note = 2'-fluorocytidine-3'-phosphate
  modified_base 10: mod_base = OTHER; note = 2'-fluoroadenosine-3'-phosphate
  modified_base 11: mod_base = OTHER; note = 2'-fluoroguanosine-3'-phosphate
  modified_base 12: mod_base = OTHER; note = 2'-O-methylguanosine-3'-phosphate
  modified_base 13: mod_base = OTHER; note = 2'-O-methyluridine-3'-phosphate
  modified_base 14: mod_base = OTHER; note = 2'-O-methyluridine-3'-phosphate
  modified_base 15: mod_base = OTHER; note = 2'-O-methylcytidine-3'-phosphate
  modified_base 16: mod_base = OTHER; note = 2'-O-methyladenosine-3'-phosphate
  modified_base 17: mod_base = OTHER; note = 2'-O-methyladenosine-3'-phosphate
  modified_base 18: mod_base = OTHER; note = 2'-O-methyladenosine-3'-phosphate
  modified_base 19: mod_base = OTHER; note = 2'-O-methylguanosine-3'-phosphate
  modified_base 20: mod_base = OTHER; note = 2'-O-methyluridine-3'-phosphate
  modified_base 21: mod_base = OTHER; note 2'-O-methylguanosine-3'-phosphate-N-[tris(GalNAc-alkyl)-ami dodecanoyl)]-4-hydroxyprolinol (Hyp-(GalNAc-alkyl)3)
tgtaagctcaggttcaaagtg

SEQ ID NO: 2313 - RNA, 23 nt, synthetic construct
  source 1..23: mol_type = other RNA
  modified_base 1: mod_base = OTHER; note = 2'-O-methylcytidine-3'- phosphorothioate
  modified_base 2: mod_base = OTHER; note = 2'-fluoroadenosine-3'-phosphorothioate
  modified_base 3: mod_base = OTHER; note = 2'-O-methylcytidine-3'-phosphate
  modified_base 4: mod_base = OTHER; note = 2'-O-methyluridine-3'-phosphate
  modified_base 5: mod_base = OTHER; note = 2'-O-methyluridine-3'-phosphate
  modified_base 6: mod_base = OTHER; note = 2'-fluorouridine-3'-phosphate
  modified_base 7: mod_base = OTHER; note = 2'-O-methylguanosine-3'-phosphate
  modified_base 8: mod_base = OTHER; note = 2'-fluoroadenosine-3'-phosphate
  modified_base 9: mod_base = OTHER; note = 2'-fluoroadenosine-3'-phosphate
  modified_base 10: mod_base = OTHER; note = 2'-O-methylcytidine-3'-phosphate
  modified_base 11: mod_base = OTHER; note = 2'-O-methylcytidine-3'-phosphate
  modified_base 12: mod_base = OTHER; note = 2'-O-methyluridine-3'-phosphate
  modified_base 13: mod_base = OTHER; note = 2'-O-methylguanosine-3'-phosphate
  modified_base 14: mod_base = OTHER; note = 2'-fluoroadenosine-3'-phosphate
  modified_base 15: mod_base = OTHER; note = 2'-O-methylguanosine-3'-phosphate
  modified_base 16: mod_base = OTHER; note = 2'-fluorocytidine-3'-phosphate
  modified_base 17: mod_base = OTHER; note = 2'-O-methyluridine-3'-phosphate
  modified_base 18: mod_base = OTHER; note = 2'-O-methyluridine-3'-phosphate
  modified_base 19: mod_base = OTHER; note = 2'-O-methyladenosine-3'-phosphate
  modified_base 20: mod_base = OTHER; note = 2'-O-methylcytidine-3'-phosphate
  modified_base 21: mod_base = OTHER; note = 2'-O-methyladenosine-3'- phosphorothioate
  modified_base 22: mod_base = OTHER; note = 2'-O-methyladenosine-3'- phosphorothioate
  modified_base 23: mod_base = OTHER; note = 2'-O-methyluridine-3'-phosphate
cactttgaacctgagcttacaat

SEQ ID NO: 2314 - RNA, 21 nt, synthetic construct
  source 1..21: mol_type = other RNA
  modified_base 1: mod_base = OTHER; note = 2'-O-methyladenosine-3'- phosphorothioate
  modified_base 2: mod_base = OTHER; note = 2'-O-methyluridine-3'-phosphorothioate
  modified_base 3: mod_base = OTHER; note = 2'-O-methylguanosine-3'-phosphate
  modified_base 4: mod_base = OTHER; note = 2'-O-methyluridine-3'-phosphate
  modified_base 5: mod_base = OTHER; note = 2'-O-methyladenosine-3'-phosphate
  modified_base 6: mod_base = OTHER; note = 2'-O-methyluridine-3'-phosphate
  modified_base 7: mod_base = OTHER; note = 2'-fluorouridine-3'-phosphate
  modified_base 8: mod_base = OTHER; note = 2'-O-methyladenosine-3'-phosphate
  modified_base 9: mod_base = OTHER; note = 2'-fluorocytidine-3'-phosphate
  modified_base 10: mod_base = OTHER; note = 2'-fluorouridine-3'-phosphate
  modified_base 11: mod_base = OTHER; note = 2'-fluorouridine-3'-phosphate
  modified_base 12: mod_base = OTHER; note = 2'-O-methylguanosine-3'-phosphate
  modified_base 13: mod_base = OTHER; note = 2'-O-methyladenosine-3'-phosphate
  modified_base 14: mod_base = OTHER; note = 2'-O-methylcytidine-3'-phosphate
  modified_base 15: mod_base = OTHER; note = 2'-O-methyladenosine-3'-phosphate
  modified_base 16: mod_base = OTHER; note = 2'-O-methyladenosine-3'-phosphate
  modified_base 17: mod_base = OTHER; note = 2'-O-methyladenosine-3'-phosphate
  modified_base 18: mod_base = OTHER; note = 2'-O-methylguanosine-3'-phosphate
  modified_base 19: mod_base = OTHER; note = 2'-O-methyladenosine-3'-phosphate
  modified_base 20: mod_base = OTHER; note = 2'-O-methylguanosine-3'-phosphate
  modified_base 21: mod_base = OTHER; note 2'-O-methyladenosine-3'-phosphate-N-[tris(GalNAc-alkyl)-ami dodecanoyl)]-4-hydroxyprolinol (Hyp-(GalNAc-alkyl)3)
atgtattacttgacaaagaga

SEQ ID NO: 2315 - RNA, 23 nt, synthetic construct
  source 1..23: mol_type = other RNA
  modified_base 1: mod_base = OTHER; note = 2'-O-methyluridine-3'-phosphorothioate
  modified_base 2: mod_base = OTHER; note = 2'-fluorocytidine-3'-phosphorothioate
  modified_base 3: mod_base = OTHER; note = 2'-O-methyluridine-3'-phosphate
  modified_base 4: mod_base = OTHER; note = 2'-O-methylcytidine-3'-phosphate
  modified_base 5: mod_base = OTHER; note = 2'-O-methyluridine-3'-phosphate
  modified_base 6: mod_base = OTHER; note = 2'-fluorouridine-3'-phosphate
  modified_base 7: mod_base = OTHER; note = 2'-O-methyluridine-3'-phosphate
  modified_base 8: mod_base = OTHER; note = 2'-fluoroguanosine-3'-phosphate
  modified_base 9: mod_base = OTHER; note = 2'-fluorouridine-3'-phosphate
  modified_base 10: mod_base = OTHER; note = 2'-O-methylcytidine-3'-phosphate
  modified_base 11: mod_base = OTHER; note = 2'-O-methyladenosine-3'-phosphate
  modified_base 12: mod_base = OTHER; note = 2'-O-methyladenosine-3'-phosphate
  modified_base 13: mod_base = OTHER; note = 2'-O-methylguanosine-3'-phosphate
  modified_base 14: mod_base = OTHER; note = 2'-fluorouridine-3'-phosphate
  modified_base 15: mod_base = OTHER; note = 2'-O-methyladenosine-3'-phosphate
  modified_base 16: mod_base = OTHER; note = 2'-fluoroadenosine-3'-phosphate
  modified_base 17: mod_base = OTHER; note = 2'-O-methyluridine-3'-phosphate
  modified_base 18: mod_base = OTHER; note = 2'-O-methyladenosine-3'-phosphate
  modified_base 19: mod_base = OTHER; note = 2'-O-methylcytidine-3'-phosphate
  modified_base 20: mod_base = OTHER; note = 2'-O-methyladenosine-3'-phosphate
  modified_base 21: mod_base = OTHER; note = 2'-O-methyluridine-3'-phosphorothioate
  modified_base 22: mod_base = OTHER; note = 2'-O-methylguanosine-3'- phosphorothioate
  modified_base 23: mod_base = OTHER; note = 2'-O-methylcytidine-3'-phosphate
tctctttgtcaagtaatacatgc

SEQ ID NO: 2316 - RNA, 21 nt, synthetic construct
  source 1..21: mol_type = other RNA
  modified_base 1: mod_base = OTHER; note = 2'-O-methyluridine-3'-phosphorothioate
  modified_base 2: mod_base = OTHER; note = 2'-O-methylguanosine-3'- phosphorothioate
  modified_base 3: mod_base = OTHER; note = 2'-O-methyluridine-3'-phosphate
  modified_base 4: mod_base = OTHER; note = 2'-O-methyladenosine-3'-phosphate
  modified_base 5: mod_base = OTHER; note = 2'-O-methyluridine-3'-phosphate
  modified_base 6: mod_base = OTHER; note = 2'-O-methyluridine-3'-phosphate
  modified_base 7: mod_base = OTHER; note = 2'-fluoroadenosine-3'-phosphate
  modified_base 8: mod_base = OTHER; note = 2'-O-methylcytidine-3'-phosphate
  modified_base 9: mod_base = OTHER; note = 2'-fluorouridine-3'-phosphate
  modified_base 10: mod_base = OTHER; note = 2'-fluorouridine-3'-phosphate
  modified_base 11: mod_base = OTHER; note = 2'-fluoroguanosine-3'-phosphate
  modified_base 12: mod_base = OTHER; note = 2'-O-methyladenosine-3'-phosphate
  modified_base 13: mod_base = OTHER; note = 2'-O-methylcytidine-3'-phosphate
  modified_base 14: mod_base = OTHER; note = 2'-O-methyladenosine-3'-phosphate
  modified_base 15: mod_base = OTHER; note = 2'-O-methyladenosine-3'-phosphate
  modified_base 16: mod_base = OTHER; note = 2'-O-methyladenosine-3'-phosphate
  modified_base 17: mod_base = OTHER; note = 2'-O-methylguanosine-3'-phosphate
  modified_base 18: mod_base = OTHER; note = 2'-O-methyladenosine-3'-phosphate
  modified_base 19: mod_base = OTHER; note = 2'-O-methylguanosine-3'-phosphate
  modified_base 20: mod_base = OTHER; note = 2'-O-methyladenosine-3'-phosphate
  modified_base 21: mod_base = OTHER; note 2'-O-methylcytidine-3'-phosphate-N-[tris(GalNAc-alkyl)-amid odecanoyl)]-4-hydroxyprolinol (Hyp-(GalNAc-alkyl)3)
tgtattacttgacaaagagac

SEQ ID NO: 2317 - RNA, 23 nt, synthetic construct
  source 1..23: mol_type = other RNA
  modified_base 1: mod_base = OTHER; note = 2'-O-methylguanosine-3'- phosphorothioate
  modified_base 2: mod_base = OTHER; note = 2'-fluorouridine -3'-phosphorothioate
  modified_base 3: mod_base = OTHER; note = 2'-O-methylcytidine-3'-phosphate
  modified_base 4: mod_base = OTHER; note = 2'-O-methyluridine-3'-phosphate
  modified_base 5: mod_base = OTHER; note = 2'-O-methylcytidine-3'-phosphate
  modified_base 6: mod_base = OTHER; note = 2'-fluorouridine-3'-phosphate
  modified_base 7: mod_base = OTHER; note = 2'-O-methyluridine-3'-phosphate
  modified_base 8: mod_base = OTHER; note = 2'-fluorouridine-3'-phosphate
  modified_base 9: mod_base = OTHER; note = 2'-fluoroguanosine-3'-phosphate
  modified_base 10: mod_base = OTHER; note = 2'-O-methyluridine-3'-phosphate
  modified_base 11: mod_base = OTHER; note = 2'-O-methylcytidine-3'-phosphate
  modified_base 12: mod_base = OTHER; note = 2'-O-methyladenosine-3'-phosphate
  modified_base 13: mod_base = OTHER; note = 2'-O-methyladenosine-3'-phosphate
  modified_base 14: mod_base = OTHER; note = 2'-fluoroguanosine-3'-phosphate
  modified_base 15: mod_base = OTHER; note = 2'-O-methyluridine-3'-phosphate
  modified_base 16: mod_base = OTHER; note = 2'-fluoroadenosine-3'-phosphate
  modified_base 17: mod_base = OTHER; note = 2'-O-methyladenosine-3'-phosphate
  modified_base 18: mod_base = OTHER; note = 2'-O-methyluridine-3'-phosphate
  modified_base 19: mod_base = OTHER; note = 2'-O-methyladenosine-3'-phosphate
  modified_base 20: mod_base = OTHER; note = 2'-O-methylcytidine-3'-phosphate
  modified_base 21: mod_base = OTHER; note = 2'-O-methyladenosine-3'- phosphorothioate
  modified_base 22: mod_base = OTHER; note = 2'-O-methyluridine-3'-phosphorothioate
  modified_base 23: mod_base = OTHER; note = 2'-O-methylguanosine-3'-phosphate
gtctctttgtcaagtaatacatg

SEQ ID NO: 2318 - RNA, 21 nt, synthetic construct
  source 1..21: mol_type = other RNA
  modified_base 1: mod_base = OTHER; note = 2'-O-methylcytidine-3'- phosphorothioate
  modified_base 2: mod_base = OTHER; note = 2'-O-methyladenosine-3'- phosphorothioate
  modified_base 3: mod_base = OTHER; note = 2'-O-methylguanosine-3'-phosphate
  modified_base 4: mod_base = OTHER; note = 2'-O-methylcytidine-3'-phosphate
  modified_base 5: mod_base = OTHER; note = 2'-O-methyladenosine-3'-phosphate
  modified_base 6: mod_base = OTHER; note = 2'-O-methyluridine-3'-phosphate
  modified_base 7: mod_base = OTHER; note = 2'-fluoroguanosine-3'-phosphate
  modified_base 8: mod_base = OTHER; note = 2'-O-methyluridine-3'-phosphate
  modified_base 9: mod_base = OTHER; note = 2'-fluoroadenosine-3'-phosphate
  modified_base 10: mod_base = OTHER; note = 2'-fluorouridine-3'-phosphate
  modified_base 11: mod_base = OTHER; note = 2'-fluorouridine-3'-phosphate
  modified_base 12: mod_base = OTHER; note = 2'-O-methyladenosine-3'-phosphate
  modified_base 13: mod_base = OTHER; note = 2'-O-methylcytidine-3'-phosphate
  modified_base 14: mod_base = OTHER; note = 2'-O-methyluridine-3'-phosphate
  modified_base 15: mod_base = OTHER; note = 2'-O-methyluridine-3'-phosphate
  modified_base 16: mod_base = OTHER; note = 2'-O-methylguanosine-3'-phosphate
  modified_base 17: mod_base = OTHER; note = 2'-O-methyladenosine-3'-phosphate
  modified_base 18: mod_base = OTHER; note = 2'-O-methylcytidine-3'-phosphate
  modified_base 19: mod_base = OTHER; note = 2'-O-methyladenosine-3'-phosphate
  modified_base 20: mod_base = OTHER; note = 2'-O-methyladenosine-3'-phosphate
  modified_base 21: mod_base = OTHER; note 2'-O-methyladenosine-3'-phosphate-N-[tris(GalNAc-alkyl)-ami dodecanoyl)]-4-hydroxyprolinol (Hyp-(GalNAc-alkyl)3)
cagcatgtattacttgacaaa

SEQ ID NO: 2319 - RNA, 23 nt, synthetic construct
  source 1..23: mol_type = other RNA
  modified_base 1: mod_base = OTHER; note = 2'-O-methyluridine-3'-phosphorothioate
  modified_base 2: mod_base = OTHER; note = 2'-fluorouridine -3'-phosphorothioate
  modified_base 3: mod_base = OTHER; note = 2'-O-methyluridine-3'-phosphate
  modified_base 4: mod_base = OTHER; note = 2'-O-methylguanosine-3'-phosphate
  modified_base 5: mod_base = OTHER; note = 2'-O-methyluridine-3'-phosphate
  modified_base 6: mod_base = OTHER; note = 2'-fluorocytidine-3'-phosphate
  modified_base 7: mod_base = OTHER; note = 2'-O-methyladenosine-3'-phosphate
  modified_base 8: mod_base = OTHER; note = 2'-fluoroadenosine-3'-phosphate
  modified_base 9: mod_base = OTHER; note = 2'-fluoroguanosine-3'-phosphate
  modified_base 10: mod_base = OTHER; note = 2'-O-methyluridine-3'-phosphate
  modified_base 11: mod_base = OTHER; note = 2'-O-methyladenosine-3'-phosphate
  modified_base 12: mod_base = OTHER; note = 2'-O-methyladenosine-3'-phosphate
  modified_base 13: mod_base = OTHER; note = 2'-O-methyluridine-3'-phosphate
  modified_base 14: mod_base = OTHER; note = 2'-fluoroadenosine-3'-phosphate
  modified_base 15: mod_base = OTHER; note = 2'-O-methylcytidine-3'-phosphate
  modified_base 16: mod_base = OTHER; note = 2'-fluoroadenosine-3'-phosphate
  modified_base 17: mod_base = OTHER; note = 2'-O-methyluridine-3'-phosphate
  modified_base 18: mod_base = OTHER; note = 2'-O-methylguanosine-3'-phosphate
  modified_base 19: mod_base = OTHER; note = 2'-O-methylcytidine-3'-phosphate
  modified_base 20: mod_base = OTHER; note = 2'-O-methyluridine-3'-phosphate
  modified_base 21: mod_base = OTHER; note = 2'-O-methylguanosine-3'- phosphorothioate
  modified_base 22: mod_base = OTHER; note = 2'-O-methyladenosine-3'- phosphorothioate
  modified_base 23: mod_base = OTHER; note = 2'-O-methyladenosine-3'-phosphate
tttgtcaagtaatacatgctgaa

SEQ ID NO: 2320 - RNA, 21 nt, synthetic construct
  source 1..21: mol_type = other RNA
  modified_base 1: mod_base = OTHER; note = 2'-O-methyluridine-3'-phosphorothioate
  modified_base 2: mod_base = OTHER; note = 2'-O-methylcytidine-3'- phosphorothioate
  modified_base 3: mod_base = OTHER; note = 2'-O-methyladenosine-3'-phosphate
  modified_base 4: mod_base = OTHER; note = 2'-O-methylguanosine-3'-phosphate
  modified_base 5: mod_base = OTHER; note = 2'-O-methylcytidine-3'-phosphate
  modified_base 6: mod_base = OTHER; note = 2'-O-methyladenosine-3'-phosphate
  modified_base 7: mod_base = OTHER; note = 2'-fluorouridine-3'-phosphate
  modified_base 8: mod_base = OTHER; note = 2'-O-methylguanosine-3'-phosphate
  modified_base 9: mod_base = OTHER; note = 2'-fluorouridine-3'-phosphate
  modified_base 10: mod_base = OTHER; note = 2'-fluoroadenosine-3'-phosphate
  modified_base 11: mod_base = OTHER; note = 2'-fluorouridine-3'-phosphate
  modified_base 12: mod_base = OTHER; note = 2'-O-methyluridine-3'-phosphate
  modified_base 13: mod_base = OTHER; note = 2'-O-methyladenosine-3'-phosphate
  modified_base 14: mod_base = OTHER; note = 2'-O-methylcytidine-3'-phosphate
  modified_base 15: mod_base = OTHER; note = 2'-O-methyluridine-3'-phosphate
  modified_base 16: mod_base = OTHER; note = 2'-O-methyluridine-3'-phosphate
  modified_base 17: mod_base = OTHER; note = 2'-O-methylguanosine-3'-phosphate
  modified_base 18: mod_base = OTHER; note = 2'-O-methyladenosine-3'-phosphate
  modified_base 19: mod_base = OTHER; note = 2'-O-methylcytidine-3'-phosphate
  modified_base 20: mod_base = OTHER; note = 2'-O-methyladenosine-3'-phosphate
  modified_base 21: mod_base = OTHER; note 2'-O-methyladenosine-3'-phosphate-N-[tris(GalNAc-alkyl)-ami dodecanoyl)]-4-hydroxyprolinol (Hyp-(GalNAc-alkyl)3)
tcagcatgtattacttgacaa

SEQ ID NO: 2321 - RNA, 23 nt, synthetic construct
  source 1..23: mol_type = other RNA
  modified_base 1: mod_base = OTHER; note = 2'-O-methyluridine-3'-phosphorothioate
  modified_base 2: mod_base = OTHER; note = 2'-fluorouridine -3'-phosphorothioate
  modified_base 3: mod_base = OTHER; note = 2'-O-methylguanosine-3'-phosphate
  modified_base 4: mod_base = OTHER; note = 2'-O-methyluridine-3'-phosphate
  modified_base 5: mod_base = OTHER; note = 2'-O-methylcytidine-3'-phosphate
  modified_base 6: mod_base = OTHER; note = 2'-fluoroadenosine-3'-phosphate
  modified_base 7: mod_base = OTHER; note = 2'-O-methyladenosine-3'-phosphate
  modified_base 8: mod_base = OTHER; note = 2'-fluoroguanosine-3'-phosphate
  modified_base 9: mod_base = OTHER; note = 2'-fluorouridine-3'-phosphate
  modified_base 10: mod_base = OTHER; note = 2'-O-methyladenosine-3'-phosphate
  modified_base 11: mod_base = OTHER; note = 2'-O-methyladenosine-3'-phosphate
  modified_base 12: mod_base = OTHER; note = 2'-O-methyluridine-3'-phosphate
  modified_base 13: mod_base = OTHER; note = 2'-O-methyladenosine-3'-phosphate
  modified_base 14: mod_base = OTHER; note = 2'-fluorocytidine-3'-phosphate
  modified_base 15: mod_base = OTHER; note = 2'-O-methyladenosine-3'-phosphate
  modified_base 16: mod_base = OTHER; note = 2'-fluorouridine-3'-phosphate
  modified_base 17: mod_base = OTHER; note = 2'-O-methylguanosine-3'-phosphate
  modified_base 18: mod_base = OTHER; note = 2'-O-methylcytidine-3'-phosphate
  modified_base 19: mod_base = OTHER; note = 2'-O-methyluridine-3'-phosphate
  modified_base 20: mod_base = OTHER; note = 2'-O-methylguanosine-3'-phosphate
  modified_base 21: mod_base = OTHER; note = 2'-O-methyladenosine-3'- phosphorothioate
  modified_base 22: mod_base = OTHER; note = 2'-O-methyladenosine-3'- phosphorothioate
  modified_base 23: mod_base = OTHER; note = 2'-O-methyladenosine-3'-phosphate
ttgtcaagtaatacatgctgaaa

SEQ ID NO: 2322 - RNA, 21 nt, synthetic construct
  source 1..21: mol_type = other RNA
  modified_base 1: mod_base = OTHER; note = 2'-O-methylcytidine-3'- phosphorothioate
  modified_base 2: mod_base = OTHER; note = 2'-O-methyluridine-3'-phosphorothioate
  modified_base 3: mod_base = OTHER; note = 2'-O-methylguanosine-3'-phosphate
  modified_base 4: mod_base = OTHER; note = 2'-O-methylcytidine-3'-phosphate
  modified_base 5: mod_base = OTHER; note = 2'-O-methyladenosine-3'-phosphate
  modified_base 6: mod_base = OTHER; note = 2'-O-methyladenosine-3'-phosphate
  modified_base 7: mod_base = OTHER; note = 2'-fluorocytidine-3'-phosphate
  modified_base 8: mod_base = OTHER; note = 2'-O-methyluridine-3'-phosphate
  modified_base 9: mod_base = OTHER; note = 2'-fluoroguanosine-3'-phosphate
  modified_base 10: mod_base = OTHER; note = 2'-fluorouridine-3'-phosphate
  modified_base 11: mod_base = OTHER; note = 2'-fluoroadenosine-3'-phosphate
  modified_base 12: mod_base = OTHER; note = 2'-O-methyluridine-3'-phosphate
  modified_base 13: mod_base = OTHER; note = 2'-O-methyladenosine-3'-phosphate
  modified_base 14: mod_base = OTHER; note = 2'-O-methyluridine-3'-phosphate
  modified_base 15: mod_base = OTHER; note = 2'-O-methylcytidine-3'-phosphate
  modified_base 16: mod_base = OTHER; note = 2'-O-methyluridine-3'-phosphate
  modified_base 17: mod_base = OTHER; note = 2'-O-methyladenosine-3'-phosphate
  modified_base 18: mod_base = OTHER; note = 2'-O-methylcytidine-3'-phosphate
  modified_base 19: mod_base = OTHER; note = 2'-O-methyladenosine-3'-phosphate
  modified_base 20: mod_base = OTHER; note = 2'-O-methyladenosine-3'-phosphate
  modified_base 21: mod_base = OTHER; note 2'-O-methylguanosine-3'-phosphate-N-[tris(GalNAc-alkyl)-ami dodecanoyl)]-4-hydroxyprolinol (Hyp-(GalNAc-alkyl)3)
ctgcaactgtatatctacaag

SEQ ID NO: 2323 - RNA, 23 nt, synthetic construct
  source 1..23: mol_type = other RNA
  modified_base 1: mod_base = OTHER; note = 2'-O-methylcytidine-3'- phosphorothioate
  modified_base 2: mod_base = OTHER; note = 2'-fluorouridine -3'-phosphorothioate
  modified_base 3: mod_base = OTHER; note = 2'-O-methyluridine-3'-phosphate
  modified_base 4: mod_base = OTHER; note = 2'-O-methylguanosine-3'-phosphate
  modified_base 5: mod_base = OTHER; note = 2'-O-methyluridine-3'-phosphate
  modified_base 6: mod_base = OTHER; note = 2'-fluoroadenosine-3'-phosphate
  modified_base 7: mod_base = OTHER; note = 2'-O-methylguanosine-3'-phosphate
  modified_base 8: mod_base = OTHER; note = 2'-fluoroadenosine-3'-phosphate
  modified_base 9: mod_base = OTHER; note = 2'-fluorouridine-3'-phosphate
  modified_base 10: mod_base = OTHER; note = 2'-O-methyladenosine-3'-phosphate
  modified_base 11: mod_base = OTHER; note = 2'-O-methyluridine-3'-phosphate
  modified_base 12: mod_base = OTHER; note = 2'-O-methyladenosine-3'-phosphate
  modified_base 13: mod_base = OTHER; note = 2'-O-methylcytidine-3'-phosphate
  modified_base 14: mod_base = OTHER; note = 2'-fluoroadenosine-3'-phosphate
  modified_base 15: mod_base = OTHER; note = 2'-O-methylguanosine-3'-phosphate
  modified_base 16: mod_base = OTHER; note = 2'-fluorouridine-3'-phosphate
  modified_base 17: mod_base = OTHER; note = 2'-O-methyluridine-3'-phosphate
  modified_base 18: mod_base = OTHER; note = 2'-O-methylguanosine-3'-phosphate
  modified_base 19: mod_base = OTHER; note = 2'-O-methylcytidine-3'-phosphate
  modified_base 20: mod_base = OTHER; note = 2'-O-methyladenosine-3'-phosphate
  modified_base 21: mod_base = OTHER; note = 2'-O-methylguanosine-3'- phosphorothioate
  modified_base 22: mod_base = OTHER; note = 2'-O-methylcytidine-3'- phosphorothioate
  modified_base 23: mod_base = OTHER; note = 2'-O-methylcytidine-3'-phosphate
cttgtagatatacagttgcagcc

SEQ ID NO: 2324 - RNA, 21 nt, synthetic construct
  source 1..21: mol_type = other RNA
  modified_base 1: mod_base = OTHER; note = 2'-O-methyluridine-3'-phosphorothioate
  modified_base 2: mod_base = OTHER; note = 2'-O-methylguanosine-3'- phosphorothioate
  modified_base 3: mod_base = OTHER; note = 2'-O-methylcytidine-3'-phosphate
  modified_base 4: mod_base = OTHER; note = 2'-O-methyladenosine-3'-phosphate
  modified_base 5: mod_base = OTHER; note = 2'-O-methyladenosine-3'-phosphate
  modified_base 6: mod_base = OTHER; note = 2'-O-methylcytidine-3'-phosphate
  modified_base 7: mod_base = OTHER; note = 2'-fluorouridine-3'-phosphate
  modified_base 8: mod_base = OTHER; note = 2'-O-methylguanosine-3'-phosphate
  modified_base 9: mod_base = OTHER; note = 2'-fluorouridine-3'-phosphate
  modified_base 10: mod_base = OTHER; note = 2'-fluoroadenosine-3'-phosphate
  modified_base 11: mod_base = OTHER; note = 2'-fluorouridine-3'-phosphate
  modified_base 12: mod_base = OTHER; note = 2'-O-methyladenosine-3'-phosphate
  modified_base 13: mod_base = OTHER; note = 2'-O-methyluridine-3'-phosphate
  modified_base 14: mod_base = OTHER; note = 2'-O-methylcytidine-3'-phosphate
  modified_base 15: mod_base = OTHER; note = 2'-O-methyluridine-3'-phosphate
  modified_base 16: mod_base = OTHER; note = 2'-O-methyladenosine-3'-phosphate
  modified_base 17: mod_base = OTHER; note = 2'-O-methylcytidine-3'-phosphate
  modified_base 18: mod_base = OTHER; note = 2'-O-methyladenosine-3'-phosphate
  modified_base 19: mod_base = OTHER; note = 2'-O-methyladenosine-3'-phosphate
  modified_base 20: mod_base = OTHER; note = 2'-O-methylguanosine-3'-phosphate
  modified_base 21: mod_base = OTHER; note 2'-O-methylguanosine-3'-phosphate-N-[tris(GalNAc-alkyl)-ami dodecanoyl)]-4-hydroxyprolinol (Hyp-(GalNAc-alkyl)3)
tgcaactgtatatctacaagg

SEQ ID NO: 2325 - RNA, 23 nt, synthetic construct
  source 1..23: mol_type = other RNA
  modified_base 1: mod_base = OTHER; note = 2'-O-methylcytidine-3'- phosphorothioate
  modified_base 2: mod_base = OTHER; note = 2'-fluorocytidine-3'-phosphorothioate
  modified_base 3: mod_base = OTHER; note = 2'-O-methyluridine-3'-phosphate
  modified_base 4: mod_base = OTHER; note = 2'-O-methyluridine-3'-phosphate
  modified_base 5: mod_base = OTHER; note = 2'-O-methylguanosine-3'-phosphate
  modified_base 6: mod_base = OTHER; note = 2'-fluorouridine-3'-phosphate
  modified_base 7: mod_base = OTHER; note = 2'-O-methyladenosine-3'-phosphate
  modified_base 8: mod_base = OTHER; note = 2'-fluoroguanosine-3'-phosphate
  modified_base 9: mod_base = OTHER; note = 2'-fluoroadenosine-3'-phosphate
  modified_base 10: mod_base = OTHER; note = 2'-O-methyluridine-3'-phosphate
  modified_base 11: mod_base = OTHER; note = 2'-O-methyladenosine-3'-phosphate
  modified_base 12: mod_base = OTHER; note = 2'-O-methyluridine-3'-phosphate
  modified_base 13: mod_base = OTHER; note = 2'-O-methyladenosine-3'-phosphate
  modified_base 14: mod_base = OTHER; note = 2'-fluorocytidine-3'-phosphate
  modified_base 15: mod_base = OTHER; note = 2'-O-methyladenosine-3'-phosphate
  modified_base 16: mod_base = OTHER; note = 2'-fluoroguanosine-3'-phosphate
  modified_base 17: mod_base = OTHER; note = 2'-O-methyluridine-3'-phosphate
  modified_base 18: mod_base = OTHER; note = 2'-O-methyluridine-3'-phosphate
  modified_base 19: mod_base = OTHER; note = 2'-O-methylguanosine-3'-phosphate
  modified_base 20: mod_base = OTHER; note = 2'-O-methylcytidine-3'-phosphate
  modified_base 21: mod_base = OTHER; note = 2'-O-methyladenosine-3'- phosphorothioate
  modified_base 22: mod_base = OTHER; note = 2'-O-methylguanosine-3'- phosphorothioate
  modified_base 23: mod_base = OTHER; note = 2'-O-methylcytidine-3'-phosphate
ccttgtagatatacagttgcagc

SEQ ID NO: 2326 - RNA, 21 nt, synthetic construct
  source 1..21: mol_type = other RNA
  modified_base 1: mod_base = OTHER; note = 2'-O-methyluridine-3'-phosphorothioate
  modified_base 2: mod_base = OTHER; note = 2'-O-methyluridine-3'-phosphorothioate
  modified_base 3: mod_base = OTHER; note = 2'-O-methylguanosine-3'-phosphate
  modified_base 4: mod_base = OTHER; note = 2'-O-methylguanosine-3'-phosphate
  modified_base 5: mod_base = OTHER; note = 2'-O-methylcytidine-3'-phosphate
  modified_base 6: mod_base = OTHER; note = 2'-O-methyluridine-3'-phosphate
  modified_base 7: mod_base = OTHER; note = 2'-fluoroguanosine-3'-phosphate
  modified_base 8: mod_base = OTHER; note = 2'-O-methylcytidine-3'-phosphate
  modified_base 9: mod_base = OTHER; note = 2'-fluoroadenosine-3'-phosphate
  modified_base 10: mod_base = OTHER; note = 2'-fluoroadenosine-3'-phosphate
  modified_base 11: mod_base = OTHER; note = 2'-fluorocytidine-3'-phosphate
  modified_base 12: mod_base = OTHER; note = 2'-O-methyluridine-3'-phosphate
  modified_base 13: mod_base = OTHER; note = 2'-O-methylguanosine-3'-phosphate
  modified_base 14: mod_base = OTHER; note = 2'-O-methyluridine-3'-phosphate
  modified_base 15: mod_base = OTHER; note = 2'-O-methyladenosine-3'-phosphate
  modified_base 16: mod_base = OTHER; note = 2'-O-methyluridine-3'-phosphate
  modified_base 17: mod_base = OTHER; note = 2'-O-methyladenosine-3'-phosphate
  modified_base 18: mod_base = OTHER; note = 2'-O-methyluridine-3'-phosphate
  modified_base 19: mod_base = OTHER; note = 2'-O-methylcytidine-3'-phosphate
  modified_base 20: mod_base = OTHER; note = 2'-O-methyluridine-3'-phosphate
  modified_base 21: mod_base = OTHER; note 2'-O-methyladenosine-3'-phosphate-N-[tris(GalNAc-alkyl)-ami dodecanoyl)]-4-hydroxyprolinol (Hyp-(GalNAc-alkyl)3)
ttggctgcaactgtatatcta

SEQ ID NO: 2327 - RNA, 23 nt, synthetic construct
  source 1..23: mol_type = other RNA
  modified_base 1: mod_base = OTHER; note = 2'-O-methyluridine-3'-phosphorothioate
  modified_base 2: mod_base = OTHER; note = 2'-fluoroadenosine-3'-phosphorothioate
  modified_base 3: mod_base = OTHER; note = 2'-O-methylguanosine-3'-phosphate
  modified_base 4: mod_base = OTHER; note = 2'-O-methyladenosine-3'-phosphate
  modified_base 5: mod_base = OTHER; note = 2'-O-methyluridine-3'-phosphate
  modified_base 6: mod_base = OTHER; note = 2'-fluoroadenosine-3'-phosphate
  modified_base 7: mod_base = OTHER; note = 2'-O-methyluridine-3'-phosphate
  modified_base 8: mod_base = OTHER; note = 2'-fluoroadenosine-3'-phosphate
  modified_base 9: mod_base = OTHER; note = 2'-fluorocytidine-3'-phosphate
  modified_base 10: mod_base = OTHER; note = 2'-O-methyladenosine-3'-phosphate
  modified_base 11: mod_base = OTHER; note = 2'-O-methylguanosine-3'-phosphate
  modified_base 12: mod_base = OTHER; note = 2'-O-methyluridine-3'-phosphate
  modified_base 13: mod_base = OTHER; note = 2'-O-methyluridine-3'-phosphate
  modified_base 14: mod_base = OTHER; note = 2'-fluoroguanosine-3'-phosphate
  modified_base 15: mod_base = OTHER; note = 2'-O-methylcytidine-3'-phosphate
  modified_base 16: mod_base = OTHER; note = 2'-fluoroadenosine-3'-phosphate
  modified_base 17: mod_base = OTHER; note = 2'-O-methylguanosine-3'-phosphate
  modified_base 18: mod_base = OTHER; note = 2'-O-methylcytidine-3'-phosphate
  modified_base 19: mod_base = OTHER; note = 2'-O-methylcytidine-3'-phosphate
  modified_base 20: mod_base = OTHER; note = 2'-O-methyladenosine-3'-phosphate
  modified_base 21: mod_base = OTHER; note = 2'-O-methyladenosine-3'- phosphorothioate
  modified_base 22: mod_base = OTHER; note = 2'-O-methylcytidine-3'- phosphorothioate
  modified_base 23: mod_base = OTHER; note = 2'-O-methylguanosine-3'-phosphate
tagatatacagttgcagccaacg

SEQ ID NO: 2328 - RNA, 21 nt, synthetic construct
  source 1..21: mol_type = other RNA
  modified_base 1: mod_base = OTHER; note = 2'-O-methylguanosine-3'- phosphorothioate
  modified_base 2: mod_base = OTHER; note = 2'-O-methyluridine-3'-phosphorothioate
  modified_base 3: mod_base = OTHER; note = 2'-O-methyluridine-3'-phosphate
  modified_base 4: mod_base = OTHER; note = 2'-O-methylguanosine-3'-phosphate
  modified_base 5: mod_base = OTHER; note = 2'-O-methylguanosine-3'-phosphate
  modified_base 6: mod_base = OTHER; note = 2'-O-methylcytidine-3'-phosphate
  modified_base 7: mod_base = OTHER; note = 2'-fluorouridine-3'-phosphate
  modified_base 8: mod_base = OTHER; note = 2'-O-methylguanosine-3'-phosphate
  modified_base 9: mod_base = OTHER; note = 2'-fluorocytidine-3'-phosphate
  modified_base 10: mod_base = OTHER; note = 2'-fluoroadenosine-3'-phosphate
  modified_base 11: mod_base = OTHER; note = 2'-fluoroadenosine-3'-phosphate
  modified_base 12: mod_base = OTHER; note = 2'-O-methylcytidine-3'-phosphate
  modified_base 13: mod_base = OTHER; note = 2'-O-methyluridine-3'-phosphate
  modified_base 14: mod_base = OTHER; note = 2'-O-methylguanosine-3'-phosphate
  modified_base 15: mod_base = OTHER; note = 2'-O-methyluridine-3'-phosphate
  modified_base 16: mod_base = OTHER; note = 2'-O-methyladenosine-3'-phosphate
  modified_base 17: mod_base = OTHER; note = 2'-O-methyluridine-3'-phosphate
  modified_base 18: mod_base = OTHER; note = 2'-O-methyladenosine-3'-phosphate
  modified_base 19: mod_base = OTHER; note = 2'-O-methyluridine-3'-phosphate
  modified_base 20: mod_base = OTHER; note = 2'-O-methylcytidine-3'-phosphate
  modified_base 21: mod_base = OTHER; note 2'-O-methyluridine-3'-phosphate-N-[tris(GalNAc-alkyl)-amido decanoyl)]-4-hydroxyprolinol (Hyp-(GalNAc-alkyl)3)
gttggctgcaactgtatatct

SEQ ID NO: 2329 - RNA, 23 nt, synthetic construct
  source 1..23: mol_type = other RNA
  modified_base 1: mod_base = OTHER; note = 2'-O-methyladenosine-3'- phosphorothioate
  modified_base 2: mod_base = OTHER; note = 2'-fluoroguanosine-3'-phosphorothioate
  modified_base 3: mod_base = OTHER; note = 2'-O-methyladenosine-3'-phosphate
  modified_base 4: mod_base = OTHER; note = 2'-O-methyluridine-3'-phosphate
  modified_base 5: mod_base = OTHER; note = 2'-O-methyladenosine-3'-phosphate
  modified_base 6: mod_base = OTHER; note = 2'-fluorouridine-3'-phosphate
  modified_base 7: mod_base = OTHER; note = 2'-O-methyladenosine-3'-phosphate
  modified_base 8: mod_base = OTHER; note = 2'-fluorocytidine-3'-phosphate
  modified_base 9: mod_base = OTHER; note = 2'-fluoroadenosine-3'-phosphate
  modified_base 10: mod_base = OTHER; note = 2'-O-methylguanosine-3'-phosphate
  modified_base 11: mod_base = OTHER; note = 2'-O-methyluridine-3'-phosphate
  modified_base 12: mod_base = OTHER; note = 2'-O-methyluridine-3'-phosphate
  modified_base 13: mod_base = OTHER; note = 2'-O-methylguanosine-3'-phosphate
  modified_base 14: mod_base = OTHER; note = 2'-fluorocytidine-3'-phosphate
  modified_base 15: mod_base = OTHER; note = 2'-O-methyladenosine-3'-phosphate
  modified_base 16: mod_base = OTHER; note = 2'-fluoroguanosine-3'-phosphate
  modified_base 17: mod_base = OTHER; note = 2'-O-methylcytidine-3'-phosphate
  modified_base 18: mod_base = OTHER; note = 2'-O-methylcytidine-3'-phosphate
  modified_base 19: mod_base = OTHER; note = 2'-O-methyladenosine-3'-phosphate
  modified_base 20: mod_base = OTHER; note = 2'-O-methyladenosine-3'-phosphate
  modified_base 21: mod_base = OTHER; note = 2'-O-methylcytidine-3'- phosphorothioate
  modified_base 22: mod_base = OTHER; note = 2'-O-methylguanosine-3'- phosphorothioate
  modified_base 23: mod_base = OTHER; note = 2'-O-methyladenosine-3'-phosphate
agatatacagttgcagccaacga

SEQ ID NO: 2330 - RNA, 21 nt, synthetic construct
  source 1..21: mol_type = other RNA
  modified_base 1: mod_base = OTHER; note = 2'-O-methylcytidine-3'- phosphorothioate
  modified_base 2: mod_base = OTHER; note = 2'-O-methyladenosine-3'- phosphorothioate
  modified_base 3: mod_base = OTHER; note = 2'-O-methyladenosine-3'-phosphate
  modified_base 4: mod_base = OTHER; note = 2'-O-methyladenosine-3'-phosphate
  modified_base 5: mod_base = OTHER; note = 2'-O-methyluridine-3'-phosphate
  modified_base 6: mod_base = OTHER; note = 2'-O-methylguanosine-3'-phosphate
  modified_base 7: mod_base = OTHER; note = 2'-fluoroadenosine-3'-phosphate
  modified_base 8: mod_base = OTHER; note = 2'-O-methyluridine-3'-phosphate
  modified_base 9: mod_base = OTHER; note = 2'-fluoroguanosine-3'-phosphate
  modified_base 10: mod_base = OTHER; note = 2'-fluoroadenosine-3'-phosphate
  modified_base 11: mod_base = OTHER; note = 2'-fluoroadenosine-3'-phosphate
  modified_base 12: mod_base = OTHER; note = 2'-O-methylguanosine-3'-phosphate
  modified_base 13: mod_base = OTHER; note = 2'-O-methyladenosine-3'-phosphate
  modified_base 14: mod_base = OTHER; note = 2'-O-methyladenosine-3'-phosphate
  modified_base 15: mod_base = OTHER; note = 2'-O-methyladenosine-3'-phosphate
  modified_base 16: mod_base = OTHER; note = 2'-O-methylcytidine-3'-phosphate
  modified_base 17: mod_base = OTHER; note = 2'-O-methyluridine-3'-phosphate
  modified_base 18: mod_base = OTHER; note = 2'-O-methyluridine-3'-phosphate
  modified_base 19: mod_base = OTHER; note = 2'-O-methyluridine-3'-phosphate
  modified_base 20: mod_base = OTHER; note = 2'-O-methylguanosine-3'-phosphate
  modified_base 21: mod_base = OTHER; note 2'-O-methylguanosine-3'-phosphate-N-[tris(GalNAc-alkyl)-ami dodecanoyl)]-4-hydroxyprolinol (Hyp-(GalNAc-alkyl)3)
caaatgatgaagaaactttgg

SEQ ID NO: 2331 - RNA, 23 nt, synthetic construct
  source 1..23: mol_type = other RNA
  modified_base 1: mod_base = OTHER; note = 2'-O-methylcytidine-3'- phosphorothioate
  modified_base 2: mod_base = OTHER; note = 2'-fluorocytidine-3'-phosphorothioate
  modified_base 3: mod_base = OTHER; note = 2'-O-methyladenosine-3'-phosphate
  modified_base 4: mod_base = OTHER; note = 2'-O-methyladenosine-3'-phosphate
  modified_base 5: mod_base = OTHER; note = 2'-O-methyladenosine-3'-phosphate
  modified_base 6: mod_base = OTHER; note = 2'-fluoroguanosine-3'-phosphate
  modified_base 7: mod_base = OTHER; note = 2'-O-methyluridine-3'-phosphate
  modified_base 8: mod_base = OTHER; note = 2'-fluorouridine-3'-phosphate
  modified_base 9: mod_base = OTHER; note = 2'-fluorouridine-3'-phosphate
  modified_base 10: mod_base = OTHER; note = 2'-O-methylcytidine-3'-phosphate
  modified_base 11: mod_base = OTHER; note = 2'-O-methyluridine-3'-phosphate
  modified_base 12: mod_base = OTHER; note = 2'-O-methyluridine-3'-phosphate
  modified_base 13: mod_base = OTHER; note = 2'-O-methylcytidine-3'-phosphate
  modified_base 14: mod_base = OTHER; note = 2'-fluoroadenosine-3'-phosphate
  modified_base 15: mod_base = OTHER; note = 2'-O-methyluridine-3'-phosphate
  modified_base 16: mod_base = OTHER; note = 2'-fluorocytidine-3'-phosphate
  modified_base 17: mod_base = OTHER; note = 2'-O-methyladenosine-3'-phosphate
  modified_base 18: mod_base = OTHER; note = 2'-O-methyluridine-3'-phosphate
  modified_base 19: mod_base = OTHER; note = 2'-O-methyluridine-3'-phosphate
  modified_base 20: mod_base = OTHER; note = 2'-O-methyluridine-3'-phosphate
  modified_base 21: mod_base = OTHER; note = 2'-O-methylguanosine-3'- phosphorothioate
  modified_base 22: mod_base = OTHER; note = 2'-O-methylcytidine-3'- phosphorothioate
  modified_base 23: mod_base = OTHER; note = 2'-O-methylcytidine-3'-phosphate
ccaaagtttcttcatcatttgcc

SEQ ID NO: 2332 - RNA, 21 nt, synthetic construct
  source 1..21: mol_type = other RNA
  modified_base 1: mod_base = OTHER; note = 2'-O-methyladenosine-3'- phosphorothioate
  modified_base 2: mod_base = OTHER; note = 2'-O-methyladenosine-3'- phosphorothioate
  modified_base 3: mod_base = OTHER; note = 2'-O-methyladenosine-3'-phosphate
  modified_base 4: mod_base = OTHER; note = 2'-O-methyluridine-3'-phosphate
  modified_base 5: mod_base = OTHER; note = 2'-O-methylguanosine-3'-phosphate
  modified_base 6: mod_base = OTHER; note = 2'-O-methyladenosine-3'-phosphate
  modified_base 7: mod_base = OTHER; note = 2'-fluorouridine-3'-phosphate
  modified_base 8: mod_base = OTHER; note = 2'-O-methylguanosine-3'-phosphate
  modified_base 9: mod_base = OTHER; note = 2'-fluoroadenosine-3'-phosphate
  modified_base 10: mod_base = OTHER; note = 2'-fluoroadenosine-3'-phosphate
  modified_base 11: mod_base = OTHER; note = 2'-fluoroguanosine-3'-phosphate
  modified_base 12: mod_base = OTHER; note = 2'-O-methyladenosine-3'-phosphate
  modified_base 13: mod_base = OTHER; note = 2'-O-methyladenosine-3'-phosphate
  modified_base 14: mod_base = OTHER; note = 2'-O-methyladenosine-3'-phosphate
  modified_base 15: mod_base = OTHER; note = 2'-O-methylcytidine-3'-phosphate
  modified_base 16: mod_base = OTHER; note = 2'-O-methyluridine-3'-phosphate
  modified_base 17: mod_base = OTHER; note = 2'-O-methyluridine-3'-phosphate
  modified_base 18: mod_base = OTHER; note = 2'-O-methyluridine-3'-phosphate
  modified_base 19: mod_base = OTHER; note = 2'-O-methylguanosine-3'-phosphate
  modified_base 20: mod_base = OTHER; note = 2'-O-methylguanosine-3'-phosphate
  modified_base 21: mod_base = OTHER; note 2'-O-methylcytidine-3'-phosphate-N-[tris(GalNAc-alkyl)-amid odecanoyl)]-4-hydroxyprolinol (Hyp-(GalNAc-alkyl)3)
aaatgatgaagaaactttggc

SEQ ID NO: 2333 - RNA, 23 nt, synthetic construct
  source 1..23: mol_type = other RNA
  modified_base 1: mod_base = OTHER; note = 2'-O-methylguanosine-3'- phosphorothioate
  modified_base 2: mod_base = OTHER; note = 2'-fluorocytidine-3'-phosphorothioate
  modified_base 3: mod_base = OTHER; note = 2'-O-methylcytidine-3'-phosphate
  modified_base 4: mod_base = OTHER; note = 2'-O-methyladenosine-3'-phosphate
  modified_base 5: mod_base = OTHER; note = 2'-O-methyladenosine-3'-phosphate
  modified_base 6: mod_base = OTHER; note = 2'-fluoroadenosine-3'-phosphate
  modified_base 7: mod_base = OTHER; note = 2'-O-methylguanosine-3'-phosphate
  modified_base 8: mod_base = OTHER; note = 2'-fluorouridine-3'-phosphate
  modified_base 9: mod_base = OTHER; note = 2'-fluorouridine-3'-phosphate
  modified_base 10: mod_base = OTHER; note = 2'-O-methyluridine-3'-phosphate
  modified_base 11: mod_base = OTHER; note = 2'-O-methylcytidine-3'-phosphate
  modified_base 12: mod_base = OTHER; note = 2'-O-methyluridine-3'-phosphate
  modified_base 13: mod_base = OTHER; note = 2'-O-methyluridine-3'-phosphate
  modified_base 14: mod_base = OTHER; note = 2'-fluorocytidine-3'-phosphate
  modified_base 15: mod_base = OTHER; note = 2'-O-methyladenosine-3'-phosphate
  modified_base 16: mod_base = OTHER; note = 2'-fluorouridine-3'-phosphate
  modified_base 17: mod_base = OTHER; note = 2'-O-methylcytidine-3'-phosphate
  modified_base 18: mod_base = OTHER; note = 2'-O-methyladenosine-3'-phosphate
  modified_base 19: mod_base = OTHER; note = 2'-O-methyluridine-3'-phosphate
  modified_base 20: mod_base = OTHER; note = 2'-O-methyluridine-3'-phosphate
  modified_base 21: mod_base = OTHER; note = 2'-O-methyluridine-3'-phosphorothioate
  modified_base 22: mod_base = OTHER; note = 2'-O-methylguanosine-3'- phosphorothioate
  modified_base 23: mod_base = OTHER; note = 2'-O-methylcytidine-3'-phosphate
gccaaagtttcttcatcatttgc

SEQ ID NO: 2334 - RNA, 21 nt, synthetic construct
  source 1..21: mol_type = other RNA
  modified_base 1: mod_base = OTHER; note = 2'-O-methylguanosine-3'- phosphorothioate
  modified_base 2: mod_base = OTHER; note = 2'-O-methylguanosine-3'- phosphorothioate
  modified_base 3: mod_base = OTHER; note = 2'-O-methylguanosine-3'-phosphate
  modified_base 4: mod_base = OTHER; note = 2'-O-methylguanosine-3'-phosphate
  modified_base 5: mod_base = OTHER; note = 2'-O-methylcytidine-3'-phosphate
  modified_base 6: mod_base = OTHER; note = 2'-O-methyladenosine-3'-phosphate
  modified_base 7: mod_base = OTHER; note = 2'-fluoroadenosine-3'-phosphate
  modified_base 8: mod_base = OTHER; note = 2'-O-methyladenosine-3'-phosphate
  modified_base 9: mod_base = OTHER; note = 2'-fluorouridine-3'-phosphate
  modified_base 10: mod_base = OTHER; note = 2'-fluoroguanosine-3'-phosphate
  modified_base 11: mod_base = OTHER; note = 2'-fluoroadenosine-3'-phosphate
  modified_base 12: mod_base = OTHER; note = 2'-O-methyluridine-3'-phosphate
  modified_base 13: mod_base = OTHER; note = 2'-O-methylguanosine-3'-phosphate
  modified_base 14: mod_base = OTHER; note = 2'-O-methyladenosine-3'-phosphate
  modified_base 15: mod_base = OTHER; note = 2'-O-methyladenosine-3'-phosphate
  modified_base 16: mod_base = OTHER; note = 2'-O-methylguanosine-3'-phosphate
  modified_base 17: mod_base = OTHER; note = 2'-O-methyladenosine-3'-phosphate
  modified_base 18: mod_base = OTHER; note = 2'-O-methyladenosine-3'-phosphate
  modified_base 19: mod_base = OTHER; note = 2'-O-methyladenosine-3'-phosphate
  modified_base 20: mod_base = OTHER; note = 2'-O-methylcytidine-3'-phosphate
  modified_base 21: mod_base = OTHER; note 2'-O-methyluridine-3'-phosphate-N-[tris(GalNAc-alkyl)-amido decanoyl)]-4-hydroxyprolinol (Hyp-(GalNAc-alkyl)3)
ggggcaaatgatgaagaaact

SEQ ID NO: 2335 - RNA, 23 nt, synthetic construct
  source 1..23: mol_type = other RNA
  modified_base 1: mod_base = OTHER; note = 2'-O-methyladenosine-3'- phosphorothioate
  modified_base 2: mod_base = OTHER; note = 2'-fluoroguanosine-3'-phosphorothioate
  modified_base 3: mod_base = OTHER; note = 2'-O-methyluridine-3'-phosphate
  modified_base 4: mod_base = OTHER; note = 2'-O-methyluridine-3'-phosphate
  modified_base 5: mod_base = OTHER; note = 2'-O-methyluridine-3'-phosphate
  modified_base 6: mod_base = OTHER; note = 2'-fluorocytidine-3'-phosphate
  modified_base 7: mod_base = OTHER; note = 2'-O-methyluridine-3'-phosphate
  modified_base 8: mod_base = OTHER; note = 2'-fluorouridine-3'-phosphate
  modified_base 9: mod_base = OTHER; note = 2'-fluorocytidine-3'-phosphate
  modified_base 10: mod_base = OTHER; note = 2'-O-methyladenosine-3'-phosphate
  modified_base 11: mod_base = OTHER; note = 2'-O-methyluridine-3'-phosphate
  modified_base 12: mod_base = OTHER; note = 2'-O-methylcytidine-3'-phosphate
  modified_base 13: mod_base = OTHER; note = 2'-O-methyladenosine-3'-phosphate
  modified_base 14: mod_base = OTHER; note = 2'-fluorouridine-3'-phosphate
  modified_base 15: mod_base = OTHER; note = 2'-O-methyluridine-3'-phosphate
  modified_base 16: mod_base = OTHER; note = 2'-fluorouridine-3'-phosphate
  modified_base 17: mod_base = OTHER; note = 2'-O-methylguanosine-3'-phosphate
  modified_base 18: mod_base = OTHER; note = 2'-O-methylcytidine-3'-phosphate
  modified_base 19: mod_base = OTHER; note = 2'-O-methylcytidine-3'-phosphate
  modified_base 20: mod_base = OTHER; note = 2'-O-methylcytidine-3'-phosphate
  modified_base 21: mod_base = OTHER; note = 2'-O-methylcytidine-3'- phosphorothioate
  modified_base 22: mod_base = OTHER; note = 2'-O-methyladenosine-3'- phosphorothioate
  modified_base 23: mod_base = OTHER; note = 2'-O-methylguanosine-3'-phosphate
agtttcttcatcatttgccccag

SEQ ID NO: 2336 - RNA, 21 nt, synthetic construct
  source 1..21: mol_type = other RNA
  modified_base 1: mod_base = OTHER; note = 2'-O-methyluridine-3'-phosphorothioate
  modified_base 2: mod_base = OTHER; note = 2'-O-methylguanosine-3'- phosphorothioate
  modified_base 3: mod_base = OTHER; note = 2'-O-methylguanosine-3'-phosphate
  modified_base 4: mod_base = OTHER; note = 2'-O-methylguanosine-3'-phosphate
  modified_base 5: mod_base = OTHER; note = 2'-O-methylguanosine-3'-phosphate
  modified_base 6: mod_base = OTHER; note = 2'-O-methylcytidine-3'-phosphate
  modified_base 7: mod_base = OTHER; note = 2'-fluoroadenosine-3'-phosphate
  modified_base 8: mod_base = OTHER; note = 2'-O-methyladenosine-3'-phosphate
  modified_base 9: mod_base = OTHER; note = 2'-fluoroadenosine-3'-phosphate
  modified_base 10: mod_base = OTHER; note = 2'-fluorouridine-3'-phosphate
  modified_base 11: mod_base = OTHER; note = 2'-fluoroguanosine-3'-phosphate
  modified_base 12: mod_base = OTHER; note = 2'-O-methyladenosine-3'-phosphate
  modified_base 13: mod_base = OTHER; note = 2'-O-methyluridine-3'-phosphate
  modified_base 14: mod_base = OTHER; note = 2'-O-methylguanosine-3'-phosphate
  modified_base 15: mod_base = OTHER; note = 2'-O-methyladenosine-3'-phosphate
  modified_base 16: mod_base = OTHER; note = 2'-O-methyladenosine-3'-phosphate
  modified_base 17: mod_base = OTHER; note = 2'-O-methylguanosine-3'-phosphate
  modified_base 18: mod_base = OTHER; note = 2'-O-methyladenosine-3'-phosphate
  modified_base 19: mod_base = OTHER; note = 2'-O-methyladenosine-3'-phosphate
  modified_base 20: mod_base = OTHER; note = 2'-O-methyladenosine-3'-phosphate
  modified_base 21: mod_base = OTHER; note 2'-O-methylcytidine-3'-phosphate-N-[tris(GalNAc-alkyl)-amid odecanoyl)]-4-hydroxyprolinol (Hyp-(GalNAc-alkyl)3)
tggggcaaatgatgaagaaac

SEQ ID NO: 2337 - RNA, 23 nt, synthetic construct
  source 1..23: mol_type = other RNA
  modified_base 1: mod_base = OTHER; note = 2'-O-methylguanosine-3'- phosphorothioate
  modified_base 2: mod_base = OTHER; note = 2'-fluorouridine -3'-phosphorothioate
  modified_base 3: mod_base = OTHER; note = 2'-O-methyluridine-3'-phosphate
  modified_base 4: mod_base = OTHER; note = 2'-O-methyluridine-3'-phosphate
  modified_base 5: mod_base = OTHER; note = 2'-O-methylcytidine-3'-phosphate
  modified_base 6: mod_base = OTHER; note = 2'-fluorouridine-3'-phosphate
  modified_base 7: mod_base = OTHER; note = 2'-O-methyluridine-3'-phosphate
  modified_base 8: mod_base = OTHER; note = 2'-fluorocytidine-3'-phosphate
  modified_base 9: mod_base = OTHER; note = 2'-fluoroadenosine-3'-phosphate
  modified_base 10: mod_base = OTHER; note = 2'-O-methyluridine-3'-phosphate
  modified_base 11: mod_base = OTHER; note = 2'-O-methylcytidine-3'-phosphate
  modified_base 12: mod_base = OTHER; note = 2'-O-methyladenosine-3'-phosphate
  modified_base 13: mod_base = OTHER; note = 2'-O-methyluridine-3'-phosphate
  modified_base 14: mod_base = OTHER; note = 2'-fluorouridine-3'-phosphate
  modified_base 15: mod_base = OTHER; note = 2'-O-methyluridine-3'-phosphate
  modified_base 16: mod_base = OTHER; note = 2'-fluoroguanosine-3'-phosphate
  modified_base 17: mod_base = OTHER; note = 2'-O-methylcytidine-3'-phosphate
  modified_base 18: mod_base = OTHER; note = 2'-O-methylcytidine-3'-phosphate
  modified_base 19: mod_base = OTHER; note = 2'-O-methylcytidine-3'-phosphate
  modified_base 20: mod_base = OTHER; note = 2'-O-methylcytidine-3'-phosphate
  modified_base 21: mod_base = OTHER; note = 2'-O-methyladenosine-3'- phosphorothioate
  modified_base 22: mod_base = OTHER; note = 2'-O-methylguanosine-3'- phosphorothioate
  modified_base 23: mod_base = OTHER; note = 2'-O-methyladenosine-3'-phosphate
gtttcttcatcatttgccccaga

SEQ ID NO: 2338 - RNA, 21 nt, synthetic construct
  source 1..21: mol_type = other RNA
  modified_base 1: mod_base = OTHER; note = 2'-O-methylcytidine-3'- phosphorothioate
  modified_base 2: mod_base = OTHER; note = 2'-O-methyladenosine-3'- phosphorothioate
  modified_base 3: mod_base = OTHER; note = 2'-O-methyladenosine-3'-phosphate
  modified_base 4: mod_base = OTHER; note = 2'-O-methyladenosine-3'-phosphate
  modified_base 5: mod_base = OTHER; note = 2'-O-methylguanosine-3'-phosphate
  modified_base 6: mod_base = OTHER; note = 2'-O-methylguanosine-3'-phosphate
  modified_base 7: mod_base = OTHER; note = 2'-fluoroguanosine-3'-phosphate
  modified_base 8: mod_base = OTHER; note = 2'-O-methyluridine-3'-phosphate
  modified_base 9: mod_base = OTHER; note = 2'-fluoroguanosine-3'-phosphate
  modified_base 10: mod_base = OTHER; note = 2'-fluorouridine-3'-phosphate
  modified_base 11: mod_base = OTHER; note = 2'-fluorocytidine-3'-phosphate
  modified_base 12: mod_base = OTHER; note = 2'-O-methylguanosine-3'-phosphate
  modified_base 13: mod_base = OTHER; note = 2'-O-methyluridine-3'-phosphate
  modified_base 14: mod_base = OTHER; note = 2'-O-methyluridine-3'-phosphate
  modified_base 15: mod_base = OTHER; note = 2'-O-methylcytidine-3'-phosphate
  modified_base 16: mod_base = OTHER; note = 2'-O-methyluridine-3'-phosphate
  modified_base 17: mod_base = OTHER; note = 2'-O-methyluridine-3'-phosphate
  modified_base 18: mod_base = OTHER; note = 2'-O-methyluridine-3'-phosphate
  modified_base 19: mod_base = OTHER; note = 2'-O-methyluridine-3'-phosphate
  modified_base 20: mod_base = OTHER; note = 2'-O-methylcytidine-3'-phosphate
  modified_base 21: mod_base = OTHER; note 2'-O-methylcytidine-3'-phosphate-N-[tris(GalNAc-alkyl)-amid odecanoyl)]-4-hydroxyprolinol (Hyp-(GalNAc-alkyl)3)
caaagggtgtcgttcttttcc

SEQ ID NO: 2339 - RNA, 23 nt, synthetic construct
  source 1..23: mol_type = other RNA
  modified_base 1: mod_base = OTHER; note = 2'-O-methylguanosine-3'- phosphorothioate
  modified_base 2: mod_base = OTHER; note = 2'-fluoroguanosine-3'-phosphorothioate
  modified_base 3: mod_base = OTHER; note = 2'-O-methyladenosine-3'-phosphate
  modified_base 4: mod_base = OTHER; note = 2'-O-methyladenosine-3'-phosphate
  modified_base 5: mod_base = OTHER; note = 2'-O-methyladenosine-3'-phosphate
  modified_base 6: mod_base = OTHER; note = 2'-fluoroadenosine-3'-phosphate
  modified_base 7: mod_base = OTHER; note = 2'-O-methylguanosine-3'-phosphate
  modified_base 8: mod_base = OTHER; note = 2'-fluoroadenosine-3'-phosphate
  modified_base 9: mod_base = OTHER; note = 2'-fluoroadenosine-3'-phosphate
  modified_base 10: mod_base = OTHER; note = 2'-O-methylcytidine-3'-phosphate
  modified_base 11: mod_base = OTHER; note = 2'-O-methylguanosine-3'-phosphate
  modified_base 12: mod_base = OTHER; note = 2'-O-methyladenosine-3'-phosphate
  modified_base 13: mod_base = OTHER; note = 2'-O-methylcytidine-3'-phosphate
  modified_base 14: mod_base = OTHER; note = 2'-fluoroadenosine-3'-phosphate
  modified_base 15: mod_base = OTHER; note = 2'-O-methylcytidine-3'-phosphate
  modified_base 16: mod_base = OTHER; note = 2'-fluorocytidine-3'-phosphate
  modified_base 17: mod_base = OTHER; note = 2'-O-methylcytidine-3'-phosphate
  modified_base 18: mod_base = OTHER; note = 2'-O-methyluridine-3'-phosphate
  modified_base 19: mod_base = OTHER; note = 2'-O-methyluridine-3'-phosphate
  modified_base 20: mod_base = OTHER; note = 2'-O-methyluridine-3'-phosphate
  modified_base 21: mod_base = OTHER; note = 2'-O-methylguanosine-3'- phosphorothioate
  modified_base 22: mod_base = OTHER; note = 2'-O-methyluridine-3'-phosphorothioate
  modified_base 23: mod_base = OTHER; note = 2'-O-methyladenosine-3'-phosphate
ggaaaagaacgacaccctttgta

SEQ ID NO: 2340 - RNA, 21 nt, synthetic construct
  source 1..21: mol_type = other RNA
  modified_base 1: mod_base = OTHER; note = 2'-O-methyladenosine-3'- phosphorothioate
  modified_base 2: mod_base = OTHER; note = 2'-O-methyladenosine-3'- phosphorothioate
  modified_base 3: mod_base = OTHER; note = 2'-O-methyladenosine-3'-phosphate
  modified_base 4: mod_base = OTHER; note = 2'-O-methylguanosine-3'-phosphate
  modified_base 5: mod_base = OTHER; note = 2'-O-methylguanosine-3'-phosphate
  modified_base 6: mod_base = OTHER; note = 2'-O-methylguanosine-3'-phosphate
  modified_base 7: mod_base = OTHER; note = 2'-fluorouridine-3'-phosphate
  modified_base 8: mod_base = OTHER; note = 2'-O-methylguanosine-3'-phosphate
  modified_base 9: mod_base = OTHER; note = 2'-fluorouridine-3'-phosphate
  modified_base 10: mod_base = OTHER; note = 2'-fluorocytidine-3'-phosphate
  modified_base 11: mod_base = OTHER; note = 2'-fluoroguanosine-3'-phosphate
  modified_base 12: mod_base = OTHER; note = 2'-O-methyluridine-3'-phosphate
  modified_base 13: mod_base = OTHER; note = 2'-O-methyluridine-3'-phosphate
  modified_base 14: mod_base = OTHER; note = 2'-O-methylcytidine-3'-phosphate
  modified_base 15: mod_base = OTHER; note = 2'-O-methyluridine-3'-phosphate
  modified_base 16: mod_base = OTHER; note = 2'-O-methyluridine-3'-phosphate
  modified_base 17: mod_base = OTHER; note = 2'-O-methyluridine-3'-phosphate
  modified_base 18: mod_base = OTHER; note = 2'-O-methyluridine-3'-phosphate
  modified_base 19: mod_base = OTHER; note = 2'-O-methylcytidine-3'-phosphate
  modified_base 20: mod_base = OTHER; note = 2'-O-methylcytidine-3'-phosphate
  modified_base 21: mod_base = OTHER; note 2'-O-methyladenosine-3'-phosphate-N-[tris(GalNAc-alkyl)-ami dodecanoyl)]-4-hydroxyprolinol (Hyp-(GalNAc-alkyl)3)
aaagggtgtcgttcttttcca

SEQ ID NO: 2341 - RNA, 23 nt, synthetic construct
  source 1..23: mol_type = other RNA
  modified_base 1: mod_base = OTHER; note = 2'-O-methyluridine-3'-phosphorothioate
  modified_base 2: mod_base = OTHER; note = 2'-fluoroguanosine-3'-phosphorothioate
  modified_base 3: mod_base = OTHER; note = 2'-O-methylguanosine-3'-phosphate
  modified_base 4: mod_base = OTHER; note = 2'-O-methyladenosine-3'-phosphate
  modified_base 5: mod_base = OTHER; note = 2'-O-methyladenosine-3'-phosphate
  modified_base 6: mod_base = OTHER; note = 2'-fluoroadenosine-3'-phosphate
  modified_base 7: mod_base = OTHER; note = 2'-O-methyladenosine-3'-phosphate
  modified_base 8: mod_base = OTHER; note = 2'-fluoroguanosine-3'-phosphate
  modified_base 9: mod_base = OTHER; note = 2'-fluoroadenosine-3'-phosphate
  modified_base 10: mod_base = OTHER; note = 2'-O-methyladenosine-3'-phosphate
  modified_base 11: mod_base = OTHER; note = 2'-O-methylcytidine-3'-phosphate
  modified_base 12: mod_base = OTHER; note = 2'-O-methylguanosine-3'-phosphate
  modified_base 13: mod_base = OTHER; note = 2'-O-methyladenosine-3'-phosphate
  modified_base 14: mod_base = OTHER; note = 2'-fluorocytidine-3'-phosphate
  modified_base 15: mod_base = OTHER; note = 2'-O-methyladenosine-3'-phosphate
  modified_base 16: mod_base = OTHER; note = 2'-fluorocytidine-3'-phosphate
  modified_base 17: mod_base = OTHER; note = 2'-O-methylcytidine-3'-phosphate
  modified_base 18: mod_base = OTHER; note = 2'-O-methylcytidine-3'-phosphate
  modified_base 19: mod_base = OTHER; note = 2'-O-methyluridine-3'-phosphate
  modified_base 20: mod_base = OTHER; note = 2'-O-methyluridine-3'-phosphate
  modified_base 21: mod_base = OTHER; note = 2'-O-methyluridine-3'-phosphorothioate
  modified_base 22: mod_base = OTHER; note = 2'-O-methylguanosine-3'- phosphorothioate
  modified_base 23: mod_base = OTHER; note = 2'-O-methyluridine-3'-phosphate
tggaaaagaacgacaccctttgt

SEQ ID NO: 2342 - RNA, 21 nt, synthetic construct
  source 1..21: mol_type = other RNA
  modified_base 1: mod_base = OTHER; note = 2'-O-methyladenosine-3'- phosphorothioate
  modified_base 2: mod_base = OTHER; note = 2'-O-methyladenosine-3'- phosphorothioate
  modified_base 3: mod_base = OTHER; note = 2'-O-methyluridine-3'-phosphate
  modified_base 4: mod_base = OTHER; note = 2'-O-methyladenosine-3'-phosphate
  modified_base 5: mod_base = OTHER; note = 2'-O-methylcytidine-3'-phosphate
  modified_base 6: mod_base = OTHER; note = 2'-O-methyladenosine-3'-phosphate
  modified_base 7: mod_base = OTHER; note = 2'-fluoroadenosine-3'-phosphate
  modified_base 8: mod_base = OTHER; note = 2'-O-methyladenosine-3'-phosphate
  modified_base 9: mod_base = OTHER; note = 2'-fluoroguanosine-3'-phosphate
  modified_base 10: mod_base = OTHER; note = 2'-fluoroguanosine-3'-phosphate
  modified_base 11: mod_base = OTHER; note = 2'-fluoroguanosine-3'-phosphate
  modified_base 12: mod_base = OTHER; note = 2'-O-methyluridine-3'-phosphate
  modified_base 13: mod_base = OTHER; note = 2'-O-methylguanosine-3'-phosphate
  modified_base 14: mod_base = OTHER; note = 2'-O-methyluridine-3'-phosphate
  modified_base 15: mod_base = OTHER; note = 2'-O-methylcytidine-3'-phosphate
  modified_base 16: mod_base = OTHER; note = 2'-O-methylguanosine-3'-phosphate
  modified_base 17: mod_base = OTHER; note = 2'-O-methyluridine-3'-phosphate
  modified_base 18: mod_base = OTHER; note = 2'-O-methyluridine-3'-phosphate
  modified_base 19: mod_base = OTHER; note = 2'-O-methylcytidine-3'-phosphate
  modified_base 20: mod_base = OTHER; note = 2'-O-methyluridine-3'-phosphate
  modified_base 21: mod_base = OTHER; note 2'-O-methyluridine-3'-phosphate-N-[tris(GalNAc-alkyl)-amido decanoyl)]-4-hydroxyprolinol (Hyp-(GalNAc-alkyl)3)
aatacaaagggtgtcgttctt

SEQ ID NO: 2343 - RNA, 23 nt, synthetic construct
  source 1..23: mol_type = other RNA
  modified_base 1: mod_base = OTHER; note = 2'-O-methyladenosine-3'- phosphorothioate
  modified_base 2: mod_base = OTHER; note = 2'-fluoroadenosine-3'-phosphorothioate
  modified_base 3: mod_base = OTHER; note = 2'-O-methylguanosine-3'-phosphate
  modified_base 4: mod_base = OTHER; note = 2'-O-methyladenosine-3'-phosphate
  modified_base 5: mod_base = OTHER; note = 2'-O-methyladenosine-3'-phosphate
  modified_base 6: mod_base = OTHER; note = 2'-fluorocytidine-3'-phosphate
  modified_base 7: mod_base = OTHER; note = 2'-O-methylguanosine-3'-phosphate
  modified_base 8: mod_base = OTHER; note = 2'-fluoroadenosine-3'-phosphate
  modified_base 9: mod_base = OTHER; note = 2'-fluorocytidine-3'-phosphate
  modified_base 10: mod_base = OTHER; note = 2'-O-methyladenosine-3'-phosphate
  modified_base 11: mod_base = OTHER; note = 2'-O-methylcytidine-3'-phosphate
  modified_base 12: mod_base = OTHER; note = 2'-O-methylcytidine-3'-phosphate
  modified_base 13: mod_base = OTHER; note = 2'-O-methylcytidine-3'-phosphate
  modified_base 14: mod_base = OTHER; note = 2'-fluorouridine-3'-phosphate
  modified_base 15: mod_base = OTHER; note = 2'-O-methyluridine-3'-phosphate
  modified_base 16: mod_base = OTHER; note = 2'-fluorouridine-3'-phosphate
  modified_base 17: mod_base = OTHER; note = 2'-O-methylguanosine-3'-phosphate
  modified_base 18: mod_base = OTHER; note = 2'-O-methyluridine-3'-phosphate
  modified_base 19: mod_base = OTHER; note = 2'-O-methyladenosine-3'-phosphate
  modified_base 20: mod_base = OTHER; note = 2'-O-methyluridine-3'-phosphate
  modified_base 21: mod_base = OTHER; note = 2'-O-methyluridine-3'-phosphorothioate
  modified_base 22: mod_base = OTHER; note = 2'-O-methylguanosine-3'- phosphorothioate
  modified_base 23: mod_base = OTHER; note = 2'-O-methyladenosine-3'-phosphate
aagaacgacaccctttgtattga

SEQ ID NO: 2344 - RNA, 21 nt, synthetic construct
  source 1..21: mol_type = other RNA
  modified_base 1: mod_base = OTHER; note = 2'-O-methylcytidine-3'- phosphorothioate
  modified_base 2: mod_base = OTHER; note = 2'-O-methyladenosine-3'- phosphorothioate
  modified_base 3: mod_base = OTHER; note = 2'-O-methyladenosine-3'-phosphate
  modified_base 4: mod_base = OTHER; note = 2'-O-methyluridine-3'-phosphate
  modified_base 5: mod_base = OTHER; note = 2'-O-methyladenosine-3'-phosphate
  modified_base 6: mod_base = OTHER; note = 2'-O-methylcytidine-3'-phosphate
  modified_base 7: mod_base = OTHER; note = 2'-fluoroadenosine-3'-phosphate
  modified_base 8: mod_base = OTHER; note = 2'-O-methyladenosine-3'-phosphate
  modified_base 9: mod_base = OTHER; note = 2'-fluoroadenosine-3'-phosphate
  modified_base 10: mod_base = OTHER; note = 2'-fluoroguanosine-3'-phosphate
  modified_base 11: mod_base = OTHER; note = 2'-fluoroguanosine-3'-phosphate
  modified_base 12: mod_base = OTHER; note = 2'-O-methylguanosine-3'-phosphate
  modified_base 13: mod_base = OTHER; note = 2'-O-methyluridine-3'-phosphate
  modified_base 14: mod_base = OTHER; note = 2'-O-methylguanosine-3'-phosphate
  modified_base 15: mod_base = OTHER; note = 2'-O-methyluridine-3'-phosphate
  modified_base 16: mod_base = OTHER; note = 2'-O-methylcytidine-3'-phosphate
  modified_base 17: mod_base = OTHER; note = 2'-O-methylguanosine-3'-phosphate
  modified_base 18: mod_base = OTHER; note = 2'-O-methyluridine-3'-phosphate
  modified_base 19: mod_base = OTHER; note = 2'-O-methyluridine-3'-phosphate
  modified_base 20: mod_base = OTHER; note = 2'-O-methylcytidine-3'-phosphate
  modified_base 21: mod_base = OTHER; note 2'-O-methyluridine-3'-phosphate-N-[tris(GalNAc-alkyl)-amido decanoyl)]-4-hydroxyprolinol (Hyp-(GalNAc-alkyl)3)
caatacaaagggtgtcgttct

SEQ ID NO: 2345 - RNA, 23 nt, synthetic construct
  source 1..23: mol_type = other RNA
  modified_base 1: mod_base = OTHER; note = 2'-O-methyladenosine-3'- phosphorothioate
  modified_base 2: mod_base = OTHER; note = 2'-fluoroguanosine-3'-phosphorothioate
  modified_base 3: mod_base = OTHER; note = 2'-O-methyladenosine-3'-phosphate
  modified_base 4: mod_base = OTHER; note = 2'-O-methyladenosine-3'-phosphate
  modified_base 5: mod_base = OTHER; note = 2'-O-methylcytidine-3'-phosphate
  modified_base 6: mod_base = OTHER; note = 2'-fluoroguanosine-3'-phosphate
  modified_base 7: mod_base = OTHER; note = 2'-O-methyladenosine-3'-phosphate
  modified_base 8: mod_base = OTHER; note = 2'-fluorocytidine-3'-phosphate
  modified_base 9: mod_base = OTHER; note = 2'-fluoroadenosine-3'-phosphate
  modified_base 10: mod_base = OTHER; note = 2'-O-methylcytidine-3'-phosphate
  modified_base 11: mod_base = OTHER; note = 2'-O-methylcytidine-3'-phosphate
  modified_base 12: mod_base = OTHER; note = 2'-O-methylcytidine-3'-phosphate
  modified_base 13: mod_base = OTHER; note = 2'-O-methyluridine-3'-phosphate
  modified_base 14: mod_base = OTHER; note = 2'-fluorouridine-3'-phosphate
  modified_base 15: mod_base = OTHER; note = 2'-O-methyluridine-3'-phosphate
  modified_base 16: mod_base = OTHER; note = 2'-fluoroguanosine-3'-phosphate
  modified_base 17: mod_base = OTHER; note = 2'-O-methyluridine-3'-phosphate
  modified_base 18: mod_base = OTHER; note = 2'-O-methyladenosine-3'-phosphate
  modified_base 19: mod_base = OTHER; note = 2'-O-methyluridine-3'-phosphate
  modified_base 20: mod_base = OTHER; note = 2'-O-methyluridine-3'-phosphate
  modified_base 21: mod_base = OTHER; note = 2'-O-methylguanosine-3'- phosphorothioate
  modified_base 22: mod_base = OTHER; note = 2'-O-methyladenosine-3'- phosphorothioate
  modified_base 23: mod_base = OTHER; note = 2'-O-methyladenosine-3'-phosphate
agaacgacaccctttgtattgaa

SEQ ID NO: 2346 - RNA, 21 nt, synthetic construct
  source 1..21: mol_type = other RNA
  modified_base 1: mod_base = OTHER; note = 2'-O-methyladenosine-3'- phosphorothioate
  modified_base 2: mod_base = OTHER; note = 2'-O-methyladenosine-3'- phosphorothioate
  modified_base 3: mod_base = OTHER; note = 2'-O-methyladenosine-3'-phosphate
  modified_base 4: mod_base = OTHER; note = 2'-O-methylguanosine-3'-phosphate
  modified_base 5: mod_base = OTHER; note = 2'-O-methylguanosine-3'-phosphate
  modified_base 6: mod_base = OTHER; note = 2'-O-methylcytidine-3'-phosphate
  modified_base 7: mod_base = OTHER; note = 2'-fluoroadenosine-3'-phosphate
  modified_base 8: mod_base = OTHER; note = 2'-O-methylcytidine-3'-phosphate
  modified_base 9: mod_base = OTHER; note = 2'-fluorouridine-3'-phosphate
  modified_base 10: mod_base = OTHER; note = 2'-fluoroguanosine-3'-phosphate
  modified_base 11: mod_base = OTHER; note = 2'-fluoroadenosine-3'-phosphate
  modified_base 12: mod_base = OTHER; note = 2'-O-methyluridine-3'-phosphate
  modified_base 13: mod_base = OTHER; note = 2'-O-methylguanosine-3'-phosphate
  modified_base 14: mod_base = OTHER; note = 2'-O-methyluridine-3'-phosphate
  modified_base 15: mod_base = OTHER; note = 2'-O-methyluridine-3'-phosphate
  modified_base 16: mod_base = OTHER; note = 2'-O-methylcytidine-3'-phosphate
  modified_base 17: mod_base = OTHER; note = 2'-O-methyluridine-3'-phosphate
  modified_base 18: mod_base = OTHER; note = 2'-O-methylguanosine-3'-phosphate
  modified_base 19: mod_base = OTHER; note = 2'-O-methyladenosine-3'-phosphate
  modified_base 20: mod_base = OTHER; note = 2'-O-methyladenosine-3'-phosphate
  modified_base 21: mod_base = OTHER; note 2'-O-methyladenosine-3'-phosphate-N-[tris(GalNAc-alkyl)-ami dodecanoyl)]-4-hydroxyprolinol (Hyp-(GalNAc-alkyl)3)
aaaggcactgatgttctgaaa

SEQ ID NO: 2347 - RNA, 23 nt, synthetic construct
  source 1..23: mol_type = other RNA
  modified_base 1: mod_base = OTHER; note = 2'-O-methyluridine-3'-phosphorothioate
  modified_base 2: mod_base = OTHER; note = 2'-fluorouridine -3'-phosphorothioate
  modified_base 3: mod_base = OTHER; note = 2'-O-methyluridine-3'-phosphate
  modified_base 4: mod_base = OTHER; note = 2'-O-methylcytidine-3'-phosphate
  modified_base 5: mod_base = OTHER; note = 2'-O-methyladenosine-3'-phosphate
  modified_base 6: mod_base = OTHER; note = 2'-fluoroguanosine-3'-phosphate
  modified_base 7: mod_base = OTHER; note = 2'-O-methyladenosine-3'-phosphate
  modified_base 8: mod_base = OTHER; note = 2'-fluoroadenosine-3'-phosphate
  modified_base 9: mod_base = OTHER; note = 2'-fluorocytidine-3'-phosphate
  modified_base 10: mod_base = OTHER; note = 2'-O-methyladenosine-3'-phosphate
  modified_base 11: mod_base = OTHER; note = 2'-O-methyluridine-3'-phosphate
  modified_base 12: mod_base = OTHER; note = 2'-O-methylcytidine-3'-phosphate
  modified_base 13: mod_base = OTHER; note = 2'-O-methyladenosine-3'-phosphate
  modified_base 14: mod_base = OTHER; note = 2'-fluoroguanosine-3'-phosphate
  modified_base 15: mod_base = OTHER; note = 2'-O-methyluridine-3'-phosphate
  modified_base 16: mod_base = OTHER; note = 2'-fluoroguanosine-3'-phosphate
  modified_base 17: mod_base = OTHER; note = 2'-O-methylcytidine-3'-phosphate
  modified_base 18: mod_base = OTHER; note = 2'-O-methylcytidine-3'-phosphate
  modified_base 19: mod_base = OTHER; note = 2'-O-methyluridine-3'-phosphate
  modified_base 20: mod_base = OTHER; note = 2'-O-methyluridine-3'-phosphate
  modified_base 21: mod_base = OTHER; note = 2'-O-methyluridine-3'-phosphorothioate
  modified_base 22: mod_base = OTHER; note = 2'-O-methylcytidine-3'- phosphorothioate
  modified_base 23: mod_base = OTHER; note = 2'-O-methylcytidine-3'-phosphate
tttcagaacatcagtgcctttcc

SEQ ID NO: 2348 - RNA, 21 nt, synthetic construct
  source 1..21: mol_type = other RNA
  modified_base 1: mod_base = OTHER; note = 2'-O-methyladenosine-3'- phosphorothioate
  modified_base 2: mod_base = OTHER; note = 2'-O-methyladenosine-3'- phosphorothioate
  modified_base 3: mod_base = OTHER; note = 2'-O-methylguanosine-3'-phosphate
  modified_base 4: mod_base = OTHER; note = 2'-O-methylguanosine-3'-phosphate
  modified_base 5: mod_base = OTHER; note = 2'-O-methylcytidine-3'-phosphate
  modified_base 6: mod_base = OTHER; note = 2'-O-methyladenosine-3'-phosphate
  modified_base 7: mod_base = OTHER; note = 2'-fluorocytidine-3'-phosphate
  modified_base 8: mod_base = OTHER; note = 2'-O-methyluridine-3'-phosphate
  modified_base 9: mod_base = OTHER; note = 2'-fluoroguanosine-3'-phosphate
  modified_base 10: mod_base = OTHER; note = 2'-fluoroadenosine-3'-phosphate
  modified_base 11: mod_base = OTHER; note = 2'-fluorouridine-3'-phosphate
  modified_base 12: mod_base = OTHER; note = 2'-O-methylguanosine-3'-phosphate
  modified_base 13: mod_base = OTHER; note = 2'-O-methyluridine-3'-phosphate
  modified_base 14: mod_base = OTHER; note = 2'-O-methyluridine-3'-phosphate
  modified_base 15: mod_base = OTHER; note = 2'-O-methylcytidine-3'-phosphate
  modified_base 16: mod_base = OTHER; note = 2'-O-methyluridine-3'-phosphate
  modified_base 17: mod_base = OTHER; note = 2'-O-methylguanosine-3'-phosphate
  modified_base 18: mod_base = OTHER; note = 2'-O-methyladenosine-3'-phosphate
  modified_base 19: mod_base = OTHER; note = 2'-O-methyladenosine-3'-phosphate
  modified_base 20: mod_base = OTHER; note = 2'-O-methyladenosine-3'-phosphate
  modified_base 21: mod_base = OTHER; note 2'-O-methylguanosine-3'-phosphate-N-[tris(GalNAc-alkyl)-ami dodecanoyl)]-4-hydroxyprolinol (Hyp-(GalNAc-alkyl)3)
aaggcactgatgttctgaaag

SEQ ID NO: 2349 - RNA, 23 nt, synthetic construct
  source 1..23: mol_type = other RNA
  modified_base 1: mod_base = OTHER; note = 2'-O-methylcytidine-3'- phosphorothioate
  modified_base 2: mod_base = OTHER; note = 2'-fluorouridine -3'-phosphorothioate
  modified_base 3: mod_base = OTHER; note = 2'-O-methyluridine-3'-phosphate
  modified_base 4: mod_base = OTHER; note = 2'-O-methyluridine-3'-phosphate
  modified_base 5: mod_base = OTHER; note = 2'-O-methylcytidine-3'-phosphate
  modified_base 6: mod_base = OTHER; note = 2'-fluoroadenosine-3'-phosphate
  modified_base 7: mod_base = OTHER; note = 2'-O-methylguanosine-3'-phosphate
  modified_base 8: mod_base = OTHER; note = 2'-fluoroadenosine-3'-phosphate
  modified_base 9: mod_base = OTHER; note = 2'-fluoroadenosine-3'-phosphate
  modified_base 10: mod_base = OTHER; note = 2'-O-methylcytidine-3'-phosphate
  modified_base 11: mod_base = OTHER; note = 2'-O-methyladenosine-3'-phosphate
  modified_base 12: mod_base = OTHER; note = 2'-O-methyluridine-3'-phosphate
  modified_base 13: mod_base = OTHER; note = 2'-O-methylcytidine-3'-phosphate
  modified_base 14: mod_base = OTHER; note = 2'-fluoroadenosine-3'-phosphate
  modified_base 15: mod_base = OTHER; note = 2'-O-methylguanosine-3'-phosphate
  modified_base 16: mod_base = OTHER; note = 2'-fluorouridine-3'-phosphate
  modified_base 17: mod_base = OTHER; note = 2'-O-methylguanosine-3'-phosphate
  modified_base 18: mod_base = OTHER; note = 2'-O-methylcytidine-3'-phosphate
  modified_base 19: mod_base = OTHER; note = 2'-O-methylcytidine-3'-phosphate
  modified_base 20: mod_base = OTHER; note = 2'-O-methyluridine-3'-phosphate
  modified_base 21: mod_base = OTHER; note = 2'-O-methyluridine-3'-phosphorothioate
  modified_base 22: mod_base = OTHER; note = 2'-O-methyluridine-3'-phosphorothioate
  modified_base 23: mod_base = OTHER; note = 2'-O-methylcytidine-3'-phosphate
ctttcagaacatcagtgcctttc

SEQ ID NO: 2350 - RNA, 21 nt, synthetic construct
  source 1..21: mol_type = other RNA
  modified_base 1: mod_base = OTHER; note = 2'-O-methylguanosine-3'- phosphorothioate
  modified_base 2: mod_base = OTHER; note = 2'-O-methylcytidine-3'- phosphorothioate
  modified_base 3: mod_base = OTHER; note = 2'-O-methylguanosine-3'-phosphate
  modified_base 4: mod_base = OTHER; note = 2'-O-methylguanosine-3'-phosphate
  modified_base 5: mod_base = OTHER; note = 2'-O-methyladenosine-3'-phosphate
  modified_base 6: mod_base = OTHER; note = 2'-O-methyladenosine-3'-phosphate
  modified_base 7: mod_base = OTHER; note = 2'-fluoroadenosine-3'-phosphate
  modified_base 8: mod_base = OTHER; note = 2'-O-methylguanosine-3'-phosphate
  modified_base 9: mod_base = OTHER; note = 2'-fluoroguanosine-3'-phosphate
  modified_base 10: mod_base = OTHER; note = 2'-fluorocytidine-3'-phosphate
  modified_base 11: mod_base = OTHER; note = 2'-fluoroadenosine-3'-phosphate
  modified_base 12: mod_base = OTHER; note = 2'-O-methylcytidine-3'-phosphate
  modified_base 13: mod_base = OTHER; note = 2'-O-methyluridine-3'-phosphate
  modified_base 14: mod_base = OTHER; note = 2'-O-methylguanosine-3'-phosphate
  modified_base 15: mod_base = OTHER; note = 2'-O-methyladenosine-3'-phosphate
  modified_base 16: mod_base = OTHER; note = 2'-O-methyluridine-3'-phosphate
  modified_base 17: mod_base = OTHER; note = 2'-O-methylguanosine-3'-phosphate
  modified_base 18: mod_base = OTHER; note = 2'-O-methyluridine-3'-phosphate
  modified_base 19: mod_base = OTHER; note = 2'-O-methyluridine-3'-phosphate
  modified_base 20: mod_base = OTHER; note = 2'-O-methylcytidine-3'-phosphate
  modified_base 21: mod_base = OTHER; note 2'-O-methyluridine-3'-phosphate-N-[tris(GalNAc-alkyl)-amido decanoyl)]-4-hydroxyprolinol (Hyp-(GalNAc-alkyl)3)
gcggaaaggcactgatgttct

SEQ ID NO: 2351 - RNA, 23 nt, synthetic construct
  source 1..23: mol_type = other RNA
  modified_base 1: mod_base = OTHER; note = 2'-O-methyladenosine-3'- phosphorothioate
  modified_base 2: mod_base = OTHER; note = 2'-fluoroguanosine-3'-phosphorothioate
  modified_base 3: mod_base = OTHER; note = 2'-O-methyladenosine-3'-phosphate
  modified_base 4: mod_base = OTHER; note = 2'-O-methyladenosine-3'-phosphate
  modified_base 5: mod_base = OTHER; note = 2'-O-methylcytidine-3'-phosphate
  modified_base 6: mod_base = OTHER; note = 2'-fluoroadenosine-3'-phosphate
  modified_base 7: mod_base = OTHER; note = 2'-O-methyluridine-3'-phosphate
  modified_base 8: mod_base = OTHER; note = 2'-fluorocytidine-3'-phosphate
  modified_base 9: mod_base = OTHER; note = 2'-fluoroadenosine-3'-phosphate
  modified_base 10: mod_base = OTHER; note = 2'-O-methylguanosine-3'-phosphate
  modified_base 11: mod_base = OTHER; note = 2'-O-methyluridine-3'-phosphate
  modified_base 12: mod_base = OTHER; note = 2'-O-methylguanosine-3'-phosphate
  modified_base 13: mod_base = OTHER; note = 2'-O-methylcytidine-3'-phosphate
  modified_base 14: mod_base = OTHER; note = 2'-fluorocytidine-3'-phosphate
  modified_base 15: mod_base = OTHER; note = 2'-O-methyluridine-3'-phosphate
  modified_base 16: mod_base = OTHER; note = 2'-fluorouridine-3'-phosphate
  modified_base 17: mod_base = OTHER; note = 2'-O-methyluridine-3'-phosphate
  modified_base 18: mod_base = OTHER; note = 2'-O-methylcytidine-3'-phosphate
  modified_base 19: mod_base = OTHER; note = 2'-O-methylcytidine-3'-phosphate
  modified_base 20: mod_base = OTHER; note = 2'-O-methylguanosine-3'-phosphate
  modified_base 21: mod_base = OTHER; note = 2'-O-methylcytidine-3'- phosphorothioate
  modified_base 22: mod_base = OTHER; note = 2'-O-methyladenosine-3'- phosphorothioate
  modified_base 23: mod_base = OTHER; note = 2'-O-methylcytidine-3'-phosphate
agaacatcagtgcctttccgcac

SEQ ID NO: 2352 - RNA, 21 nt, synthetic construct
  source 1..21: mol_type = other RNA
  modified_base 1: mod_base = OTHER; note = 2'-O-methyluridine-3'-phosphorothioate
  modified_base 2: mod_base = OTHER; note = 2'-O-methylguanosine-3'- phosphorothioate
  modified_base 3: mod_base = OTHER; note = 2'-O-methylcytidine-3'-phosphate
  modified_base 4: mod_base = OTHER; note = 2'-O-methylguanosine-3'-phosphate
  modified_base 5: mod_base = OTHER; note = 2'-O-methylguanosine-3'-phosphate
  modified_base 6: mod_base = OTHER; note = 2'-O-methyladenosine-3'-phosphate
  modified_base 7: mod_base = OTHER; note = 2'-fluoroadenosine-3'-phosphate
  modified_base 8: mod_base = OTHER; note = 2'-O-methyladenosine-3'-phosphate
  modified_base 9: mod_base = OTHER; note = 2'-fluoroguanosine-3'-phosphate
  modified_base 10: mod_base = OTHER; note = 2'-fluoroguanosine-3'-phosphate
  modified_base 11: mod_base = OTHER; note = 2'-fluorocytidine-3'-phosphate
  modified_base 12: mod_base = OTHER; note = 2'-O-methyladenosine-3'-phosphate
  modified_base 13: mod_base = OTHER; note = 2'-O-methylcytidine-3'-phosphate
  modified_base 14: mod_base = OTHER; note = 2'-O-methyluridine-3'-phosphate
  modified_base 15: mod_base = OTHER; note = 2'-O-methylguanosine-3'-phosphate
  modified_base 16: mod_base = OTHER; note = 2'-O-methyladenosine-3'-phosphate
  modified_base 17: mod_base = OTHER; note = 2'-O-methyluridine-3'-phosphate
  modified_base 18: mod_base = OTHER; note = 2'-O-methylguanosine-3'-phosphate
  modified_base 19: mod_base = OTHER; note = 2'-O-methyluridine-3'-phosphate
  modified_base 20: mod_base = OTHER; note = 2'-O-methyluridine-3'-phosphate
  modified_base 21: mod_base = OTHER; note 2'-O-methylcytidine-3'-phosphate-N-[tris(GalNAc-alkyl)-amid odecanoyl)]-4-hydroxyprolinol (Hyp-(GalNAc-alkyl)3)
tgcggaaaggcactgatgttc

SEQ ID NO: 2353 - RNA, 23 nt, synthetic construct
  source 1..23: mol_type = other RNA
  modified_base 1: mod_base = OTHER; note = 2'-O-methylguanosine-3'- phosphorothioate
  modified_base 2: mod_base = OTHER; note = 2'-fluoroadenosine-3'-phosphorothioate
  modified_base 3: mod_base = OTHER; note = 2'-O-methyladenosine-3'-phosphate
  modified_base 4: mod_base = OTHER; note = 2'-O-methylcytidine-3'-phosphate
  modified_base 5: mod_base = OTHER; note = 2'-O-methyladenosine-3'-phosphate
  modified_base 6: mod_base = OTHER; note = 2'-fluorouridine-3'-phosphate
  modified_base 7: mod_base = OTHER; note = 2'-O-methylcytidine-3'-phosphate
  modified_base 8: mod_base = OTHER; note = 2'-fluoroadenosine-3'-phosphate
  modified_base 9: mod_base = OTHER; note = 2'-fluoroguanosine-3'-phosphate
  modified_base 10: mod_base = OTHER; note = 2'-O-methyluridine-3'-phosphate
  modified_base 11: mod_base = OTHER; note = 2'-O-methylguanosine-3'-phosphate
  modified_base 12: mod_base = OTHER; note = 2'-O-methylcytidine-3'-phosphate
  modified_base 13: mod_base = OTHER; note = 2'-O-methylcytidine-3'-phosphate
  modified_base 14: mod_base = OTHER; note = 2'-fluorouridine-3'-phosphate
  modified_base 15: mod_base = OTHER; note = 2'-O-methyluridine-3'-phosphate
  modified_base 16: mod_base = OTHER; note = 2'-fluorouridine-3'-phosphate
  modified_base 17: mod_base = OTHER; note = 2'-O-methylcytidine-3'-phosphate
  modified_base 18: mod_base = OTHER; note = 2'-O-methylcytidine-3'-phosphate
  modified_base 19: mod_base = OTHER; note = 2'-O-methylguanosine-3'-phosphate
  modified_base 20: mod_base = OTHER; note = 2'-O-methylcytidine-3'-phosphate
  modified_base 21: mod_base = OTHER; note = 2'-O-methyladenosine-3'- phosphorothioate
  modified_base 22: mod_base = OTHER; note = 2'-O-methylcytidine-3'- phosphorothioate
  modified_base 23: mod_base = OTHER; note = 2'-O-methyladenosine-3'-phosphate
gaacatcagtgcctttccgcaca

SEQ ID NO: 2354 - RNA, 21 nt, synthetic construct
  source 1..21: mol_type = other RNA
  modified_base 1: mod_base = OTHER; note = 2'-O-methyladenosine-3'- phosphorothioate
  modified_base 2: mod_base = OTHER; note = 2'-O-methyladenosine-3'- phosphorothioate
  modified_base 3: mod_base = OTHER; note = 2'-O-methylguanosine-3'-phosphate
  modified_base 4: mod_base = OTHER; note = 2'-O-methylguanosine-3'-phosphate
  modified_base 5: mod_base = OTHER; note = 2'-O-methyladenosine-3'-phosphate
  modified_base 6: mod_base = OTHER; note = 2'-O-methyluridine-3'-phosphate
  modified_base 7: mod_base = OTHER; note = 2'-fluoroguanosine-3'-phosphate
  modified_base 8: mod_base = OTHER; note = 2'-O-methylcytidine-3'-phosphate
  modified_base 9: mod_base = OTHER; note = 2'-fluorouridine-3'-phosphate
  modified_base 10: mod_base = OTHER; note = 2'-fluorocytidine-3'-phosphate
  modified_base 11: mod_base = OTHER; note = 2'-fluorocytidine-3'-phosphate
  modified_base 12: mod_base = OTHER; note = 2'-O-methylguanosine-3'-phosphate
  modified_base 13: mod_base = OTHER; note = 2'-O-methylguanosine-3'-phosphate
  modified_base 14: mod_base = OTHER; note = 2'-O-methyladenosine-3'-phosphate
  modified_base 15: mod_base = OTHER; note = 2'-O-methyladenosine-3'-phosphate
  modified_base 16: mod_base = OTHER; note = 2'-O-methyluridine-3'-phosphate
  modified_base 17: mod_base = OTHER; note = 2'-O-methylguanosine-3'-phosphate
  modified_base 18: mod_base = OTHER; note = 2'-O-methyluridine-3'-phosphate
  modified_base 19: mod_base = OTHER; note = 2'-O-methyluridine-3'-phosphate
  modified_base 20: mod_base = OTHER; note = 2'-O-methylguanosine-3'-phosphate
  modified_base 21: mod_base = OTHER; note 2'-O-methylcytidine-3'-phosphate-N-[tris(GalNAc-alkyl)-amid odecanoyl)]-4-hydroxyprolinol (Hyp-(GalNAc-alkyl)3)
aaggatgctccggaatgttgc

SEQ ID NO: 2355 - RNA, 23 nt, synthetic construct
  source 1..23: mol_type = other RNA
  modified_base 1: mod_base = OTHER; note = 2'-O-methylguanosine-3'- phosphorothioate
  modified_base 2: mod_base = OTHER; note = 2'-fluorocytidine-3'-phosphorothioate
  modified_base 3: mod_base = OTHER; note = 2'-O-methyladenosine-3'-phosphate
  modified_base 4: mod_base = OTHER; note = 2'-O-methyladenosine-3'-phosphate
  modified_base 5: mod_base = OTHER; note = 2'-O-methylcytidine-3'-phosphate
  modified_base 6: mod_base = OTHER; note = 2'-fluoroadenosine-3'-phosphate
  modified_base 7: mod_base = OTHER; note = 2'-O-methyluridine-3'-phosphate
  modified_base 8: mod_base = OTHER; note = 2'-fluorouridine-3'-phosphate
  modified_base 9: mod_base = OTHER; note = 2'-fluorocytidine-3'-phosphate
  modified_base 10: mod_base = OTHER; note = 2'-O-methylcytidine-3'-phosphate
  modified_base 11: mod_base = OTHER; note = 2'-O-methylguanosine-3'-phosphate
  modified_base 12: mod_base = OTHER; note = 2'-O-methylguanosine-3'-phosphate
  modified_base 13: mod_base = OTHER; note = 2'-O-methyladenosine-3'-phosphate
  modified_base 14: mod_base = OTHER; note = 2'-fluoroguanosine-3'-phosphate
  modified_base 15: mod_base = OTHER; note = 2'-O-methylcytidine-3'-phosphate
  modified_base 16: mod_base = OTHER; note = 2'-fluoroadenosine-3'-phosphate
  modified_base 17: mod_base = OTHER; note = 2'-O-methyluridine-3'-phosphate
  modified_base 18: mod_base = OTHER; note = 2'-O-methylcytidine-3'-phosphate
  modified_base 19: mod_base = OTHER; note = 2'-O-methylcytidine-3'-phosphate
  modified_base 20: mod_base = OTHER; note = 2'-O-methyluridine-3'-phosphate
  modified_base 21: mod_base = OTHER; note = 2'-O-methyluridine-3'-phosphorothioate
  modified_base 22: mod_base = OTHER; note = 2'-O-methylguanosine-3'- phosphorothioate
  modified_base 23: mod_base = OTHER; note = 2'-O-methylguanosine-3'-phosphate
gcaacattccggagcatccttgg

SEQ ID NO: 2356 - RNA, 21 nt, synthetic construct
  source 1..21: mol_type = other RNA
  modified_base 1: mod_base = OTHER; note = 2'-O-methyladenosine-3'- phosphorothioate
  modified_base 2: mod_base = OTHER; note = 2'-O-methylguanosine-3'- phosphorothioate
  modified_base 3: mod_base = OTHER; note = 2'-O-methylguanosine-3'-phosphate
  modified_base 4: mod_base = OTHER; note = 2'-O-methyladenosine-3'-phosphate
  modified_base 5: mod_base = OTHER; note = 2'-O-methyluridine-3'-phosphate
  modified_base 6: mod_base = OTHER; note = 2'-O-methylguanosine-3'-phosphate
  modified_base 7: mod_base = OTHER; note = 2'-fluorocytidine-3'-phosphate
  modified_base 8: mod_base = OTHER; note = 2'-O-methyluridine-3'-phosphate
  modified_base 9: mod_base = OTHER; note = 2'-fluorocytidine-3'-phosphate
  modified_base 10: mod_base = OTHER; note = 2'-fluorocytidine-3'-phosphate
  modified_base 11: mod_base = OTHER; note = 2'-fluoroguanosine-3'-phosphate
  modified_base 12: mod_base = OTHER; note = 2'-O-methylguanosine-3'-phosphate
  modified_base 13: mod_base = OTHER; note = 2'-O-methyladenosine-3'-phosphate
  modified_base 14: mod_base = OTHER; note = 2'-O-methyladenosine-3'-phosphate
  modified_base 15: mod_base = OTHER; note = 2'-O-methyluridine-3'-phosphate
  modified_base 16: mod_base = OTHER; note = 2'-O-methylguanosine-3'-phosphate
  modified_base 17: mod_base = OTHER; note = 2'-O-methyluridine-3'-phosphate
  modified_base 18: mod_base = OTHER; note = 2'-O-methyluridine-3'-phosphate
  modified_base 19: mod_base = OTHER; note = 2'-O-methylguanosine-3'-phosphate
  modified_base 20: mod_base = OTHER; note = 2'-O-methylcytidine-3'-phosphate
  modified_base 21: mod_base = OTHER; note 2'-O-methyluridine-3'-phosphate-N-[tris(GalNAc-alkyl)-amido decanoyl)]-4-hydroxyprolinol (Hyp-(GalNAc-alkyl)3)
aggatgctccggaatgttgct

SEQ ID NO: 2357 - RNA, 23 nt, synthetic construct
  source 1..23: mol_type = other RNA
  modified_base 1: mod_base = OTHER; note = 2'-O-methyladenosine-3'- phosphorothioate
  modified_base 2: mod_base = OTHER; note = 2'-fluoroguanosine-3'-phosphorothioate
  modified_base 3: mod_base = OTHER; note = 2'-O-methylcytidine-3'-phosphate
  modified_base 4: mod_base = OTHER; note = 2'-O-methyladenosine-3'-phosphate
  modified_base 5: mod_base = OTHER; note = 2'-O-methyladenosine-3'-phosphate
  modified_base 6: mod_base = OTHER; note = 2'-fluorocytidine-3'-phosphate
  modified_base 7: mod_base = OTHER; note = 2'-O-methyladenosine-3'-phosphate
  modified_base 8: mod_base = OTHER; note = 2'-fluorouridine-3'-phosphate
  modified_base 9: mod_base = OTHER; note = 2'-fluorouridine-3'-phosphate
  modified_base 10: mod_base = OTHER; note = 2'-O-methylcytidine-3'-phosphate
  modified_base 11: mod_base = OTHER; note = 2'-O-methylcytidine-3'-phosphate
  modified_base 12: mod_base = OTHER; note = 2'-O-methylguanosine-3'-phosphate
  modified_base 13: mod_base = OTHER; note = 2'-O-methylguanosine-3'-phosphate
  modified_base 14: mod_base = OTHER; note = 2'-fluoroadenosine-3'-phosphate
  modified_base 15: mod_base = OTHER; note = 2'-O-methylguanosine-3'-phosphate
  modified_base 16: mod_base = OTHER; note = 2'-fluorocytidine-3'-phosphate
  modified_base 17: mod_base = OTHER; note = 2'-O-methyladenosine-3'-phosphate
  modified_base 18: mod_base = OTHER; note = 2'-O-methyluridine-3'-phosphate
  modified_base 19: mod_base = OTHER; note = 2'-O-methylcytidine-3'-phosphate
  modified_base 20: mod_base = OTHER; note = 2'-O-methylcytidine-3'-phosphate
  modified_base 21: mod_base = OTHER; note = 2'-O-methyluridine-3'-phosphorothioate
  modified_base 22: mod_base = OTHER; note = 2'-O-methyluridine-3'-phosphorothioate
  modified_base 23: mod_base = OTHER; note = 2'-O-methylguanosine-3'-phosphate
agcaacattccggagcatccttg

SEQ ID NO: 2358 - RNA, 21 nt, synthetic construct
  source 1..21: mol_type = other RNA
  modified_base 1: mod_base = OTHER; note = 2'-O-methyladenosine-3'- phosphorothioate
  modified_base 2: mod_base = OTHER; note = 2'-O-methyluridine-3'-phosphorothioate
  modified_base 3: mod_base = OTHER; note = 2'-O-methylcytidine-3'-phosphate
  modified_base 4: mod_base = OTHER; note = 2'-O-methylcytidine-3'-phosphate
  modified_base 5: mod_base = OTHER; note = 2'-O-methyladenosine-3'-phosphate
  modified_base 6: mod_base = OTHER; note = 2'-O-methyladenosine-3'-phosphate
  modified_base 7: mod_base = OTHER; note = 2'-fluoroguanosine-3'-phosphate
  modified_base 8: mod_base = OTHER; note = 2'-O-methylguanosine-3'-phosphate
  modified_base 9: mod_base = OTHER; note = 2'-fluoroadenosine-3'-phosphate
  modified_base 10: mod_base = OTHER; note = 2'-fluorouridine-3'-phosphate
  modified_base 11: mod_base = OTHER; note = 2'-fluoroguanosine-3'-phosphate
  modified_base 12: mod_base = OTHER; note = 2'-O-methylcytidine-3'-phosphate
  modified_base 13: mod_base = OTHER; note = 2'-O-methyluridine-3'-phosphate
  modified_base 14: mod_base = OTHER; note = 2'-O-methylcytidine-3'-phosphate
  modified_base 15: mod_base = OTHER; note = 2'-O-methylcytidine-3'-phosphate
  modified_base 16: mod_base = OTHER; note = 2'-O-methylguanosine-3'-phosphate
  modified_base 17: mod_base = OTHER; note = 2'-O-methylguanosine-3'-phosphate
  modified_base 18: mod_base = OTHER; note = 2'-O-methyladenosine-3'-phosphate
  modified_base 19: mod_base = OTHER; note = 2'-O-methyladenosine-3'-phosphate
  modified_base 20: mod_base = OTHER; note = 2'-O-methyluridine-3'-phosphate
  modified_base 21: mod_base = OTHER; note 2'-O-methylguanosine-3'-phosphate-N-[tris(GalNAc-alkyl)-ami dodecanoyl)]-4-hydroxyprolinol (Hyp-(GalNAc-alkyl)3)
atccaaggatgctccggaatg

SEQ ID NO: 2359 - RNA, 23 nt, synthetic construct
  source 1..23: mol_type = other RNA
  modified_base 1: mod_base = OTHER; note = 2'-O-methylcytidine-3'- phosphorothioate
  modified_base 2: mod_base = OTHER; note = 2'-fluoroadenosine-3'-phosphorothioate
  modified_base 3: mod_base = OTHER; note = 2'-O-methyluridine-3'-phosphate
  modified_base 4: mod_base = OTHER; note = 2'-O-methyluridine-3'-phosphate
  modified_base 5: mod_base = OTHER; note = 2'-O-methylcytidine-3'-phosphate
  modified_base 6: mod_base = OTHER; note = 2'-fluorocytidine-3'-phosphate
  modified_base 7: mod_base = OTHER; note = 2'-O-methylguanosine-3'-phosphate
  modified_base 8: mod_base = OTHER; note = 2'-fluoroguanosine-3'-phosphate
  modified_base 9: mod_base = OTHER; note = 2'-fluoroadenosine-3'-phosphate
  modified_base 10: mod_base = OTHER; note = 2'-O-methylguanosine-3'-phosphate
  modified_base 11: mod_base = OTHER; note = 2'-O-methylcytidine-3'-phosphate
  modified_base 12: mod_base = OTHER; note = 2'-O-methyladenosine-3'-phosphate
  modified_base 13: mod_base = OTHER; note = 2'-O-methyluridine-3'-phosphate
  modified_base 14: mod_base = OTHER; note = 2'-fluorocytidine-3'-phosphate
  modified_base 15: mod_base = OTHER; note = 2'-O-methylcytidine-3'-phosphate
  modified_base 16: mod_base = OTHER; note = 2'-fluorouridine-3'-phosphate
  modified_base 17: mod_base = OTHER; note = 2'-O-methyluridine-3'-phosphate
  modified_base 18: mod_base = OTHER; note = 2'-O-methylguanosine-3'-phosphate
  modified_base 19: mod_base = OTHER; note = 2'-O-methylguanosine-3'-phosphate
  modified_base 20: mod_base = OTHER; note = 2'-O-methyladenosine-3'-phosphate
  modified_base 21: mod_base = OTHER; note = 2'-O-methyluridine-3'-phosphorothioate
  modified_base 22: mod_base = OTHER; note = 2'-O-methyladenosine-3'- phosphorothioate
  modified_base 23: mod_base = OTHER; note = 2'-O-methylcytidine-3'-phosphate
cattccggagcatccttggatac

SEQ ID NO: 2360 - RNA, 21 nt, synthetic construct
  source 1..21: mol_type = other RNA
  modified_base 1: mod_base = OTHER; note = 2'-O-methyluridine-3'-phosphorothioate
  modified_base 2: mod_base = OTHER; note = 2'-O-methyladenosine-3'- phosphorothioate
  modified_base 3: mod_base = OTHER; note = 2'-O-methyluridine-3'-phosphate
  modified_base 4: mod_base = OTHER; note = 2'-O-methylcytidine-3'-phosphate
  modified_base 5: mod_base = OTHER; note = 2'-O-methylcytidine-3'-phosphate
  modified_base 6: mod_base = OTHER; note = 2'-O-methyladenosine-3'-phosphate
  modified_base 7: mod_base = OTHER; note = 2'-fluoroadenosine-3'-phosphate
  modified_base 8: mod_base = OTHER; note = 2'-O-methylguanosine-3'-phosphate
  modified_base 9: mod_base = OTHER; note = 2'-fluoroguanosine-3'-phosphate
  modified_base 10: mod_base = OTHER; note = 2'-fluoroadenosine-3'-phosphate
  modified_base 11: mod_base = OTHER; note = 2'-fluorouridine-3'-phosphate
  modified_base 12: mod_base = OTHER; note = 2'-O-methylguanosine-3'-phosphate
  modified_base 13: mod_base = OTHER; note = 2'-O-methylcytidine-3'-phosphate
  modified_base 14: mod_base = OTHER; note = 2'-O-methyluridine-3'-phosphate
  modified_base 15: mod_base = OTHER; note = 2'-O-methylcytidine-3'-phosphate
  modified_base 16: mod_base = OTHER; note = 2'-O-methylcytidine-3'-phosphate
  modified_base 17: mod_base = OTHER; note = 2'-O-methylguanosine-3'-phosphate
  modified_base 18: mod_base = OTHER; note = 2'-O-methylguanosine-3'-phosphate
  modified_base 19: mod_base = OTHER; note = 2'-O-methyladenosine-3'-phosphate
  modified_base 20: mod_base = OTHER; note = 2'-O-methyladenosine-3'-phosphate
  modified_base 21: mod_base = OTHER; note 2'-O-methyluridine-3'-phosphate-N-[tris(GalNAc-alkyl)-amido decanoyl)]-4-hydroxyprolinol (Hyp-(GalNAc-alkyl)3)
tatccaaggatgctccggaat

SEQ ID NO: 2361 - RNA, 23 nt, synthetic construct
  source 1..23: mol_type = other RNA
  modified_base 1: mod_base = OTHER; note = 2'-O-methyladenosine-3'- phosphorothioate
  modified_base 2: mod_base = OTHER; note = 2'-fluorouridine -3'-phosphorothioate
  modified_base 3: mod_base = OTHER; note = 2'-O-methyluridine-3'-phosphate
  modified_base 4: mod_base = OTHER; note = 2'-O-methylcytidine-3'-phosphate
  modified_base 5: mod_base = OTHER; note = 2'-O-methylcytidine-3'-phosphate
  modified_base 6: mod_base = OTHER; note = 2'-fluoroguanosine-3'-phosphate
  modified_base 7: mod_base = OTHER; note = 2'-O-methylguanosine-3'-phosphate
  modified_base 8: mod_base = OTHER; note = 2'-fluoroadenosine-3'-phosphate
  modified_base 9: mod_base = OTHER; note = 2'-fluoroguanosine-3'-phosphate
  modified_base 10: mod_base = OTHER; note = 2'-O-methylcytidine-3'-phosphate
  modified_base 11: mod_base = OTHER; note = 2'-O-methyladenosine-3'-phosphate
  modified_base 12: mod_base = OTHER; note = 2'-O-methyluridine-3'-phosphate
  modified_base 13: mod_base = OTHER; note = 2'-O-methylcytidine-3'-phosphate
  modified_base 14: mod_base = OTHER; note = 2'-fluorocytidine-3'-phosphate
  modified_base 15: mod_base = OTHER; note = 2'-O-methyluridine-3'-phosphate
  modified_base 16: mod_base = OTHER; note = 2'-fluorouridine-3'-phosphate
  modified_base 17: mod_base = OTHER; note = 2'-O-methylguanosine-3'-phosphate
  modified_base 18: mod_base = OTHER; note = 2'-O-methylguanosine-3'-phosphate
  modified_base 19: mod_base = OTHER; note = 2'-O-methyladenosine-3'-phosphate
  modified_base 20: mod_base = OTHER; note = 2'-O-methyluridine-3'-phosphate
  modified_base 21: mod_base = OTHER; note = 2'-O-methyladenosine-3'- phosphorothioate
  modified_base 22: mod_base = OTHER; note = 2'-O-methylcytidine-3'- phosphorothioate
  modified_base 23: mod_base = OTHER; note = 2'-O-methyladenosine-3'-phosphate
attccggagcatccttggataca

SEQ ID NO: 2362 - RNA, 21 nt, synthetic construct
  source 1..21: mol_type = other RNA
  modified_base 1: mod_base = OTHER; note = 2'-O-methyladenosine-3'- phosphorothioate
  modified_base 2: mod_base = OTHER; note = 2'-O-methyladenosine-3'- phosphorothioate
  modified_base 3: mod_base = OTHER; note = 2'-O-methyluridine-3'-phosphate
  modified_base 4: mod_base = OTHER; note = 2'-O-methylguanosine-3'-phosphate
  modified_base 5: mod_base = OTHER; note = 2'-O-methylguanosine-3'-phosphate
  modified_base 6: mod_base = OTHER; note = 2'-O-methylguanosine-3'-phosphate
  modified_base 7: mod_base = OTHER; note = 2'-fluorouridine-3'-phosphate
  modified_base 8: mod_base = OTHER; note = 2'-O-methylguanosine-3'-phosphate
  modified_base 9: mod_base = OTHER; note = 2'-fluoroguanosine-3'-phosphate
  modified_base 10: mod_base = OTHER; note = 2'-fluorocytidine-3'-phosphate
  modified_base 11: mod_base = OTHER; note = 2'-fluoroguanosine-3'-phosphate
  modified_base 12: mod_base = OTHER; note = 2'-O-methylguanosine-3'-phosphate
  modified_base 13: mod_base = OTHER; note = 2'-O-methyluridine-3'-phosphate
  modified_base 14: mod_base = OTHER; note = 2'-O-methyladenosine-3'-phosphate
  modified_base 15: mod_base = OTHER; note = 2'-O-methyladenosine-3'-phosphate
  modified_base 16: mod_base = OTHER; note = 2'-O-methyluridine-3'-phosphate
  modified_base 17: mod_base = OTHER; note = 2'-O-methyluridine-3'-phosphate
  modified_base 18: mod_base = OTHER; note = 2'-O-methylguanosine-3'-phosphate
  modified_base 19: mod_base = OTHER; note = 2'-O-methylguanosine-3'-phosphate
  modified_base 20: mod_base = OTHER; note = 2'-O-methyluridine-3'-phosphate
  modified_base 21: mod_base = OTHER; note 2'-O-methylguanosine-3'-phosphate-N-[tris(GalNAc-alkyl)-ami dodecanoyl)]-4-hydroxyprolinol (Hyp-(GalNAc-alkyl)3)
aatgggtggcggtaattggtg

SEQ ID NO: 2363 - RNA, 23 nt, synthetic construct
  source 1..23: mol_type = other RNA
  modified_base 1: mod_base = OTHER; note = 2'-O-methylcytidine-3'- phosphorothioate
  modified_base 2: mod_base = OTHER; note = 2'-fluoroadenosine-3'-phosphorothioate
  modified_base 3: mod_base = OTHER; note = 2'-O-methylcytidine-3'-phosphate
  modified_base 4: mod_base = OTHER; note = 2'-O-methylcytidine-3'-phosphate
  modified_base 5: mod_base = OTHER; note = 2'-O-methyladenosine-3'-phosphate
  modified_base 6: mod_base = OTHER; note = 2'-fluoroadenosine-3'-phosphate
  modified_base 7: mod_base = OTHER; note = 2'-O-methyluridine-3'-phosphate
  modified_base 8: mod_base = OTHER; note = 2'-fluorouridine-3'-phosphate
  modified_base 9: mod_base = OTHER; note = 2'-fluoroadenosine-3'-phosphate
  modified_base 10: mod_base = OTHER; note = 2'-O-methylcytidine-3'-phosphate
  modified_base 11: mod_base = OTHER; note = 2'-O-methylcytidine-3'-phosphate
  modified_base 12: mod_base = OTHER; note = 2'-O-methylguanosine-3'-phosphate
  modified_base 13: mod_base = OTHER; note = 2'-O-methylcytidine-3'-phosphate
  modified_base 14: mod_base = OTHER; note = 2'-fluorocytidine-3'-phosphate
  modified_base 15: mod_base = OTHER; note = 2'-O-methyladenosine-3'-phosphate
  modified_base 16: mod_base = OTHER; note = 2'-fluorocytidine-3'-phosphate
  modified_base 17: mod_base = OTHER; note = 2'-O-methylcytidine-3'-phosphate
  modified_base 18: mod_base = OTHER; note = 2'-O-methylcytidine-3'-phosphate
  modified_base 19: mod_base = OTHER; note = 2'-O-methyladenosine-3'-phosphate
  modified_base 20: mod_base = OTHER; note = 2'-O-methyluridine-3'-phosphate
  modified_base 21: mod_base = OTHER; note = 2'-O-methyluridine-3'-phosphorothioate
  modified_base 22: mod_base = OTHER; note = 2'-O-methylcytidine-3'- phosphorothioate
  modified_base 23: mod_base = OTHER; note = 2'-O-methylcytidine-3'-phosphate
caccaattaccgccacccattcc

SEQ ID NO: 2364 - RNA, 21 nt, synthetic construct
  source 1..21: mol_type = other RNA
  modified_base 1: mod_base = OTHER; note = 2'-O-methyladenosine-3'- phosphorothioate
  modified_base 2: mod_base = OTHER; note = 2'-O-methyluridine-3'-phosphorothioate
  modified_base 3: mod_base = OTHER; note = 2'-O-methylguanosine-3'-phosphate
  modified_base 4: mod_base = OTHER; note = 2'-O-methylguanosine-3'-phosphate
  modified_base 5: mod_base = OTHER; note = 2'-O-methylguanosine-3'-phosphate
  modified_base 6: mod_base = OTHER; note = 2'-O-methyluridine-3'-phosphate
  modified_base 7: mod_base = OTHER; note = 2'-fluoroguanosine-3'-phosphate
  modified_base 8: mod_base = OTHER; note = 2'-O-methylguanosine-3'-phosphate
  modified_base 9: mod_base = OTHER; note = 2'-fluorocytidine-3'-phosphate
  modified_base 10: mod_base = OTHER; note = 2'-fluoroguanosine-3'-phosphate
  modified_base 11: mod_base = OTHER; note = 2'-fluoroguanosine-3'-phosphate
  modified_base 12: mod_base = OTHER; note = 2'-O-methyluridine-3'-phosphate
  modified_base 13: mod_base = OTHER; note = 2'-O-methyladenosine-3'-phosphate
  modified_base 14: mod_base = OTHER; note = 2'-O-methyladenosine-3'-phosphate
  modified_base 15: mod_base = OTHER; note = 2'-O-methyluridine-3'-phosphate
  modified_base 16: mod_base = OTHER; note = 2'-O-methyluridine-3'-phosphate
  modified_base 17: mod_base = OTHER; note = 2'-O-methylguanosine-3'-phosphate
  modified_base 18: mod_base = OTHER; note = 2'-O-methylguanosine-3'-phosphate
  modified_base 19: mod_base = OTHER; note = 2'-O-methyluridine-3'-phosphate
  modified_base 20: mod_base = OTHER; note = 2'-O-methylguanosine-3'-phosphate
  modified_base 21: mod_base = OTHER; note 2'-O-methyladenosine-3'-phosphate-N-[tris(GalNAc-alkyl)-ami dodecanoyl)]-4-hydroxyprolinol (Hyp-(GalNAc-alkyl)3)
atgggtggcggtaattggtga

SEQ ID NO: 2365 - RNA, 23 nt, synthetic construct
  source 1..23: mol_type = other RNA
  modified_base 1: mod_base = OTHER; note = 2'-O-methyluridine-3'-phosphorothioate
  modified_base 2: mod_base = OTHER; note = 2'-fluorocytidine-3'-phosphorothioate
  modified_base 3: mod_base = OTHER; note = 2'-O-methyladenosine-3'-phosphate
  modified_base 4: mod_base = OTHER; note = 2'-O-methylcytidine-3'-phosphate
  modified_base 5: mod_base = OTHER; note = 2'-O-methylcytidine-3'-phosphate
  modified_base 6: mod_base = OTHER; note = 2'-fluoroadenosine-3'-phosphate
  modified_base 7: mod_base = OTHER; note = 2'-O-methyladenosine-3'-phosphate
  modified_base 8: mod_base = OTHER; note = 2'-fluorouridine-3'-phosphate
  modified_base 9: mod_base = OTHER; note = 2'-fluorouridine-3'-phosphate
  modified_base 10: mod_base = OTHER; note = 2'-O-methyladenosine-3'-phosphate
  modified_base 11: mod_base = OTHER; note = 2'-O-methylcytidine-3'-phosphate
  modified_base 12: mod_base = OTHER; note = 2'-O-methylcytidine-3'-phosphate
  modified_base 13: mod_base = OTHER; note = 2'-O-methylguanosine-3'-phosphate
  modified_base 14: mod_base = OTHER; note = 2'-fluorocytidine-3'-phosphate
  modified_base 15: mod_base = OTHER; note = 2'-O-methylcytidine-3'-phosphate
  modified_base 16: mod_base = OTHER; note = 2'-fluoroadenosine-3'-phosphate
  modified_base 17: mod_base = OTHER; note = 2'-O-methylcytidine-3'-phosphate
  modified_base 18: mod_base = OTHER; note = 2'-O-methylcytidine-3'-phosphate
  modified_base 19: mod_base = OTHER; note = 2'-O-methylcytidine-3'-phosphate
  modified_base 20: mod_base = OTHER; note = 2'-O-methyladenosine-3'-phosphate
  modified_base 21: mod_base = OTHER; note = 2'-O-methyluridine-3'-phosphorothioate
  modified_base 22: mod_base = OTHER; note = 2'-O-methyluridine-3'-phosphorothioate
  modified_base 23: mod_base = OTHER; note = 2'-O-methylcytidine-3'-phosphate
tcaccaattaccgccacccattc

SEQ ID NO: 2366 - RNA, 21 nt, synthetic construct
  source 1..21: mol_type = other RNA
  modified_base 1: mod_base = OTHER; note = 2'-O-methyluridine-3'-phosphorothioate
  modified_base 2: mod_base = OTHER; note = 2'-O-methyluridine-3'-phosphorothioate
  modified_base 3: mod_base = OTHER; note = 2'-O-methylguanosine-3'-phosphate
  modified_base 4: mod_base = OTHER; note = 2'-O-methylguanosine-3'-phosphate
  modified_base 5: mod_base = OTHER; note = 2'-O-methyladenosine-3'-phosphate
  modified_base 6: mod_base = OTHER; note = 2'-O-methyladenosine-3'-phosphate
  modified_base 7: mod_base = OTHER; note = 2'-fluorouridine-3'-phosphate
  modified_base 8: mod_base = OTHER; note = 2'-O-methylguanosine-3'-phosphate
  modified_base 9: mod_base = OTHER; note = 2'-fluoroguanosine-3'-phosphate
  modified_base 10: mod_base = OTHER; note = 2'-fluoroguanosine-3'-phosphate
  modified_base 11: mod_base = OTHER; note = 2'-fluorouridine-3'-phosphate
  modified_base 12: mod_base = OTHER; note = 2'-O-methylguanosine-3'-phosphate
  modified_base 13: mod_base = OTHER; note = 2'-O-methylguanosine-3'-phosphate
  modified_base 14: mod_base = OTHER; note = 2'-O-methylcytidine-3'-phosphate
  modified_base 15: mod_base = OTHER; note = 2'-O-methylguanosine-3'-phosphate
  modified_base 16: mod_base = OTHER; note = 2'-O-methylguanosine-3'-phosphate
  modified_base 17: mod_base = OTHER; note = 2'-O-methyluridine-3'-phosphate
  modified_base 18: mod_base = OTHER; note = 2'-O-methyladenosine-3'-phosphate
  modified_base 19: mod_base = OTHER; note = 2'-O-methyladenosine-3'-phosphate
  modified_base 20: mod_base = OTHER; note = 2'-O-methyluridine-3'-phosphate
  modified_base 21: mod_base = OTHER; note 2'-O-methyluridine-3'-phosphate-N-[tris(GalNAc-alkyl)-amido decanoyl)]-4-hydroxyprolinol (Hyp-(GalNAc-alkyl)3)
ttggaatgggtggcggtaatt

SEQ ID NO: 2367 - RNA, 23 nt, synthetic construct
  source 1..23: mol_type = other RNA
  modified_base 1: mod_base = OTHER; note = 2'-O-methyladenosine-3'- phosphorothioate
  modified_base 2: mod_base = OTHER; note = 2'-fluoroadenosine-3'-phosphorothioate
  modified_base 3: mod_base = OTHER; note = 2'-O-methyluridine-3'-phosphate
  modified_base 4: mod_base = OTHER; note = 2'-O-methyluridine-3'-phosphate
  modified_base 5: mod_base = OTHER; note = 2'-O-methyladenosine-3'-phosphate
  modified_base 6: mod_base = OTHER; note = 2'-fluorocytidine-3'-phosphate
  modified_base 7: mod_base = OTHER; note = 2'-O-methylcytidine-3'-phosphate
  modified_base 8: mod_base = OTHER; note = 2'-fluoroguanosine-3'-phosphate
  modified_base 9: mod_base = OTHER; note = 2'-fluorocytidine-3'-phosphate
  modified_base 10: mod_base = OTHER; note = 2'-O-methylcytidine-3'-phosphate
  modified_base 11: mod_base = OTHER; note = 2'-O-methyladenosine-3'-phosphate
  modified_base 12: mod_base = OTHER; note = 2'-O-methylcytidine-3'-phosphate
  modified_base 13: mod_base = OTHER; note = 2'-O-methylcytidine-3'-phosphate
  modified_base 14: mod_base = OTHER; note = 2'-fluorocytidine-3'-phosphate
  modified_base 15: mod_base = OTHER; note = 2'-O-methyladenosine-3'-phosphate
  modified_base 16: mod_base = OTHER; note = 2'-fluorouridine-3'-phosphate
  modified_base 17: mod_base = OTHER; note = 2'-O-methyluridine-3'-phosphate
  modified_base 18: mod_base = OTHER; note = 2'-O-methylcytidine-3'-phosphate
  modified_base 19: mod_base = OTHER; note = 2'-O-methylcytidine-3'-phosphate
  modified_base 20: mod_base = OTHER; note = 2'-O-methyladenosine-3'-phosphate
  modified_base 21: mod_base = OTHER; note = 2'-O-methyladenosine-3'- phosphorothioate
  modified_base 22: mod_base = OTHER; note = 2'-O-methyluridine-3'-phosphorothioate
  modified_base 23: mod_base = OTHER; note = 2'-O-methyluridine-3'-phosphate
aattaccgccacccattccaatt

SEQ ID NO: 2368 - RNA, 21 nt, synthetic construct
  source 1..21: mol_type = other RNA
  modified_base 1: mod_base = OTHER; note = 2'-O-methyladenosine-3'- phosphorothioate
  modified_base 2: mod_base = OTHER; note = 2'-O-methyluridine-3'-phosphorothioate
  modified_base 3: mod_base = OTHER; note = 2'-O-methyluridine-3'-phosphate
  modified_base 4: mod_base = OTHER; note = 2'-O-methylguanosine-3'-phosphate
  modified_base 5: mod_base = OTHER; note = 2'-O-methylguanosine-3'-phosphate
  modified_base 6: mod_base = OTHER; note = 2'-O-methyladenosine-3'-phosphate
  modified_base 7: mod_base = OTHER; note = 2'-fluoroadenosine-3'-phosphate
  modified_base 8: mod_base = OTHER; note = 2'-O-methyluridine-3'-phosphate
  modified_base 9: mod_base = OTHER; note = 2'-fluoroguanosine-3'-phosphate
  modified_base 10: mod_base = OTHER; note = 2'-fluoroguanosine-3'-phosphate
  modified_base 11: mod_base = OTHER; note = 2'-fluoroguanosine-3'-phosphate
  modified_base 12: mod_base = OTHER; note = 2'-O-methyluridine-3'-phosphate
  modified_base 13: mod_base = OTHER; note = 2'-O-methylguanosine-3'-phosphate
  modified_base 14: mod_base = OTHER; note = 2'-O-methylguanosine-3'-phosphate
  modified_base 15: mod_base = OTHER; note = 2'-O-methylcytidine-3'-phosphate
  modified_base 16: mod_base = OTHER; note = 2'-O-methylguanosine-3'-phosphate
  modified_base 17: mod_base = OTHER; note = 2'-O-methylguanosine-3'-phosphate
  modified_base 18: mod_base = OTHER; note = 2'-O-methyluridine-3'-phosphate
  modified_base 19: mod_base = OTHER; note = 2'-O-methyladenosine-3'-phosphate
  modified_base 20: mod_base = OTHER; note = 2'-O-methyladenosine-3'-phosphate
  modified_base 21: mod_base = OTHER; note 2'-O-methyluridine-3'-phosphate-N-[tris(GalNAc-alkyl)-amido decanoyl)]-4-hydroxyprolinol (Hyp-(GalNAc-alkyl)3)
attggaatgggtggcggtaat

SEQ ID NO: 2369 - RNA, 23 nt, synthetic construct
  source 1..23: mol_type = other RNA
  modified_base 1: mod_base = OTHER; note = 2'-O-methyladenosine-3'- phosphorothioate
  modified_base 2: mod_base = OTHER; note = 2'-fluorouridine -3'-phosphorothioate
  modified_base 3: mod_base = OTHER; note = 2'-O-methyluridine-3'-phosphate
  modified_base 4: mod_base = OTHER; note = 2'-O-methyladenosine-3'-phosphate
  modified_base 5: mod_base = OTHER; note = 2'-O-methylcytidine-3'-phosphate
  modified_base 6: mod_base = OTHER; note = 2'-fluorocytidine-3'-phosphate
  modified_base 7: mod_base = OTHER; note = 2'-O-methylguanosine-3'-phosphate
  modified_base 8: mod_base = OTHER; note = 2'-fluorocytidine-3'-phosphate
  modified_base 9: mod_base = OTHER; note = 2'-fluorocytidine-3'-phosphate
  modified_base 10: mod_base = OTHER; note = 2'-O-methyladenosine-3'-phosphate
  modified_base 11: mod_base = OTHER; note = 2'-O-methylcytidine-3'-phosphate
  modified_base 12: mod_base = OTHER; note = 2'-O-methylcytidine-3'-phosphate
  modified_base 13: mod_base = OTHER; note = 2'-O-methylcytidine-3'-phosphate
  modified_base 14: mod_base = OTHER; note = 2'-fluoroadenosine-3'-phosphate
  modified_base 15: mod_base = OTHER; note = 2'-O-methyluridine-3'-phosphate
  modified_base 16: mod_base = OTHER; note = 2'-fluorouridine-3'-phosphate
  modified_base 17: mod_base = OTHER; note = 2'-O-methylcytidine-3'-phosphate
  modified_base 18: mod_base = OTHER; note = 2'-O-methylcytidine-3'-phosphate
  modified_base 19: mod_base = OTHER; note = 2'-O-methyladenosine-3'-phosphate
  modified_base 20: mod_base = OTHER; note = 2'-O-methyladenosine-3'-phosphate
  modified_base 21: mod_base = OTHER; note = 2'-O-methyluridine-3'-phosphorothioate
  modified_base 22: mod_base = OTHER; note = 2'-O-methyluridine-3'-phosphorothioate
  modified_base 23: mod_base = OTHER; note = 2'-O-methylcytidine-3'-phosphate
attaccgccacccattccaattc

SEQ ID NO: 2370 - RNA, 21 nt, synthetic construct
  source 1..21: mol_type = other RNA
  modified_base 1: mod_base = OTHER; note = 2'-O-methylguanosine-3'- phosphorothioate
  modified_base 2: mod_base = OTHER; note = 2'-O-methylguanosine-3'- phosphorothioate
  modified_base 3: mod_base = OTHER; note = 2'-O-methyladenosine-3'-phosphate
  modified_base 4: mod_base = OTHER; note = 2'-O-methyladenosine-3'-phosphate
  modified_base 5: mod_base = OTHER; note = 2'-O-methyladenosine-3'-phosphate
  modified_base 6: mod_base = OTHER; note = 2'-O-methylguanosine-3'-phosphate
  modified_base 7: mod_base = OTHER; note = 2'-fluoroguanosine-3'-phosphate
  modified_base 8: mod_base = OTHER; note = 2'-O-methylcytidine-3'-phosphate
  modified_base 9: mod_base = OTHER; note = 2'-fluoroadenosine-3'-phosphate
  modified_base 10: mod_base = OTHER; note = 2'-fluorocytidine-3'-phosphate
  modified_base 11: mod_base = OTHER; note = 2'-fluorouridine-3'-phosphate
  modified_base 12: mod_base = OTHER; note = 2'-O-methylguanosine-3'-phosphate
  modified_base 13: mod_base = OTHER; note = 2'-O-methyladenosine-3'-phosphate
  modified_base 14: mod_base = OTHER; note = 2'-O-methyluridine-3'-phosphate
  modified_base 15: mod_base = OTHER; note = 2'-O-methylguanosine-3'-phosphate
  modified_base 16: mod_base = OTHER; note = 2'-O-methyluridine-3'-phosphate
  modified_base 17: mod_base = OTHER; note = 2'-O-methyluridine-3'-phosphate
  modified_base 18: mod_base = OTHER; note = 2'-O-methylcytidine-3'-phosphate
  modified_base 19: mod_base = OTHER; note = 2'-O-methyluridine-3'-phosphate
  modified_base 20: mod_base = OTHER; note = 2'-O-methylguanosine-3'-phosphate
  modified_base 21: mod_base = OTHER; note 2'-O-methyladenosine-3'-phosphate-N-[tris(GalNAc-alkyl)-ami dodecanoyl)]-4-hydroxyprolinol (Hyp-(GalNAc-alkyl)3)
ggaaaggcactgatgttctga

SEQ ID NO: 2371 - RNA, 23 nt, synthetic construct
  source 1..23: mol_type = other RNA
  modified_base 1: mod_base = OTHER; note = 2'-O-methyluridine-3'-phosphorothioate
  modified_base 2: mod_base = OTHER; note = 2'-fluorocytidine-3'-phosphorothioate
  modified_base 3: mod_base = OTHER; note = 2'-O-methyladenosine-3'-phosphate
  modified_base 4: mod_base = OTHER; note = 2'-O-methylguanosine-3'-phosphate
  modified_base 5: mod_base = OTHER; note = 2'-O-methyladenosine-3'-phosphate
  modified_base 6: mod_base = OTHER; note = 2'-fluoroadenosine-3'-phosphate
  modified_base 7: mod_base = OTHER; note = 2'-O-methylcytidine-3'-phosphate
  modified_base 8: mod_base = OTHER; note = 2'-fluoroadenosine-3'-phosphate
  modified_base 9: mod_base = OTHER; note = 2'-fluorouridine-3'-phosphate
  modified_base 10: mod_base = OTHER; note = 2'-O-methylcytidine-3'-phosphate
  modified_base 11: mod_base = OTHER; note = 2'-O-methyladenosine-3'-phosphate
  modified_base 12: mod_base = OTHER; note = 2'-O-methylguanosine-3'-phosphate
  modified_base 13: mod_base = OTHER; note = 2'-O-methyluridine-3'-phosphate
  modified_base 14: mod_base = OTHER; note = 2'-fluoroguanosine-3'-phosphate
  modified_base 15: mod_base = OTHER; note = 2'-O-methylcytidine-3'-phosphate
  modified_base 16: mod_base = OTHER; note = 2'-fluorocytidine-3'-phosphate
  modified_base 17: mod_base = OTHER; note = 2'-O-methyluridine-3'-phosphate
  modified_base 18: mod_base = OTHER; note = 2'-O-methyluridine-3'-phosphate
  modified_base 19: mod_base = OTHER; note = 2'-O-methyluridine-3'-phosphate
  modified_base 20: mod_base = OTHER; note = 2'-O-methylcytidine-3'-phosphate
  modified_base 21: mod_base = OTHER; note = 2'-O-methylcytidine-3'- phosphorothioate
  modified_base 22: mod_base = OTHER; note = 2'-O-methylguanosine-3'- phosphorothioate
  modified_base 23: mod_base = OTHER; note = 2'-O-methylcytidine-3'-phosphate
tcagaacatcagtgcctttccgc

SEQ ID NO: 2372 - RNA, 21 nt, synthetic construct
  source 1..21: mol_type = other RNA
  modified_base 1: mod_base = OTHER; note = 2'-O-methylguanosine-3'- phosphorothioate
  modified_base 2: mod_base = OTHER; note = 2'-O-methyladenosine-3'- phosphorothioate
  modified_base 3: mod_base = OTHER; note = 2'-O-methyladenosine-3'-phosphate
  modified_base 4: mod_base = OTHER; note = 2'-O-methyladenosine-3'-phosphate
  modified_base 5: mod_base = OTHER; note = 2'-O-methylguanosine-3'-phosphate
  modified_base 6: mod_base = OTHER; note = 2'-O-methylguanosine-3'-phosphate
  modified_base 7: mod_base = OTHER; note = 2'-fluorocytidine-3'-phosphate
  modified_base 8: mod_base = OTHER; note = 2'-O-methyladenosine-3'-phosphate
  modified_base 9: mod_base = OTHER; note = 2'-fluorocytidine-3'-phosphate
  modified_base 10: mod_base = OTHER; note = 2'-fluorouridine-3'-phosphate
  modified_base 11: mod_base = OTHER; note = 2'-fluoroguanosine-3'-phosphate
  modified_base 12: mod_base = OTHER; note = 2'-O-methyladenosine-3'-phosphate
  modified_base 13: mod_base = OTHER; note = 2'-O-methyluridine-3'-phosphate
  modified_base 14: mod_base = OTHER; note = 2'-O-methylguanosine-3'-phosphate
  modified_base 15: mod_base = OTHER; note = 2'-O-methyluridine-3'-phosphate
  modified_base 16: mod_base = OTHER; note = 2'-O-methyluridine-3'-phosphate
  modified_base 17: mod_base = OTHER; note = 2'-O-methylcytidine-3'-phosphate
  modified_base 18: mod_base = OTHER; note = 2'-O-methyluridine-3'-phosphate
  modified_base 19: mod_base = OTHER; note = 2'-O-methylguanosine-3'-phosphate
  modified_base 20: mod_base = OTHER; note = 2'-O-methyladenosine-3'-phosphate
  modified_base 21: mod_base = OTHER; note 2'-O-methyladenosine-3'-phosphate-N-[tris(GalNAc-alkyl)-ami dodecanoyl)]-4-hydroxyprolinol (Hyp-(GalNAc-alkyl)3)
gaaaggcactgatgttctgaa

SEQ ID NO: 2373 - RNA, 23 nt, synthetic construct
  source 1..23: mol_type = other RNA
  modified_base 1: mod_base = OTHER; note = 2'-O-methyluridine-3'-phosphorothioate
  modified_base 2: mod_base = OTHER; note = 2'-fluorouridine -3'-phosphorothioate
  modified_base 3: mod_base = OTHER; note = 2'-O-methylcytidine-3'-phosphate
  modified_base 4: mod_base = OTHER; note = 2'-O-methyladenosine-3'-phosphate
  modified_base 5: mod_base = OTHER; note = 2'-O-methylguanosine-3'-phosphate
  modified_base 6: mod_base = OTHER; note = 2'-fluoroadenosine-3'-phosphate
  modified_base 7: mod_base = OTHER; note = 2'-O-methyladenosine-3'-phosphate
  modified_base 8: mod_base = OTHER; note = 2'-fluorocytidine-3'-phosphate
  modified_base 9: mod_base = OTHER; note = 2'-fluoroadenosine-3'-phosphate
  modified_base 10: mod_base = OTHER; note = 2'-O-methyluridine-3'-phosphate
  modified_base 11: mod_base = OTHER; note = 2'-O-methylcytidine-3'-phosphate
  modified_base 12: mod_base = OTHER; note = 2'-O-methyladenosine-3'-phosphate
  modified_base 13: mod_base = OTHER; note = 2'-O-methylguanosine-3'-phosphate
  modified_base 14: mod_base = OTHER; note = 2'-fluorouridine-3'-phosphate
  modified_base 15: mod_base = OTHER; note = 2'-O-methylguanosine-3'-phosphate
  modified_base 16: mod_base = OTHER; note = 2'-fluorocytidine-3'-phosphate
  modified_base 17: mod_base = OTHER; note = 2'-O-methylcytidine-3'-phosphate
  modified_base 18: mod_base = OTHER; note = 2'-O-methyluridine-3'-phosphate
  modified_base 19: mod_base = OTHER; note = 2'-O-methyluridine-3'-phosphate
  modified_base 20: mod_base = OTHER; note = 2'-O-methyluridine-3'-phosphate
  modified_base 21: mod_base = OTHER; note = 2'-O-methylcytidine-3'- phosphorothioate
  modified_base 22: mod_base = OTHER; note = 2'-O-methylcytidine-3'- phosphorothioate
  modified_base 23: mod_base = OTHER; note = 2'-O-methylguanosine-3'-phosphate
ttcagaacatcagtgcctttccg

SEQ ID NO: 2374 - RNA, 21 nt, synthetic construct
  source 1..21: mol_type = other RNA
  modified_base 1: mod_base = OTHER; note = 2'-O-methylguanosine-3'- phosphorothioate
  modified_base 2: mod_base = OTHER; note = 2'-O-methyluridine-3'-phosphorothioate
  modified_base 3: mod_base = OTHER; note = 2'-O-methylguanosine-3'-phosphate
  modified_base 4: mod_base = OTHER; note = 2'-O-methylcytidine-3'-phosphate
  modified_base 5: mod_base = OTHER; note = 2'-O-methylguanosine-3'-phosphate
  modified_base 6: mod_base = OTHER; note = 2'-O-methylguanosine-3'-phosphate
  modified_base 7: mod_base = OTHER; note = 2'-fluoroadenosine-3'-phosphate
  modified_base 8: mod_base = OTHER; note = 2'-O-methyladenosine-3'-phosphate
  modified_base 9: mod_base = OTHER; note = 2'-fluoroadenosine-3'-phosphate
  modified_base 10: mod_base = OTHER; note = 2'-fluoroguanosine-3'-phosphate
  modified_base 11: mod_base = OTHER; note = 2'-fluoroguanosine-3'-phosphate
  modified_base 12: mod_base = OTHER; note = 2'-O-methylcytidine-3'-phosphate
  modified_base 13: mod_base = OTHER; note = 2'-O-methyladenosine-3'-phosphate
  modified_base 14: mod_base = OTHER; note = 2'-O-methylcytidine-3'-phosphate
  modified_base 15: mod_base = OTHER; note = 2'-O-methyluridine-3'-phosphate
  modified_base 16: mod_base = OTHER; note = 2'-O-methylguanosine-3'-phosphate
  modified_base 17: mod_base = OTHER; note = 2'-O-methyladenosine-3'-phosphate
  modified_base 18: mod_base = OTHER; note = 2'-O-methyluridine-3'-phosphate
  modified_base 19: mod_base = OTHER; note = 2'-O-methylguanosine-3'-phosphate
  modified_base 20: mod_base = OTHER; note = 2'-O-methyluridine-3'-phosphate
  modified_base 21: mod_base = OTHER; note 2'-O-methyluridine-3'-phosphate-N-[tris(GalNAc-alkyl)-amido decanoyl)]-4-hydroxyprolinol (Hyp-(GalNAc-alkyl)3)
gtgcggaaaggcactgatgtt

SEQ ID NO: 2375 - RNA, 23 nt, synthetic construct
  source 1..23: mol_type = other RNA
  modified_base 1: mod_base = OTHER; note = 2'-O-methyladenosine-3'- phosphorothioate
  modified_base 2: mod_base = OTHER; note = 2'-fluoroadenosine-3'-phosphorothioate
  modified_base 3: mod_base = OTHER; note = 2'-O-methylcytidine-3'-phosphate
  modified_base 4: mod_base = OTHER; note = 2'-O-methyladenosine-3'-phosphate
  modified_base 5: mod_base = OTHER; note = 2'-O-methyluridine-3'-phosphate
  modified_base 6: mod_base = OTHER; note = 2'-fluorocytidine-3'-phosphate
  modified_base 7: mod_base = OTHER; note = 2'-O-methyladenosine-3'-phosphate
  modified_base 8: mod_base = OTHER; note = 2'-fluoroguanosine-3'-phosphate
  modified_base 9: mod_base = OTHER; note = 2'-fluorouridine-3'-phosphate
  modified_base 10: mod_base = OTHER; note = 2'-O-methylguanosine-3'-phosphate
  modified_base 11: mod_base = OTHER; note = 2'-O-methylcytidine-3'-phosphate
  modified_base 12: mod_base = OTHER; note = 2'-O-methylcytidine-3'-phosphate
  modified_base 13: mod_base = OTHER; note = 2'-O-methyluridine-3'-phosphate
  modified_base 14: mod_base = OTHER; note = 2'-fluorouridine-3'-phosphate
  modified_base 15: mod_base = OTHER; note = 2'-O-methyluridine-3'-phosphate
  modified_base 16: mod_base = OTHER; note = 2'-fluorocytidine-3'-phosphate
  modified_base 17: mod_base = OTHER; note = 2'-O-methylcytidine-3'-phosphate
  modified_base 18: mod_base = OTHER; note = 2'-O-methylguanosine-3'-phosphate
  modified_base 19: mod_base = OTHER; note = 2'-O-methylcytidine-3'-phosphate
  modified_base 20: mod_base = OTHER; note = 2'-O-methyladenosine-3'-phosphate
  modified_base 21: mod_base = OTHER; note = 2'-O-methylcytidine-3'- phosphorothioate
  modified_base 22: mod_base = OTHER; note = 2'-O-methyladenosine-3'- phosphorothioate
  modified_base 23: mod_base = OTHER; note = 2'-O-methylcytidine-3'-phosphate
aacatcagtgcctttccgcacac

SEQ ID NO: 2376 - RNA, 21 nt, synthetic construct
  source 1..21: mol_type = other RNA
  modified_base 1: mod_base = OTHER; note = 2'-O-methyluridine-3'-phosphorothioate
  modified_base 2: mod_base = OTHER; note = 2'-O-methylguanosine-3'- phosphorothioate
  modified_base 3: mod_base = OTHER; note = 2'-O-methyluridine-3'-phosphate
  modified_base 4: mod_base = OTHER; note = 2'-O-methylguanosine-3'-phosphate
  modified_base 5: mod_base = OTHER; note = 2'-O-methylcytidine-3'-phosphate
  modified_base 6: mod_base = OTHER; note = 2'-O-methylguanosine-3'-phosphate
  modified_base 7: mod_base = OTHER; note = 2'-fluoroguanosine-3'-phosphate
  modified_base 8: mod_base = OTHER; note = 2'-O-methyladenosine-3'-phosphate
  modified_base 9: mod_base = OTHER; note = 2'-fluoroadenosine-3'-phosphate
  modified_base 10: mod_base = OTHER; note = 2'-fluoroadenosine-3'-phosphate
  modified_base 11: mod_base = OTHER; note = 2'-fluoroguanosine-3'-phosphate
  modified_base 12: mod_base = OTHER; note = 2'-O-methylguanosine-3'-phosphate
  modified_base 13: mod_base = OTHER; note = 2'-O-methylcytidine-3'-phosphate
  modified_base 14: mod_base = OTHER; note = 2'-O-methyladenosine-3'-phosphate
  modified_base 15: mod_base = OTHER; note = 2'-O-methylcytidine-3'-phosphate
  modified_base 16: mod_base = OTHER; note = 2'-O-methyluridine-3'-phosphate
  modified_base 17: mod_base = OTHER; note = 2'-O-methylguanosine-3'-phosphate
  modified_base 18: mod_base = OTHER; note = 2'-O-methyladenosine-3'-phosphate
  modified_base 19: mod_base = OTHER; note = 2'-O-methyluridine-3'-phosphate
  modified_base 20: mod_base = OTHER; note = 2'-O-methylguanosine-3'-phosphate
  modified_base 21: mod_base = OTHER; note 2'-O-methyluridine-3'-phosphate-N-[tris(GalNAc-alkyl)-amido decanoyl)]-4-hydroxyprolinol (Hyp-(GalNAc-alkyl)3)
tgtgcggaaaggcactgatgt

SEQ ID NO: 2377 - RNA, 23 nt, synthetic construct
  source 1..23: mol_type = other RNA
  modified_base 1: mod_base = OTHER; note = 2'-O-methyladenosine-3'- phosphorothioate
  modified_base 2: mod_base = OTHER; note = 2'-fluorocytidine-3'-phosphorothioate
  modified_base 3: mod_base = OTHER; note = 2'-O-methyladenosine-3'-phosphate
  modified_base 4: mod_base = OTHER; note = 2'-O-methyluridine-3'-phosphate
  modified_base 5: mod_base = OTHER; note = 2'-O-methylcytidine-3'-phosphate
  modified_base 6: mod_base = OTHER; note = 2'-fluoroadenosine-3'-phosphate
  modified_base 7: mod_base = OTHER; note = 2'-O-methylguanosine-3'-phosphate
  modified_base 8: mod_base = OTHER; note = 2'-fluorouridine-3'-phosphate
  modified_base 9: mod_base = OTHER; note = 2'-fluoroguanosine-3'-phosphate
  modified_base 10: mod_base = OTHER; note = 2'-O-methylcytidine-3'-phosphate
  modified_base 11: mod_base = OTHER; note = 2'-O-methylcytidine-3'-phosphate
  modified_base 12: mod_base = OTHER; note = 2'-O-methyluridine-3'-phosphate
  modified_base 13: mod_base = OTHER; note = 2'-O-methyluridine-3'-phosphate
  modified_base 14: mod_base = OTHER; note = 2'-fluorouridine-3'-phosphate
  modified_base 15: mod_base = OTHER; note = 2'-O-methylcytidine-3'-phosphate
  modified_base 16: mod_base = OTHER; note = 2'-fluorocytidine-3'-phosphate
  modified_base 17: mod_base = OTHER; note = 2'-O-methylguanosine-3'-phosphate
  modified_base 18: mod_base = OTHER; note = 2'-O-methylcytidine-3'-phosphate
  modified_base 19: mod_base = OTHER; note = 2'-O-methyladenosine-3'-phosphate
  modified_base 20: mod_base = OTHER; note = 2'-O-methylcytidine-3'-phosphate
  modified_base 21: mod_base = OTHER; note = 2'-O-methyladenosine-3'- phosphorothioate
  modified_base 22: mod_base = OTHER; note = 2'-O-methylcytidine-3'- phosphorothioate
  modified_base 23: mod_base = OTHER; note = 2'-O-methylcytidine-3'-phosphate
acatcagtgcctttccgcacacc

SEQ ID NO: 2378 - RNA, 21 nt, synthetic construct
  source 1..21: mol_type = other RNA
  modified_base 1: mod_base = OTHER; note = 2'-O-methyladenosine-3'- phosphorothioate
  modified_base 2: mod_base = OTHER; note = 2'-O-methyladenosine-3'- phosphorothioate
  modified_base 3: mod_base = OTHER; note = 2'-O-methyluridine-3'-phosphate
  modified_base 4: mod_base = OTHER; note = 2'-O-methyluridine-3'-phosphate
  modified_base 5: mod_base = OTHER; note = 2'-O-methylguanosine-3'-phosphate
  modified_base 6: mod_base = OTHER; note = 2'-O-methyluridine-3'-phosphate
  modified_base 7: mod_base = OTHER; note = 2'-fluoroadenosine-3'-phosphate
  modified_base 8: mod_base = OTHER; note = 2'-O-methyladenosine-3'-phosphate
  modified_base 9: mod_base = OTHER; note = 2'-fluoroguanosine-3'-phosphate
  modified_base 10: mod_base = OTHER; note = 2'-fluorocytidine-3'-phosphate
  modified_base 11: mod_base = OTHER; note = 2'-fluorouridine-3'-phosphate
  modified_base 12: mod_base = OTHER; note = 2'-O-methylcytidine-3'-phosphate
  modified_base 13: mod_base = OTHER; note = 2'-O-methyladenosine-3'-phosphate
  modified_base 14: mod_base = OTHER; note = 2'-O-methylguanosine-3'-phosphate
  modified_base 15: mod_base = OTHER; note = 2'-O-methylguanosine-3'-phosphate
  modified_base 16: mod_base = OTHER; note = 2'-O-methyluridine-3'-phosphate
  modified_base 17: mod_base = OTHER; note = 2'-O-methyluridine-3'-phosphate
  modified_base 18: mod_base = OTHER; note = 2'-O-methylcytidine-3'-phosphate
  modified_base 19: mod_base = OTHER; note = 2'-O-methyladenosine-3'-phosphate
  modified_base 20: mod_base = OTHER; note = 2'-O-methyladenosine-3'-phosphate
  modified_base 21: mod_base = OTHER; note 2'-O-methyladenosine-3'-phosphate-N-[tris(GalNAc-alkyl)-ami dodecanoyl)]-4-hydroxyprolinol (Hyp-(GalNAc-alkyl)3)
aattgtaagctcaggttcaaa

SEQ ID NO: 2379 - RNA, 23 nt, synthetic construct
  source 1..23: mol_type = other RNA
  modified_base 1: mod_base = OTHER; note = 2'-O-methyluridine-3'-phosphorothioate
  modified_base 2: mod_base = OTHER; note = 2'-fluorouridine -3'-phosphorothioate
  modified_base 3: mod_base = OTHER; note = 2'-O-methyluridine-3'-phosphate
  modified_base 4: mod_base = OTHER; note = 2'-O-methylguanosine-3'-phosphate
  modified_base 5: mod_base = OTHER; note = 2'-O-methyladenosine-3'-phosphate
  modified_base 6: mod_base = OTHER; note = 2'-fluoroadenosine-3'-phosphate
  modified_base 7: mod_base = OTHER; note = 2'-O-methylcytidine-3'-phosphate
  modified_base 8: mod_base = OTHER; note = 2'-fluorocytidine-3'-phosphate
  modified_base 9: mod_base = OTHER; note = 2'-fluorouridine-3'-phosphate
  modified_base 10: mod_base = OTHER; note = 2'-O-methylguanosine-3'-phosphate
  modified_base 11: mod_base = OTHER; note = 2'-O-methyladenosine-3'-phosphate
  modified_base 12: mod_base = OTHER; note = 2'-O-methylguanosine-3'-phosphate
  modified_base 13: mod_base = OTHER; note = 2'-O-methylcytidine-3'-phosphate
  modified_base 14: mod_base = OTHER; note = 2'-fluorouridine-3'-phosphate
  modified_base 15: mod_base = OTHER; note = 2'-O-methyluridine-3'-phosphate
  modified_base 16: mod_base = OTHER; note = 2'-fluoroadenosine-3'-phosphate
  modified_base 17: mod_base = OTHER; note = 2'-O-methylcytidine-3'-phosphate
  modified_base 18: mod_base = OTHER; note = 2'-O-methyladenosine-3'-phosphate
  modified_base 19: mod_base = OTHER; note = 2'-O-methyladenosine-3'-phosphate
  modified_base 20: mod_base = OTHER; note = 2'-O-methyluridine-3'-phosphate
  modified_base 21: mod_base = OTHER; note = 2'-O-methyluridine-3'-phosphorothioate
  modified_base 22: mod_base = OTHER; note = 2'-O-methyluridine-3'-phosphorothioate
  modified_base 23: mod_base = OTHER; note = 2'-O-methyladenosine-3'-phosphate
tttgaacctgagcttacaattta

SEQ ID NO: 2380 - RNA, 21 nt, synthetic construct
  source 1..21: mol_type = other RNA
  modified_base 1: mod_base = OTHER; note = 2'-O-methyladenosine-3'- phosphorothioate
  modified_base 2: mod_base = OTHER; note = 2'-O-methyluridine-3'-phosphorothioate
  modified_base 3: mod_base = OTHER; note = 2'-O-methyluridine-3'-phosphate
  modified_base 4: mod_base = OTHER; note = 2'-O-methylguanosine-3'-phosphate
  modified_base 5: mod_base = OTHER; note = 2'-O-methyluridine-3'-phosphate
  modified_base 6: mod_base = OTHER; note = 2'-O-methyladenosine-3'-phosphate
  modified_base 7: mod_base = OTHER; note = 2'-fluoroadenosine-3'-phosphate
  modified_base 8: mod_base = OTHER; note = 2'-O-methylguanosine-3'-phosphate
  modified_base 9: mod_base = OTHER; note = 2'-fluorocytidine-3'-phosphate
  modified_base 10: mod_base = OTHER; note = 2'-fluorouridine-3'-phosphate
  modified_base 11: mod_base = OTHER; note = 2'-fluorocytidine-3'-phosphate
  modified_base 12: mod_base = OTHER; note = 2'-O-methyladenosine-3'-phosphate
  modified_base 13: mod_base = OTHER; note = 2'-O-methylguanosine-3'-phosphate
  modified_base 14: mod_base = OTHER; note = 2'-O-methylguanosine-3'-phosphate
  modified_base 15: mod_base = OTHER; note = 2'-O-methyluridine-3'-phosphate
  modified_base 16: mod_base = OTHER; note = 2'-O-methyluridine-3'-phosphate
  modified_base 17: mod_base = OTHER; note = 2'-O-methylcytidine-3'-phosphate
  modified_base 18: mod_base = OTHER; note = 2'-O-methyladenosine-3'-phosphate
  modified_base 19: mod_base = OTHER; note = 2'-O-methyladenosine-3'-phosphate
  modified_base 20: mod_base = OTHER; note = 2'-O-methyladenosine-3'-phosphate
  modified_base 21: mod_base = OTHER; note 2'-O-methylguanosine-3'-phosphate-N-[tris(GalNAc-alkyl)-ami dodecanoyl)]-4-hydroxyprolinol (Hyp-(GalNAc-alkyl)3)
attgtaagctcaggttcaaag

SEQ ID NO: 2381 - RNA, 23 nt, synthetic construct
  source 1..23: mol_type = other RNA
  modified_base 1: mod_base = OTHER; note = 2'-O-methylcytidine-3'- phosphorothioate
  modified_base 2: mod_base = OTHER; note = 2'-fluorouridine -3'-phosphorothioate
  modified_base 3: mod_base = OTHER; note = 2'-O-methyluridine-3'-phosphate
  modified_base 4: mod_base = OTHER; note = 2'-O-methyluridine-3'-phosphate
  modified_base 5: mod_base = OTHER; note = 2'-O-methylguanosine-3'-phosphate
  modified_base 6: mod_base = OTHER; note = 2'-fluoroadenosine-3'-phosphate
  modified_base 7: mod_base = OTHER; note = 2'-O-methyladenosine-3'-phosphate
  modified_base 8: mod_base = OTHER; note = 2'-fluorocytidine-3'-phosphate
  modified_base 9: mod_base = OTHER; note = 2'-fluorocytidine-3'-phosphate
  modified_base 10: mod_base = OTHER; note = 2'-O-methyluridine-3'-phosphate
  modified_base 11: mod_base = OTHER; note = 2'-O-methylguanosine-3'-phosphate
  modified_base 12: mod_base = OTHER; note = 2'-O-methyladenosine-3'-phosphate
  modified_base 13: mod_base = OTHER; note = 2'-O-methylguanosine-3'-phosphate
  modified_base 14: mod_base = OTHER; note = 2'-fluorocytidine-3'-phosphate
  modified_base 15: mod_base = OTHER; note = 2'-O-methyluridine-3'-phosphate
  modified_base 16: mod_base = OTHER; note = 2'-fluorouridine-3'-phosphate
  modified_base 17: mod_base = OTHER; note = 2'-O-methyladenosine-3'-phosphate
  modified_base 18: mod_base = OTHER; note = 2'-O-methylcytidine-3'-phosphate
  modified_base 19: mod_base = OTHER; note = 2'-O-methyladenosine-3'-phosphate
  modified_base 20: mod_base = OTHER; note = 2'-O-methyladenosine-3'-phosphate
  modified_base 21: mod_base = OTHER; note = 2'-O-methyluridine-3'-phosphorothioate
  modified_base 22: mod_base = OTHER; note = 2'-O-methyluridine-3'-phosphorothioate
  modified_base 23: mod_base = OTHER; note = 2'-O-methyluridine-3'-phosphate
ctttgaacctgagcttacaattt

SEQ ID NO: 2382 - RNA, 21 nt, synthetic construct
  source 1..21: mol_type = other RNA
  modified_base 1: mod_base = OTHER; note = 2'-O-methylcytidine-3'- phosphorothioate
  modified_base 2: mod_base = OTHER; note = 2'-O-methyluridine-3'-phosphorothioate
  modified_base 3: mod_base = OTHER; note = 2'-O-methyluridine-3'-phosphate
  modified_base 4: mod_base = OTHER; note = 2'-O-methyladenosine-3'-phosphate
  modified_base 5: mod_base = OTHER; note = 2'-O-methyladenosine-3'-phosphate
  modified_base 6: mod_base = OTHER; note = 2'-O-methyladenosine-3'-phosphate
  modified_base 7: mod_base = OTHER; note = 2'-fluorouridine-3'-phosphate
  modified_base 8: mod_base = OTHER; note = 2'-O-methyluridine-3'-phosphate
  modified_base 9: mod_base = OTHER; note = 2'-fluoroguanosine-3'-phosphate
  modified_base 10: mod_base = OTHER; note = 2'-fluorouridine-3'-phosphate
  modified_base 11: mod_base = OTHER; note = 2'-fluoroadenosine-3'-phosphate
  modified_base 12: mod_base = OTHER; note = 2'-O-methyladenosine-3'-phosphate
  modified_base 13: mod_base = OTHER; note = 2'-O-methylguanosine-3'-phosphate
  modified_base 14: mod_base = OTHER; note = 2'-O-methylcytidine-3'-phosphate
  modified_base 15: mod_base = OTHER; note = 2'-O-methyluridine-3'-phosphate
  modified_base 16: mod_base = OTHER; note = 2'-O-methylcytidine-3'-phosphate
  modified_base 17: mod_base = OTHER; note = 2'-O-methyladenosine-3'-phosphate
  modified_base 18: mod_base = OTHER; note = 2'-O-methylguanosine-3'-phosphate
  modified_base 19: mod_base = OTHER; note = 2'-O-methylguanosine-3'-phosphate
  modified_base 20: mod_base = OTHER; note = 2'-O-methyluridine-3'-phosphate
  modified_base 21: mod_base = OTHER; note 2'-O-methyluridine-3'-phosphate-N-[tris(GalNAc-alkyl)-amido decanoyl)]-4-hydroxyprolinol (Hyp-(GalNAc-alkyl)3)
cttaaattgtaagctcaggtt

SEQ ID NO: 2383 - RNA, 23 nt, synthetic construct
  source 1..23: mol_type = other RNA
  modified_base 1: mod_base = OTHER; note = 2'-O-methyladenosine-3'- phosphorothioate
  modified_base 2: mod_base = OTHER; note = 2'-fluoroadenosine-3'-phosphorothioate
  modified_base 3: mod_base = OTHER; note = 2'-O-methylcytidine-3'-phosphate
  modified_base 4: mod_base = OTHER; note = 2'-O-methylcytidine-3'-phosphate
  modified_base 5: mod_base = OTHER; note = 2'-O-methyluridine-3'-phosphate
  modified_base 6: mod_base = OTHER; note = 2'-fluoroguanosine-3'-phosphate
  modified_base 7: mod_base = OTHER; note = 2'-O-methyladenosine-3'-phosphate
  modified_base 8: mod_base = OTHER; note = 2'-fluoroguanosine-3'-phosphate
  modified_base 9: mod_base = OTHER; note = 2'-fluorocytidine-3'-phosphate
  modified_base 10: mod_base = OTHER; note = 2'-O-methyluridine-3'-phosphate
  modified_base 11: mod_base = OTHER; note = 2'-O-methyluridine-3'-phosphate
  modified_base 12: mod_base = OTHER; note = 2'-O-methyladenosine-3'-phosphate
  modified_base 13: mod_base = OTHER; note = 2'-O-methylcytidine-3'-phosphate
  modified_base 14: mod_base = OTHER; note = 2'-fluoroadenosine-3'-phosphate
  modified_base 15: mod_base = OTHER; note = 2'-O-methyladenosine-3'-phosphate
  modified_base 16: mod_base = OTHER; note = 2'-fluorouridine-3'-phosphate
  modified_base 17: mod_base = OTHER; note = 2'-O-methyluridine-3'-phosphate
  modified_base 18: mod_base = OTHER; note = 2'-O-methyluridine-3'-phosphate
  modified_base 19: mod_base = OTHER; note = 2'-O-methyladenosine-3'-phosphate
  modified_base 20: mod_base = OTHER; note = 2'-O-methyladenosine-3'-phosphate
  modified_base 21: mod_base = OTHER; note = 2'-O-methylguanosine-3'- phosphorothioate
  modified_base 22: mod_base = OTHER; note = 2'-O-methyladenosine-3'- phosphorothioate
  modified_base 23: mod_base = OTHER; note = 2'-O-methyladenosine-3'-phosphate
aacctgagcttacaatttaagaa

SEQ ID NO: 2384 - RNA, 21 nt, synthetic construct
  source 1..21: mol_type = other RNA
  modified_base 1: mod_base = OTHER; note = 2'-O-methyluridine-3'-phosphorothioate
  modified_base 2: mod_base = OTHER; note = 2'-O-methylcytidine-3'- phosphorothioate
  modified_base 3: mod_base = OTHER; note = 2'-O-methyluridine-3'-phosphate
  modified_base 4: mod_base = OTHER; note = 2'-O-methyluridine-3'-phosphate
  modified_base 5: mod_base = OTHER; note = 2'-O-methyladenosine-3'-phosphate
  modified_base 6: mod_base = OTHER; note = 2'-O-methyladenosine-3'-phosphate
  modified_base 7: mod_base = OTHER; note = 2'-fluoroadenosine-3'-phosphate
  modified_base 8: mod_base = OTHER; note = 2'-O-methyluridine-3'-phosphate
  modified_base 9: mod_base = OTHER; note = 2'-fluorouridine-3'-phosphate
  modified_base 10: mod_base = OTHER; note = 2'-fluoroguanosine-3'-phosphate
  modified_base 11: mod_base = OTHER; note = 2'-fluorouridine-3'-phosphate
  modified_base 12: mod_base = OTHER; note = 2'-O-methyladenosine-3'-phosphate
  modified_base 13: mod_base = OTHER; note = 2'-O-methyladenosine-3'-phosphate
  modified_base 14: mod_base = OTHER; note = 2'-O-methylguanosine-3'-phosphate
  modified_base 15: mod_base = OTHER; note = 2'-O-methylcytidine-3'-phosphate
  modified_base 16: mod_base = OTHER; note = 2'-O-methyluridine-3'-phosphate
  modified_base 17: mod_base = OTHER; note = 2'-O-methylcytidine-3'-phosphate
  modified_base 18: mod_base = OTHER; note = 2'-O-methyladenosine-3'-phosphate
  modified_base 19: mod_base = OTHER; note = 2'-O-methylguanosine-3'-phosphate
  modified_base 20: mod_base = OTHER; note = 2'-O-methylguanosine-3'-phosphate
  modified_base 21: mod_base = OTHER; note 2'-O-methyluridine-3'-phosphate-N-[tris(GalNAc-alkyl)-amido decanoyl)]-4-hydroxyprolinol (Hyp-(GalNAc-alkyl)3)
tcttaaattgtaagctcaggt

SEQ ID NO: 2385 - RNA, 23 nt, synthetic construct
  source 1..23: mol_type = other RNA
  modified_base 1: mod_base = OTHER; note = 2'-O-methyladenosine-3'- phosphorothioate
  modified_base 2: mod_base = OTHER; note = 2'-fluorocytidine-3'-phosphorothioate
  modified_base 3: mod_base = OTHER; note = 2'-O-methylcytidine-3'-phosphate
  modified_base 4: mod_base = OTHER; note = 2'-O-methyluridine-3'-phosphate
  modified_base 5: mod_base = OTHER; note = 2'-O-methylguanosine-3'-phosphate
  modified_base 6: mod_base = OTHER; note = 2'-fluoroadenosine-3'-phosphate
  modified_base 7: mod_base = OTHER; note = 2'-O-methylguanosine-3'-phosphate
  modified_base 8: mod_base = OTHER; note = 2'-fluorocytidine-3'-phosphate
  modified_base 9: mod_base = OTHER; note = 2'-fluorouridine-3'-phosphate
  modified_base 10: mod_base = OTHER; note = 2'-O-methyluridine-3'-phosphate
  modified_base 11: mod_base = OTHER; note = 2'-O-methyladenosine-3'-phosphate
  modified_base 12: mod_base = OTHER; note = 2'-O-methylcytidine-3'-phosphate
  modified_base 13: mod_base = OTHER; note = 2'-O-methyladenosine-3'-phosphate
  modified_base 14: mod_base = OTHER; note = 2'-fluoroadenosine-3'-phosphate
  modified_base 15: mod_base = OTHER; note = 2'-O-methyluridine-3'-phosphate
  modified_base 16: mod_base = OTHER; note = 2'-fluorouridine-3'-phosphate
  modified_base 17: mod_base = OTHER; note = 2'-O-methyluridine-3'-phosphate
  modified_base 18: mod_base = OTHER; note = 2'-O-methyladenosine-3'-phosphate
  modified_base 19: mod_base = OTHER; note = 2'-O-methyladenosine-3'-phosphate
  modified_base 20: mod_base = OTHER; note = 2'-O-methylguanosine-3'-phosphate
  modified_base 21: mod_base = OTHER; note = 2'-O-methyladenosine-3'- phosphorothioate
  modified_base 22: mod_base = OTHER; note = 2'-O-methyladenosine-3'- phosphorothioate
  modified_base 23: mod_base = OTHER; note = 2'-O-methylcytidine-3'-phosphate
acctgagcttacaatttaagaac

SEQ ID NO: 2386 - RNA, 21 nt, synthetic construct
  source 1..21: mol_type = other RNA
  modified_base 1: mod_base = OTHER; note = 2'-O-methylguanosine-3'- phosphorothioate
  modified_base 2: mod_base = OTHER; note = 2'-O-methylcytidine-3'- phosphorothioate
  modified_base 3: mod_base = OTHER; note = 2'-O-methyladenosine-3'-phosphate
  modified_base 4: mod_base = OTHER; note = 2'-O-methyladenosine-3'-phosphate
  modified_base 5: mod_base = OTHER; note = 2'-O-methyladenosine-3'-phosphate
  modified_base 6: mod_base = OTHER; note = 2'-O-methylcytidine-3'-phosphate
  modified_base 7: mod_base = OTHER; note = 2'-fluoroadenosine-3'-phosphate
  modified_base 8: mod_base = OTHER; note = 2'-O-methylcytidine-3'-phosphate
  modified_base 9: mod_base = OTHER; note = 2'-fluorouridine-3'-phosphate
  modified_base 10: mod_base = OTHER; note = 2'-fluoroadenosine-3'-phosphate
  modified_base 11: mod_base = OTHER; note = 2'-fluoroadenosine-3'-phosphate
  modified_base 12: mod_base = OTHER; note = 2'-O-methylguanosine-3'-phosphate
  modified_base 13: mod_base = OTHER; note = 2'-O-methylguanosine-3'-phosphate
  modified_base 14: mod_base = OTHER; note = 2'-O-methyluridine-3'-phosphate
  modified_base 15: mod_base = OTHER; note = 2'-O-methylguanosine-3'-phosphate
  modified_base 16: mod_base = OTHER; note = 2'-O-methyladenosine-3'-phosphate
  modified_base 17: mod_base = OTHER; note = 2'-O-methyladenosine-3'-phosphate
  modified_base 18: mod_base = OTHER; note = 2'-O-methyladenosine-3'-phosphate
  modified_base 19: mod_base = OTHER; note = 2'-O-methyladenosine-3'-phosphate
  modified_base 20: mod_base = OTHER; note = 2'-O-methylguanosine-3'-phosphate
  modified_base 21: mod_base = OTHER; note 2'-O-methyladenosine-3'-phosphate-N-[tris(GalNAc-alkyl)-ami dodecanoyl)]-4-hydroxyprolinol (Hyp-(GalNAc-alkyl)3)
gcaaacactaaggtgaaaaga

SEQ ID NO: 2387 - RNA, 23 nt, synthetic construct
  source 1..23: mol_type = other RNA
  modified_base 1: mod_base = OTHER; note = 2'-O-methyluridine-3'-phosphorothioate
  modified_base 2: mod_base = OTHER; note = 2'-fluorocytidine-3'-phosphorothioate
  modified_base 3: mod_base = OTHER; note = 2'-O-methyluridine-3'-phosphate
  modified_base 4: mod_base = OTHER; note = 2'-O-methyluridine-3'-phosphate
  modified_base 5: mod_base = OTHER; note = 2'-O-methyluridine-3'-phosphate
  modified_base 6: mod_base = OTHER; note = 2'-fluorouridine-3'-phosphate
  modified_base 7: mod_base = OTHER; note = 2'-O-methylcytidine-3'-phosphate
  modified_base 8: mod_base = OTHER; note = 2'-fluoroadenosine-3'-phosphate
  modified_base 9: mod_base = OTHER; note = 2'-fluorocytidine-3'-phosphate
  modified_base 10: mod_base = OTHER; note = 2'-O-methylcytidine-3'-phosphate
  modified_base 11: mod_base = OTHER; note = 2'-O-methyluridine-3'-phosphate
  modified_base 12: mod_base = OTHER; note = 2'-O-methyluridine-3'-phosphate
  modified_base 13: mod_base = OTHER; note = 2'-O-methyladenosine-3'-phosphate
  modified_base 14: mod_base = OTHER; note = 2'-fluoroguanosine-3'-phosphate
  modified_base 15: mod_base = OTHER; note = 2'-O-methyluridine-3'-phosphate
  modified_base 16: mod_base = OTHER; note = 2'-fluoroguanosine-3'-phosphate
  modified_base 17: mod_base = OTHER; note = 2'-O-methyluridine-3'-phosphate
  modified_base 18: mod_base = OTHER; note = 2'-O-methyluridine-3'-phosphate
  modified_base 19: mod_base = OTHER; note = 2'-O-methyluridine-3'-phosphate
  modified_base 20: mod_base = OTHER; note = 2'-O-methylguanosine-3'-phosphate
  modified_base 21: mod_base = OTHER; note = 2'-O-methylcytidine-3'- phosphorothioate
  modified_base 22: mod_base = OTHER; note = 2'-O-methyluridine-3'-phosphorothioate
  modified_base 23: mod_base = OTHER; note = 2'-O-methyladenosine-3'-phosphate
tcttttcaccttagtgtttgcta

SEQ ID NO: 2388 - RNA, 21 nt, synthetic construct
  source 1..21: mol_type = other RNA
  modified_base 1: mod_base = OTHER; note = 2'-O-methylcytidine-3'- phosphorothioate
  modified_base 2: mod_base = OTHER; note = 2'-O-methyladenosine-3'- phosphorothioate
  modified_base 3: mod_base = OTHER; note = 2'-O-methyladenosine-3'-phosphate
  modified_base 4: mod_base = OTHER; note = 2'-O-methyladenosine-3'-phosphate
  modified_base 5: mod_base = OTHER; note = 2'-O-methylcytidine-3'-phosphate
  modified_base 6: mod_base = OTHER; note = 2'-O-methyladenosine-3'-phosphate
  modified_base 7: mod_base = OTHER; note = 2'-fluorocytidine-3'-phosphate
  modified_base 8: mod_base = OTHER; note = 2'-O-methyluridine-3'-phosphate
  modified_base 9: mod_base = OTHER; note = 2'-fluoroadenosine-3'-phosphate
  modified_base 10: mod_base = OTHER; note = 2'-fluoroadenosine-3'-phosphate
  modified_base 11: mod_base = OTHER; note = 2'-fluoroguanosine-3'-phosphate
  modified_base 12: mod_base = OTHER; note = 2'-O-methylguanosine-3'-phosphate
  modified_base 13: mod_base = OTHER; note = 2'-O-methyluridine-3'-phosphate
  modified_base 14: mod_base = OTHER; note = 2'-O-methylguanosine-3'-phosphate
  modified_base 15: mod_base = OTHER; note = 2'-O-methyladenosine-3'-phosphate
  modified_base 16: mod_base = OTHER; note = 2'-O-methyladenosine-3'-phosphate
  modified_base 17: mod_base = OTHER; note = 2'-O-methyladenosine-3'-phosphate
  modified_base 18: mod_base = OTHER; note = 2'-O-methyladenosine-3'-phosphate
  modified_base 19: mod_base = OTHER; note = 2'-O-methylguanosine-3'-phosphate
  modified_base 20: mod_base = OTHER; note = 2'-O-methyladenosine-3'-phosphate
  modified_base 21: mod_base = OTHER; note 2'-O-methyluridine-3'-phosphate-N-[tris(GalNAc-alkyl)-amido decanoyl)]-4-hydroxyprolinol (Hyp-(GalNAc-alkyl)3)
caaacactaaggtgaaaagat

SEQ ID NO: 2389 - RNA, 23 nt, synthetic construct
  source 1..23: mol_type = other RNA
  modified_base 1: mod_base = OTHER; note = 2'-O-methyladenosine-3'- phosphorothioate
  modified_base 2: mod_base = OTHER; note = 2'-fluorouridine -3'-phosphorothioate
  modified_base 3: mod_base = OTHER; note = 2'-O-methylcytidine-3'-phosphate
  modified_base 4: mod_base = OTHER; note = 2'-O-methyluridine-3'-phosphate
  modified_base 5: mod_base = OTHER; note = 2'-O-methyluridine-3'-phosphate
  modified_base 6: mod_base = OTHER; note = 2'-fluorouridine-3'-phosphate
  modified_base 7: mod_base = OTHER; note = 2'-O-methyluridine-3'-phosphate
  modified_base 8: mod_base = OTHER; note = 2'-fluorocytidine-3'-phosphate
  modified_base 9: mod_base = OTHER; note = 2'-fluoroadenosine-3'-phosphate
  modified_base 10: mod_base = OTHER; note = 2'-O-methylcytidine-3'-phosphate
  modified_base 11: mod_base = OTHER; note = 2'-O-methylcytidine-3'-phosphate
  modified_base 12: mod_base = OTHER; note = 2'-O-methyluridine-3'-phosphate
  modified_base 13: mod_base = OTHER; note = 2'-O-methyluridine-3'-phosphate
  modified_base 14: mod_base = OTHER; note = 2'-fluoroadenosine-3'-phosphate
  modified_base 15: mod_base = OTHER; note = 2'-O-methylguanosine-3'-phosphate
  modified_base 16: mod_base = OTHER; note = 2'-fluorouridine-3'-phosphate
  modified_base 17: mod_base = OTHER; note = 2'-O-methylguanosine-3'-phosphate
  modified_base 18: mod_base = OTHER; note = 2'-O-methyluridine-3'-phosphate
  modified_base 19: mod_base = OTHER; note = 2'-O-methyluridine-3'-phosphate
  modified_base 20: mod_base = OTHER; note = 2'-O-methyluridine-3'-phosphate
  modified_base 21: mod_base = OTHER; note = 2'-O-methylguanosine-3'- phosphorothioate
  modified_base 22: mod_base = OTHER; note = 2'-O-methylcytidine-3'- phosphorothioate
  modified_base 23: mod_base = OTHER; note = 2'-O-methyluridine-3'-phosphate
atcttttcaccttagtgtttgct

SEQ ID NO: 2390 - RNA, 21 nt, synthetic construct
  source 1..21: mol_type = other RNA
  modified_base 1: mod_base = OTHER; note = 2'-O-methylguanosine-3'- phosphorothioate
  modified_base 2: mod_base = OTHER; note = 2'-O-methylguanosine-3'- phosphorothioate
  modified_base 3: mod_base = OTHER; note = 2'-O-methyluridine-3'-phosphate
  modified_base 4: mod_base = OTHER; note = 2'-O-methyladenosine-3'-phosphate
  modified_base 5: mod_base = OTHER; note = 2'-O-methylguanosine-3'-phosphate
  modified_base 6: mod_base = OTHER; note = 2'-O-methylcytidine-3'-phosphate
  modified_base 7: mod_base = OTHER; note = 2'-fluoroadenosine-3'-phosphate
  modified_base 8: mod_base = OTHER; note = 2'-O-methyladenosine-3'-phosphate
  modified_base 9: mod_base = OTHER; note = 2'-fluoroadenosine-3'-phosphate
  modified_base 10: mod_base = OTHER; note = 2'-fluorocytidine-3'-phosphate
  modified_base 11: mod_base = OTHER; note = 2'-fluoroadenosine-3'-phosphate
  modified_base 12: mod_base = OTHER; note = 2'-O-methylcytidine-3'-phosphate
  modified_base 13: mod_base = OTHER; note = 2'-O-methyluridine-3'-phosphate
  modified_base 14: mod_base = OTHER; note = 2'-O-methyladenosine-3'-phosphate
  modified_base 15: mod_base = OTHER; note = 2'-O-methyladenosine-3'-phosphate
  modified_base 16: mod_base = OTHER; note = 2'-O-methylguanosine-3'-phosphate
  modified_base 17: mod_base = OTHER; note = 2'-O-methylguanosine-3'-phosphate
  modified_base 18: mod_base = OTHER; note = 2'-O-methyluridine-3'-phosphate
  modified_base 19: mod_base = OTHER; note = 2'-O-methylguanosine-3'-phosphate
  modified_base 20: mod_base = OTHER; note = 2'-O-methyladenosine-3'-phosphate
  modified_base 21: mod_base = OTHER; note 2'-O-methyladenosine-3'-phosphate-N-[tris(GalNAc-alkyl)-ami dodecanoyl)]-4-hydroxyprolinol (Hyp-(GalNAc-alkyl)3)
ggtagcaaacactaaggtgaa

SEQ ID NO: 2391 - RNA, 23 nt, synthetic construct
  source 1..23: mol_type = other RNA
  modified_base 1: mod_base = OTHER; note = 2'-O-methyluridine-3'-phosphorothioate
  modified_base 2: mod_base = OTHER; note = 2'-fluorouridine -3'-phosphorothioate
  modified_base 3: mod_base = OTHER; note = 2'-O-methylcytidine-3'-phosphate
  modified_base 4: mod_base = OTHER; note = 2'-O-methyladenosine-3'-phosphate
  modified_base 5: mod_base = OTHER; note = 2'-O-methylcytidine-3'-phosphate
  modified_base 6: mod_base = OTHER; note = 2'-fluorocytidine-3'-phosphate
  modified_base 7: mod_base = OTHER; note = 2'-O-methyluridine-3'-phosphate
  modified_base 8: mod_base = OTHER; note = 2'-fluorouridine-3'-phosphate
  modified_base 9: mod_base = OTHER; note = 2'-fluoroadenosine-3'-phosphate
  modified_base 10: mod_base = OTHER; note = 2'-O-methylguanosine-3'-phosphate
  modified_base 11: mod_base = OTHER; note = 2'-O-methyluridine-3'-phosphate
  modified_base 12: mod_base = OTHER; note = 2'-O-methylguanosine-3'-phosphate
  modified_base 13: mod_base = OTHER; note = 2'-O-methyluridine-3'-phosphate
  modified_base 14: mod_base = OTHER; note = 2'-fluorouridine-3'-phosphate
  modified_base 15: mod_base = OTHER; note = 2'-O-methyluridine-3'-phosphate
  modified_base 16: mod_base = OTHER; note = 2'-fluoroguanosine-3'-phosphate
  modified_base 17: mod_base = OTHER; note = 2'-O-methylcytidine-3'-phosphate
  modified_base 18: mod_base = OTHER; note = 2'-O-methyluridine-3'-phosphate
  modified_base 19: mod_base = OTHER; note = 2'-O-methyladenosine-3'-phosphate
  modified_base 20: mod_base = OTHER; note = 2'-O-methylcytidine-3'-phosphate
  modified_base 21: mod_base = OTHER; note = 2'-O-methylcytidine-3'- phosphorothioate
  modified_base 22: mod_base = OTHER; note = 2'-O-methyluridine-3'-phosphorothioate
  modified_base 23: mod_base = OTHER; note = 2'-O-methylcytidine-3'-phosphate
ttcaccttagtgtttgctacctc

SEQ ID NO: 2392 - RNA, 21 nt, synthetic construct
  source 1..21: mol_type = other RNA
  modified_base 1: mod_base = OTHER; note = 2'-O-methyladenosine-3'- phosphorothioate
  modified_base 2: mod_base = OTHER; note = 2'-O-methylguanosine-3'- phosphorothioate
  modified_base 3: mod_base = OTHER; note = 2'-O-methylguanosine-3'-phosphate
  modified_base 4: mod_base = OTHER; note = 2'-O-methyluridine-3'-phosphate
  modified_base 5: mod_base = OTHER; note = 2'-O-methyladenosine-3'-phosphate
  modified_base 6: mod_base = OTHER; note = 2'-O-methylguanosine-3'-phosphate
  modified_base 7: mod_base = OTHER; note = 2'-fluorocytidine-3'-phosphate
  modified_base 8: mod_base = OTHER; note = 2'-O-methyladenosine-3'-phosphate
  modified_base 9: mod_base = OTHER; note = 2'-fluoroadenosine-3'-phosphate
  modified_base 10: mod_base = OTHER; note = 2'-fluoroadenosine-3'-phosphate
  modified_base 11: mod_base = OTHER; note = 2'-fluorocytidine-3'-phosphate
  modified_base 12: mod_base = OTHER; note = 2'-O-methyladenosine-3'-phosphate
  modified_base 13: mod_base = OTHER; note = 2'-O-methylcytidine-3'-phosphate
  modified_base 14: mod_base = OTHER; note = 2'-O-methyluridine-3'-phosphate
  modified_base 15: mod_base = OTHER; note = 2'-O-methyladenosine-3'-phosphate
  modified_base 16: mod_base = OTHER; note = 2'-O-methyladenosine-3'-phosphate
  modified_base 17: mod_base = OTHER; note = 2'-O-methylguanosine-3'-phosphate
  modified_base 18: mod_base = OTHER; note = 2'-O-methylguanosine-3'-phosphate
  modified_base 19: mod_base = OTHER; note = 2'-O-methyluridine-3'-phosphate
  modified_base 20: mod_base = OTHER; note = 2'-O-methylguanosine-3'-phosphate
  modified_base 21: mod_base = OTHER; note 2'-O-methyladenosine-3'-phosphate-N-[tris(GalNAc-alkyl)-ami dodecanoyl)]-4-hydroxyprolinol (Hyp-(GalNAc-alkyl)3)
aggtagcaaacactaaggtga

SEQ ID NO: 2393 - RNA, 23 nt, synthetic construct
  source 1..23: mol_type = other RNA
  modified_base 1: mod_base = OTHER; note = 2'-O-methyluridine-3'-phosphorothioate
  modified_base 2: mod_base = OTHER; note = 2'-fluorocytidine-3'-phosphorothioate
  modified_base 3: mod_base = OTHER; note = 2'-O-methyladenosine-3'-phosphate
  modified_base 4: mod_base = OTHER; note = 2'-O-methylcytidine-3'-phosphate
  modified_base 5: mod_base = OTHER; note = 2'-O-methylcytidine-3'-phosphate
  modified_base 6: mod_base = OTHER; note = 2'-fluorouridine-3'-phosphate
  modified_base 7: mod_base = OTHER; note = 2'-O-methyluridine-3'-phosphate
  modified_base 8: mod_base = OTHER; note = 2'-fluoroadenosine-3'-phosphate
  modified_base 9: mod_base = OTHER; note = 2'-fluoroguanosine-3'-phosphate
  modified_base 10: mod_base = OTHER; note = 2'-O-methyluridine-3'-phosphate
  modified_base 11: mod_base = OTHER; note = 2'-O-methylguanosine-3'-phosphate
  modified_base 12: mod_base = OTHER; note = 2'-O-methyluridine-3'-phosphate
  modified_base 13: mod_base = OTHER; note = 2'-O-methyluridine-3'-phosphate
  modified_base 14: mod_base = OTHER; note = 2'-fluorouridine-3'-phosphate
  modified_base 15: mod_base = OTHER; note = 2'-O-methylguanosine-3'-phosphate
  modified_base 16: mod_base = OTHER; note = 2'-fluorocytidine-3'-phosphate
  modified_base 17: mod_base = OTHER; note = 2'-O-methyluridine-3'-phosphate
  modified_base 18: mod_base = OTHER; note = 2'-O-methyladenosine-3'-phosphate
  modified_base 19: mod_base = OTHER; note = 2'-O-methylcytidine-3'-phosphate
  modified_base 20: mod_base = OTHER; note = 2'-O-methylcytidine-3'-phosphate
  modified_base 21: mod_base = OTHER; note = 2'-O-methyluridine-3'-phosphorothioate
  modified_base 22: mod_base = OTHER; note = 2'-O-methylcytidine-3'- phosphorothioate
  modified_base 23: mod_base = OTHER; note = 2'-O-methylcytidine-3'-phosphate
tcaccttagtgtttgctacctcc

SEQ ID NO: 2394 - RNA, 21 nt, synthetic construct
  source 1..21: mol_type = other RNA
  modified_base 1: mod_base = OTHER; note = 2'-O-methyladenosine-3'- phosphorothioate
  modified_base 2: mod_base = OTHER; note = 2'-O-methylguanosine-3'- phosphorothioate
  modified_base 3: mod_base = OTHER; note = 2'-O-methylguanosine-3'-phosphate
  modified_base 4: mod_base = OTHER; note = 2'-O-methyluridine-3'-phosphate
  modified_base 5: mod_base = OTHER; note = 2'-O-methyladenosine-3'-phosphate
  modified_base 6: mod_base = OTHER; note = 2'-O-methylguanosine-3'-phosphate
  modified_base 7: mod_base = OTHER; note = 2'-fluorocytidine-3'-phosphate
  modified_base 8: mod_base = OTHER; note = 2'-O-methyladenosine-3'-phosphate
  modified_base 9: mod_base = OTHER; note = 2'-fluoroadenosine-3'-phosphate
  modified_base 10: mod_base = OTHER; note = 2'-fluoroadenosine-3'-phosphate
  modified_base 11: mod_base = OTHER; note = 2'-fluorocytidine-3'-phosphate
  modified_base 12: mod_base = OTHER; note = 2'-O-methyladenosine-3'-phosphate
  modified_base 13: mod_base = OTHER; note = 2'-O-methylcytidine-3'-phosphate
  modified_base 14: mod_base = OTHER; note = 2'-O-methyluridine-3'-phosphate
  modified_base 15: mod_base = OTHER; note = 2'-O-methyladenosine-3'-phosphate
  modified_base 16: mod_base = OTHER; note = 2'-O-methyladenosine-3'-phosphate
  modified_base 17: mod_base = OTHER; note = 2'-O-methylguanosine-3'-phosphate
  modified_base 18: mod_base = OTHER; note = 2'-O-methylguanosine-3'-phosphate
  modified_base 19: mod_base = OTHER; note = 2'-O-methyluridine-3'-phosphate
  modified_base 20: mod_base = OTHER; note = 2'-O-methylguanosine-3'-phosphate
  modified_base 21: mod_base = OTHER; note 2'-O-methyladenosine-3'-phosphate-N-[tris(GalNAc-alkyl)-ami dodecanoyl)]-4-hydroxyprolinol (Hyp-(GalNAc-alkyl)3)
aggtagcaaacactaaggtga

SEQ ID NO: 2395 - RNA, 23 nt, synthetic construct
  source 1..23: mol_type = other RNA
  modified_base 1: mod_base = OTHER; note = 2'-O-methyluridine-3'-phosphorothioate
  modified_base 2: mod_base = OTHER; note = 2'-fluorocytidine-3'-phosphorothioate
  modified_base 3: mod_base = OTHER; note = 2'-O-methyladenosine-3'-phosphate
  modified_base 4: mod_base = OTHER; note = 2'-O-methylcytidine-3'-phosphate
  modified_base 5: mod_base = OTHER; note = 2'-O-methylcytidine-3'-phosphate
  modified_base 6: mod_base = OTHER; note = 2'-fluorouridine-3'-phosphate
  modified_base 7: mod_base = OTHER; note = 2'-O-methyluridine-3'-phosphate
  modified_base 8: mod_base = OTHER; note = 2'-fluoroadenosine-3'-phosphate
  modified_base 9: mod_base = OTHER; note = 2'-fluoroguanosine-3'-phosphate
  modified_base 10: mod_base = OTHER; note = 2'-O-methyluridine-3'-phosphate
  modified_base 11: mod_base = OTHER; note = 2'-O-methylguanosine-3'-phosphate
  modified_base 12: mod_base = OTHER; note = 2'-O-methyluridine-3'-phosphate
  modified_base 13: mod_base = OTHER; note = 2'-O-methyluridine-3'-phosphate
  modified_base 14: mod_base = OTHER; note = 2'-fluorouridine-3'-phosphate
  modified_base 15: mod_base = OTHER; note = 2'-O-methylguanosine-3'-phosphate
  modified_base 16: mod_base = OTHER; note = 2'-fluorocytidine-3'-phosphate
  modified_base 17: mod_base = OTHER; note = 2'-O-methyluridine-3'-phosphate
  modified_base 18: mod_base = OTHER; note = 2'-O-methyladenosine-3'-phosphate
  modified_base 19: mod_base = OTHER; note = 2'-O-methylcytidine-3'-phosphate
  modified_base 20: mod_base = OTHER; note = 2'-O-methylcytidine-3'-phosphate
  modified_base 21: mod_base = OTHER; note = 2'-O-methyluridine-3'-phosphorothioate
  modified_base 22: mod_base = OTHER; note = 2'-O-methylcytidine-3'- phosphorothioate
  modified_base 23: mod_base = OTHER; note = 2'-O-methylcytidine-3'-phosphate
tcaccttagtgtttgctacctcc

SEQ ID NO: 2396 - RNA, 21 nt, synthetic construct
  source 1..21: mol_type = other RNA
  modified_base 1: mod_base = OTHER; note = 2'-O-methylguanosine-3'- phosphorothioate
  modified_base 2: mod_base = OTHER; note = 2'-O-methylguanosine-3'- phosphorothioate
  modified_base 3: mod_base = OTHER; note = 2'-O-methyluridine-3'-phosphate
  modified_base 4: mod_base = OTHER; note = 2'-O-methyladenosine-3'-phosphate
  modified_base 5: mod_base = OTHER; note = 2'-O-methylguanosine-3'-phosphate
  modified_base 6: mod_base = OTHER; note = 2'-O-methylcytidine-3'-phosphate
  modified_base 7: mod_base = OTHER; note = 2'-fluoroadenosine-3'-phosphate
  modified_base 8: mod_base = OTHER; note = 2'-O-methyladenosine-3'-phosphate
  modified_base 9: mod_base = OTHER; note = 2'-fluoroadenosine-3'-phosphate
  modified_base 10: mod_base = OTHER; note = 2'-fluorocytidine-3'-phosphate
  modified_base 11: mod_base = OTHER; note = 2'-fluoroadenosine-3'-phosphate
  modified_base 12: mod_base = OTHER; note = 2'-O-methylcytidine-3'-phosphate
  modified_base 13: mod_base = OTHER; note = 2'-O-methyluridine-3'-phosphate
  modified_base 14: mod_base = OTHER; note = 2'-O-methyladenosine-3'-phosphate
  modified_base 15: mod_base = OTHER; note = 2'-O-methyladenosine-3'-phosphate
  modified_base 16: mod_base = OTHER; note = 2'-O-methylguanosine-3'-phosphate
  modified_base 17: mod_base = OTHER; note = 2'-O-methylguanosine-3'-phosphate
  modified_base 18: mod_base = OTHER; note = 2'-O-methyluridine-3'-phosphate
  modified_base 19: mod_base = OTHER; note = 2'-O-methylguanosine-3'-phosphate
  modified_base 20: mod_base = OTHER; note = 2'-O-methyladenosine-3'-phosphate
  modified_base 21: mod_base = OTHER; note 2'-O-methyladenosine-3'-phosphate-N-[tris(GalNAc-alkyl)-ami dodecanoyl)]-4-hydroxyprolinol (Hyp-(GalNAc-alkyl)3)
ggtagcaaacactaaggtgaa

SEQ ID NO: 2397 - RNA, 23 nt, synthetic construct
  source 1..23: mol_type = other RNA
  modified_base 1: mod_base = OTHER; note = 2'-O-methyluridine-3'-phosphorothioate
  modified_base 2: mod_base = OTHER; note = 2'-fluorouridine -3'-phosphorothioate
  modified_base 3: mod_base = OTHER; note = 2'-O-methylcytidine-3'-phosphate
  modified_base 4: mod_base = OTHER; note = 2'-O-methyladenosine-3'-phosphate
  modified_base 5: mod_base = OTHER; note = 2'-O-methylcytidine-3'-phosphate
  modified_base 6: mod_base = OTHER; note = 2'-fluorocytidine-3'-phosphate
  modified_base 7: mod_base = OTHER; note = 2'-O-methyluridine-3'-phosphate
  modified_base 8: mod_base = OTHER; note = 2'-fluorouridine-3'-phosphate
  modified_base 9: mod_base = OTHER; note = 2'-fluoroadenosine-3'-phosphate
  modified_base 10: mod_base = OTHER; note = 2'-O-methylguanosine-3'-phosphate
  modified_base 11: mod_base = OTHER; note = 2'-O-methyluridine-3'-phosphate
  modified_base 12: mod_base = OTHER; note = 2'-O-methylguanosine-3'-phosphate
  modified_base 13: mod_base = OTHER; note = 2'-O-methyluridine-3'-phosphate
  modified_base 14: mod_base = OTHER; note = 2'-fluorouridine-3'-phosphate
  modified_base 15: mod_base = OTHER; note = 2'-O-methyluridine-3'-phosphate
  modified_base 16: mod_base = OTHER; note = 2'-fluoroguanosine-3'-phosphate
  modified_base 17: mod_base = OTHER; note = 2'-O-methylcytidine-3'-phosphate
  modified_base 18: mod_base = OTHER; note = 2'-O-methyluridine-3'-phosphate
  modified_base 19: mod_base = OTHER; note = 2'-O-methyladenosine-3'-phosphate
  modified_base 20: mod_base = OTHER; note = 2'-O-methylcytidine-3'-phosphate
  modified_base 21: mod_base = OTHER; note = 2'-O-methylcytidine-3'- phosphorothioate
  modified_base 22: mod_base = OTHER; note = 2'-O-methyluridine-3'-phosphorothioate
  modified_base 23: mod_base = OTHER; note = 2'-O-methylcytidine-3'-phosphate
ttcaccttagtgtttgctacctc

SEQ ID NO: 2398 - RNA, 21 nt, synthetic construct
  source 1..21: mol_type = other RNA
  modified_base 1: mod_base = OTHER; note = 2'-O-methyluridine-3'-phosphorothioate
  modified_base 2: mod_base = OTHER; note = 2'-O-methyluridine-3'-phosphorothioate
  modified_base 3: mod_base = OTHER; note = 2'-O-methylguanosine-3'-phosphate
  modified_base 4: mod_base = OTHER; note = 2'-O-methylguanosine-3'-phosphate
  modified_base 5: mod_base = OTHER; note = 2'-O-methyladenosine-3'-phosphate
  modified_base 6: mod_base = OTHER; note = 2'-O-methylguanosine-3'-phosphate
  modified_base 7: mod_base = OTHER; note = 2'-fluoroguanosine-3'-phosphate
  modified_base 8: mod_base = OTHER; note = 2'-O-methyluridine-3'-phosphate
  modified_base 9: mod_base = OTHER; note = 2'-fluoroadenosine-3'-phosphate
  modified_base 10: mod_base = OTHER; note = 2'-fluoroguanosine-3'-phosphate
  modified_base 11: mod_base = OTHER; note = 2'-fluorocytidine-3'-phosphate
  modified_base 12: mod_base = OTHER; note = 2'-O-methyladenosine-3'-phosphate
  modified_base 13: mod_base = OTHER; note = 2'-O-methyladenosine-3'-phosphate
  modified_base 14: mod_base = OTHER; note = 2'-O-methyladenosine-3'-phosphate
  modified_base 15: mod_base = OTHER; note = 2'-O-methylcytidine-3'-phosphate
  modified_base 16: mod_base = OTHER; note = 2'-O-methyladenosine-3'-phosphate
  modified_base 17: mod_base = OTHER; note = 2'-O-methylcytidine-3'-phosphate
  modified_base 18: mod_base = OTHER; note = 2'-O-methyluridine-3'-phosphate
  modified_base 19: mod_base = OTHER; note = 2'-O-methyladenosine-3'-phosphate
  modified_base 20: mod_base = OTHER; note = 2'-O-methyladenosine-3'-phosphate
  modified_base 21: mod_base = OTHER; note 2'-O-methylguanosine-3'-phosphate-N-[tris(GalNAc-alkyl)-ami dodecanoyl)]-4-hydroxyprolinol (Hyp-(GalNAc-alkyl)3)
ttggaggtagcaaacactaag

SEQ ID NO: 2399 - RNA, 23 nt, synthetic construct
  source 1..23: mol_type = other RNA
  modified_base 1: mod_base = OTHER; note = 2'-O-methylcytidine-3'- phosphorothioate
  modified_base 2: mod_base = OTHER; note = 2'-fluorouridine -3'-phosphorothioate
  modified_base 3: mod_base = OTHER; note = 2'-O-methyluridine-3'-phosphate
  modified_base 4: mod_base = OTHER; note = 2'-O-methyladenosine-3'-phosphate
  modified_base 5: mod_base = OTHER; note = 2'-O-methylguanosine-3'-phosphate
  modified_base 6: mod_base = OTHER; note = 2'-fluorouridine-3'-phosphate
  modified_base 7: mod_base = OTHER; note = 2'-O-methylguanosine-3'-phosphate
  modified_base 8: mod_base = OTHER; note = 2'-fluorouridine-3'-phosphate
  modified_base 9: mod_base = OTHER; note = 2'-fluorouridine-3'-phosphate
  modified_base 10: mod_base = OTHER; note = 2'-O-methyluridine-3'-phosphate
  modified_base 11: mod_base = OTHER; note = 2'-O-methylguanosine-3'-phosphate
  modified_base 12: mod_base = OTHER; note = 2'-O-methylcytidine-3'-phosphate
  modified_base 13: mod_base = OTHER; note = 2'-O-methyluridine-3'-phosphate
  modified_base 14: mod_base = OTHER; note = 2'-fluoroadenosine-3'-phosphate
  modified_base 15: mod_base = OTHER; note = 2'-O-methylcytidine-3'-phosphate
  modified_base 16: mod_base = OTHER; note = 2'-fluorocytidine-3'-phosphate
  modified_base 17: mod_base = OTHER; note = 2'-O-methyluridine-3'-phosphate
  modified_base 18: mod_base = OTHER; note = 2'-O-methylcytidine-3'-phosphate
  modified_base 19: mod_base = OTHER; note = 2'-O-methylcytidine-3'-phosphate
  modified_base 20: mod_base = OTHER; note = 2'-O-methyladenosine-3'-phosphate
  modified_base 21: mod_base = OTHER; note = 2'-O-methyladenosine-3'- phosphorothioate
  modified_base 22: mod_base = OTHER; note = 2'-O-methyluridine-3'-phosphorothioate
  modified_base 23: mod_base = OTHER; note = 2'-O-methyluridine-3'-phosphate
cttagtgtttgctacctccaatt

SEQ ID NO: 2400 - RNA, 21 nt, synthetic construct
  source 1..21: mol_type = other RNA
  modified_base 1: mod_base = OTHER; note = 2'-O-methyladenosine-3'- phosphorothioate
  modified_base 2: mod_base = OTHER; note = 2'-O-methyluridine-3'-phosphorothioate
  modified_base 3: mod_base = OTHER; note = 2'-O-methyluridine-3'-phosphate
  modified_base 4: mod_base = OTHER; note = 2'-O-methylguanosine-3'-phosphate
  modified_base 5: mod_base = OTHER; note = 2'-O-methylguanosine-3'-phosphate
  modified_base 6: mod_base = OTHER; note = 2'-O-methyladenosine-3'-phosphate
  modified_base 7: mod_base = OTHER; note = 2'-fluoroguanosine-3'-phosphate
  modified_base 8: mod_base = OTHER; note = 2'-O-methylguanosine-3'-phosphate
  modified_base 9: mod_base = OTHER; note = 2'-fluorouridine-3'-phosphate
  modified_base 10: mod_base = OTHER; note = 2'-fluoroadenosine-3'-phosphate
  modified_base 11: mod_base = OTHER; note = 2'-fluoroguanosine-3'-phosphate
  modified_base 12: mod_base = OTHER; note = 2'-O-methylcytidine-3'-phosphate
  modified_base 13: mod_base = OTHER; note = 2'-O-methyladenosine-3'-phosphate
  modified_base 14: mod_base = OTHER; note = 2'-O-methyladenosine-3'-phosphate
  modified_base 15: mod_base = OTHER; note = 2'-O-methyladenosine-3'-phosphate
  modified_base 16: mod_base = OTHER; note = 2'-O-methylcytidine-3'-phosphate
  modified_base 17: mod_base = OTHER; note = 2'-O-methyladenosine-3'-phosphate
  modified_base 18: mod_base = OTHER; note = 2'-O-methylcytidine-3'-phosphate
  modified_base 19: mod_base = OTHER; note = 2'-O-methyluridine-3'-phosphate
  modified_base 20: mod_base = OTHER; note = 2'-O-methyladenosine-3'-phosphate
  modified_base 21: mod_base = OTHER; note 2'-O-methyladenosine-3'-phosphate-N-[tris(GalNAc-alkyl)-ami dodecanoyl)]-4-hydroxyprolinol (Hyp-(GalNAc-alkyl)3)
attggaggtagcaaacactaa

SEQ ID NO: 2401 - RNA, 23 nt, synthetic construct
  source 1..23: mol_type = other RNA
  modified_base 1: mod_base = OTHER; note = 2'-O-methyluridine-3'-phosphorothioate
  modified_base 2: mod_base = OTHER; note = 2'-fluorouridine -3'-phosphorothioate
  modified_base 3: mod_base = OTHER; note = 2'-O-methyladenosine-3'-phosphate
  modified_base 4: mod_base = OTHER; note = 2'-O-methylguanosine-3'-phosphate
  modified_base 5: mod_base = OTHER; note = 2'-O-methyluridine-3'-phosphate
  modified_base 6: mod_base = OTHER; note = 2'-fluoroguanosine-3'-phosphate
  modified_base 7: mod_base = OTHER; note = 2'-O-methyluridine-3'-phosphate
  modified_base 8: mod_base = OTHER; note = 2'-fluorouridine-3'-phosphate
  modified_base 9: mod_base = OTHER; note = 2'-fluorouridine-3'-phosphate
  modified_base 10: mod_base = OTHER; note = 2'-O-methylguanosine-3'-phosphate
  modified_base 11: mod_base = OTHER; note = 2'-O-methylcytidine-3'-phosphate
  modified_base 12: mod_base = OTHER; note = 2'-O-methyluridine-3'-phosphate
  modified_base 13: mod_base = OTHER; note = 2'-O-methyladenosine-3'-phosphate
  modified_base 14: mod_base = OTHER; note = 2'-fluorocytidine-3'-phosphate
  modified_base 15: mod_base = OTHER; note = 2'-O-methylcytidine-3'-phosphate
  modified_base 16: mod_base = OTHER; note = 2'-fluorouridine-3'-phosphate
  modified_base 17: mod_base = OTHER; note = 2'-O-methylcytidine-3'-phosphate
  modified_base 18: mod_base = OTHER; note = 2'-O-methylcytidine-3'-phosphate
  modified_base 19: mod_base = OTHER; note = 2'-O-methyladenosine-3'-phosphate
  modified_base 20: mod_base = OTHER; note = 2'-O-methyladenosine-3'-phosphate
  modified_base 21: mod_base = OTHER; note = 2'-O-methyluridine-3'-phosphorothioate
  modified_base 22: mod_base = OTHER; note = 2'-O-methyluridine-3'-phosphorothioate
  modified_base 23: mod_base = OTHER; note = 2'-O-methyluridine-3'-phosphate
ttagtgtttgctacctccaattt

SEQ ID NO: 2402 - RNA, 21 nt, synthetic construct
  source 1..21: mol_type = other RNA
  modified_base 1: mod_base = OTHER; note = 2'-O-methyluridine-3'-phosphorothioate
  modified_base 2: mod_base = OTHER; note = 2'-O-methyladenosine-3'- phosphorothioate
  modified_base 3: mod_base = OTHER; note = 2'-O-methyladenosine-3'-phosphate
  modified_base 4: mod_base = OTHER; note = 2'-O-methyladenosine-3'-phosphate
  modified_base 5: mod_base = OTHER; note = 2'-O-methylguanosine-3'-phosphate
  modified_base 6: mod_base = OTHER; note = 2'-O-methyluridine-3'-phosphate
  modified_base 7: mod_base = OTHER; note = 2'-fluoroguanosine-3'-phosphate
  modified_base 8: mod_base = OTHER; note = 2'-O-methylcytidine-3'-phosphate
  modified_base 9: mod_base = OTHER; note = 2'-fluorouridine-3'-phosphate
  modified_base 10: mod_base = OTHER; note = 2'-fluoroguanosine-3'-phosphate
  modified_base 11: mod_base = OTHER; note = 2'-fluorouridine-3'-phosphate
  modified_base 12: mod_base = OTHER; note = 2'-O-methyladenosine-3'-phosphate
  modified_base 13: mod_base = OTHER; note = 2'-O-methyluridine-3'-phosphate
  modified_base 14: mod_base = OTHER; note = 2'-O-methylcytidine-3'-phosphate
  modified_base 15: mod_base = OTHER; note = 2'-O-methylcytidine-3'-phosphate
  modified_base 16: mod_base = OTHER; note = 2'-O-methyluridine-3'-phosphate
  modified_base 17: mod_base = OTHER; note = 2'-O-methyluridine-3'-phosphate
  modified_base 18: mod_base = OTHER; note = 2'-O-methyluridine-3'-phosphate
  modified_base 19: mod_base = OTHER; note = 2'-O-methyladenosine-3'-phosphate
  modified_base 20: mod_base = OTHER; note = 2'-O-methylguanosine-3'-phosphate
  modified_base 21: mod_base = OTHER; note 2'-O-methyluridine-3'-phosphate-N-[tris(GalNAc-alkyl)-amido decanoyl)]-4-hydroxyprolinol (Hyp-(GalNAc-alkyl)3)
taaagtgctgtatcctttagt

SEQ ID NO: 2403 - RNA, 23 nt, synthetic construct
  source 1..23: mol_type = other RNA
  modified_base 1: mod_base = OTHER; note = 2'-O-methyladenosine-3'- phosphorothioate
  modified_base 2: mod_base = OTHER; note = 2'-fluorocytidine-3'-phosphorothioate
  modified_base 3: mod_base = OTHER; note = 2'-O-methyluridine-3'-phosphate
  modified_base 4: mod_base = OTHER; note = 2'-O-methyladenosine-3'-phosphate
  modified_base 5: mod_base = OTHER; note = 2'-O-methyladenosine-3'-phosphate
  modified_base 6: mod_base = OTHER; note = 2'-fluoroadenosine-3'-phosphate
  modified_base 7: mod_base = OTHER; note = 2'-O-methylguanosine-3'-phosphate
  modified_base 8: mod_base = OTHER; note = 2'-fluoroguanosine-3'-phosphate
  modified_base 9: mod_base = OTHER; note = 2'-fluoroadenosine-3'-phosphate
  modified_base 10: mod_base = OTHER; note = 2'-O-methyluridine-3'-phosphate
  modified_base 11: mod_base = OTHER; note = 2'-O-methyladenosine-3'-phosphate
  modified_base 12: mod_base = OTHER; note = 2'-O-methylcytidine-3'-phosphate
  modified_base 13: mod_base = OTHER; note = 2'-O-methyladenosine-3'-phosphate
  modified_base 14: mod_base = OTHER; note = 2'-fluoroguanosine-3'-phosphate
  modified_base 15: mod_base = OTHER; note = 2'-O-methylcytidine-3'-phosphate
  modified_base 16: mod_base = OTHER; note = 2'-fluoroadenosine-3'-phosphate
  modified_base 17: mod_base = OTHER; note = 2'-O-methylcytidine-3'-phosphate
  modified_base 18: mod_base = OTHER; note = 2'-O-methyluridine-3'-phosphate
  modified_base 19: mod_base = OTHER; note = 2'-O-methyluridine-3'-phosphate
  modified_base 20: mod_base = OTHER; note = 2'-O-methyluridine-3'-phosphate
  modified_base 21: mod_base = OTHER; note = 2'-O-methyladenosine-3'- phosphorothioate
  modified_base 22: mod_base = OTHER; note = 2'-O-methylguanosine-3'- phosphorothioate
  modified_base 23: mod_base = OTHER; note = 2'-O-methylcytidine-3'-phosphate
actaaaggatacagcactttagc

SEQ ID NO: 2404 - RNA, 21 nt, synthetic construct
  source 1..21: mol_type = other RNA
  modified_base 1: mod_base = OTHER; note = 2'-O-methyladenosine-3'- phosphorothioate
  modified_base 2: mod_base = OTHER; note = 2'-O-methyladenosine-3'- phosphorothioate
  modified_base 3: mod_base = OTHER; note = 2'-O-methyladenosine-3'-phosphate
  modified_base 4: mod_base = OTHER; note = 2'-O-methylguanosine-3'-phosphate
  modified_base 5: mod_base = OTHER; note = 2'-O-methyluridine-3'-phosphate
  modified_base 6: mod_base = OTHER; note = 2'-O-methylguanosine-3'-phosphate
  modified_base 7: mod_base = OTHER; note = 2'-fluorocytidine-3'-phosphate
  modified_base 8: mod_base = OTHER; note = 2'-O-methyluridine-3'-phosphate
  modified_base 9: mod_base = OTHER; note = 2'-fluoroguanosine-3'-phosphate
  modified_base 10: mod_base = OTHER; note = 2'-fluorouridine-3'-phosphate
  modified_base 11: mod_base = OTHER; note = 2'-fluoroadenosine-3'-phosphate
  modified_base 12: mod_base = OTHER; note = 2'-O-methyluridine-3'-phosphate
  modified_base 13: mod_base = OTHER; note = 2'-O-methylcytidine-3'-phosphate
  modified_base 14: mod_base = OTHER; note = 2'-O-methylcytidine-3'-phosphate
  modified_base 15: mod_base = OTHER; note = 2'-O-methyluridine-3'-phosphate
  modified_base 16: mod_base = OTHER; note = 2'-O-methyluridine-3'-phosphate
  modified_base 17: mod_base = OTHER; note = 2'-O-methyluridine-3'-phosphate
  modified_base 18: mod_base = OTHER; note = 2'-O-methyladenosine-3'-phosphate
  modified_base 19: mod_base = OTHER; note = 2'-O-methylguanosine-3'-phosphate
  modified_base 20: mod_base = OTHER; note = 2'-O-methyluridine-3'-phosphate
  modified_base 21: mod_base = OTHER; note 2'-O-methyladenosine-3'-phosphate-N-[tris(GalNAc-alkyl)-ami dodecanoyl)]-4-hydroxyprolinol (Hyp-(GalNAc-alkyl)3)
aaagtgctgtatcctttagta

SEQ ID NO: 2405 - RNA, 23 nt, synthetic construct
  source 1..23: mol_type = other RNA
  modified_base 1: mod_base = OTHER; note = 2'-O-methyluridine-3'-phosphorothioate
  modified_base 2: mod_base = OTHER; note = 2'-fluoroadenosine-3'-phosphorothioate
  modified_base 3: mod_base = OTHER; note = 2'-O-methylcytidine-3'-phosphate
  modified_base 4: mod_base = OTHER; note = 2'-O-methyluridine-3'-phosphate
  modified_base 5: mod_base = OTHER; note = 2'-O-methyladenosine-3'-phosphate
  modified_base 6: mod_base = OTHER; note = 2'-fluoroadenosine-3'-phosphate
  modified_base 7: mod_base = OTHER; note = 2'-O-methyladenosine-3'-phosphate
  modified_base 8: mod_base = OTHER; note = 2'-fluoroguanosine-3'-phosphate
  modified_base 9: mod_base = OTHER; note = 2'-fluoroguanosine-3'-phosphate
  modified_base 10: mod_base = OTHER; note = 2'-O-methyladenosine-3'-phosphate
  modified_base 11: mod_base = OTHER; note = 2'-O-methyluridine-3'-phosphate
  modified_base 12: mod_base = OTHER; note = 2'-O-methyladenosine-3'-phosphate
  modified_base 13: mod_base = OTHER; note = 2'-O-methylcytidine-3'-phosphate
  modified_base 14: mod_base = OTHER; note = 2'-fluoroadenosine-3'-phosphate
  modified_base 15: mod_base = OTHER; note = 2'-O-methylguanosine-3'-phosphate
  modified_base 16: mod_base = OTHER; note = 2'-fluorocytidine-3'-phosphate
  modified_base 17: mod_base = OTHER; note = 2'-O-methyladenosine-3'-phosphate
  modified_base 18: mod_base = OTHER; note = 2'-O-methylcytidine-3'-phosphate
  modified_base 19: mod_base = OTHER; note = 2'-O-methyluridine-3'-phosphate
  modified_base 20: mod_base = OTHER; note = 2'-O-methyluridine-3'-phosphate
  modified_base 21: mod_base = OTHER; note = 2'-O-methyluridine-3'-phosphorothioate
  modified_base 22: mod_base = OTHER; note = 2'-O-methyladenosine-3'- phosphorothioate
  modified_base 23: mod_base = OTHER; note = 2'-O-methylguanosine-3'-phosphate
tactaaaggatacagcactttag

SEQ ID NO: 2406 - RNA, 21 nt, synthetic construct
  source 1..21: mol_type = other RNA
  modified_base 1: mod_base = OTHER; note = 2'-O-methyladenosine-3'- phosphorothioate
  modified_base 2: mod_base = OTHER; note = 2'-O-methylguanosine-3'- phosphorothioate
  modified_base 3: mod_base = OTHER; note = 2'-O-methylguanosine-3'-phosphate
  modified_base 4: mod_base = OTHER; note = 2'-O-methylcytidine-3'-phosphate
  modified_base 5: mod_base = OTHER; note = 2'-O-methyluridine-3'-phosphate
  modified_base 6: mod_base = OTHER; note = 2'-O-methyladenosine-3'-phosphate
  modified_base 7: mod_base = OTHER; note = 2'-fluoroadenosine-3'-phosphate
  modified_base 8: mod_base = OTHER; note = 2'-O-methyladenosine-3'-phosphate
  modified_base 9: mod_base = OTHER; note = 2'-fluoroguanosine-3'-phosphate
  modified_base 10: mod_base = OTHER; note = 2'-fluorouridine-3'-phosphate
  modified_base 11: mod_base = OTHER; note = 2'-fluoroguanosine-3'-phosphate
  modified_base 12: mod_base = OTHER; note = 2'-O-methylcytidine-3'-phosphate
  modified_base 13: mod_base = OTHER; note = 2'-O-methyluridine-3'-phosphate
  modified_base 14: mod_base = OTHER; note = 2'-O-methylguanosine-3'-phosphate
  modified_base 15: mod_base = OTHER; note = 2'-O-methyluridine-3'-phosphate
  modified_base 16: mod_base = OTHER; note = 2'-O-methyladenosine-3'-phosphate
  modified_base 17: mod_base = OTHER; note = 2'-O-methyluridine-3'-phosphate
  modified_base 18: mod_base = OTHER; note = 2'-O-methylcytidine-3'-phosphate
  modified_base 19: mod_base = OTHER; note = 2'-O-methylcytidine-3'-phosphate
  modified_base 20: mod_base = OTHER; note = 2'-O-methyluridine-3'-phosphate
  modified_base 21: mod_base = OTHER; note 2'-O-methyluridine-3'-phosphate-N-[tris(GalNAc-alkyl)-amido decanoyl)]-4-hydroxyprolinol (Hyp-(GalNAc-alkyl)3)
aggctaaagtgctgtatcctt

SEQ ID NO: 2407 - RNA, 23 nt, synthetic construct
  source 1..23: mol_type = other RNA
  modified_base 1: mod_base = OTHER; note = 2'-O-methyladenosine-3'- phosphorothioate
  modified_base 2: mod_base = OTHER; note = 2'-fluoroadenosine-3'-phosphorothioate
  modified_base 3: mod_base = OTHER; note = 2'-O-methylguanosine-3'-phosphate
  modified_base 4: mod_base = OTHER; note = 2'-O-methylguanosine-3'-phosphate
  modified_base 5: mod_base = OTHER; note = 2'-O-methyladenosine-3'-phosphate
  modified_base 6: mod_base = OTHER; note = 2'-fluorouridine-3'-phosphate
  modified_base 7: mod_base = OTHER; note = 2'-O-methyladenosine-3'-phosphate
  modified_base 8: mod_base = OTHER; note = 2'-fluorocytidine-3'-phosphate
  modified_base 9: mod_base = OTHER; note = 2'-fluoroadenosine-3'-phosphate
  modified_base 10: mod_base = OTHER; note = 2'-O-methylguanosine-3'-phosphate
  modified_base 11: mod_base = OTHER; note = 2'-O-methylcytidine-3'-phosphate
  modified_base 12: mod_base = OTHER; note = 2'-O-methyladenosine-3'-phosphate
  modified_base 13: mod_base = OTHER; note = 2'-O-methylcytidine-3'-phosphate
  modified_base 14: mod_base = OTHER; note = 2'-fluorouridine-3'-phosphate
  modified_base 15: mod_base = OTHER; note = 2'-O-methyluridine-3'-phosphate
  modified_base 16: mod_base = OTHER; note = 2'-fluorouridine-3'-phosphate
  modified_base 17: mod_base = OTHER; note = 2'-O-methyladenosine-3'-phosphate
  modified_base 18: mod_base = OTHER; note = 2'-O-methylguanosine-3'-phosphate
  modified_base 19: mod_base = OTHER; note = 2'-O-methylcytidine-3'-phosphate
  modified_base 20: mod_base = OTHER; note = 2'-O-methylcytidine-3'-phosphate
  modified_base 21: mod_base = OTHER; note = 2'-O-methyluridine-3'-phosphorothioate
  modified_base 22: mod_base = OTHER; note = 2'-O-methylguanosine-3'- phosphorothioate
  modified_base 23: mod_base = OTHER; note = 2'-O-methylcytidine-3'-phosphate
aaggatacagcactttagcctgc

SEQ ID NO: 2408 - RNA, 21 nt, synthetic construct
  source 1..21: mol_type = other RNA
  modified_base 1: mod_base = OTHER; note = 2'-O-methylcytidine-3'- phosphorothioate
  modified_base 2: mod_base = OTHER; note = 2'-O-methyladenosine-3'- phosphorothioate
  modified_base 3: mod_base = OTHER; note = 2'-O-methylguanosine-3'-phosphate
  modified_base 4: mod_base = OTHER; note = 2'-O-methylguanosine-3'-phosphate
  modified_base 5: mod_base = OTHER; note = 2'-O-methylcytidine-3'-phosphate
  modified_base 6: mod_base = OTHER; note = 2'-O-methyluridine-3'-phosphate
  modified_base 7: mod_base = OTHER; note = 2'-fluoroadenosine-3'-phosphate
  modified_base 8: mod_base = OTHER; note = 2'-O-methyladenosine-3'-phosphate
  modified_base 9: mod_base = OTHER; note = 2'-fluoroadenosine-3'-phosphate
  modified_base 10: mod_base = OTHER; note = 2'-fluoroguanosine-3'-phosphate
  modified_base 11: mod_base = OTHER; note = 2'-fluorouridine-3'-phosphate
  modified_base 12: mod_base = OTHER; note = 2'-O-methylguanosine-3'-phosphate
  modified_base 13: mod_base = OTHER; note = 2'-O-methylcytidine-3'-phosphate
  modified_base 14: mod_base = OTHER; note = 2'-O-methyluridine-3'-phosphate
  modified_base 15: mod_base = OTHER; note = 2'-O-methylguanosine-3'-phosphate
  modified_base 16: mod_base = OTHER; note = 2'-O-methyluridine-3'-phosphate
  modified_base 17: mod_base = OTHER; note = 2'-O-methyladenosine-3'-phosphate
  modified_base 18: mod_base = OTHER; note = 2'-O-methyluridine-3'-phosphate
  modified_base 19: mod_base = OTHER; note = 2'-O-methylcytidine-3'-phosphate
  modified_base 20: mod_base = OTHER; note = 2'-O-methylcytidine-3'-phosphate
  modified_base 21: mod_base = OTHER; note 2'-O-methyluridine-3'-phosphate-N-[tris(GalNAc-alkyl)-amido decanoyl)]-4-hydroxyprolinol (Hyp-(GalNAc-alkyl)3)
caggctaaagtgctgtatcct

SEQ ID NO: 2409 - RNA, 23 nt, synthetic construct
  source 1..23: mol_type = other RNA
  modified_base 1: mod_base = OTHER; note = 2'-O-methyladenosine-3'- phosphorothioate
  modified_base 2: mod_base = OTHER; note = 2'-fluoroguanosine-3'-phosphorothioate
  modified_base 3: mod_base = OTHER; note = 2'-O-methylguanosine-3'-phosphate
  modified_base 4: mod_base = OTHER; note = 2'-O-methyladenosine-3'-phosphate
  modified_base 5: mod_base = OTHER; note = 2'-O-methyluridine-3'-phosphate
  modified_base 6: mod_base = OTHER; note = 2'-fluoroadenosine-3'-phosphate
  modified_base 7: mod_base = OTHER; note = 2'-O-methylcytidine-3'-phosphate
  modified_base 8: mod_base = OTHER; note = 2'-fluoroadenosine-3'-phosphate
  modified_base 9: mod_base = OTHER; note = 2'-fluoroguanosine-3'-phosphate
  modified_base 10: mod_base = OTHER; note = 2'-O-methylcytidine-3'-phosphate
  modified_base 11: mod_base = OTHER; note = 2'-O-methyladenosine-3'-phosphate
  modified_base 12: mod_base = OTHER; note = 2'-O-methylcytidine-3'-phosphate
  modified_base 13: mod_base = OTHER; note = 2'-O-methyluridine-3'-phosphate
  modified_base 14: mod_base = OTHER; note = 2'-fluorouridine-3'-phosphate
  modified_base 15: mod_base = OTHER; note = 2'-O-methyluridine-3'-phosphate
  modified_base 16: mod_base = OTHER; note = 2'-fluoroadenosine-3'-phosphate
  modified_base 17: mod_base = OTHER; note = 2'-O-methylguanosine-3'-phosphate
  modified_base 18: mod_base = OTHER; note = 2'-O-methylcytidine-3'-phosphate
  modified_base 19: mod_base = OTHER; note = 2'-O-methylcytidine-3'-phosphate
  modified_base 20: mod_base = OTHER; note = 2'-O-methyluridine-3'-phosphate
  modified_base 21: mod_base = OTHER; note = 2'-O-methylguanosine-3'- phosphorothioate
  modified_base 22: mod_base = OTHER; note = 2'-O-methylcytidine-3'- phosphorothioate
  modified_base 23: mod_base = OTHER; note = 2'-O-methylcytidine-3'-phosphate
aggatacagcactttagcctgcc

SEQ ID NO: 2410 - RNA, 21 nt, synthetic construct
  source 1..21: mol_type = other RNA
  modified_base 1: mod_base = OTHER; note = 2'-O-methyladenosine-3'- phosphorothioate
  modified_base 2: mod_base = OTHER; note = 2'-O-methyladenosine-3'- phosphorothioate
  modified_base 3: mod_base = OTHER; note = 2'-O-methylguanosine-3'-phosphate
  modified_base 4: mod_base = OTHER; note = 2'-O-methyladenosine-3'-phosphate
  modified_base 5: mod_base = OTHER; note = 2'-O-methylcytidine-3'-phosphate
  modified_base 6: mod_base = OTHER; note = 2'-O-methyladenosine-3'-phosphate
  modified_base 7: mod_base = OTHER; note = 2'-fluorouridine-3'-phosphate
  modified_base 8: mod_base = OTHER; note = 2'-O-methyluridine-3'-phosphate
  modified_base 9: mod_base = OTHER; note = 2'-fluoroguanosine-3'-phosphate
  modified_base 10: mod_base = OTHER; note = 2'-fluoroguanosine-3'-phosphate
  modified_base 11: mod_base = OTHER; note = 2'-fluorouridine-3'-phosphate
  modified_base 12: mod_base = OTHER; note = 2'-O-methylguanosine-3'-phosphate
  modified_base 13: mod_base = OTHER; note = 2'-O-methyladenosine-3'-phosphate
  modified_base 14: mod_base = OTHER; note = 2'-O-methylguanosine-3'-phosphate
  modified_base 15: mod_base = OTHER; note = 2'-O-methylguanosine-3'-phosphate
  modified_base 16: mod_base = OTHER; note = 2'-O-methyladenosine-3'-phosphate
  modified_base 17: mod_base = OTHER; note = 2'-O-methyladenosine-3'-phosphate
  modified_base 18: mod_base = OTHER; note = 2'-O-methyladenosine-3'-phosphate
  modified_base 19: mod_base = OTHER; note = 2'-O-methyladenosine-3'-phosphate
  modified_base 20: mod_base = OTHER; note = 2'-O-methyladenosine-3'-phosphate
  modified_base 21: mod_base = OTHER; note 2'-O-methyluridine-3'-phosphate-N-[tris(GalNAc-alkyl)-amido decanoyl)]-4-hydroxyprolinol (Hyp-(GalNAc-alkyl)3)
aagacattggtgaggaaaaat

SEQ ID NO: 2411 - RNA, 23 nt, synthetic construct
  source 1..23: mol_type = other RNA
  modified_base 1: mod_base = OTHER; note = 2'-O-methyladenosine-3'- phosphorothioate
  modified_base 2: mod_base = OTHER; note = 2'-fluorouridine -3'-phosphorothioate
  modified_base 3: mod_base = OTHER; note = 2'-O-methyluridine-3'-phosphate
  modified_base 4: mod_base = OTHER; note = 2'-O-methyluridine-3'-phosphate
  modified_base 5: mod_base = OTHER; note = 2'-O-methyluridine-3'-phosphate
  modified_base 6: mod_base = OTHER; note = 2'-fluorouridine-3'-phosphate
  modified_base 7: mod_base = OTHER; note = 2'-O-methylcytidine-3'-phosphate
  modified_base 8: mod_base = OTHER; note = 2'-fluorocytidine-3'-phosphate
  modified_base 9: mod_base = OTHER; note = 2'-fluorouridine-3'-phosphate
  modified_base 10: mod_base = OTHER; note = 2'-O-methylcytidine-3'-phosphate
  modified_base 11: mod_base = OTHER; note = 2'-O-methyladenosine-3'-phosphate
  modified_base 12: mod_base = OTHER; note = 2'-O-methylcytidine-3'-phosphate
  modified_base 13: mod_base = OTHER; note = 2'-O-methylcytidine-3'-phosphate
  modified_base 14: mod_base = OTHER; note = 2'-fluoroadenosine-3'-phosphate
  modified_base 15: mod_base = OTHER; note = 2'-O-methyladenosine-3'-phosphate
  modified_base 16: mod_base = OTHER; note = 2'-fluorouridine-3'-phosphate
  modified_base 17: mod_base = OTHER; note = 2'-O-methylguanosine-3'-phosphate
  modified_base 18: mod_base = OTHER; note = 2'-O-methyluridine-3'-phosphate
  modified_base 19: mod_base = OTHER; note = 2'-O-methylcytidine-3'-phosphate
  modified_base 20: mod_base = OTHER; note = 2'-O-methyluridine-3'-phosphate
  modified_base 21: mod_base = OTHER; note = 2'-O-methyluridine-3'-phosphorothioate
  modified_base 22: mod_base = OTHER; note = 2'-O-methylguanosine-3'- phosphorothioate
  modified_base 23: mod_base = OTHER; note = 2'-O-methyluridine-3'-phosphate
atttttcctcaccaatgtcttgt

SEQ ID NO: 2412 - RNA, 21 nt, synthetic construct
  source 1..21: mol_type = other RNA
  modified_base 1: mod_base = OTHER; note = 2'-O-methyladenosine-3'- phosphorothioate
  modified_base 2: mod_base = OTHER; note = 2'-O-methylguanosine-3'- phosphorothioate
  modified_base 3: mod_base = OTHER; note = 2'-O-methyladenosine-3'-phosphate
  modified_base 4: mod_base = OTHER; note = 2'-O-methylcytidine-3'-phosphate
  modified_base 5: mod_base = OTHER; note = 2'-O-methyladenosine-3'-phosphate
  modified_base 6: mod_base = OTHER; note = 2'-O-methyluridine-3'-phosphate
  modified_base 7: mod_base = OTHER; note = 2'-fluorouridine-3'-phosphate
  modified_base 8: mod_base = OTHER; note = 2'-O-methylguanosine-3'-phosphate
  modified_base 9: mod_base = OTHER; note = 2'-fluoroguanosine-3'-phosphate
  modified_base 10: mod_base = OTHER; note = 2'-fluorouridine-3'-phosphate
  modified_base 11: mod_base = OTHER; note = 2'-fluoroguanosine-3'-phosphate
  modified_base 12: mod_base = OTHER; note = 2'-O-methyladenosine-3'-phosphate
  modified_base 13: mod_base = OTHER; note = 2'-O-methylguanosine-3'-phosphate
  modified_base 14: mod_base = OTHER; note = 2'-O-methylguanosine-3'-phosphate
  modified_base 15: mod_base = OTHER; note = 2'-O-methyladenosine-3'-phosphate
  modified_base 16: mod_base = OTHER; note = 2'-O-methyladenosine-3'-phosphate
  modified_base 17: mod_base = OTHER; note = 2'-O-methyladenosine-3'-phosphate
  modified_base 18: mod_base = OTHER; note = 2'-O-methyladenosine-3'-phosphate
  modified_base 19: mod_base = OTHER; note = 2'-O-methyladenosine-3'-phosphate
  modified_base 20: mod_base = OTHER; note = 2'-O-methyluridine-3'-phosphate
  modified_base 21: mod_base = OTHER; note 2'-O-methylcytidine-3'-phosphate-N-[tris(GalNAc-alkyl)-amid odecanoyl)]-4-hydroxyprolinol (Hyp-(GalNAc-alkyl)3)
agacattggtgaggaaaaatc

SEQ ID NO: 2413 - RNA, 23 nt, synthetic construct
  source 1..23: mol_type = other RNA
  modified_base 1: mod_base = OTHER; note = 2'-O-methylguanosine-3'- phosphorothioate
  modified_base 2: mod_base = OTHER; note = 2'-fluoroadenosine-3'-phosphorothioate
  modified_base 3: mod_base = OTHER; note = 2'-O-methyluridine-3'-phosphate
  modified_base 4: mod_base = OTHER; note = 2'-O-methyluridine-3'-phosphate
  modified_base 5: mod_base = OTHER; note = 2'-O-methyluridine-3'-phosphate
  modified_base 6: mod_base = OTHER; note = 2'-fluorouridine-3'-phosphate
  modified_base 7: mod_base = OTHER; note = 2'-O-methyluridine-3'-phosphate
  modified_base 8: mod_base = OTHER; note = 2'-fluorocytidine-3'-phosphate
  modified_base 9: mod_base = OTHER; note = 2'-fluorocytidine-3'-phosphate
  modified_base 10: mod_base = OTHER; note = 2'-O-methyluridine-3'-phosphate
  modified_base 11: mod_base = OTHER; note = 2'-O-methylcytidine-3'-phosphate
  modified_base 12: mod_base = OTHER; note = 2'-O-methyladenosine-3'-phosphate
  modified_base 13: mod_base = OTHER; note = 2'-O-methylcytidine-3'-phosphate
  modified_base 14: mod_base = OTHER; note = 2'-fluorocytidine-3'-phosphate
  modified_base 15: mod_base = OTHER; note = 2'-O-methyladenosine-3'-phosphate
  modified_base 16: mod_base = OTHER; note = 2'-fluoroadenosine-3'-phosphate
  modified_base 17: mod_base = OTHER; note = 2'-O-methyluridine-3'-phosphate
  modified_base 18: mod_base = OTHER; note = 2'-O-methylguanosine-3'-phosphate
  modified_base 19: mod_base = OTHER; note = 2'-O-methyluridine-3'-phosphate
  modified_base 20: mod_base = OTHER; note = 2'-O-methylcytidine-3'-phosphate
  modified_base 21: mod_base = OTHER; note = 2'-O-methyluridine-3'-phosphorothioate
  modified_base 22: mod_base = OTHER; note = 2'-O-methyluridine-3'-phosphorothioate
  modified_base 23: mod_base = OTHER; note = 2'-O-methylguanosine-3'-phosphate
gatttttcctcaccaatgtcttg

SEQ ID NO: 2414 - RNA, 21 nt, synthetic construct
  source 1..21: mol_type = other RNA
  modified_base 1: mod_base = OTHER; note = 2'-O-methylcytidine-3'- phosphorothioate
  modified_base 2: mod_base = OTHER; note = 2'-O-methylguanosine-3'- phosphorothioate
  modified_base 3: mod_base = OTHER; note = 2'-O-methyladenosine-3'-phosphate
  modified_base 4: mod_base = OTHER; note = 2'-O-methylcytidine-3'-phosphate
  modified_base 5: mod_base = OTHER; note = 2'-O-methyladenosine-3'-phosphate
  modified_base 6: mod_base = OTHER; note = 2'-O-methyladenosine-3'-phosphate
  modified_base 7: mod_base = OTHER; note = 2'-fluoroguanosine-3'-phosphate
  modified_base 8: mod_base = OTHER; note = 2'-O-methyladenosine-3'-phosphate
  modified_base 9: mod_base = OTHER; note = 2'-fluorocytidine-3'-phosphate
  modified_base 10: mod_base = OTHER; note = 2'-fluoroadenosine-3'-phosphate
  modified_base 11: mod_base = OTHER; note = 2'-fluorouridine-3'-phosphate
  modified_base 12: mod_base = OTHER; note = 2'-O-methyluridine-3'-phosphate
  modified_base 13: mod_base = OTHER; note = 2'-O-methylguanosine-3'-phosphate
  modified_base 14: mod_base = OTHER; note = 2'-O-methylguanosine-3'-phosphate
  modified_base 15: mod_base = OTHER; note = 2'-O-methyluridine-3'-phosphate
  modified_base 16: mod_base = OTHER; note = 2'-O-methylguanosine-3'-phosphate
  modified_base 17: mod_base = OTHER; note = 2'-O-methyladenosine-3'-phosphate
  modified_base 18: mod_base = OTHER; note = 2'-O-methylguanosine-3'-phosphate
  modified_base 19: mod_base = OTHER; note = 2'-O-methylguanosine-3'-phosphate
  modified_base 20: mod_base = OTHER; note = 2'-O-methyladenosine-3'-phosphate
  modified_base 21: mod_base = OTHER; note 2'-O-methyladenosine-3'-phosphate-N-[tris(GalNAc-alkyl)-ami dodecanoyl)]-4-hydroxyprolinol (Hyp-(GalNAc-alkyl)3)
cgacaagacattggtgaggaa

SEQ ID NO: 2415 - RNA, 23 nt, synthetic construct
  source 1..23: mol_type = other RNA
  modified_base 1: mod_base = OTHER; note = 2'-O-methyluridine-3'-phosphorothioate
  modified_base 2: mod_base = OTHER; note = 2'-fluorouridine -3'-phosphorothioate
  modified_base 3: mod_base = OTHER; note = 2'-O-methylcytidine-3'-phosphate
  modified_base 4: mod_base = OTHER; note = 2'-O-methylcytidine-3'-phosphate
  modified_base 5: mod_base = OTHER; note = 2'-O-methyluridine-3'-phosphate
  modified_base 6: mod_base = OTHER; note = 2'-fluorocytidine-3'-phosphate
  modified_base 7: mod_base = OTHER; note = 2'-O-methyladenosine-3'-phosphate
  modified_base 8: mod_base = OTHER; note = 2'-fluorocytidine-3'-phosphate
  modified_base 9: mod_base = OTHER; note = 2'-fluorocytidine-3'-phosphate
  modified_base 10: mod_base = OTHER; note = 2'-O-methyladenosine-3'-phosphate
  modified_base 11: mod_base = OTHER; note = 2'-O-methyladenosine-3'-phosphate
  modified_base 12: mod_base = OTHER; note = 2'-O-methyluridine-3'-phosphate
  modified_base 13: mod_base = OTHER; note = 2'-O-methylguanosine-3'-phosphate
  modified_base 14: mod_base = OTHER; note = 2'-fluorouridine-3'-phosphate
  modified_base 15: mod_base = OTHER; note = 2'-O-methylcytidine-3'-phosphate
  modified_base 16: mod_base = OTHER; note = 2'-fluorouridine-3'-phosphate
  modified_base 17: mod_base = OTHER; note = 2'-O-methyluridine-3'-phosphate
  modified_base 18: mod_base = OTHER; note = 2'-O-methylguanosine-3'-phosphate
  modified_base 19: mod_base = OTHER; note = 2'-O-methyluridine-3'-phosphate
  modified_base 20: mod_base = OTHER; note = 2'-O-methylcytidine-3'-phosphate
  modified_base 21: mod_base = OTHER; note = 2'-O-methylguanosine-3'- phosphorothioate
  modified_base 22: mod_base = OTHER; note = 2'-O-methyladenosine-3'- phosphorothioate
  modified_base 23: mod_base = OTHER; note = 2'-O-methyluridine-3'-phosphate
ttcctcaccaatgtcttgtcgat

SEQ ID NO: 2416 - RNA, 21 nt, synthetic construct
  source 1..21: mol_type = other RNA
  modified_base 1: mod_base = OTHER; note = 2'-O-methyluridine-3'-phosphorothioate
  modified_base 2: mod_base = OTHER; note = 2'-O-methylcytidine-3'- phosphorothioate
  modified_base 3: mod_base = OTHER; note = 2'-O-methylguanosine-3'-phosphate
  modified_base 4: mod_base = OTHER; note = 2'-O-methyladenosine-3'-phosphate
  modified_base 5: mod_base = OTHER; note = 2'-O-methylcytidine-3'-phosphate
  modified_base 6: mod_base = OTHER; note = 2'-O-methyladenosine-3'-phosphate
  modified_base 7: mod_base = OTHER; note = 2'-fluoroadenosine-3'-phosphate
  modified_base 8: mod_base = OTHER; note = 2'-O-methylguanosine-3'-phosphate
  modified_base 9: mod_base = OTHER; note = 2'-fluoroadenosine-3'-phosphate
  modified_base 10: mod_base = OTHER; note = 2'-fluorocytidine-3'-phosphate
  modified_base 11: mod_base = OTHER; note = 2'-fluoroadenosine-3'-phosphate
  modified_base 12: mod_base = OTHER; note = 2'-O-methyluridine-3'-phosphate
  modified_base 13: mod_base = OTHER; note = 2'-O-methyluridine-3'-phosphate
  modified_base 14: mod_base = OTHER; note = 2'-O-methylguanosine-3'-phosphate
  modified_base 15: mod_base = OTHER; note = 2'-O-methylguanosine-3'-phosphate
  modified_base 16: mod_base = OTHER; note = 2'-O-methyluridine-3'-phosphate
  modified_base 17: mod_base = OTHER; note = 2'-O-methylguanosine-3'-phosphate
  modified_base 18: mod_base = OTHER; note = 2'-O-methyladenosine-3'-phosphate
  modified_base 19: mod_base = OTHER; note = 2'-O-methylguanosine-3'-phosphate
  modified_base 20: mod_base = OTHER; note = 2'-O-methylguanosine-3'-phosphate
  modified_base 21: mod_base = OTHER; note 2'-O-methyladenosine-3'-phosphate-N-[tris(GalNAc-alkyl)-ami dodecanoyl)]-4-hydroxyprolinol (Hyp-(GalNAc-alkyl)3)
tcgacaagacattggtgagga

SEQ ID NO: 2417 - RNA, 23 nt, synthetic construct
  source 1..23: mol_type = other RNA
  modified_base 1: mod_base = OTHER; note = 2'-O-methyluridine-3'-phosphorothioate
  modified_base 2: mod_base = OTHER; note = 2'-fluorocytidine-3'-phosphorothioate
  modified_base 3: mod_base = OTHER; note = 2'-O-methylcytidine-3'-phosphate
  modified_base 4: mod_base = OTHER; note = 2'-O-methyluridine-3'-phosphate
  modified_base 5: mod_base = OTHER; note = 2'-O-methylcytidine-3'-phosphate
  modified_base 6: mod_base = OTHER; note = 2'-fluoroadenosine-3'-phosphate
  modified_base 7: mod_base = OTHER; note = 2'-O-methylcytidine-3'-phosphate
  modified_base 8: mod_base = OTHER; note = 2'-fluorocytidine-3'-phosphate
  modified_base 9: mod_base = OTHER; note = 2'-fluoroadenosine-3'-phosphate
  modified_base 10: mod_base = OTHER; note = 2'-O-methyladenosine-3'-phosphate
  modified_base 11: mod_base = OTHER; note = 2'-O-methyluridine-3'-phosphate
  modified_base 12: mod_base = OTHER; note = 2'-O-methylguanosine-3'-phosphate
  modified_base 13: mod_base = OTHER; note = 2'-O-methyluridine-3'-phosphate
  modified_base 14: mod_base = OTHER; note = 2'-fluorocytidine-3'-phosphate
  modified_base 15: mod_base = OTHER; note = 2'-O-methyluridine-3'-phosphate
  modified_base 16: mod_base = OTHER; note = 2'-fluorouridine-3'-phosphate
  modified_base 17: mod_base = OTHER; note = 2'-O-methylguanosine-3'-phosphate
  modified_base 18: mod_base = OTHER; note = 2'-O-methyluridine-3'-phosphate
  modified_base 19: mod_base = OTHER; note = 2'-O-methylcytidine-3'-phosphate
  modified_base 20: mod_base = OTHER; note = 2'-O-methylguanosine-3'-phosphate
  modified_base 21: mod_base = OTHER; note = 2'-O-methyladenosine-3'- phosphorothioate
  modified_base 22: mod_base = OTHER; note = 2'-O-methyluridine-3'-phosphorothioate
  modified_base 23: mod_base = OTHER; note = 2'-O-methylguanosine-3'-phosphate
tcctcaccaatgtcttgtcgatg

SEQ ID NO: 2418 - RNA, 21 nt, synthetic construct
  source 1..21: mol_type = other RNA
  modified_base 1: mod_base = OTHER; note = 2'-O-methyladenosine-3'- phosphorothioate
  modified_base 2: mod_base = OTHER; note = 2'-O-methyladenosine-3'- phosphorothioate
  modified_base 3: mod_base = OTHER; note = 2'-O-methylguanosine-3'-phosphate
  modified_base 4: mod_base = OTHER; note = 2'-O-methyladenosine-3'-phosphate
  modified_base 5: mod_base = OTHER; note = 2'-O-methyluridine-3'-phosphate
  modified_base 6: mod_base = OTHER; note = 2'-O-methylguanosine-3'-phosphate
  modified_base 7: mod_base = OTHER; note = 2'-fluorouridine-3'-phosphate
  modified_base 8: mod_base = OTHER; note = 2'-O-methylcytidine-3'-phosphate
  modified_base 9: mod_base = OTHER; note = 2'-fluorocytidine-3'-phosphate
  modified_base 10: mod_base = OTHER; note = 2'-fluorouridine-3'-phosphate
  modified_base 11: mod_base = OTHER; note = 2'-fluorocytidine-3'-phosphate
  modified_base 12: mod_base = OTHER; note = 2'-O-methylguanosine-3'-phosphate
  modified_base 13: mod_base = OTHER; note = 2'-O-methyladenosine-3'-phosphate
  modified_base 14: mod_base = OTHER; note = 2'-O-methylguanosine-3'-phosphate
  modified_base 15: mod_base = OTHER; note = 2'-O-methyladenosine-3'-phosphate
  modified_base 16: mod_base = OTHER; note = 2'-O-methyluridine-3'-phosphate
  modified_base 17: mod_base = OTHER; note = 2'-O-methyladenosine-3'-phosphate
  modified_base 18: mod_base = OTHER; note = 2'-O-methylcytidine-3'-phosphate
  modified_base 19: mod_base = OTHER; note = 2'-O-methyluridine-3'-phosphate
  modified_base 20: mod_base = OTHER; note = 2'-O-methyladenosine-3'-phosphate
  modified_base 21: mod_base = OTHER; note 2'-O-methyladenosine-3'-phosphate-N-[tris(GalNAc-alkyl)-ami dodecanoyl)]-4-hydroxyprolinol (Hyp-(GalNAc-alkyl)3)
aagatgtcctcgagatactaa

SEQ ID NO: 2419 - RNA, 23 nt, synthetic construct
  source 1..23: mol_type = other RNA
  modified_base 1: mod_base = OTHER; note = 2'-O-methyluridine-3'-phosphorothioate
  modified_base 2: mod_base = OTHER; note = 2'-fluorouridine -3'-phosphorothioate
  modified_base 3: mod_base = OTHER; note = 2'-O-methyladenosine-3'-phosphate
  modified_base 4: mod_base = OTHER; note = 2'-O-methylguanosine-3'-phosphate
  modified_base 5: mod_base = OTHER; note = 2'-O-methyluridine-3'-phosphate
  modified_base 6: mod_base = OTHER; note = 2'-fluoroadenosine-3'-phosphate
  modified_base 7: mod_base = OTHER; note = 2'-O-methyluridine-3'-phosphate
  modified_base 8: mod_base = OTHER; note = 2'-fluorocytidine-3'-phosphate
  modified_base 9: mod_base = OTHER; note = 2'-fluorouridine-3'-phosphate
  modified_base 10: mod_base = OTHER; note = 2'-O-methylcytidine-3'-phosphate
  modified_base 11: mod_base = OTHER; note = 2'-O-methylguanosine-3'-phosphate
  modified_base 12: mod_base = OTHER; note = 2'-O-methyladenosine-3'-phosphate
  modified_base 13: mod_base = OTHER; note = 2'-O-methylguanosine-3'-phosphate
  modified_base 14: mod_base = OTHER; note = 2'-fluoroguanosine-3'-phosphate
  modified_base 15: mod_base = OTHER; note = 2'-O-methyladenosine-3'-phosphate
  modified_base 16: mod_base = OTHER; note = 2'-fluorocytidine-3'-phosphate
  modified_base 17: mod_base = OTHER; note = 2'-O-methyladenosine-3'-phosphate
  modified_base 18: mod_base = OTHER; note = 2'-O-methyluridine-3'-phosphate
  modified_base 19: mod_base = OTHER; note = 2'-O-methylcytidine-3'-phosphate
  modified_base 20: mod_base = OTHER; note = 2'-O-methyluridine-3'-phosphate
  modified_base 21: mod_base = OTHER; note = 2'-O-methyluridine-3'-phosphorothioate
  modified_base 22: mod_base = OTHER; note = 2'-O-methylguanosine-3'- phosphorothioate
  modified_base 23: mod_base = OTHER; note = 2'-O-methyladenosine-3'-phosphate
ttagtatctcgaggacatcttga

SEQ ID NO: 2420 - RNA, 21 nt, synthetic construct
  source 1..21: mol_type = other RNA
  modified_base 1: mod_base = OTHER; note = 2'-O-methyladenosine-3'- phosphorothioate
  modified_base 2: mod_base = OTHER; note = 2'-O-methylguanosine-3'- phosphorothioate
  modified_base 3: mod_base = OTHER; note = 2'-O-methyladenosine-3'-phosphate
  modified_base 4: mod_base = OTHER; note = 2'-O-methyluridine-3'-phosphate
  modified_base 5: mod_base = OTHER; note = 2'-O-methylguanosine-3'-phosphate
  modified_base 6: mod_base = OTHER; note = 2'-O-methyluridine-3'-phosphate
  modified_base 7: mod_base = OTHER; note = 2'-fluorocytidine-3'-phosphate
  modified_base 8: mod_base = OTHER; note = 2'-O-methylcytidine-3'-phosphate
  modified_base 9: mod_base = OTHER; note = 2'-fluorouridine-3'-phosphate
  modified_base 10: mod_base = OTHER; note = 2'-fluorocytidine-3'-phosphate
  modified_base 11: mod_base = OTHER; note = 2'-fluoroguanosine-3'-phosphate
  modified_base 12: mod_base = OTHER; note = 2'-O-methyladenosine-3'-phosphate
  modified_base 13: mod_base = OTHER; note = 2'-O-methylguanosine-3'-phosphate
  modified_base 14: mod_base = OTHER; note = 2'-O-methyladenosine-3'-phosphate
  modified_base 15: mod_base = OTHER; note = 2'-O-methyluridine-3'-phosphate
  modified_base 16: mod_base = OTHER; note = 2'-O-methyladenosine-3'-phosphate
  modified_base 17: mod_base = OTHER; note = 2'-O-methylcytidine-3'-phosphate
  modified_base 18: mod_base = OTHER; note = 2'-O-methyluridine-3'-phosphate
  modified_base 19: mod_base = OTHER; note = 2'-O-methyladenosine-3'-phosphate
  modified_base 20: mod_base = OTHER; note = 2'-O-methyladenosine-3'-phosphate
  modified_base 21: mod_base = OTHER; note 2'-O-methyladenosine-3'-phosphate-N-[tris(GalNAc-alkyl)-ami dodecanoyl)]-4-hydroxyprolinol (Hyp-(GalNAc-alkyl)3)
agatgtcctcgagatactaaa

SEQ ID NO: 2421 - RNA, 23 nt, synthetic construct
  source 1..23: mol_type = other RNA
  modified_base 1: mod_base = OTHER; note = 2'-O-methyluridine-3'-phosphorothioate
  modified_base 2: mod_base = OTHER; note = 2'-fluorouridine -3'-phosphorothioate
  modified_base 3: mod_base = OTHER; note = 2'-O-methyluridine-3'-phosphate
  modified_base 4: mod_base = OTHER; note = 2'-O-methyladenosine-3'-phosphate
  modified_base 5: mod_base = OTHER; note = 2'-O-methylguanosine-3'-phosphate
  modified_base 6: mod_base = OTHER; note = 2'-fluorouridine-3'-phosphate
  modified_base 7: mod_base = OTHER; note = 2'-O-methyladenosine-3'-phosphate
  modified_base 8: mod_base = OTHER; note = 2'-fluorouridine-3'-phosphate
  modified_base 9: mod_base = OTHER; note = 2'-fluorocytidine-3'-phosphate
  modified_base 10: mod_base = OTHER; note = 2'-O-methyluridine-3'-phosphate
  modified_base 11: mod_base = OTHER; note = 2'-O-methylcytidine-3'-phosphate
  modified_base 12: mod_base = OTHER; note = 2'-O-methylguanosine-3'-phosphate
  modified_base 13: mod_base = OTHER; note = 2'-O-methyladenosine-3'-phosphate
  modified_base 14: mod_base = OTHER; note = 2'-fluoroguanosine-3'-phosphate
  modified_base 15: mod_base = OTHER; note = 2'-O-methylguanosine-3'-phosphate
  modified_base 16: mod_base = OTHER; note = 2'-fluoroadenosine-3'-phosphate
  modified_base 17: mod_base = OTHER; note = 2'-O-methylcytidine-3'-phosphate
  modified_base 18: mod_base = OTHER; note = 2'-O-methyladenosine-3'-phosphate
  modified_base 19: mod_base = OTHER; note = 2'-O-methyluridine-3'-phosphate
  modified_base 20: mod_base = OTHER; note = 2'-O-methylcytidine-3'-phosphate
  modified_base 21: mod_base = OTHER; note = 2'-O-methyluridine-3'-phosphorothioate
  modified_base 22: mod_base = OTHER; note = 2'-O-methyluridine-3'-phosphorothioate
  modified_base 23: mod_base = OTHER; note = 2'-O-methylguanosine-3'-phosphate
tttagtatctcgaggacatcttg

SEQ ID NO: 2422 - RNA, 21 nt, synthetic construct
  source 1..21: mol_type = other RNA
  modified_base 1: mod_base = OTHER; note = 2'-O-methylguanosine-3'- phosphorothioate
  modified_base 2: mod_base = OTHER; note = 2'-O-methyluridine-3'-phosphorothioate
  modified_base 3: mod_base = OTHER; note = 2'-O-methyluridine-3'-phosphate
  modified_base 4: mod_base = OTHER; note = 2'-O-methylcytidine-3'-phosphate
  modified_base 5: mod_base = OTHER; note = 2'-O-methyladenosine-3'-phosphate
  modified_base 6: mod_base = OTHER; note = 2'-O-methyladenosine-3'-phosphate
  modified_base 7: mod_base = OTHER; note = 2'-fluoroguanosine-3'-phosphate
  modified_base 8: mod_base = OTHER; note = 2'-O-methyladenosine-3'-phosphate
  modified_base 9: mod_base = OTHER; note = 2'-fluorouridine-3'-phosphate
  modified_base 10: mod_base = OTHER; note = 2'-fluoroguanosine-3'-phosphate
  modified_base 11: mod_base = OTHER; note = 2'-fluorouridine-3'-phosphate
  modified_base 12: mod_base = OTHER; note = 2'-O-methylcytidine-3'-phosphate
  modified_base 13: mod_base = OTHER; note = 2'-O-methylcytidine-3'-phosphate
  modified_base 14: mod_base = OTHER; note = 2'-O-methyluridine-3'-phosphate
  modified_base 15: mod_base = OTHER; note = 2'-O-methylcytidine-3'-phosphate
  modified_base 16: mod_base = OTHER; note = 2'-O-methylguanosine-3'-phosphate
  modified_base 17: mod_base = OTHER; note = 2'-O-methyladenosine-3'-phosphate
  modified_base 18: mod_base = OTHER; note = 2'-O-methylguanosine-3'-phosphate
  modified_base 19: mod_base = OTHER; note = 2'-O-methyladenosine-3'-phosphate
  modified_base 20: mod_base = OTHER; note = 2'-O-methyluridine-3'-phosphate
  modified_base 21: mod_base = OTHER; note 2'-O-methyladenosine-3'-phosphate-N-[tris(GalNAc-alkyl)-ami dodecanoyl)]-4-hydroxyprolinol (Hyp-(GalNAc-alkyl)3)
gttcaagatgtcctcgagata

SEQ ID NO: 2423 - RNA, 23 nt, synthetic construct
  source 1..23: mol_type = other RNA
  modified_base 1: mod_base = OTHER; note = 2'-O-methyluridine-3'-phosphorothioate
  modified_base 2: mod_base = OTHER; note = 2'-fluoroadenosine-3'-phosphorothioate
  modified_base 3: mod_base = OTHER; note = 2'-O-methyluridine-3'-phosphate
  modified_base 4: mod_base = OTHER; note = 2'-O-methylcytidine-3'-phosphate
  modified_base 5: mod_base = OTHER; note = 2'-O-methyluridine-3'-phosphate
  modified_base 6: mod_base = OTHER; note = 2'-fluorocytidine-3'-phosphate
  modified_base 7: mod_base = OTHER; note = 2'-O-methylguanosine-3'-phosphate
  modified_base 8: mod_base = OTHER; note = 2'-fluoroadenosine-3'-phosphate
  modified_base 9: mod_base = OTHER; note = 2'-fluoroguanosine-3'-phosphate
  modified_base 10: mod_base = OTHER; note = 2'-O-methylguanosine-3'-phosphate
  modified_base 11: mod_base = OTHER; note = 2'-O-methyladenosine-3'-phosphate
  modified_base 12: mod_base = OTHER; note = 2'-O-methylcytidine-3'-phosphate
  modified_base 13: mod_base = OTHER; note = 2'-O-methyladenosine-3'-phosphate
  modified_base 14: mod_base = OTHER; note = 2'-fluorouridine-3'-phosphate
  modified_base 15: mod_base = OTHER; note = 2'-O-methylcytidine-3'-phosphate
  modified_base 16: mod_base = OTHER; note = 2'-fluorouridine-3'-phosphate
  modified_base 17: mod_base = OTHER; note = 2'-O-methyluridine-3'-phosphate
  modified_base 18: mod_base = OTHER; note = 2'-O-methylguanosine-3'-phosphate
  modified_base 19: mod_base = OTHER; note = 2'-O-methyladenosine-3'-phosphate
  modified_base 20: mod_base = OTHER; note = 2'-O-methyladenosine-3'-phosphate
  modified_base 21: mod_base = OTHER; note = 2'-O-methylcytidine-3'- phosphorothioate
  modified_base 22: mod_base = OTHER; note = 2'-O-methyladenosine-3'- phosphorothioate
  modified_base 23: mod_base = OTHER; note = 2'-O-methylcytidine-3'-phosphate
tatctcgaggacatcttgaacac

SEQ ID NO: 2424 - RNA, 21 nt, synthetic construct
  source 1..21: mol_type = other RNA
  modified_base 1: mod_base = OTHER; note = 2'-O-methyluridine-3'-phosphorothioate
  modified_base 2: mod_base = OTHER; note = 2'-O-methylguanosine-3'- phosphorothioate
  modified_base 3: mod_base = OTHER; note = 2'-O-methyluridine-3'-phosphate
  modified_base 4: mod_base = OTHER; note = 2'-O-methyluridine-3'-phosphate
  modified_base 5: mod_base = OTHER; note = 2'-O-methylcytidine-3'-phosphate
  modified_base 6: mod_base = OTHER; note = 2'-O-methyladenosine-3'-phosphate
  modified_base 7: mod_base = OTHER; note = 2'-fluoroadenosine-3'-phosphate
  modified_base 8: mod_base = OTHER; note = 2'-O-methylguanosine-3'-phosphate
  modified_base 9: mod_base = OTHER; note = 2'-fluoroadenosine-3'-phosphate
  modified_base 10: mod_base = OTHER; note = 2'-fluorouridine-3'-phosphate
  modified_base 11: mod_base = OTHER; note = 2'-fluoroguanosine-3'-phosphate
  modified_base 12: mod_base = OTHER; note = 2'-O-methyluridine-3'-phosphate
  modified_base 13: mod_base = OTHER; note = 2'-O-methylcytidine-3'-phosphate
  modified_base 14: mod_base = OTHER; note = 2'-O-methylcytidine-3'-phosphate
  modified_base 15: mod_base = OTHER; note = 2'-O-methyluridine-3'-phosphate
  modified_base 16: mod_base = OTHER; note = 2'-O-methylcytidine-3'-phosphate
  modified_base 17: mod_base = OTHER; note = 2'-O-methylguanosine-3'-phosphate
  modified_base 18: mod_base = OTHER; note = 2'-O-methyladenosine-3'-phosphate
  modified_base 19: mod_base = OTHER; note = 2'-O-methylguanosine-3'-phosphate
  modified_base 20: mod_base = OTHER; note = 2'-O-methyladenosine-3'-phosphate
  modified_base 21: mod_base = OTHER; note 2'-O-methyluridine-3'-phosphate-N-[tris(GalNAc-alkyl)-amido decanoyl)]-4-hydroxyprolinol (Hyp-(GalNAc-alkyl)3)
tgttcaagatgtcctcgagat

SEQ ID NO: 2425 - RNA, 23 nt, synthetic construct
  source 1..23: mol_type = other RNA
  modified_base 1: mod_base = OTHER; note = 2'-O-methyladenosine-3'- phosphorothioate
  modified_base 2: mod_base = OTHER; note = 2'-fluorouridine -3'-phosphorothioate
  modified_base 3: mod_base = OTHER; note = 2'-O-methylcytidine-3'-phosphate
  modified_base 4: mod_base = OTHER; note = 2'-O-methyluridine-3'-phosphate
  modified_base 5: mod_base = OTHER; note = 2'-O-methylcytidine-3'-phosphate
  modified_base 6: mod_base = OTHER; note = 2'-fluoroguanosine-3'-phosphate
  modified_base 7: mod_base = OTHER; note = 2'-O-methyladenosine-3'-phosphate
  modified_base 8: mod_base = OTHER; note = 2'-fluoroguanosine-3'-phosphate
  modified_base 9: mod_base = OTHER; note = 2'-fluoroguanosine-3'-phosphate
  modified_base 10: mod_base = OTHER; note = 2'-O-methyladenosine-3'-phosphate
  modified_base 11: mod_base = OTHER; note = 2'-O-methylcytidine-3'-phosphate
  modified_base 12: mod_base = OTHER; note = 2'-O-methyladenosine-3'-phosphate
  modified_base 13: mod_base = OTHER; note = 2'-O-methyluridine-3'-phosphate
  modified_base 14: mod_base = OTHER; note = 2'-fluorocytidine-3'-phosphate
  modified_base 15: mod_base = OTHER; note = 2'-O-methyluridine-3'-phosphate
  modified_base 16: mod_base = OTHER; note = 2'-fluorouridine-3'-phosphate
  modified_base 17: mod_base = OTHER; note = 2'-O-methylguanosine-3'-phosphate
  modified_base 18: mod_base = OTHER; note = 2'-O-methyladenosine-3'-phosphate
  modified_base 19: mod_base = OTHER; note = 2'-O-methyladenosine-3'-phosphate
  modified_base 20: mod_base = OTHER; note = 2'-O-methylcytidine-3'-phosphate
  modified_base 21: mod_base = OTHER; note = 2'-O-methyladenosine-3'- phosphorothioate
  modified_base 22: mod_base = OTHER; note = 2'-O-methylcytidine-3'- phosphorothioate
  modified_base 23: mod_base = OTHER; note = 2'-O-methylcytidine-3'-phosphate
atctcgaggacatcttgaacacc

SEQ ID NO: 2426 - RNA, 21 nt, synthetic construct
  source 1..21: mol_type = other RNA
  modified_base 1: mod_base = OTHER; note = 2'-O-methylguanosine-3'- phosphorothioate
  modified_base 2: mod_base = OTHER; note = 2'-O-methyladenosine-3'- phosphorothioate
  modified_base 3: mod_base = OTHER; note = 2'-O-methylguanosine-3'-phosphate
  modified_base 4: mod_base = OTHER; note = 2'-O-methyladenosine-3'-phosphate
  modified_base 5: mod_base = OTHER; note = 2'-O-methyladenosine-3'-phosphate
  modified_base 6: mod_base = OTHER; note = 2'-O-methyladenosine-3'-phosphate
  modified_base 7: mod_base = OTHER; note = 2'-fluoroguanosine-3'-phosphate
  modified_base 8: mod_base = OTHER; note = 2'-O-methylguanosine-3'-phosphate
  modified_base 9: mod_base = OTHER; note = 2'-fluorouridine-3'-phosphate
  modified_base 10: mod_base = OTHER; note = 2'-fluoroguanosine-3'-phosphate
  modified_base 11: mod_base = OTHER; note = 2'-fluorouridine-3'-phosphate
  modified_base 12: mod_base = OTHER; note = 2'-O-methyluridine-3'-phosphate
  modified_base 13: mod_base = OTHER; note = 2'-O-methylcytidine-3'-phosphate
  modified_base 14: mod_base = OTHER; note = 2'-O-methyladenosine-3'-phosphate
  modified_base 15: mod_base = OTHER; note = 2'-O-methyladenosine-3'-phosphate
  modified_base 16: mod_base = OTHER; note = 2'-O-methylguanosine-3'-phosphate
  modified_base 17: mod_base = OTHER; note = 2'-O-methyladenosine-3'-phosphate
  modified_base 18: mod_base = OTHER; note = 2'-O-methyluridine-3'-phosphate
  modified_base 19: mod_base = OTHER; note = 2'-O-methylguanosine-3'-phosphate
  modified_base 20: mod_base = OTHER; note = 2'-O-methyluridine-3'-phosphate
  modified_base 21: mod_base = OTHER; note 2'-O-methylcytidine-3'-phosphate-N-[tris(GalNAc-alkyl)-amid odecanoyl)]-4-hydroxyprolinol (Hyp-(GalNAc-alkyl)3)
gagaaaggtgttcaagatgtc

SEQ ID NO: 2427 - RNA, 23 nt, synthetic construct
  source 1..23: mol_type = other RNA
  modified_base 1: mod_base = OTHER; note = 2'-O-methylguanosine-3'- phosphorothioate
  modified_base 2: mod_base = OTHER; note = 2'-fluoroadenosine-3'-phosphorothioate
  modified_base 3: mod_base = OTHER; note = 2'-O-methylcytidine-3'-phosphate
  modified_base 4: mod_base = OTHER; note = 2'-O-methyladenosine-3'-phosphate
  modified_base 5: mod_base = OTHER; note = 2'-O-methyluridine-3'-phosphate
  modified_base 6: mod_base = OTHER; note = 2'-fluorocytidine-3'-phosphate
  modified_base 7: mod_base = OTHER; note = 2'-O-methyluridine-3'-phosphate
  modified_base 8: mod_base = OTHER; note = 2'-fluorouridine-3'-phosphate
  modified_base 9: mod_base = OTHER; note = 2'-fluoroguanosine-3'-phosphate
  modified_base 10: mod_base = OTHER; note = 2'-O-methyladenosine-3'-phosphate
  modified_base 11: mod_base = OTHER; note = 2'-O-methyladenosine-3'-phosphate
  modified_base 12: mod_base = OTHER; note = 2'-O-methylcytidine-3'-phosphate
  modified_base 13: mod_base = OTHER; note = 2'-O-methyladenosine-3'-phosphate
  modified_base 14: mod_base = OTHER; note = 2'-fluorocytidine-3'-phosphate
  modified_base 15: mod_base = OTHER; note = 2'-O-methylcytidine-3'-phosphate
  modified_base 16: mod_base = OTHER; note = 2'-fluorouridine-3'-phosphate
  modified_base 17: mod_base = OTHER; note = 2'-O-methyluridine-3'-phosphate
  modified_base 18: mod_base = OTHER; note = 2'-O-methyluridine-3'-phosphate
  modified_base 19: mod_base = OTHER; note = 2'-O-methylcytidine-3'-phosphate
  modified_base 20: mod_base = OTHER; note = 2'-O-methyluridine-3'-phosphate
  modified_base 21: mod_base = OTHER; note = 2'-O-methylcytidine-3'- phosphorothioate
  modified_base 22: mod_base = OTHER; note = 2'-O-methylcytidine-3'- phosphorothioate
  modified_base 23: mod_base = OTHER; note = 2'-O-methylcytidine-3'-phosphate
gacatcttgaacacctttctccc

SEQ ID NO: 2428 - RNA, 21 nt, synthetic construct
  source 1..21: mol_type = other RNA
  modified_base 1: mod_base = OTHER; note = 2'-O-methyladenosine-3'- phosphorothioate
  modified_base 2: mod_base = OTHER; note = 2'-O-methylguanosine-3'- phosphorothioate
  modified_base 3: mod_base = OTHER; note = 2'-O-methyladenosine-3'-phosphate
  modified_base 4: mod_base = OTHER; note = 2'-O-methyladenosine-3'-phosphate
  modified_base 5: mod_base = OTHER; note = 2'-O-methyladenosine-3'-phosphate
  modified_base 6: mod_base = OTHER; note = 2'-O-methylguanosine-3'-phosphate
  modified_base 7: mod_base = OTHER; note = 2'-fluoroguanosine-3'-phosphate
  modified_base 8: mod_base = OTHER; note = 2'-O-methyluridine-3'-phosphate
  modified_base 9: mod_base = OTHER; note = 2'-fluoroguanosine-3'-phosphate
  modified_base 10: mod_base = OTHER; note = 2'-fluorouridine-3'-phosphate
  modified_base 11: mod_base = OTHER; note = 2'-fluorouridine-3'-phosphate
  modified_base 12: mod_base = OTHER; note = 2'-O-methylcytidine-3'-phosphate
  modified_base 13: mod_base = OTHER; note = 2'-O-methyladenosine-3'-phosphate
  modified_base 14: mod_base = OTHER; note = 2'-O-methyladenosine-3'-phosphate
  modified_base 15: mod_base = OTHER; note = 2'-O-methylguanosine-3'-phosphate
  modified_base 16: mod_base = OTHER; note = 2'-O-methyladenosine-3'-phosphate
  modified_base 17: mod_base = OTHER; note = 2'-O-methyluridine-3'-phosphate
  modified_base 18: mod_base = OTHER; note = 2'-O-methylguanosine-3'-phosphate
  modified_base 19: mod_base = OTHER; note = 2'-O-methyluridine-3'-phosphate
  modified_base 20: mod_base = OTHER; note = 2'-O-methylcytidine-3'-phosphate
  modified_base 21: mod_base = OTHER; note 2'-O-methylcytidine-3'-phosphate-N-[tris(GalNAc-alkyl)-amid odecanoyl)]-4-hydroxyprolinol (Hyp-(GalNAc-alkyl)3)
agaaaggtgttcaagatgtcc

SEQ ID NO: 2429 - RNA, 23 nt, synthetic construct
  source 1..23: mol_type = other RNA
  modified_base 1: mod_base = OTHER; note = 2'-O-methylguanosine-3'- phosphorothioate
  modified_base 2: mod_base = OTHER; note = 2'-fluoroguanosine-3'-phosphorothioate
  modified_base 3: mod_base = OTHER; note = 2'-O-methyladenosine-3'-phosphate
  modified_base 4: mod_base = OTHER; note = 2'-O-methylcytidine-3'-phosphate
  modified_base 5: mod_base = OTHER; note = 2'-O-methyladenosine-3'-phosphate
  modified_base 6: mod_base = OTHER; note = 2'-fluorouridine-3'-phosphate
  modified_base 7: mod_base = OTHER; note = 2'-O-methylcytidine-3'-phosphate
  modified_base 8: mod_base = OTHER; note = 2'-fluorouridine-3'-phosphate
  modified_base 9: mod_base = OTHER; note = 2'-fluorouridine-3'-phosphate
  modified_base 10: mod_base = OTHER; note = 2'-O-methylguanosine-3'-phosphate
  modified_base 11: mod_base = OTHER; note = 2'-O-methyladenosine-3'-phosphate
  modified_base 12: mod_base = OTHER; note = 2'-O-methyladenosine-3'-phosphate
  modified_base 13: mod_base = OTHER; note = 2'-O-methylcytidine-3'-phosphate
  modified_base 14: mod_base = OTHER; note = 2'-fluoroadenosine-3'-phosphate
  modified_base 15: mod_base = OTHER; note = 2'-O-methylcytidine-3'-phosphate
  modified_base 16: mod_base = OTHER; note = 2'-fluorocytidine-3'-phosphate
  modified_base 17: mod_base = OTHER; note = 2'-O-methyluridine-3'-phosphate
  modified_base 18: mod_base = OTHER; note = 2'-O-methyluridine-3'-phosphate
  modified_base 19: mod_base = OTHER; note = 2'-O-methyluridine-3'-phosphate
  modified_base 20: mod_base = OTHER; note = 2'-O-methylcytidine-3'-phosphate
  modified_base 21: mod_base = OTHER; note = 2'-O-methyluridine-3'-phosphorothioate
  modified_base 22: mod_base = OTHER; note = 2'-O-methylcytidine-3'- phosphorothioate
  modified_base 23: mod_base = OTHER; note = 2'-O-methylcytidine-3'-phosphate
ggacatcttgaacacctttctcc

SEQ ID NO: 2430 - RNA, 21 nt, synthetic construct
  source 1..21: mol_type = other RNA
  modified_base 1: mod_base = OTHER; note = 2'-O-methylguanosine-3'- phosphorothioate
  modified_base 2: mod_base = OTHER; note = 2'-O-methylguanosine-3'- phosphorothioate
  modified_base 3: mod_base = OTHER; note = 2'-O-methylguanosine-3'-phosphate
  modified_base 4: mod_base = OTHER; note = 2'-O-methylguanosine-3'-phosphate
  modified_base 5: mod_base = OTHER; note = 2'-O-methylguanosine-3'-phosphate
  modified_base 6: mod_base = OTHER; note = 2'-O-methyladenosine-3'-phosphate
  modified_base 7: mod_base = OTHER; note = 2'-fluoroguanosine-3'-phosphate
  modified_base 8: mod_base = OTHER; note = 2'-O-methyladenosine-3'-phosphate
  modified_base 9: mod_base = OTHER; note = 2'-fluoroadenosine-3'-phosphate
  modified_base 10: mod_base = OTHER; note = 2'-fluoroadenosine-3'-phosphate
  modified_base 11: mod_base = OTHER; note = 2'-fluoroguanosine-3'-phosphate
  modified_base 12: mod_base = OTHER; note = 2'-O-methylguanosine-3'-phosphate
  modified_base 13: mod_base = OTHER; note = 2'-O-methyluridine-3'-phosphate
  modified_base 14: mod_base = OTHER; note = 2'-O-methylguanosine-3'-phosphate
  modified_base 15: mod_base = OTHER; note = 2'-O-methyluridine-3'-phosphate
  modified_base 16: mod_base = OTHER; note = 2'-O-methyluridine-3'-phosphate
  modified_base 17: mod_base = OTHER; note = 2'-O-methylcytidine-3'-phosphate
  modified_base 18: mod_base = OTHER; note = 2'-O-methyladenosine-3'-phosphate
  modified_base 19: mod_base = OTHER; note = 2'-O-methyladenosine-3'-phosphate
  modified_base 20: mod_base = OTHER; note = 2'-O-methylguanosine-3'-phosphate
  modified_base 21: mod_base = OTHER; note 2'-O-methyladenosine-3'-phosphate-N-[tris(GalNAc-alkyl)-ami dodecanoyl)]-4-hydroxyprolinol (Hyp-(GalNAc-alkyl)3)
gggggagaaaggtgttcaaga

SEQ ID NO: 2431 - RNA, 23 nt, synthetic construct
  source 1..23: mol_type = other RNA
  modified_base 1: mod_base = OTHER; note = 2'-O-methyluridine-3'-phosphorothioate
  modified_base 2: mod_base = OTHER; note = 2'-fluorocytidine-3'-phosphorothioate
  modified_base 3: mod_base = OTHER; note = 2'-O-methyluridine-3'-phosphate
  modified_base 4: mod_base = OTHER; note = 2'-O-methyluridine-3'-phosphate
  modified_base 5: mod_base = OTHER; note = 2'-O-methylguanosine-3'-phosphate
  modified_base 6: mod_base = OTHER; note = 2'-fluoroadenosine-3'-phosphate
  modified_base 7: mod_base = OTHER; note = 2'-O-methyladenosine-3'-phosphate
  modified_base 8: mod_base = OTHER; note = 2'-fluorocytidine-3'-phosphate
  modified_base 9: mod_base = OTHER; note = 2'-fluoroadenosine-3'-phosphate
  modified_base 10: mod_base = OTHER; note = 2'-O-methylcytidine-3'-phosphate
  modified_base 11: mod_base = OTHER; note = 2'-O-methylcytidine-3'-phosphate
  modified_base 12: mod_base = OTHER; note = 2'-O-methyluridine-3'-phosphate
  modified_base 13: mod_base = OTHER; note = 2'-O-methyluridine-3'-phosphate
  modified_base 14: mod_base = OTHER; note = 2'-fluorouridine-3'-phosphate
  modified_base 15: mod_base = OTHER; note = 2'-O-methylcytidine-3'-phosphate
  modified_base 16: mod_base = OTHER; note = 2'-fluorouridine-3'-phosphate
  modified_base 17: mod_base = OTHER; note = 2'-O-methylcytidine-3'-phosphate
  modified_base 18: mod_base = OTHER; note = 2'-O-methylcytidine-3'-phosphate
  modified_base 19: mod_base = OTHER; note = 2'-O-methylcytidine-3'-phosphate
  modified_base 20: mod_base = OTHER; note = 2'-O-methylcytidine-3'-phosphate
  modified_base 21: mod_base = OTHER; note = 2'-O-methylcytidine-3'- phosphorothioate
  modified_base 22: mod_base = OTHER; note = 2'-O-methyluridine-3'-phosphorothioate
  modified_base 23: mod_base = OTHER; note = 2'-O-methylguanosine-3'-phosphate
tcttgaacacctttctccccctg

SEQ ID NO: 2432 - RNA, 21 nt, synthetic construct
  source 1..21: mol_type = other RNA
  modified_base 1: mod_base = OTHER; note = 2'-O-methyladenosine-3'- phosphorothioate
  modified_base 2: mod_base = OTHER; note = 2'-O-methylguanosine-3'- phosphorothioate
  modified_base 3: mod_base = OTHER; note = 2'-O-methylguanosine-3'-phosphate
  modified_base 4: mod_base = OTHER; note = 2'-O-methylguanosine-3'-phosphate
  modified_base 5: mod_base = OTHER; note = 2'-O-methylguanosine-3'-phosphate
  modified_base 6: mod_base = OTHER; note = 2'-O-methylguanosine-3'-phosphate
  modified_base 7: mod_base = OTHER; note = 2'-fluoroadenosine-3'-phosphate
  modified_base 8: mod_base = OTHER; note = 2'-O-methylguanosine-3'-phosphate
  modified_base 9: mod_base = OTHER; note = 2'-fluoroadenosine-3'-phosphate
  modified_base 10: mod_base = OTHER; note = 2'-fluoroadenosine-3'-phosphate
  modified_base 11: mod_base = OTHER; note = 2'-fluoroadenosine-3'-phosphate
  modified_base 12: mod_base = OTHER; note = 2'-O-methylguanosine-3'-phosphate
  modified_base 13: mod_base = OTHER; note = 2'-O-methylguanosine-3'-phosphate
  modified_base 14: mod_base = OTHER; note = 2'-O-methyluridine-3'-phosphate
  modified_base 15: mod_base = OTHER; note = 2'-O-methylguanosine-3'-phosphate
  modified_base 16: mod_base = OTHER; note = 2'-O-methyluridine-3'-phosphate
  modified_base 17: mod_base = OTHER; note = 2'-O-methyluridine-3'-phosphate
  modified_base 18: mod_base = OTHER; note = 2'-O-methylcytidine-3'-phosphate
  modified_base 19: mod_base = OTHER; note = 2'-O-methyladenosine-3'-phosphate
  modified_base 20: mod_base = OTHER; note = 2'-O-methyladenosine-3'-phosphate
  modified_base 21: mod_base = OTHER; note 2'-O-methylguanosine-3'-phosphate-N-[tris(GalNAc-alkyl)-ami dodecanoyl)]-4-hydroxyprolinol (Hyp-(GalNAc-alkyl)3)
agggggagaaaggtgttcaag

SEQ ID NO: 2433 - RNA, 23 nt, synthetic construct
  source 1..23: mol_type = other RNA
  modified_base 1: mod_base = OTHER; note = 2'-O-methylcytidine-3'- phosphorothioate
  modified_base 2: mod_base = OTHER; note = 2'-fluorouridine -3'-phosphorothioate
  modified_base 3: mod_base = OTHER; note = 2'-O-methyluridine-3'-phosphate
  modified_base 4: mod_base = OTHER; note = 2'-O-methylguanosine-3'-phosphate
  modified_base 5: mod_base = OTHER; note = 2'-O-methyladenosine-3'-phosphate
  modified_base 6: mod_base = OTHER; note = 2'-fluoroadenosine-3'-phosphate
  modified_base 7: mod_base = OTHER; note = 2'-O-methylcytidine-3'-phosphate
  modified_base 8: mod_base = OTHER; note = 2'-fluoroadenosine-3'-phosphate
  modified_base 9: mod_base = OTHER; note = 2'-fluorocytidine-3'-phosphate
  modified_base 10: mod_base = OTHER; note = 2'-O-methylcytidine-3'-phosphate
  modified_base 11: mod_base = OTHER; note = 2'-O-methyluridine-3'-phosphate
  modified_base 12: mod_base = OTHER; note = 2'-O-methyluridine-3'-phosphate
  modified_base 13: mod_base = OTHER; note = 2'-O-methyluridine-3'-phosphate
  modified_base 14: mod_base = OTHER; note = 2'-fluorocytidine-3'-phosphate
  modified_base 15: mod_base = OTHER; note = 2'-O-methyluridine-3'-phosphate
  modified_base 16: mod_base = OTHER; note = 2'-fluorocytidine-3'-phosphate
  modified_base 17: mod_base = OTHER; note = 2'-O-methylcytidine-3'-phosphate
  modified_base 18: mod_base = OTHER; note = 2'-O-methylcytidine-3'-phosphate
  modified_base 19: mod_base = OTHER; note = 2'-O-methylcytidine-3'-phosphate
  modified_base 20: mod_base = OTHER; note = 2'-O-methylcytidine-3'-phosphate
  modified_base 21: mod_base = OTHER; note = 2'-O-methyluridine-3'-phosphorothioate
  modified_base 22: mod_base = OTHER; note = 2'-O-methylguanosine-3'- phosphorothioate
  modified_base 23: mod_base = OTHER; note = 2'-O-methylguanosine-3'-phosphate
cttgaacacctttctccccctgg

SEQ ID NO: 2434 - RNA, 21 nt, synthetic construct
  source 1..21: mol_type = other RNA
  modified_base 1: mod_base = OTHER; note = 2'-O-methylguanosine-3'- phosphorothioate
  modified_base 2: mod_base = OTHER; note = 2'-O-methylcytidine-3'- phosphorothioate
  modified_base 3: mod_base = OTHER; note = 2'-O-methyluridine-3'-phosphate
  modified_base 4: mod_base = OTHER; note = 2'-O-methylguanosine-3'-phosphate
  modified_base 5: mod_base = OTHER; note = 2'-O-methylguanosine-3'-phosphate
  modified_base 6: mod_base = OTHER; note = 2'-O-methylguanosine-3'-phosphate
  modified_base 7: mod_base = OTHER; note = 2'-fluoroadenosine-3'-phosphate
  modified_base 8: mod_base = OTHER; note = 2'-O-methyladenosine-3'-phosphate
  modified_base 9: mod_base = OTHER; note = 2'-fluoroguanosine-3'-phosphate
  modified_base 10: mod_base = OTHER; note = 2'-fluoroadenosine-3'-phosphate
  modified_base 11: mod_base = OTHER; note = 2'-fluorouridine-3'-phosphate
  modified_base 12: mod_base = OTHER; note = 2'-O-methyladenosine-3'-phosphate
  modified_base 13: mod_base = OTHER; note = 2'-O-methyluridine-3'-phosphate
  modified_base 14: mod_base = OTHER; note = 2'-O-methylcytidine-3'-phosphate
  modified_base 15: mod_base = OTHER; note = 2'-O-methyladenosine-3'-phosphate
  modified_base 16: mod_base = OTHER; note = 2'-O-methyladenosine-3'-phosphate
  modified_base 17: mod_base = OTHER; note = 2'-O-methyladenosine-3'-phosphate
  modified_base 18: mod_base = OTHER; note = 2'-O-methyluridine-3'-phosphate
  modified_base 19: mod_base = OTHER; note = 2'-O-methylguanosine-3'-phosphate
  modified_base 20: mod_base = OTHER; note = 2'-O-methylguanosine-3'-phosphate
  modified_base 21: mod_base = OTHER; note 2'-O-methylcytidine-3'-phosphate-N-[tris(GalNAc-alkyl)-amid odecanoyl)]-4-hydroxyprolinol (Hyp-(GalNAc-alkyl)3)
gctgggaagatatcaaatggc

SEQ ID NO: 2435 - RNA, 23 nt, synthetic construct
  source 1..23: mol_type = other RNA
  modified_base 1: mod_base = OTHER; note = 2'-O-methylguanosine-3'- phosphorothioate
  modified_base 2: mod_base = OTHER; note = 2'-fluorocytidine-3'-phosphorothioate
  modified_base 3: mod_base = OTHER; note = 2'-O-methylcytidine-3'-phosphate
  modified_base 4: mod_base = OTHER; note = 2'-O-methyladenosine-3'-phosphate
  modified_base 5: mod_base = OTHER; note = 2'-O-methyluridine-3'-phosphate
  modified_base 6: mod_base = OTHER; note = 2'-fluorouridine-3'-phosphate
  modified_base 7: mod_base = OTHER; note = 2'-O-methyluridine-3'-phosphate
  modified_base 8: mod_base = OTHER; note = 2'-fluoroguanosine-3'-phosphate
  modified_base 9: mod_base = OTHER; note = 2'-fluoroadenosine-3'-phosphate
  modified_base 10: mod_base = OTHER; note = 2'-O-methyluridine-3'-phosphate
  modified_base 11: mod_base = OTHER; note = 2'-O-methyladenosine-3'-phosphate
  modified_base 12: mod_base = OTHER; note = 2'-O-methyluridine-3'-phosphate
  modified_base 13: mod_base = OTHER; note = 2'-O-methylcytidine-3'-phosphate
  modified_base 14: mod_base = OTHER; note = 2'-fluorouridine-3'-phosphate
  modified_base 15: mod_base = OTHER; note = 2'-O-methyluridine-3'-phosphate
  modified_base 16: mod_base = OTHER; note = 2'-fluorocytidine-3'-phosphate
  modified_base 17: mod_base = OTHER; note = 2'-O-methylcytidine-3'-phosphate
  modified_base 18: mod_base = OTHER; note = 2'-O-methylcytidine-3'-phosphate
  modified_base 19: mod_base = OTHER; note = 2'-O-methyladenosine-3'-phosphate
  modified_base 20: mod_base = OTHER; note = 2'-O-methylguanosine-3'-phosphate
  modified_base 21: mod_base = OTHER; note = 2'-O-methylcytidine-3'- phosphorothioate
  modified_base 22: mod_base = OTHER; note = 2'-O-methyluridine-3'-phosphorothioate
  modified_base 23: mod_base = OTHER; note = 2'-O-methylguanosine-3'-phosphate
gccatttgatatcttcccagctg

SEQ ID NO: 2436 - RNA, 21 nt, synthetic construct
  source 1..21: mol_type = other RNA
  modified_base 1: mod_base = OTHER; note = 2'-O-methylcytidine-3'- phosphorothioate
  modified_base 2: mod_base = OTHER; note = 2'-O-methyluridine-3'-phosphorothioate
  modified_base 3: mod_base = OTHER; note = 2'-O-methylguanosine-3'-phosphate
  modified_base 4: mod_base = OTHER; note = 2'-O-methylguanosine-3'-phosphate
  modified_base 5: mod_base = OTHER; note = 2'-O-methylguanosine-3'-phosphate
  modified_base 6: mod_base = OTHER; note = 2'-O-methyladenosine-3'-phosphate
  modified_base 7: mod_base = OTHER; note = 2'-fluoroadenosine-3'-phosphate
  modified_base 8: mod_base = OTHER; note = 2'-O-methylguanosine-3'-phosphate
  modified_base 9: mod_base = OTHER; note = 2'-fluoroadenosine-3'-phosphate
  modified_base 10: mod_base = OTHER; note = 2'-fluorouridine-3'-phosphate
  modified_base 11: mod_base = OTHER; note = 2'-fluoroadenosine-3'-phosphate
  modified_base 12: mod_base = OTHER; note = 2'-O-methyluridine-3'-phosphate
  modified_base 13: mod_base = OTHER; note = 2'-O-methylcytidine-3'-phosphate
  modified_base 14: mod_base = OTHER; note = 2'-O-methyladenosine-3'-phosphate
  modified_base 15: mod_base = OTHER; note = 2'-O-methyladenosine-3'-phosphate
  modified_base 16: mod_base = OTHER; note = 2'-O-methyladenosine-3'-phosphate
  modified_base 17: mod_base = OTHER; note = 2'-O-methyluridine-3'-phosphate
  modified_base 18: mod_base = OTHER; note = 2'-O-methylguanosine-3'-phosphate
  modified_base 19: mod_base = OTHER; note = 2'-O-methylguanosine-3'-phosphate
  modified_base 20: mod_base = OTHER; note = 2'-O-methylcytidine-3'-phosphate
  modified_base 21: mod_base = OTHER; note 2'-O-methyluridine-3'-phosphate-N-[tris(GalNAc-alkyl)-amido decanoyl)]-4-hydroxyprolinol (Hyp-(GalNAc-alkyl)3)
ctgggaagatatcaaatggct

SEQ ID NO: 2437 - RNA, 23 nt, synthetic construct
  source 1..23: mol_type = other RNA
  modified_base 1: mod_base = OTHER; note = 2'-O-methyladenosine-3'- phosphorothioate
  modified_base 2: mod_base = OTHER; note = 2'-fluoroguanosine-3'-phosphorothioate
  modified_base 3: mod_base = OTHER; note = 2'-O-methylcytidine-3'-phosphate
  modified_base 4: mod_base = OTHER; note = 2'-O-methylcytidine-3'-phosphate
  modified_base 5: mod_base = OTHER; note = 2'-O-methyladenosine-3'-phosphate
  modified_base 6: mod_base = OTHER; note = 2'-fluorouridine-3'-phosphate
  modified_base 7: mod_base = OTHER; note = 2'-O-methyluridine-3'-phosphate
  modified_base 8: mod_base = OTHER; note = 2'-fluorouridine-3'-phosphate
  modified_base 9: mod_base = OTHER; note = 2'-fluoroguanosine-3'-phosphate
  modified_base 10: mod_base = OTHER; note = 2'-O-methyladenosine-3'-phosphate
  modified_base 11: mod_base = OTHER; note = 2'-O-methyluridine-3'-phosphate
  modified_base 12: mod_base = OTHER; note = 2'-O-methyladenosine-3'-phosphate
  modified_base 13: mod_base = OTHER; note = 2'-O-methyluridine-3'-phosphate
  modified_base 14: mod_base = OTHER; note = 2'-fluorocytidine-3'-phosphate
  modified_base 15: mod_base = OTHER; note = 2'-O-methyluridine-3'-phosphate
  modified_base 16: mod_base = OTHER; note = 2'-fluorouridine-3'-phosphate
  modified_base 17: mod_base = OTHER; note = 2'-O-methylcytidine-3'-phosphate
  modified_base 18: mod_base = OTHER; note = 2'-O-methylcytidine-3'-phosphate
  modified_base 19: mod_base = OTHER; note = 2'-O-methylcytidine-3'-phosphate
  modified_base 20: mod_base = OTHER; note = 2'-O-methyladenosine-3'-phosphate
  modified_base 21: mod_base = OTHER; note = 2'-O-methylguanosine-3'- phosphorothioate
  modified_base 22: mod_base = OTHER; note = 2'-O-methylcytidine-3'- phosphorothioate
  modified_base 23: mod_base = OTHER; note = 2'-O-methyluridine-3'-phosphate
agccatttgatatcttcccagct

SEQ ID NO: 2438 - RNA, 21 nt, synthetic construct
  source 1..21: mol_type = other RNA
  modified_base 1: mod_base = OTHER; note = 2'-O-methyladenosine-3'- phosphorothioate
  modified_base 2: mod_base = OTHER; note = 2'-O-methyluridine-3'-phosphorothioate
  modified_base 3: mod_base = OTHER; note = 2'-O-methylcytidine-3'-phosphate
  modified_base 4: mod_base = OTHER; note = 2'-O-methyladenosine-3'-phosphate
  modified_base 5: mod_base = OTHER; note = 2'-O-methylguanosine-3'-phosphate
  modified_base 6: mod_base = OTHER; note = 2'-O-methylcytidine-3'-phosphate
  modified_base 7: mod_base = OTHER; note = 2'-fluorouridine-3'-phosphate
  modified_base 8: mod_base = OTHER; note = 2'-O-methylguanosine-3'-phosphate
  modified_base 9: mod_base = OTHER; note = 2'-fluoroguanosine-3'-phosphate
  modified_base 10: mod_base = OTHER; note = 2'-fluoroguanosine-3'-phosphate
  modified_base 11: mod_base = OTHER; note = 2'-fluoroadenosine-3'-phosphate
  modified_base 12: mod_base = OTHER; note = 2'-O-methyladenosine-3'-phosphate
  modified_base 13: mod_base = OTHER; note = 2'-O-methylguanosine-3'-phosphate
  modified_base 14: mod_base = OTHER; note = 2'-O-methyladenosine-3'-phosphate
  modified_base 15: mod_base = OTHER; note = 2'-O-methyluridine-3'-phosphate
  modified_base 16: mod_base = OTHER; note = 2'-O-methyladenosine-3'-phosphate
  modified_base 17: mod_base = OTHER; note = 2'-O-methyluridine-3'-phosphate
  modified_base 18: mod_base = OTHER; note = 2'-O-methylcytidine-3'-phosphate
  modified_base 19: mod_base = OTHER; note = 2'-O-methyladenosine-3'-phosphate
  modified_base 20: mod_base = OTHER; note = 2'-O-methyladenosine-3'-phosphate
  modified_base 21: mod_base = OTHER; note 2'-O-methyladenosine-3'-phosphate-N-[tris(GalNAc-alkyl)-ami dodecanoyl)]-4-hydroxyprolinol (Hyp-(GalNAc-alkyl)3)
atcagctgggaagatatcaaa

SEQ ID NO: 2439 - RNA, 23 nt, synthetic construct
  source 1..23: mol_type = other RNA
  modified_base 1: mod_base = OTHER; note = 2'-O-methyluridine-3'-phosphorothioate
  modified_base 2: mod_base = OTHER; note = 2'-fluorouridine -3'-phosphorothioate
  modified_base 3: mod_base = OTHER; note = 2'-O-methyluridine-3'-phosphate
  modified_base 4: mod_base = OTHER; note = 2'-O-methylguanosine-3'-phosphate
  modified_base 5: mod_base = OTHER; note = 2'-O-methyladenosine-3'-phosphate
  modified_base 6: mod_base = OTHER; note = 2'-fluorouridine-3'-phosphate
  modified_base 7: mod_base = OTHER; note = 2'-O-methyladenosine-3'-phosphate
  modified_base 8: mod_base = OTHER; note = 2'-fluorouridine-3'-phosphate
  modified_base 9: mod_base = OTHER; note = 2'-fluorocytidine-3'-phosphate
  modified_base 10: mod_base = OTHER; note = 2'-O-methyluridine-3'-phosphate
  modified_base 11: mod_base = OTHER; note = 2'-O-methyluridine-3'-phosphate
  modified_base 12: mod_base = OTHER; note = 2'-O-methylcytidine-3'-phosphate
  modified_base 13: mod_base = OTHER; note = 2'-O-methylcytidine-3'-phosphate
  modified_base 14: mod_base = OTHER; note = 2'-fluorocytidine-3'-phosphate
  modified_base 15: mod_base = OTHER; note = 2'-O-methyladenosine-3'-phosphate
  modified_base 16: mod_base = OTHER; note = 2'-fluoroguanosine-3'-phosphate
  modified_base 17: mod_base = OTHER; note = 2'-O-methylcytidine-3'-phosphate
  modified_base 18: mod_base = OTHER; note = 2'-O-methyluridine-3'-phosphate
  modified_base 19: mod_base = OTHER; note = 2'-O-methylguanosine-3'-phosphate
  modified_base 20: mod_base = OTHER; note = 2'-O-methyladenosine-3'-phosphate
  modified_base 21: mod_base = OTHER; note = 2'-O-methyluridine-3'-phosphorothioate
  modified_base 22: mod_base = OTHER; note = 2'-O-methyladenosine-3'- phosphorothioate
  modified_base 23: mod_base = OTHER; note = 2'-O-methylguanosine-3'-phosphate
tttgatatcttcccagctgatag

SEQ ID NO: 2440 - RNA, 21 nt, synthetic construct
  source 1..21: mol_type = other RNA
  modified_base 1: mod_base = OTHER; note = 2'-O-methyluridine-3'-phosphorothioate
  modified_base 2: mod_base = OTHER; note = 2'-O-methyladenosine-3'- phosphorothioate
  modified_base 3: mod_base = OTHER; note = 2'-O-methyluridine-3'-phosphate
  modified_base 4: mod_base = OTHER; note = 2'-O-methylcytidine-3'-phosphate
  modified_base 5: mod_base = OTHER; note = 2'-O-methyladenosine-3'-phosphate
  modified_base 6: mod_base = OTHER; note = 2'-O-methylguanosine-3'-phosphate
  modified_base 7: mod_base = OTHER; note = 2'-fluorocytidine-3'-phosphate
  modified_base 8: mod_base = OTHER; note = 2'-O-methyluridine-3'-phosphate
  modified_base 9: mod_base = OTHER; note = 2'-fluoroguanosine-3'-phosphate
  modified_base 10: mod_base = OTHER; note = 2'-fluoroguanosine-3'-phosphate
  modified_base 11: mod_base = OTHER; note = 2'-fluoroguanosine-3'-phosphate
  modified_base 12: mod_base = OTHER; note = 2'-O-methyladenosine-3'-phosphate
  modified_base 13: mod_base = OTHER; note = 2'-O-methyladenosine-3'-phosphate
  modified_base 14: mod_base = OTHER; note = 2'-O-methylguanosine-3'-phosphate
  modified_base 15: mod_base = OTHER; note = 2'-O-methyladenosine-3'-phosphate
  modified_base 16: mod_base = OTHER; note = 2'-O-methyluridine-3'-phosphate
  modified_base 17: mod_base = OTHER; note = 2'-O-methyladenosine-3'-phosphate
  modified_base 18: mod_base = OTHER; note = 2'-O-methyluridine-3'-phosphate
  modified_base 19: mod_base = OTHER; note = 2'-O-methylcytidine-3'-phosphate
  modified_base 20: mod_base = OTHER; note = 2'-O-methyladenosine-3'-phosphate
  modified_base 21: mod_base = OTHER; note 2'-O-methyladenosine-3'-phosphate-N-[tris(GalNAc-alkyl)-ami dodecanoyl)]-4-hydroxyprolinol (Hyp-(GalNAc-alkyl)3)
tatcagctgggaagatatcaa

SEQ ID NO: 2441 - RNA, 23 nt, synthetic construct
  source 1..23: mol_type = other RNA
  modified_base 1: mod_base = OTHER; note = 2'-O-methyluridine-3'-phosphorothioate
  modified_base 2: mod_base = OTHER; note = 2'-fluorouridine -3'-phosphorothioate
  modified_base 3: mod_base = OTHER; note = 2'-O-methylguanosine-3'-phosphate
  modified_base 4: mod_base = OTHER; note = 2'-O-methyladenosine-3'-phosphate
  modified_base 5: mod_base = OTHER; note = 2'-O-methyluridine-3'-phosphate
  modified_base 6: mod_base = OTHER; note = 2'-fluoroadenosine-3'-phosphate
  modified_base 7: mod_base = OTHER; note = 2'-O-methyluridine-3'-phosphate
  modified_base 8: mod_base = OTHER; note = 2'-fluorocytidine-3'-phosphate
  modified_base 9: mod_base = OTHER; note = 2'-fluorouridine-3'-phosphate
  modified_base 10: mod_base = OTHER; note = 2'-O-methyluridine-3'-phosphate
  modified_base 11: mod_base = OTHER; note = 2'-O-methylcytidine-3'-phosphate
  modified_base 12: mod_base = OTHER; note = 2'-O-methylcytidine-3'-phosphate
  modified_base 13: mod_base = OTHER; note = 2'-O-methylcytidine-3'-phosphate
  modified_base 14: mod_base = OTHER; note = 2'-fluoroadenosine-3'-phosphate
  modified_base 15: mod_base = OTHER; note = 2'-O-methylguanosine-3'-phosphate
  modified_base 16: mod_base = OTHER; note = 2'-fluorocytidine-3'-phosphate
  modified_base 17: mod_base = OTHER; note = 2'-O-methyluridine-3'-phosphate
  modified_base 18: mod_base = OTHER; note = 2'-O-methylguanosine-3'-phosphate
  modified_base 19: mod_base = OTHER; note = 2'-O-methyladenosine-3'-phosphate
  modified_base 20: mod_base = OTHER; note = 2'-O-methyluridine-3'-phosphate
  modified_base 21: mod_base = OTHER; note = 2'-O-methyladenosine-3'- phosphorothioate
  modified_base 22: mod_base = OTHER; note = 2'-O-methylguanosine-3'- phosphorothioate
  modified_base 23: mod_base = OTHER; note = 2'-O-methyladenosine-3'-phosphate
ttgatatcttcccagctgataga

SEQ ID NO: 2442 - RNA, 21 nt, synthetic construct
  source 1..21: mol_type = other RNA
  modified_base 1: mod_base = OTHER; note = 2'-O-methyluridine-3'-phosphorothioate
  modified_base 2: mod_base = OTHER; note = 2'-O-methylcytidine-3'- phosphorothioate
  modified_base 3: mod_base = OTHER; note = 2'-O-methyluridine-3'-phosphate
  modified_base 4: mod_base = OTHER; note = 2'-O-methylguanosine-3'-phosphate
  modified_base 5: mod_base = OTHER; note = 2'-O-methyluridine-3'-phosphate
  modified_base 6: mod_base = OTHER; note = 2'-O-methylcytidine-3'-phosphate
  modified_base 7: mod_base = OTHER; note = 2'-fluoroguanosine-3'-phosphate
  modified_base 8: mod_base = OTHER; note = 2'-O-methyladenosine-3'-phosphate
  modified_base 9: mod_base = OTHER; note = 2'-fluorocytidine-3'-phosphate
  modified_base 10: mod_base = OTHER; note = 2'-fluorouridine-3'-phosphate
  modified_base 11: mod_base = OTHER; note = 2'-fluorouridine-3'-phosphate
  modified_base 12: mod_base = OTHER; note = 2'-O-methylcytidine-3'-phosphate
  modified_base 13: mod_base = OTHER; note = 2'-O-methyluridine-3'-phosphate
  modified_base 14: mod_base = OTHER; note = 2'-O-methylguanosine-3'-phosphate
  modified_base 15: mod_base = OTHER; note = 2'-O-methyluridine-3'-phosphate
  modified_base 16: mod_base = OTHER; note = 2'-O-methyluridine-3'-phosphate
  modified_base 17: mod_base = OTHER; note = 2'-O-methyluridine-3'-phosphate
  modified_base 18: mod_base = OTHER; note = 2'-O-methyluridine-3'-phosphate
  modified_base 19: mod_base = OTHER; note = 2'-O-methyladenosine-3'-phosphate
  modified_base 20: mod_base = OTHER; note = 2'-O-methylguanosine-3'-phosphate
  modified_base 21: mod_base = OTHER; note 2'-O-methylguanosine-3'-phosphate-N-[tris(GalNAc-alkyl)-ami dodecanoyl)]-4-hydroxyprolinol (Hyp-(GalNAc-alkyl)3)
tctgtcgacttctgttttagg

SEQ ID NO: 2443 - RNA, 23 nt, synthetic construct
  source 1..23: mol_type = other RNA
  modified_base 1: mod_base = OTHER; note = 2'-O-methylcytidine-3'- phosphorothioate
  modified_base 2: mod_base = OTHER; note = 2'-fluorocytidine-3'-phosphorothioate
  modified_base 3: mod_base = OTHER; note = 2'-O-methyluridine-3'-phosphate
  modified_base 4: mod_base = OTHER; note = 2'-O-methyladenosine-3'-phosphate
  modified_base 5: mod_base = OTHER; note = 2'-O-methyladenosine-3'-phosphate
  modified_base 6: mod_base = OTHER; note = 2'-fluoroadenosine-3'-phosphate
  modified_base 7: mod_base = OTHER; note = 2'-O-methyladenosine-3'-phosphate
  modified_base 8: mod_base = OTHER; note = 2'-fluorocytidine-3'-phosphate
  modified_base 9: mod_base = OTHER; note = 2'-fluoroadenosine-3'-phosphate
  modified_base 10: mod_base = OTHER; note = 2'-O-methylguanosine-3'-phosphate
  modified_base 11: mod_base = OTHER; note = 2'-O-methyladenosine-3'-phosphate
  modified_base 12: mod_base = OTHER; note = 2'-O-methyladenosine-3'-phosphate
  modified_base 13: mod_base = OTHER; note = 2'-O-methylguanosine-3'-phosphate
  modified_base 14: mod_base = OTHER; note = 2'-fluorouridine-3'-phosphate
  modified_base 15: mod_base = OTHER; note = 2'-O-methylcytidine-3'-phosphate
  modified_base 16: mod_base = OTHER; note = 2'-fluoroguanosine-3'-phosphate
  modified_base 17: mod_base = OTHER; note = 2'-O-methyladenosine-3'-phosphate
  modified_base 18: mod_base = OTHER; note = 2'-O-methylcytidine-3'-phosphate
  modified_base 19: mod_base = OTHER; note = 2'-O-methyladenosine-3'-phosphate
  modified_base 20: mod_base = OTHER; note = 2'-O-methylguanosine-3'-phosphate
  modified_base 21: mod_base = OTHER; note = 2'-O-methyladenosine-3'- phosphorothioate
  modified_base 22: mod_base = OTHER; note = 2'-O-methyluridine-3'-phosphorothioate
  modified_base 23: mod_base = OTHER; note = 2'-O-methylcytidine-3'-phosphate
cctaaaacagaagtcgacagatc

SEQ ID NO: 2444 - RNA, 21 nt, synthetic construct
  source 1..21: mol_type = other RNA
  modified_base 1: mod_base = OTHER; note = 2'-O-methylcytidine-3'- phosphorothioate
  modified_base 2: mod_base = OTHER; note = 2'-O-methyluridine-3'-phosphorothioate
  modified_base 3: mod_base = OTHER; note = 2'-O-methylguanosine-3'-phosphate
  modified_base 4: mod_base = OTHER; note = 2'-O-methyluridine-3'-phosphate
  modified_base 5: mod_base = OTHER; note = 2'-O-methylcytidine-3'-phosphate
  modified_base 6: mod_base = OTHER; note = 2'-O-methylguanosine-3'-phosphate
  modified_base 7: mod_base = OTHER; note = 2'-fluoroadenosine-3'-phosphate
  modified_base 8: mod_base = OTHER; note = 2'-O-methylcytidine-3'-phosphate
  modified_base 9: mod_base = OTHER; note = 2'-fluorouridine-3'-phosphate
  modified_base 10: mod_base = OTHER; note = 2'-fluorouridine-3'-phosphate
  modified_base 11: mod_base = OTHER; note = 2'-fluorocytidine-3'-phosphate
  modified_base 12: mod_base = OTHER; note = 2'-O-methyluridine-3'-phosphate
  modified_base 13: mod_base = OTHER; note = 2'-O-methylguanosine-3'-phosphate
  modified_base 14: mod_base = OTHER; note = 2'-O-methyluridine-3'-phosphate
  modified_base 15: mod_base = OTHER; note = 2'-O-methyluridine-3'-phosphate
  modified_base 16: mod_base = OTHER; note = 2'-O-methyluridine-3'-phosphate
  modified_base 17: mod_base = OTHER; note = 2'-O-methyluridine-3'-phosphate
  modified_base 18: mod_base = OTHER; note = 2'-O-methyladenosine-3'-phosphate
  modified_base 19: mod_base = OTHER; note = 2'-O-methylguanosine-3'-phosphate
  modified_base 20: mod_base = OTHER; note = 2'-O-methylguanosine-3'-phosphate
  modified_base 21: mod_base = OTHER; note 2'-O-methyladenosine-3'-phosphate-N-[tris(GalNAc-alkyl)-ami dodecanoyl)]-4-hydroxyprolinol (Hyp-(GalNAc-alkyl)3)
ctgtcgacttctgttttagga

SEQ ID NO: 2445 - RNA, 23 nt, synthetic construct
  source 1..23: mol_type = other RNA
  modified_base 1: mod_base = OTHER; note = 2'-O-methyluridine-3'-phosphorothioate
  modified_base 2: mod_base = OTHER; note = 2'-fluorocytidine-3'-phosphorothioate
  modified_base 3: mod_base = OTHER; note = 2'-O-methylcytidine-3'-phosphate
  modified_base 4: mod_base = OTHER; note = 2'-O-methyluridine-3'-phosphate
  modified_base 5: mod_base = OTHER; note = 2'-O-methyladenosine-3'-phosphate
  modified_base 6: mod_base = OTHER; note = 2'-fluoroadenosine-3'-phosphate
  modified_base 7: mod_base = OTHER; note = 2'-O-methyladenosine-3'-phosphate
  modified_base 8: mod_base = OTHER; note = 2'-fluoroadenosine-3'-phosphate
  modified_base 9: mod_base = OTHER; note = 2'-fluorocytidine-3'-phosphate
  modified_base 10: mod_base = OTHER; note = 2'-O-methyladenosine-3'-phosphate
  modified_base 11: mod_base = OTHER; note = 2'-O-methylguanosine-3'-phosphate
  modified_base 12: mod_base = OTHER; note = 2'-O-methyladenosine-3'-phosphate
  modified_base 13: mod_base = OTHER; note = 2'-O-methyladenosine-3'-phosphate
  modified_base 14: mod_base = OTHER; note = 2'-fluoroguanosine-3'-phosphate
  modified_base 15: mod_base = OTHER; note = 2'-O-methyluridine-3'-phosphate
  modified_base 16: mod_base = OTHER; note = 2'-fluorocytidine-3'-phosphate
  modified_base 17: mod_base = OTHER; note = 2'-O-methylguanosine-3'-phosphate
  modified_base 18: mod_base = OTHER; note = 2'-O-methyladenosine-3'-phosphate
  modified_base 19: mod_base = OTHER; note = 2'-O-methylcytidine-3'-phosphate
  modified_base 20: mod_base = OTHER; note = 2'-O-methyladenosine-3'-phosphate
  modified_base 21: mod_base = OTHER; note = 2'-O-methylguanosine-3'- phosphorothioate
  modified_base 22: mod_base = OTHER; note = 2'-O-methyladenosine-3'- phosphorothioate
  modified_base 23: mod_base = OTHER; note = 2'-O-methyluridine-3'-phosphate
tcctaaaacagaagtcgacagat

SEQ ID NO: 2446 - RNA, 21 nt, synthetic construct
  source 1..21: mol_type = other RNA
  modified_base 1: mod_base = OTHER; note = 2'-O-methylcytidine-3'- phosphorothioate
  modified_base 2: mod_base = OTHER; note = 2'-O-methyladenosine-3'- phosphorothioate
  modified_base 3: mod_base = OTHER; note = 2'-O-methylguanosine-3'-phosphate
  modified_base 4: mod_base = OTHER; note = 2'-O-methyladenosine-3'-phosphate
  modified_base 5: mod_base = OTHER; note = 2'-O-methyluridine-3'-phosphate
  modified_base 6: mod_base = OTHER; note = 2'-O-methylcytidine-3'-phosphate
  modified_base 7: mod_base = OTHER; note = 2'-fluorouridine-3'-phosphate
  modified_base 8: mod_base = OTHER; note = 2'-O-methylguanosine-3'-phosphate
  modified_base 9: mod_base = OTHER; note = 2'-fluorouridine-3'-phosphate
  modified_base 10: mod_base = OTHER; note = 2'-fluorocytidine-3'-phosphate
  modified_base 11: mod_base = OTHER; note = 2'-fluoroguanosine-3'-phosphate
  modified_base 12: mod_base = OTHER; note = 2'-O-methyladenosine-3'-phosphate
  modified_base 13: mod_base = OTHER; note = 2'-O-methylcytidine-3'-phosphate
  modified_base 14: mod_base = OTHER; note = 2'-O-methyluridine-3'-phosphate
  modified_base 15: mod_base = OTHER; note = 2'-O-methyluridine-3'-phosphate
  modified_base 16: mod_base = OTHER; note = 2'-O-methylcytidine-3'-phosphate
  modified_base 17: mod_base = OTHER; note = 2'-O-methyluridine-3'-phosphate
  modified_base 18: mod_base = OTHER; note = 2'-O-methylguanosine-3'-phosphate
  modified_base 19: mod_base = OTHER; note = 2'-O-methyluridine-3'-phosphate
  modified_base 20: mod_base = OTHER; note = 2'-O-methyluridine-3'-phosphate
  modified_base 21: mod_base = OTHER; note 2'-O-methyluridine-3'-phosphate-N-[tris(GalNAc-alkyl)-amido decanoyl)]-4-hydroxyprolinol (Hyp-(GalNAc-alkyl)3)
cagatctgtcgacttctgttt

SEQ ID NO: 2447 - RNA, 23 nt, synthetic construct
  source 1..23: mol_type = other RNA
  modified_base 1: mod_base = OTHER; note = 2'-O-methyladenosine-3'- phosphorothioate
  modified_base 2: mod_base = OTHER; note = 2'-fluoroadenosine-3'-phosphorothioate
  modified_base 3: mod_base = OTHER; note = 2'-O-methyladenosine-3'-phosphate
  modified_base 4: mod_base = OTHER; note = 2'-O-methylcytidine-3'-phosphate
  modified_base 5: mod_base = OTHER; note = 2'-O-methyladenosine-3'-phosphate
  modified_base 6: mod_base = OTHER; note = 2'-fluoroguanosine-3'-phosphate
  modified_base 7: mod_base = OTHER; note = 2'-O-methyladenosine-3'-phosphate
  modified_base 8: mod_base = OTHER; note = 2'-fluoroadenosine-3'-phosphate
  modified_base 9: mod_base = OTHER; note = 2'-fluoroguanosine-3'-phosphate
  modified_base 10: mod_base = OTHER; note = 2'-O-methyluridine-3'-phosphate
  modified_base 11: mod_base = OTHER; note = 2'-O-methylcytidine-3'-phosphate
  modified_base 12: mod_base = OTHER; note = 2'-O-methylguanosine-3'-phosphate
  modified_base 13: mod_base = OTHER; note = 2'-O-methyladenosine-3'-phosphate
  modified_base 14: mod_base = OTHER; note = 2'-fluorocytidine-3'-phosphate
  modified_base 15: mod_base = OTHER; note = 2'-O-methyladenosine-3'-phosphate
  modified_base 16: mod_base = OTHER; note = 2'-fluoroguanosine-3'-phosphate
  modified_base 17: mod_base = OTHER; note = 2'-O-methyladenosine-3'-phosphate
  modified_base 18: mod_base = OTHER; note = 2'-O-methyluridine-3'-phosphate
  modified_base 19: mod_base = OTHER; note = 2'-O-methylcytidine-3'-phosphate
  modified_base 20: mod_base = OTHER; note = 2'-O-methyluridine-3'-phosphate
  modified_base 21: mod_base = OTHER; note = 2'-O-methylguanosine-3'- phosphorothioate
  modified_base 22: mod_base = OTHER; note = 2'-O-methyluridine-3'-phosphorothioate
  modified_base 23: mod_base = OTHER; note = 2'-O-methyluridine-3'-phosphate
aaacagaagtcgacagatctgtt

SEQ ID NO: 2448 - RNA, 21 nt, synthetic construct
  source 1..21: mol_type = other RNA
  modified_base 1: mod_base = OTHER; note = 2'-O-methyladenosine-3'- phosphorothioate
  modified_base 2: mod_base = OTHER; note = 2'-O-methylcytidine-3'- phosphorothioate
  modified_base 3: mod_base = OTHER; note = 2'-O-methyladenosine-3'-phosphate
  modified_base 4: mod_base = OTHER; note = 2'-O-methylguanosine-3'-phosphate
  modified_base 5: mod_base = OTHER; note = 2'-O-methyladenosine-3'-phosphate
  modified_base 6: mod_base = OTHER; note = 2'-O-methyluridine-3'-phosphate
  modified_base 7: mod_base = OTHER; note = 2'-fluorocytidine-3'-phosphate
  modified_base 8: mod_base = OTHER; note = 2'-O-methyluridine-3'-phosphate
  modified_base 9: mod_base = OTHER; note = 2'-fluoroguanosine-3'-phosphate
  modified_base 10: mod_base = OTHER; note = 2'-fluorouridine-3'-phosphate
  modified_base 11: mod_base = OTHER; note = 2'-fluorocytidine-3'-phosphate
  modified_base 12: mod_base = OTHER; note = 2'-O-methylguanosine-3'-phosphate
  modified_base 13: mod_base = OTHER; note = 2'-O-methyladenosine-3'-phosphate
  modified_base 14: mod_base = OTHER; note = 2'-O-methylcytidine-3'-phosphate
  modified_base 15: mod_base = OTHER; note = 2'-O-methyluridine-3'-phosphate
  modified_base 16: mod_base = OTHER; note = 2'-O-methyluridine-3'-phosphate
  modified_base 17: mod_base = OTHER; note = 2'-O-methylcytidine-3'-phosphate
  modified_base 18: mod_base = OTHER; note = 2'-O-methyluridine-3'-phosphate
  modified_base 19: mod_base = OTHER; note = 2'-O-methylguanosine-3'-phosphate
  modified_base 20: mod_base = OTHER; note = 2'-O-methyluridine-3'-phosphate
  modified_base 21: mod_base = OTHER; note 2'-O-methyluridine-3'-phosphate-N-[tris(GalNAc-alkyl)-amido decanoyl)]-4-hydroxyprolinol (Hyp-(GalNAc-alkyl)3)
acagatctgtcgacttctgtt

SEQ ID NO: 2449 - RNA, 23 nt, synthetic construct
  source 1..23: mol_type = other RNA
  modified_base 1: mod_base = OTHER; note = 2'-O-methyladenosine-3'- phosphorothioate
  modified_base 2: mod_base = OTHER; note = 2'-fluoroadenosine-3'-phosphorothioate
  modified_base 3: mod_base = OTHER; note = 2'-O-methylcytidine-3'-phosphate
  modified_base 4: mod_base = OTHER; note = 2'-O-methyladenosine-3'-phosphate
  modified_base 5: mod_base = OTHER; note = 2'-O-methylguanosine-3'-phosphate
  modified_base 6: mod_base = OTHER; note = 2'-fluoroadenosine-3'-phosphate
  modified_base 7: mod_base = OTHER; note = 2'-O-methyladenosine-3'-phosphate
  modified_base 8: mod_base = OTHER; note = 2'-fluoroguanosine-3'-phosphate
  modified_base 9: mod_base = OTHER; note = 2'-fluorouridine-3'-phosphate
  modified_base 10: mod_base = OTHER; note = 2'-O-methylcytidine-3'-phosphate
  modified_base 11: mod_base = OTHER; note = 2'-O-methylguanosine-3'-phosphate
  modified_base 12: mod_base = OTHER; note = 2'-O-methyladenosine-3'-phosphate
  modified_base 13: mod_base = OTHER; note = 2'-O-methylcytidine-3'-phosphate
  modified_base 14: mod_base = OTHER; note = 2'-fluoroadenosine-3'-phosphate
  modified_base 15: mod_base = OTHER; note = 2'-O-methylguanosine-3'-phosphate
  modified_base 16: mod_base = OTHER; note = 2'-fluoroadenosine-3'-phosphate
  modified_base 17: mod_base = OTHER; note = 2'-O-methyluridine-3'-phosphate
  modified_base 18: mod_base = OTHER; note = 2'-O-methylcytidine-3'-phosphate
  modified_base 19: mod_base = OTHER; note = 2'-O-methyluridine-3'-phosphate
  modified_base 20: mod_base = OTHER; note = 2'-O-methylguanosine-3'-phosphate
  modified_base 21: mod_base = OTHER; note = 2'-O-methyluridine-3'-phosphorothioate
  modified_base 22: mod_base = OTHER; note = 2'-O-methyluridine-3'-phosphorothioate
  modified_base 23: mod_base = OTHER; note = 2'-O-methyluridine-3'-phosphate
aacagaagtcgacagatctgttt

SEQ ID NO: 2450 - RNA, 21 nt, synthetic construct
  source 1..21: mol_type = other RNA
  modified_base 1: mod_base = OTHER; note = 2'-O-methyluridine-3'-phosphorothioate
  modified_base 2: mod_base = OTHER; note = 2'-O-methyladenosine-3'- phosphorothioate
  modified_base 3: mod_base = OTHER; note = 2'-O-methylcytidine-3'-phosphate
  modified_base 4: mod_base = OTHER; note = 2'-O-methyluridine-3'-phosphate
  modified_base 5: mod_base = OTHER; note = 2'-O-methyluridine-3'-phosphate
  modified_base 6: mod_base = OTHER; note = 2'-O-methylcytidine-3'-phosphate
  modified_base 7: mod_base = OTHER; note = 2'-fluorouridine-3'-phosphate
  modified_base 8: mod_base = OTHER; note = 2'-O-methyluridine-3'-phosphate
  modified_base 9: mod_base = OTHER; note = 2'-fluorouridine-3'-phosphate
  modified_base 10: mod_base = OTHER; note = 2'-fluoroguanosine-3'-phosphate
  modified_base 11: mod_base = OTHER; note = 2'-fluoroadenosine-3'-phosphate
  modified_base 12: mod_base = OTHER; note = 2'-O-methyladenosine-3'-phosphate
  modified_base 13: mod_base = OTHER; note = 2'-O-methyluridine-3'-phosphate
  modified_base 14: mod_base = OTHER; note = 2'-O-methylguanosine-3'-phosphate
  modified_base 15: mod_base = OTHER; note = 2'-O-methyluridine-3'-phosphate
  modified_base 16: mod_base = OTHER; note = 2'-O-methyladenosine-3'-phosphate
  modified_base 17: mod_base = OTHER; note = 2'-O-methylguanosine-3'-phosphate
  modified_base 18: mod_base = OTHER; note = 2'-O-methyladenosine-3'-phosphate
  modified_base 19: mod_base = OTHER; note = 2'-O-methyluridine-3'-phosphate
  modified_base 20: mod_base = OTHER; note = 2'-O-methyluridine-3'-phosphate
  modified_base 21: mod_base = OTHER; note 2'-O-methyluridine-3'-phosphate-N-[tris(GalNAc-alkyl)-amido decanoyl)]-4-hydroxyprolinol (Hyp-(GalNAc-alkyl)3)
tacttctttgaatgtagattt

SEQ ID NO: 2451 - RNA, 23 nt, synthetic construct
  source 1..23: mol_type = other RNA
  modified_base 1: mod_base = OTHER; note = 2'-O-methyladenosine-3'- phosphorothioate
  modified_base 2: mod_base = OTHER; note = 2'-fluoroadenosine-3'-phosphorothioate
  modified_base 3: mod_base = OTHER; note = 2'-O-methyladenosine-3'-phosphate
  modified_base 4: mod_base = OTHER; note = 2'-O-methyluridine-3'-phosphate
  modified_base 5: mod_base = OTHER; note = 2'-O-methylcytidine-3'-phosphate
  modified_base 6: mod_base = OTHER; note = 2'-fluorouridine-3'-phosphate
  modified_base 7: mod_base = OTHER; note = 2'-O-methyladenosine-3'-phosphate
  modified_base 8: mod_base = OTHER; note = 2'-fluorocytidine-3'-phosphate
  modified_base 9: mod_base = OTHER; note = 2'-fluoroadenosine-3'-phosphate
  modified_base 10: mod_base = OTHER; note = 2'-O-methyluridine-3'-phosphate
  modified_base 11: mod_base = OTHER; note = 2'-O-methyluridine-3'-phosphate
  modified_base 12: mod_base = OTHER; note = 2'-O-methylcytidine-3'-phosphate
  modified_base 13: mod_base = OTHER; note = 2'-O-methyladenosine-3'-phosphate
  modified_base 14: mod_base = OTHER; note = 2'-fluoroadenosine-3'-phosphate
  modified_base 15: mod_base = OTHER; note = 2'-O-methyladenosine-3'-phosphate
  modified_base 16: mod_base = OTHER; note = 2'-fluoroguanosine-3'-phosphate
  modified_base 17: mod_base = OTHER; note = 2'-O-methyladenosine-3'-phosphate
  modified_base 18: mod_base = OTHER; note = 2'-O-methyladenosine-3'-phosphate
  modified_base 19: mod_base = OTHER; note = 2'-O-methylguanosine-3'-phosphate
  modified_base 20: mod_base = OTHER; note = 2'-O-methyluridine-3'-phosphate
  modified_base 21: mod_base = OTHER; note = 2'-O-methyladenosine-3'- phosphorothioate
  modified_base 22: mod_base = OTHER; note = 2'-O-methyluridine-3'-phosphorothioate
  modified_base 23: mod_base = OTHER; note = 2'-O-methylcytidine-3'-phosphate
aaatctacattcaaagaagtatc

SEQ ID NO: 2452 - RNA, 21 nt, synthetic construct
  source 1..21: mol_type = other RNA
  modified_base 1: mod_base = OTHER; note = 2'-O-methyladenosine-3'- phosphorothioate
  modified_base 2: mod_base = OTHER; note = 2'-O-methylcytidine-3'- phosphorothioate
  modified_base 3: mod_base = OTHER; note = 2'-O-methyluridine-3'-phosphate
  modified_base 4: mod_base = OTHER; note = 2'-O-methyluridine-3'-phosphate
  modified_base 5: mod_base = OTHER; note = 2'-O-methylcytidine-3'-phosphate
  modified_base 6: mod_base = OTHER; note = 2'-O-methyluridine-3'-phosphate
  modified_base 7: mod_base = OTHER; note = 2'-fluorouridine-3'-phosphate
  modified_base 8: mod_base = OTHER; note = 2'-O-methyluridine-3'-phosphate
  modified_base 9: mod_base = OTHER; note = 2'-fluoroguanosine-3'-phosphate
  modified_base 10: mod_base = OTHER; note = 2'-fluoroadenosine-3'-phosphate
  modified_base 11: mod_base = OTHER; note = 2'-fluoroadenosine-3'-phosphate
  modified_base 12: mod_base = OTHER; note = 2'-O-methyluridine-3'-phosphate
  modified_base 13: mod_base = OTHER; note = 2'-O-methylguanosine-3'-phosphate
  modified_base 14: mod_base = OTHER; note = 2'-O-methyluridine-3'-phosphate
  modified_base 15: mod_base = OTHER; note = 2'-O-methyladenosine-3'-phosphate
  modified_base 16: mod_base = OTHER; note = 2'-O-methylguanosine-3'-phosphate
  modified_base 17: mod_base = OTHER; note = 2'-O-methyladenosine-3'-phosphate
  modified_base 18: mod_base = OTHER; note = 2'-O-methyluridine-3'-phosphate
  modified_base 19: mod_base = OTHER; note = 2'-O-methyluridine-3'-phosphate
  modified_base 20: mod_base = OTHER; note = 2'-O-methyluridine-3'-phosphate
  modified_base 21: mod_base = OTHER; note 2'-O-methylcytidine-3'-phosphate-N-[tris(GalNAc-alkyl)-amid odecanoyl)]-4-hydroxyprolinol (Hyp-(GalNAc-alkyl)3)
acttctttgaatgtagatttc

SEQ ID NO: 2453 - RNA, 23 nt, synthetic construct
  source 1..23: mol_type = other RNA
  modified_base 1: mod_base = OTHER; note = 2'-O-methylguanosine-3'- phosphorothioate
  modified_base 2: mod_base = OTHER; note = 2'-fluoroadenosine-3'-phosphorothioate
  modified_base 3: mod_base = OTHER; note = 2'-O-methyladenosine-3'-phosphate
  modified_base 4: mod_base = OTHER; note = 2'-O-methyladenosine-3'-phosphate
  modified_base 5: mod_base = OTHER; note = 2'-O-methyluridine-3'-phosphate
  modified_base 6: mod_base = OTHER; note = 2'-fluorocytidine-3'-phosphate
  modified_base 7: mod_base = OTHER; note = 2'-O-methyluridine-3'-phosphate
  modified_base 8: mod_base = OTHER; note = 2'-fluoroadenosine-3'-phosphate
  modified_base 9: mod_base = OTHER; note = 2'-fluorocytidine-3'-phosphate
  modified_base 10: mod_base = OTHER; note = 2'-O-methyladenosine-3'-phosphate
  modified_base 11: mod_base = OTHER; note = 2'-O-methyluridine-3'-phosphate
  modified_base 12: mod_base = OTHER; note = 2'-O-methyluridine-3'-phosphate
  modified_base 13: mod_base = OTHER; note = 2'-O-methylcytidine-3'-phosphate
  modified_base 14: mod_base = OTHER; note = 2'-fluoroadenosine-3'-phosphate
  modified_base 15: mod_base = OTHER; note = 2'-O-methyladenosine-3'-phosphate
  modified_base 16: mod_base = OTHER; note = 2'-fluoroadenosine-3'-phosphate
  modified_base 17: mod_base = OTHER; note = 2'-O-methylguanosine-3'-phosphate
  modified_base 18: mod_base = OTHER; note = 2'-O-methyladenosine-3'-phosphate
  modified_base 19: mod_base = OTHER; note = 2'-O-methyladenosine-3'-phosphate
  modified_base 20: mod_base = OTHER; note = 2'-O-methylguanosine-3'-phosphate
  modified_base 21: mod_base = OTHER; note = 2'-O-methyluridine-3'-phosphorothioate
  modified_base 22: mod_base = OTHER; note = 2'-O-methyladenosine-3'- phosphorothioate
  modified_base 23: mod_base = OTHER; note = 2'-O-methyluridine-3'-phosphate
gaaatctacattcaaagaagtat

SEQ ID NO: 2454 - RNA, 21 nt, synthetic construct
  source 1..21: mol_type = other RNA
  modified_base 1: mod_base = OTHER; note = 2'-O-methylguanosine-3'- phosphorothioate
  modified_base 2: mod_base = OTHER; note = 2'-O-methyluridine-3'-phosphorothioate
  modified_base 3: mod_base = OTHER; note = 2'-O-methylguanosine-3'-phosphate
  modified_base 4: mod_base = OTHER; note = 2'-O-methyladenosine-3'-phosphate
  modified_base 5: mod_base = OTHER; note = 2'-O-methyluridine-3'-phosphate
  modified_base 6: mod_base = OTHER; note = 2'-O-methyladenosine-3'-phosphate
  modified_base 7: mod_base = OTHER; note = 2'-fluorocytidine-3'-phosphate
  modified_base 8: mod_base = OTHER; note = 2'-O-methyluridine-3'-phosphate
  modified_base 9: mod_base = OTHER; note = 2'-fluorouridine-3'-phosphate
  modified_base 10: mod_base = OTHER; note = 2'-fluorocytidine-3'-phosphate
  modified_base 11: mod_base = OTHER; note = 2'-fluorouridine-3'-phosphate
  modified_base 12: mod_base = OTHER; note = 2'-O-methyluridine-3'-phosphate
  modified_base 13: mod_base = OTHER; note = 2'-O-methyluridine-3'-phosphate
  modified_base 14: mod_base = OTHER; note = 2'-O-methylguanosine-3'-phosphate
  modified_base 15: mod_base = OTHER; note = 2'-O-methyladenosine-3'-phosphate
  modified_base 16: mod_base = OTHER; note = 2'-O-methyladenosine-3'-phosphate
  modified_base 17: mod_base = OTHER; note = 2'-O-methyluridine-3'-phosphate
  modified_base 18: mod_base = OTHER; note = 2'-O-methylguanosine-3'-phosphate
  modified_base 19: mod_base = OTHER; note = 2'-O-methyluridine-3'-phosphate
  modified_base 20: mod_base = OTHER; note = 2'-O-methyladenosine-3'-phosphate
  modified_base 21: mod_base = OTHER; note 2'-O-methylguanosine-3'-phosphate-N-[tris(GalNAc-alkyl)-ami dodecanoyl)]-4-hydroxyprolinol (Hyp-(GalNAc-alkyl)3)
gtgatacttctttgaatgtag

SEQ ID NO: 2455 - RNA, 23 nt, synthetic construct
  source 1..23: mol_type = other RNA
  modified_base 1: mod_base = OTHER; note = 2'-O-methylcytidine-3'- phosphorothioate
  modified_base 2: mod_base = OTHER; note = 2'-fluorouridine -3'-phosphorothioate
  modified_base 3: mod_base = OTHER; note = 2'-O-methyladenosine-3'-phosphate
  modified_base 4: mod_base = OTHER; note = 2'-O-methylcytidine-3'-phosphate
  modified_base 5: mod_base = OTHER; note = 2'-O-methyladenosine-3'-phosphate
  modified_base 6: mod_base = OTHER; note = 2'-fluorouridine-3'-phosphate
  modified_base 7: mod_base = OTHER; note = 2'-O-methyluridine-3'-phosphate
  modified_base 8: mod_base = OTHER; note = 2'-fluorocytidine-3'-phosphate
  modified_base 9: mod_base = OTHER; note = 2'-fluoroadenosine-3'-phosphate
  modified_base 10: mod_base = OTHER; note = 2'-O-methyladenosine-3'-phosphate
  modified_base 11: mod_base = OTHER; note = 2'-O-methyladenosine-3'-phosphate
  modified_base 12: mod_base = OTHER; note = 2'-O-methylguanosine-3'-phosphate
  modified_base 13: mod_base = OTHER; note = 2'-O-methyladenosine-3'-phosphate
  modified_base 14: mod_base = OTHER; note = 2'-fluoroadenosine-3'-phosphate
  modified_base 15: mod_base = OTHER; note = 2'-O-methylguanosine-3'-phosphate
  modified_base 16: mod_base = OTHER; note = 2'-fluorouridine-3'-phosphate
  modified_base 17: mod_base = OTHER; note = 2'-O-methyladenosine-3'-phosphate
  modified_base 18: mod_base = OTHER; note = 2'-O-methyluridine-3'-phosphate
  modified_base 19: mod_base = OTHER; note = 2'-O-methylcytidine-3'-phosphate
  modified_base 20: mod_base = OTHER; note = 2'-O-methyladenosine-3'-phosphate
  modified_base 21: mod_base = OTHER; note = 2'-O-methylcytidine-3'- phosphorothioate
  modified_base 22: mod_base = OTHER; note = 2'-O-methylcytidine-3'- phosphorothioate
  modified_base 23: mod_base = OTHER; note = 2'-O-methyladenosine-3'-phosphate
ctacattcaaagaagtatcacca

SEQ ID NO: 2456 - RNA, 21 nt, synthetic construct
  source 1..21: mol_type = other RNA
  modified_base 1: mod_base = OTHER; note = 2'-O-methylguanosine-3'- phosphorothioate
  modified_base 2: mod_base = OTHER; note = 2'-O-methylguanosine-3'- phosphorothioate
  modified_base 3: mod_base = OTHER; note = 2'-O-methyluridine-3'-phosphate
  modified_base 4: mod_base = OTHER; note = 2'-O-methylguanosine-3'-phosphate
  modified_base 5: mod_base = OTHER; note = 2'-O-methyladenosine-3'-phosphate
  modified_base 6: mod_base = OTHER; note = 2'-O-methyluridine-3'-phosphate
  modified_base 7: mod_base = OTHER; note = 2'-fluoroadenosine-3'-phosphate
  modified_base 8: mod_base = OTHER; note = 2'-O-methylcytidine-3'-phosphate
  modified_base 9: mod_base = OTHER; note = 2'-fluorouridine-3'-phosphate
  modified_base 10: mod_base = OTHER; note = 2'-fluorouridine-3'-phosphate
  modified_base 11: mod_base = OTHER; note = 2'-fluorocytidine-3'-phosphate
  modified_base 12: mod_base = OTHER; note = 2'-O-methyluridine-3'-phosphate
  modified_base 13: mod_base = OTHER; note = 2'-O-methyluridine-3'-phosphate
  modified_base 14: mod_base = OTHER; note = 2'-O-methyluridine-3'-phosphate
  modified_base 15: mod_base = OTHER; note = 2'-O-methylguanosine-3'-phosphate
  modified_base 16: mod_base = OTHER; note = 2'-O-methyladenosine-3'-phosphate
  modified_base 17: mod_base = OTHER; note = 2'-O-methyladenosine-3'-phosphate
  modified_base 18: mod_base = OTHER; note = 2'-O-methyluridine-3'-phosphate
  modified_base 19: mod_base = OTHER; note = 2'-O-methylguanosine-3'-phosphate
  modified_base 20: mod_base = OTHER; note = 2'-O-methyluridine-3'-phosphate
  modified_base 21: mod_base = OTHER; note 2'-O-methyladenosine-3'-phosphate-N-[tris(GalNAc-alkyl)-ami dodecanoyl)]-4-hydroxyprolinol (Hyp-(GalNAc-alkyl)3)
ggtgatacttctttgaatgta

SEQ ID NO: 2457 - RNA, 23 nt, synthetic construct
  source 1..23: mol_type = other RNA
  modified_base 1: mod_base = OTHER; note = 2'-O-methyluridine-3'-phosphorothioate
  modified_base 2: mod_base = OTHER; note = 2'-fluoroadenosine-3'-phosphorothioate
  modified_base 3: mod_base = OTHER; note = 2'-O-methylcytidine-3'-phosphate
  modified_base 4: mod_base = OTHER; note = 2'-O-methyladenosine-3'-phosphate
  modified_base 5: mod_base = OTHER; note = 2'-O-methyluridine-3'-phosphate
  modified_base 6: mod_base = OTHER; note = 2'-fluorouridine-3'-phosphate
  modified_base 7: mod_base = OTHER; note = 2'-O-methylcytidine-3'-phosphate
  modified_base 8: mod_base = OTHER; note = 2'-fluoroadenosine-3'-phosphate
  modified_base 9: mod_base = OTHER; note = 2'-fluoroadenosine-3'-phosphate
  modified_base 10: mod_base = OTHER; note = 2'-O-methyladenosine-3'-phosphate
  modified_base 11: mod_base = OTHER; note = 2'-O-methylguanosine-3'-phosphate
  modified_base 12: mod_base = OTHER; note = 2'-O-methyladenosine-3'-phosphate
  modified_base 13: mod_base = OTHER; note = 2'-O-methyladenosine-3'-phosphate
  modified_base 14: mod_base = OTHER; note = 2'-fluoroguanosine-3'-phosphate
  modified_base 15: mod_base = OTHER; note = 2'-O-methyluridine-3'-phosphate
  modified_base 16: mod_base = OTHER; note = 2'-fluoroadenosine-3'-phosphate
  modified_base 17: mod_base = OTHER; note = 2'-O-methyluridine-3'-phosphate
  modified_base 18: mod_base = OTHER; note = 2'-O-methylcytidine-3'-phosphate
  modified_base 19: mod_base = OTHER; note = 2'-O-methyladenosine-3'-phosphate
  modified_base 20: mod_base = OTHER; note = 2'-O-methylcytidine-3'-phosphate
  modified_base 21: mod_base = OTHER; note = 2'-O-methylcytidine-3'- phosphorothioate
  modified_base 22: mod_base = OTHER; note = 2'-O-methyladenosine-3'- phosphorothioate
  modified_base 23: mod_base = OTHER; note = 2'-O-methyladenosine-3'-phosphate
tacattcaaagaagtatcaccaa

SEQ ID NO: 2458 - RNA, 21 nt, synthetic construct
  source 1..21: mol_type = other RNA
  modified_base 1: mod_base = OTHER; note = 2'-O-methyluridine-3'-phosphorothioate
  modified_base 2: mod_base = OTHER; note = 2'-O-methylguanosine-3'- phosphorothioate
  modified_base 3: mod_base = OTHER; note = 2'-O-methylguanosine-3'-phosphate
  modified_base 4: mod_base = OTHER; note = 2'-O-methylguanosine-3'-phosphate
  modified_base 5: mod_base = OTHER; note = 2'-O-methyladenosine-3'-phosphate
  modified_base 6: mod_base = OTHER; note = 2'-O-methyladenosine-3'-phosphate
  modified_base 7: mod_base = OTHER; note = 2'-fluoroguanosine-3'-phosphate
  modified_base 8: mod_base = OTHER; note = 2'-O-methyladenosine-3'-phosphate
  modified_base 9: mod_base = OTHER; note = 2'-fluorouridine-3'-phosphate
  modified_base 10: mod_base = OTHER; note = 2'-fluoroadenosine-3'-phosphate
  modified_base 11: mod_base = OTHER; note = 2'-fluorouridine-3'-phosphate
  modified_base 12: mod_base = OTHER; note = 2'-O-methylcytidine-3'-phosphate
  modified_base 13: mod_base = OTHER; note = 2'-O-methyladenosine-3'-phosphate
  modified_base 14: mod_base = OTHER; note = 2'-O-methyladenosine-3'-phosphate
  modified_base 15: mod_base = OTHER; note = 2'-O-methyladenosine-3'-phosphate
  modified_base 16: mod_base = OTHER; note = 2'-O-methyluridine-3'-phosphate
  modified_base 17: mod_base = OTHER; note = 2'-O-methylguanosine-3'-phosphate
  modified_base 18: mod_base = OTHER; note = 2'-O-methylguanosine-3'-phosphate
  modified_base 19: mod_base = OTHER; note = 2'-O-methylcytidine-3'-phosphate
  modified_base 20: mod_base = OTHER; note = 2'-O-methyluridine-3'-phosphate
  modified_base 21: mod_base = OTHER; note 2'-O-methylguanosine-3'-phosphate-N-[tris(GalNAc-alkyl)-ami dodecanoyl)]-4-hydroxyprolinol (Hyp-(GalNAc-alkyl)3)
tgggaagatatcaaatggctg

SEQ ID NO: 2459 - RNA, 23 nt, synthetic construct
  source 1..23: mol_type = other RNA
  modified_base 1: mod_base = OTHER; note = 2'-O-methylcytidine-3'- phosphorothioate
  modified_base 2: mod_base = OTHER; note = 2'-fluoroadenosine-3'-phosphorothioate
  modified_base 3: mod_base = OTHER; note = 2'-O-methylguanosine-3'-phosphate
  modified_base 4: mod_base = OTHER; note = 2'-O-methylcytidine-3'-phosphate
  modified_base 5: mod_base = OTHER; note = 2'-O-methylcytidine-3'-phosphate
  modified_base 6: mod_base = OTHER; note = 2'-fluoroadenosine-3'-phosphate
  modified_base 7: mod_base = OTHER; note = 2'-O-methyluridine-3'-phosphate
  modified_base 8: mod_base = OTHER; note = 2'-fluorouridine-3'-phosphate
  modified_base 9: mod_base = OTHER; note = 2'-fluorouridine-3'-phosphate
  modified_base 10: mod_base = OTHER; note = 2'-O-methylguanosine-3'-phosphate
  modified_base 11: mod_base = OTHER; note = 2'-O-methyladenosine-3'-phosphate
  modified_base 12: mod_base = OTHER; note = 2'-O-methyluridine-3'-phosphate
  modified_base 13: mod_base = OTHER; note = 2'-O-methyladenosine-3'-phosphate
  modified_base 14: mod_base = OTHER; note = 2'-fluorouridine-3'-phosphate
  modified_base 15: mod_base = OTHER; note = 2'-O-methylcytidine-3'-phosphate
  modified_base 16: mod_base = OTHER; note = 2'-fluorouridine-3'-phosphate
  modified_base 17: mod_base = OTHER; note = 2'-O-methyluridine-3'-phosphate
  modified_base 18: mod_base = OTHER; note = 2'-O-methylcytidine-3'-phosphate
  modified_base 19: mod_base = OTHER; note = 2'-O-methylcytidine-3'-phosphate
  modified_base 20: mod_base = OTHER; note = 2'-O-methylcytidine-3'-phosphate
  modified_base 21: mod_base = OTHER; note = 2'-O-methyladenosine-3'- phosphorothioate
  modified_base 22: mod_base = OTHER; note = 2'-O-methylguanosine-3'- phosphorothioate
  modified_base 23: mod_base = OTHER; note = 2'-O-methylcytidine-3'-phosphate
cagccatttgatatcttcccagc

SEQ ID NO: 2460 - RNA, 21 nt, synthetic construct
  source 1..21: mol_type = other RNA
  modified_base 1: mod_base = OTHER; note = 2'-O-methylguanosine-3'- phosphorothioate
  modified_base 2: mod_base = OTHER; note = 2'-O-methylguanosine-3'- phosphorothioate
  modified_base 3: mod_base = OTHER; note = 2'-O-methylguanosine-3'-phosphate
  modified_base 4: mod_base = OTHER; note = 2'-O-methyladenosine-3'-phosphate
  modified_base 5: mod_base = OTHER; note = 2'-O-methyladenosine-3'-phosphate
  modified_base 6: mod_base = OTHER; note = 2'-O-methylguanosine-3'-phosphate
  modified_base 7: mod_base = OTHER; note = 2'-fluoroadenosine-3'-phosphate
  modified_base 8: mod_base = OTHER; note = 2'-O-methyluridine-3'-phosphate
  modified_base 9: mod_base = OTHER; note = 2'-fluoroadenosine-3'-phosphate
  modified_base 10: mod_base = OTHER; note = 2'-fluorouridine-3'-phosphate
  modified_base 11: mod_base = OTHER; note = 2'-fluorocytidine-3'-phosphate
  modified_base 12: mod_base = OTHER; note = 2'-O-methyladenosine-3'-phosphate
  modified_base 13: mod_base = OTHER; note = 2'-O-methyladenosine-3'-phosphate
  modified_base 14: mod_base = OTHER; note = 2'-O-methyladenosine-3'-phosphate
  modified_base 15: mod_base = OTHER; note = 2'-O-methyluridine-3'-phosphate
  modified_base 16: mod_base = OTHER; note = 2'-O-methylguanosine-3'-phosphate
  modified_base 17: mod_base = OTHER; note = 2'-O-methylguanosine-3'-phosphate
  modified_base 18: mod_base = OTHER; note = 2'-O-methylcytidine-3'-phosphate
  modified_base 19: mod_base = OTHER; note = 2'-O-methyluridine-3'-phosphate
  modified_base 20: mod_base = OTHER; note = 2'-O-methylguanosine-3'-phosphate
  modified_base 21: mod_base = OTHER; note 2'-O-methyladenosine-3'-phosphate-N-[tris(GalNAc-alkyl)-ami dodecanoyl)]-4-hydroxyprolinol (Hyp-(GalNAc-alkyl)3)
gggaagatatcaaatggctga

SEQ ID NO: 2461 - RNA, 23 nt, synthetic construct
  source 1..23: mol_type = other RNA
  modified_base 1: mod_base = OTHER; note = 2'-O-methyluridine-3'-phosphorothioate
  modified_base 2: mod_base = OTHER; note = 2'-fluorocytidine-3'-phosphorothioate
  modified_base 3: mod_base = OTHER; note = 2'-O-methyladenosine-3'-phosphate
  modified_base 4: mod_base = OTHER; note = 2'-O-methylguanosine-3'-phosphate
  modified_base 5: mod_base = OTHER; note = 2'-O-methylcytidine-3'-phosphate
  modified_base 6: mod_base = OTHER; note = 2'-fluorocytidine-3'-phosphate
  modified_base 7: mod_base = OTHER; note = 2'-O-methyladenosine-3'-phosphate
  modified_base 8: mod_base = OTHER; note = 2'-fluorouridine-3'-phosphate
  modified_base 9: mod_base = OTHER; note = 2'-fluorouridine-3'-phosphate
  modified_base 10: mod_base = OTHER; note = 2'-O-methyluridine-3'-phosphate
  modified_base 11: mod_base = OTHER; note = 2'-O-methylguanosine-3'-phosphate
  modified_base 12: mod_base = OTHER; note = 2'-O-methyladenosine-3'-phosphate
  modified_base 13: mod_base = OTHER; note = 2'-O-methyluridine-3'-phosphate
  modified_base 14: mod_base = OTHER; note = 2'-fluoroadenosine-3'-phosphate
  modified_base 15: mod_base = OTHER; note = 2'-O-methyluridine-3'-phosphate
  modified_base 16: mod_base = OTHER; note = 2'-fluorocytidine-3'-phosphate
  modified_base 17: mod_base = OTHER; note = 2'-O-methyluridine-3'-phosphate
  modified_base 18: mod_base = OTHER; note = 2'-O-methyluridine-3'-phosphate
  modified_base 19: mod_base = OTHER; note = 2'-O-methylcytidine-3'-phosphate
  modified_base 20: mod_base = OTHER; note = 2'-O-methylcytidine-3'-phosphate
  modified_base 21: mod_base = OTHER; note = 2'-O-methylcytidine-3'- phosphorothioate
  modified_base 22: mod_base = OTHER; note = 2'-O-methyladenosine-3'- phosphorothioate
  modified_base 23: mod_base = OTHER; note = 2'-O-methylguanosine-3'-phosphate
tcagccatttgatatcttcccag

SEQ ID NO: 2462 - RNA, 21 nt, synthetic construct
  source 1..21: mol_type = other RNA
  modified_base 1: mod_base = OTHER; note = 2'-O-methylcytidine-3'- phosphorothioate
  modified_base 2: mod_base = OTHER; note = 2'-O-methyladenosine-3'- phosphorothioate
  modified_base 3: mod_base = OTHER; note = 2'-O-methylguanosine-3'-phosphate
  modified_base 4: mod_base = OTHER; note = 2'-O-methylcytidine-3'-phosphate
  modified_base 5: mod_base = OTHER; note = 2'-O-methyluridine-3'-phosphate
  modified_base 6: mod_base = OTHER; note = 2'-O-methylguanosine-3'-phosphate
  modified_base 7: mod_base = OTHER; note = 2'-fluoroguanosine-3'-phosphate
  modified_base 8: mod_base = OTHER; note = 2'-O-methylguanosine-3'-phosphate
  modified_base 9: mod_base = OTHER; note = 2'-fluoroadenosine-3'-phosphate
  modified_base 10: mod_base = OTHER; note = 2'-fluoroadenosine-3'-phosphate
  modified_base 11: mod_base = OTHER; note = 2'-fluoroguanosine-3'-phosphate
  modified_base 12: mod_base = OTHER; note = 2'-O-methyladenosine-3'-phosphate
  modified_base 13: mod_base = OTHER; note = 2'-O-methyluridine-3'-phosphate
  modified_base 14: mod_base = OTHER; note = 2'-O-methyladenosine-3'-phosphate
  modified_base 15: mod_base = OTHER; note = 2'-O-methyluridine-3'-phosphate
  modified_base 16: mod_base = OTHER; note = 2'-O-methylcytidine-3'-phosphate
  modified_base 17: mod_base = OTHER; note = 2'-O-methyladenosine-3'-phosphate
  modified_base 18: mod_base = OTHER; note = 2'-O-methyladenosine-3'-phosphate
  modified_base 19: mod_base = OTHER; note = 2'-O-methyladenosine-3'-phosphate
  modified_base 20: mod_base = OTHER; note = 2'-O-methyluridine-3'-phosphate
  modified_base 21: mod_base = OTHER; note 2'-O-methylguanosine-3'-phosphate-N-[tris(GalNAc-alkyl)-ami dodecanoyl)]-4-hydroxyprolinol (Hyp-(GalNAc-alkyl)3)
cagctgggaagatatcaaatg

SEQ ID NO: 2463 - RNA, 23 nt, synthetic construct
  source 1..23: mol_type = other RNA
  modified_base 1: mod_base = OTHER; note = 2'-O-methylcytidine-3'- phosphorothioate
  modified_base 2: mod_base = OTHER; note = 2'-fluoroadenosine-3'-phosphorothioate
  modified_base 3: mod_base = OTHER; note = 2'-O-methyluridine-3'-phosphate
  modified_base 4: mod_base = OTHER; note = 2'-O-methyluridine-3'-phosphate
  modified_base 5: mod_base = OTHER; note = 2'-O-methyluridine-3'-phosphate
  modified_base 6: mod_base = OTHER; note = 2'-fluoroguanosine-3'-phosphate
  modified_base 7: mod_base = OTHER; note = 2'-O-methyladenosine-3'-phosphate
  modified_base 8: mod_base = OTHER; note = 2'-fluorouridine-3'-phosphate
  modified_base 9: mod_base = OTHER; note = 2'-fluoroadenosine-3'-phosphate
  modified_base 10: mod_base = OTHER; note = 2'-O-methyluridine-3'-phosphate
  modified_base 11: mod_base = OTHER; note = 2'-O-methylcytidine-3'-phosphate
  modified_base 12: mod_base = OTHER; note = 2'-O-methyluridine-3'-phosphate
  modified_base 13: mod_base = OTHER; note = 2'-O-methyluridine-3'-phosphate
  modified_base 14: mod_base = OTHER; note = 2'-fluorocytidine-3'-phosphate
  modified_base 15: mod_base = OTHER; note = 2'-O-methylcytidine-3'-phosphate
  modified_base 16: mod_base = OTHER; note = 2'-fluorocytidine-3'-phosphate
  modified_base 17: mod_base = OTHER; note = 2'-O-methyladenosine-3'-phosphate
  modified_base 18: mod_base = OTHER; note = 2'-O-methylguanosine-3'-phosphate
  modified_base 19: mod_base = OTHER; note = 2'-O-methylcytidine-3'-phosphate
  modified_base 20: mod_base = OTHER; note = 2'-O-methyluridine-3'-phosphate
  modified_base 21: mod_base = OTHER; note = 2'-O-methylguanosine-3'- phosphorothioate
  modified_base 22: mod_base = OTHER; note = 2'-O-methyladenosine-3'- phosphorothioate
  modified_base 23: mod_base = OTHER; note = 2'-O-methyluridine-3'-phosphate
catttgatatcttcccagctgat

SEQ ID NO: 2464 - RNA, 21 nt, synthetic construct
  source 1..21: mol_type = other RNA
  modified_base 1: mod_base = OTHER; note = 2'-O-methyluridine-3'-phosphorothioate
  modified_base 2: mod_base = OTHER; note = 2'-O-methylcytidine-3'- phosphorothioate
  modified_base 3: mod_base = OTHER; note = 2'-O-methyladenosine-3'-phosphate
  modified_base 4: mod_base = OTHER; note = 2'-O-methylguanosine-3'-phosphate
  modified_base 5: mod_base = OTHER; note = 2'-O-methylcytidine-3'-phosphate
  modified_base 6: mod_base = OTHER; note = 2'-O-methyluridine-3'-phosphate
  modified_base 7: mod_base = OTHER; note = 2'-fluoroguanosine-3'-phosphate
  modified_base 8: mod_base = OTHER; note = 2'-O-methylguanosine-3'-phosphate
  modified_base 9: mod_base = OTHER; note = 2'-fluoroguanosine-3'-phosphate
  modified_base 10: mod_base = OTHER; note = 2'-fluoroadenosine-3'-phosphate
  modified_base 11: mod_base = OTHER; note = 2'-fluoroadenosine-3'-phosphate
  modified_base 12: mod_base = OTHER; note = 2'-O-methylguanosine-3'-phosphate
  modified_base 13: mod_base = OTHER; note = 2'-O-methyladenosine-3'-phosphate
  modified_base 14: mod_base = OTHER; note = 2'-O-methyluridine-3'-phosphate
  modified_base 15: mod_base = OTHER; note = 2'-O-methyladenosine-3'-phosphate
  modified_base 16: mod_base = OTHER; note = 2'-O-methyluridine-3'-phosphate
  modified_base 17: mod_base = OTHER; note = 2'-O-methylcytidine-3'-phosphate
  modified_base 18: mod_base = OTHER; note = 2'-O-methyladenosine-3'-phosphate
  modified_base 19: mod_base = OTHER; note = 2'-O-methyladenosine-3'-phosphate
  modified_base 20: mod_base = OTHER; note = 2'-O-methyladenosine-3'-phosphate
  modified_base 21: mod_base = OTHER; note 2'-O-methyluridine-3'-phosphate-N-[tris(GalNAc-alkyl)-amido decanoyl)]-4-hydroxyprolinol (Hyp-(GalNAc-alkyl)3)
tcagctgggaagatatcaaat

SEQ ID NO: 2465 - RNA, 23 nt, synthetic construct
  source 1..23: mol_type = other RNA
  modified_base 1: mod_base = OTHER; note = 2'-O-methyladenosine-3'- phosphorothioate
  modified_base 2: mod_base = OTHER; note = 2'-fluorouridine -3'-phosphorothioate
  modified_base 3: mod_base = OTHER; note = 2'-O-methyluridine-3'-phosphate
  modified_base 4: mod_base = OTHER; note = 2'-O-methyluridine-3'-phosphate
  modified_base 5: mod_base = OTHER; note = 2'-O-methylguanosine-3'-phosphate
  modified_base 6: mod_base = OTHER; note = 2'-fluoroadenosine-3'-phosphate
  modified_base 7: mod_base = OTHER; note = 2'-O-methyluridine-3'-phosphate
  modified_base 8: mod_base = OTHER; note = 2'-fluoroadenosine-3'-phosphate
  modified_base 9: mod_base = OTHER; note = 2'-fluorouridine-3'-phosphate
  modified_base 10: mod_base = OTHER; note = 2'-O-methylcytidine-3'-phosphate
  modified_base 11: mod_base = OTHER; note = 2'-O-methyluridine-3'-phosphate
  modified_base 12: mod_base = OTHER; note = 2'-O-methyluridine-3'-phosphate
  modified_base 13: mod_base = OTHER; note = 2'-O-methylcytidine-3'-phosphate
  modified_base 14: mod_base = OTHER; note = 2'-fluorocytidine-3'-phosphate
  modified_base 15: mod_base = OTHER; note = 2'-O-methylcytidine-3'-phosphate
  modified_base 16: mod_base = OTHER; note = 2'-fluoroadenosine-3'-phosphate
  modified_base 17: mod_base = OTHER; note = 2'-O-methylguanosine-3'-phosphate
  modified_base 18: mod_base = OTHER; note = 2'-O-methylcytidine-3'-phosphate
  modified_base 19: mod_base = OTHER; note = 2'-O-methyluridine-3'-phosphate
  modified_base 20: mod_base = OTHER; note = 2'-O-methylguanosine-3'-phosphate
  modified_base 21: mod_base = OTHER; note = 2'-O-methyladenosine-3'- phosphorothioate
  modified_base 22: mod_base = OTHER; note = 2'-O-methyluridine-3'-phosphorothioate
  modified_base 23: mod_base = OTHER; note = 2'-O-methyladenosine-3'-phosphate
atttgatatcttcccagctgata

SEQ ID NO: 2466 - RNA, 21 nt, synthetic construct
  source 1..21: mol_type = other RNA
  modified_base 1: mod_base = OTHER; note = 2'-O-methyluridine-3'-phosphorothioate
  modified_base 2: mod_base = OTHER; note = 2'-O-methylcytidine-3'- phosphorothioate
  modified_base 3: mod_base = OTHER; note = 2'-O-methylcytidine-3'-phosphate
  modified_base 4: mod_base = OTHER; note = 2'-O-methyladenosine-3'-phosphate
  modified_base 5: mod_base = OTHER; note = 2'-O-methyladenosine-3'-phosphate
  modified_base 6: mod_base = OTHER; note = 2'-O-methyladenosine-3'-phosphate
  modified_base 7: mod_base = OTHER; note = 2'-fluoroguanosine-3'-phosphate
  modified_base 8: mod_base = OTHER; note = 2'-O-methyluridine-3'-phosphate
  modified_base 9: mod_base = OTHER; note = 2'-fluorocytidine-3'-phosphate
  modified_base 10: mod_base = OTHER; note = 2'-fluorouridine-3'-phosphate
  modified_base 11: mod_base = OTHER; note = 2'-fluoroadenosine-3'-phosphate
  modified_base 12: mod_base = OTHER; note = 2'-O-methyluridine-3'-phosphate
  modified_base 13: mod_base = OTHER; note = 2'-O-methyladenosine-3'-phosphate
  modified_base 14: mod_base = OTHER; note = 2'-O-methyluridine-3'-phosphate
  modified_base 15: mod_base = OTHER; note = 2'-O-methyladenosine-3'-phosphate
  modified_base 16: mod_base = OTHER; note = 2'-O-methyluridine-3'-phosphate
  modified_base 17: mod_base = OTHER; note = 2'-O-methylguanosine-3'-phosphate
  modified_base 18: mod_base = OTHER; note = 2'-O-methyladenosine-3'-phosphate
  modified_base 19: mod_base = OTHER; note = 2'-O-methylcytidine-3'-phosphate
  modified_base 20: mod_base = OTHER; note = 2'-O-methyluridine-3'-phosphate
  modified_base 21: mod_base = OTHER; note 2'-O-methyladenosine-3'-phosphate-N-[tris(GalNAc-alkyl)-ami dodecanoyl)]-4-hydroxyprolinol (Hyp-(GalNAc-alkyl)3)
tccaaagtctatatatgacta

SEQ ID NO: 2467 - RNA, 23 nt, synthetic construct
  source 1..23: mol_type = other RNA
  modified_base 1: mod_base = OTHER; note = 2'-O-methyluridine-3'-phosphorothioate
  modified_base 2: mod_base = OTHER; note = 2'-fluoroadenosine-3'-phosphorothioate
  modified_base 3: mod_base = OTHER; note = 2'-O-methylguanosine-3'-phosphate
  modified_base 4: mod_base = OTHER; note = 2'-O-methyluridine-3'-phosphate
  modified_base 5: mod_base = OTHER; note = 2'-O-methylcytidine-3'-phosphate
  modified_base 6: mod_base = OTHER; note = 2'-fluoroadenosine-3'-phosphate
  modified_base 7: mod_base = OTHER; note = 2'-O-methyluridine-3'-phosphate
  modified_base 8: mod_base = OTHER; note = 2'-fluoroadenosine-3'-phosphate
  modified_base 9: mod_base = OTHER; note = 2'-fluorouridine-3'-phosphate
  modified_base 10: mod_base = OTHER; note = 2'-O-methyladenosine-3'-phosphate
  modified_base 11: mod_base = OTHER; note = 2'-O-methyluridine-3'-phosphate
  modified_base 12: mod_base = OTHER; note = 2'-O-methyladenosine-3'-phosphate
  modified_base 13: mod_base = OTHER; note = 2'-O-methylguanosine-3'-phosphate
  modified_base 14: mod_base = OTHER; note = 2'-fluoroadenosine-3'-phosphate
  modified_base 15: mod_base = OTHER; note = 2'-O-methylcytidine-3'-phosphate
  modified_base 16: mod_base = OTHER; note = 2'-fluorouridine-3'-phosphate
  modified_base 17: mod_base = OTHER; note = 2'-O-methyluridine-3'-phosphate
  modified_base 18: mod_base = OTHER; note = 2'-O-methyluridine-3'-phosphate
  modified_base 19: mod_base = OTHER; note = 2'-O-methylguanosine-3'-phosphate
  modified_base 20: mod_base = OTHER; note = 2'-O-methylguanosine-3'-phosphate
  modified_base 21: mod_base = OTHER; note = 2'-O-methyladenosine-3'- phosphorothioate
  modified_base 22: mod_base = OTHER; note = 2'-O-methyladenosine-3'- phosphorothioate
  modified_base 23: mod_base = OTHER; note = 2'-O-methylguanosine-3'-phosphate
tagtcatatatagactttggaag

SEQ ID NO: 2468 - RNA, 21 nt, synthetic construct
  source 1..21: mol_type = other RNA
  modified_base 1: mod_base = OTHER; note = 2'-O-methylcytidine-3'- phosphorothioate
  modified_base 2: mod_base = OTHER; note = 2'-O-methylcytidine-3'- phosphorothioate
  modified_base 3: mod_base = OTHER; note = 2'-O-methyladenosine-3'-phosphate
  modified_base 4: mod_base = OTHER; note = 2'-O-methyladenosine-3'-phosphate
  modified_base 5: mod_base = OTHER; note = 2'-O-methyladenosine-3'-phosphate
  modified_base 6: mod_base = OTHER; note = 2'-O-methylguanosine-3'-phosphate
  modified_base 7: mod_base = OTHER; note = 2'-fluorouridine-3'-phosphate
  modified_base 8: mod_base = OTHER; note = 2'-O-methylcytidine-3'-phosphate
  modified_base 9: mod_base = OTHER; note = 2'-fluorouridine-3'-phosphate
  modified_base 10: mod_base = OTHER; note = 2'-fluoroadenosine-3'-phosphate
  modified_base 11: mod_base = OTHER; note = 2'-fluorouridine-3'-phosphate
  modified_base 12: mod_base = OTHER; note = 2'-O-methyladenosine-3'-phosphate
  modified_base 13: mod_base = OTHER; note = 2'-O-methyluridine-3'-phosphate
  modified_base 14: mod_base = OTHER; note = 2'-O-methyladenosine-3'-phosphate
  modified_base 15: mod_base = OTHER; note = 2'-O-methyluridine-3'-phosphate
  modified_base 16: mod_base = OTHER; note = 2'-O-methylguanosine-3'-phosphate
  modified_base 17: mod_base = OTHER; note = 2'-O-methyladenosine-3'-phosphate
  modified_base 18: mod_base = OTHER; note = 2'-O-methylcytidine-3'-phosphate
  modified_base 19: mod_base = OTHER; note = 2'-O-methyluridine-3'-phosphate
  modified_base 20: mod_base = OTHER; note = 2'-O-methyladenosine-3'-phosphate
  modified_base 21: mod_base = OTHER; note 2'-O-methyluridine-3'-phosphate-N-[tris(GalNAc-alkyl)-amido decanoyl)]-4-hydroxyprolinol (Hyp-(GalNAc-alkyl)3)
ccaaagtctatatatgactat

SEQ ID NO: 2469 - RNA, 23 nt, synthetic construct
  source 1..23: mol_type = other RNA
  modified_base 1: mod_base = OTHER; note = 2'-O-methyladenosine-3'- phosphorothioate
  modified_base 2: mod_base = OTHER; note = 2'-fluorouridine -3'-phosphorothioate
  modified_base 3: mod_base = OTHER; note = 2'-O-methyladenosine-3'-phosphate
  modified_base 4: mod_base = OTHER; note = 2'-O-methylguanosine-3'-phosphate
  modified_base 5: mod_base = OTHER; note = 2'-O-methyluridine-3'-phosphate
  modified_base 6: mod_base = OTHER; note = 2'-fluorocytidine-3'-phosphate
  modified_base 7: mod_base = OTHER; note = 2'-O-methyladenosine-3'-phosphate
  modified_base 8: mod_base = OTHER; note = 2'-fluorouridine-3'-phosphate
  modified_base 9: mod_base = OTHER; note = 2'-fluoroadenosine-3'-phosphate
  modified_base 10: mod_base = OTHER; note = 2'-O-methyluridine-3'-phosphate
  modified_base 11: mod_base = OTHER; note = 2'-O-methyladenosine-3'-phosphate
  modified_base 12: mod_base = OTHER; note = 2'-O-methyluridine-3'-phosphate
  modified_base 13: mod_base = OTHER; note = 2'-O-methyladenosine-3'-phosphate
  modified_base 14: mod_base = OTHER; note = 2'-fluoroguanosine-3'-phosphate
  modified_base 15: mod_base = OTHER; note = 2'-O-methyladenosine-3'-phosphate
  modified_base 16: mod_base = OTHER; note = 2'-fluorocytidine-3'-phosphate
  modified_base 17: mod_base = OTHER; note = 2'-O-methyluridine-3'-phosphate
  modified_base 18: mod_base = OTHER; note = 2'-O-methyluridine-3'-phosphate
  modified_base 19: mod_base = OTHER; note = 2'-O-methyluridine-3'-phosphate
  modified_base 20: mod_base = OTHER; note = 2'-O-methylguanosine-3'-phosphate
  modified_base 21: mod_base = OTHER; note = 2'-O-methylguanosine-3'- phosphorothioate
  modified_base 22: mod_base = OTHER; note = 2'-O-methyladenosine-3'- phosphorothioate
  modified_base 23: mod_base = OTHER; note = 2'-O-methyladenosine-3'-phosphate
atagtcatatatagactttggaa

SEQ ID NO: 2470 - RNA, 21 nt, synthetic construct
  source 1..21: mol_type = other RNA
  modified_base 1: mod_base = OTHER; note = 2'-O-methyluridine-3'-phosphorothioate
  modified_base 2: mod_base = OTHER; note = 2'-O-methyladenosine-3'- phosphorothioate
  modified_base 3: mod_base = OTHER; note = 2'-O-methylcytidine-3'-phosphate
  modified_base 4: mod_base = OTHER; note = 2'-O-methyluridine-3'-phosphate
  modified_base 5: mod_base = OTHER; note = 2'-O-methyluridine-3'-phosphate
  modified_base 6: mod_base = OTHER; note = 2'-O-methylcytidine-3'-phosphate
  modified_base 7: mod_base = OTHER; note = 2'-fluorocytidine-3'-phosphate
  modified_base 8: mod_base = OTHER; note = 2'-O-methyladenosine-3'-phosphate
  modified_base 9: mod_base = OTHER; note = 2'-fluoroadenosine-3'-phosphate
  modified_base 10: mod_base = OTHER; note = 2'-fluoroadenosine-3'-phosphate
  modified_base 11: mod_base = OTHER; note = 2'-fluoroguanosine-3'-phosphate
  modified_base 12: mod_base = OTHER; note = 2'-O-methyluridine-3'-phosphate
  modified_base 13: mod_base = OTHER; note = 2'-O-methylcytidine-3'-phosphate
  modified_base 14: mod_base = OTHER; note = 2'-O-methyluridine-3'-phosphate
  modified_base 15: mod_base = OTHER; note = 2'-O-methyladenosine-3'-phosphate
  modified_base 16: mod_base = OTHER; note = 2'-O-methyluridine-3'-phosphate
  modified_base 17: mod_base = OTHER; note = 2'-O-methyladenosine-3'-phosphate
  modified_base 18: mod_base = OTHER; note = 2'-O-methyluridine-3'-phosphate
  modified_base 19: mod_base = OTHER; note = 2'-O-methyladenosine-3'-phosphate
  modified_base 20: mod_base = OTHER; note = 2'-O-methyluridine-3'-phosphate
  modified_base 21: mod_base = OTHER; note 2'-O-methylguanosine-3'-phosphate-N-[tris(GalNAc-alkyl)-ami dodecanoyl)]-4-hydroxyprolinol (Hyp-(GalNAc-alkyl)3)
tacttccaaagtctatatatg

SEQ ID NO: 2471 - RNA, 23 nt, synthetic construct
  source 1..23: mol_type = other RNA
  modified_base 1: mod_base = OTHER; note = 2'-O-methylcytidine-3'- phosphorothioate
  modified_base 2: mod_base = OTHER; note = 2'-fluoroadenosine-3'-phosphorothioate
  modified_base 3: mod_base = OTHER; note = 2'-O-methyluridine-3'-phosphate
  modified_base 4: mod_base = OTHER; note = 2'-O-methyladenosine-3'-phosphate
  modified_base 5: mod_base = OTHER; note = 2'-O-methyluridine-3'-phosphate
  modified_base 6: mod_base = OTHER; note = 2'-fluoroadenosine-3'-phosphate
  modified_base 7: mod_base = OTHER; note = 2'-O-methyluridine-3'-phosphate
  modified_base 8: mod_base = OTHER; note = 2'-fluoroadenosine-3'-phosphate
  modified_base 9: mod_base = OTHER; note = 2'-fluoroguanosine-3'-phosphate
  modified_base 10: mod_base = OTHER; note = 2'-O-methyladenosine-3'-phosphate
  modified_base 11: mod_base = OTHER; note = 2'-O-methylcytidine-3'-phosphate
  modified_base 12: mod_base = OTHER; note = 2'-O-methyluridine-3'-phosphate
  modified_base 13: mod_base = OTHER; note = 2'-O-methyluridine-3'-phosphate
  modified_base 14: mod_base = OTHER; note = 2'-fluorouridine-3'-phosphate
  modified_base 15: mod_base = OTHER; note = 2'-O-methylguanosine-3'-phosphate
  modified_base 16: mod_base = OTHER; note = 2'-fluoroguanosine-3'-phosphate
  modified_base 17: mod_base = OTHER; note = 2'-O-methyladenosine-3'-phosphate
  modified_base 18: mod_base = OTHER; note = 2'-O-methyladenosine-3'-phosphate
  modified_base 19: mod_base = OTHER; note = 2'-O-methylguanosine-3'-phosphate
  modified_base 20: mod_base = OTHER; note = 2'-O-methyluridine-3'-phosphate
  modified_base 21: mod_base = OTHER; note = 2'-O-methyladenosine-3'- phosphorothioate
  modified_base 22: mod_base = OTHER; note = 2'-O-methylcytidine-3'- phosphorothioate
  modified_base 23: mod_base = OTHER; note = 2'-O-methyluridine-3'-phosphate
catatatagactttggaagtact

SEQ ID NO: 2472 - RNA, 21 nt, synthetic construct
  source 1..21: mol_type = other RNA
  modified_base 1: mod_base = OTHER; note = 2'-O-methylguanosine-3'- phosphorothioate
  modified_base 2: mod_base = OTHER; note = 2'-O-methyluridine-3'-phosphorothioate
  modified_base 3: mod_base = OTHER; note = 2'-O-methyladenosine-3'-phosphate
  modified_base 4: mod_base = OTHER; note = 2'-O-methylcytidine-3'-phosphate
  modified_base 5: mod_base = OTHER; note = 2'-O-methyluridine-3'-phosphate
  modified_base 6: mod_base = OTHER; note = 2'-O-methyluridine-3'-phosphate
  modified_base 7: mod_base = OTHER; note = 2'-fluorocytidine-3'-phosphate
  modified_base 8: mod_base = OTHER; note = 2'-O-methylcytidine-3'-phosphate
  modified_base 9: mod_base = OTHER; note = 2'-fluoroadenosine-3'-phosphate
  modified_base 10: mod_base = OTHER; note = 2'-fluoroadenosine-3'-phosphate
  modified_base 11: mod_base = OTHER; note = 2'-fluoroadenosine-3'-phosphate
  modified_base 12: mod_base = OTHER; note = 2'-O-methylguanosine-3'-phosphate
  modified_base 13: mod_base = OTHER; note = 2'-O-methyluridine-3'-phosphate
  modified_base 14: mod_base = OTHER; note = 2'-O-methylcytidine-3'-phosphate
  modified_base 15: mod_base = OTHER; note = 2'-O-methyluridine-3'-phosphate
  modified_base 16: mod_base = OTHER; note = 2'-O-methyladenosine-3'-phosphate
  modified_base 17: mod_base = OTHER; note = 2'-O-methyluridine-3'-phosphate
  modified_base 18: mod_base = OTHER; note = 2'-O-methyladenosine-3'-phosphate
  modified_base 19: mod_base = OTHER; note = 2'-O-methyluridine-3'-phosphate
  modified_base 20: mod_base = OTHER; note = 2'-O-methyladenosine-3'-phosphate
  modified_base 21: mod_base = OTHER; note 2'-O-methyluridine-3'-phosphate-N-[tris(GalNAc-alkyl)-amido decanoyl)]-4-hydroxyprolinol (Hyp-(GalNAc-alkyl)3)
gtacttccaaagtctatatat

SEQ ID NO: 2473 - RNA, 23 nt, synthetic construct
  source 1..23: mol_type = other RNA
  modified_base 1: mod_base = OTHER; note = 2'-O-methyladenosine-3'- phosphorothioate
  modified_base 2: mod_base = OTHER; note = 2'-fluorouridine -3'-phosphorothioate
  modified_base 3: mod_base = OTHER; note = 2'-O-methyladenosine-3'-phosphate
  modified_base 4: mod_base = OTHER; note = 2'-O-methyluridine-3'-phosphate
  modified_base 5: mod_base = OTHER; note = 2'-O-methyladenosine-3'-phosphate
  modified_base 6: mod_base = OTHER; note = 2'-fluorouridine-3'-phosphate
  modified_base 7: mod_base = OTHER; note = 2'-O-methyladenosine-3'-phosphate
  modified_base 8: mod_base = OTHER; note = 2'-fluoroguanosine-3'-phosphate
  modified_base 9: mod_base = OTHER; note = 2'-fluoroadenosine-3'-phosphate
  modified_base 10: mod_base = OTHER; note = 2'-O-methylcytidine-3'-phosphate
  modified_base 11: mod_base = OTHER; note = 2'-O-methyluridine-3'-phosphate
  modified_base 12: mod_base = OTHER; note = 2'-O-methyluridine-3'-phosphate
  modified_base 13: mod_base = OTHER; note = 2'-O-methyluridine-3'-phosphate
  modified_base 14: mod_base = OTHER; note = 2'-fluoroguanosine-3'-phosphate
  modified_base 15: mod_base = OTHER; note = 2'-O-methylguanosine-3'-phosphate
  modified_base 16: mod_base = OTHER; note = 2'-fluoroadenosine-3'-phosphate
  modified_base 17: mod_base = OTHER; note = 2'-O-methyladenosine-3'-phosphate
  modified_base 18: mod_base = OTHER; note = 2'-O-methylguanosine-3'-phosphate
  modified_base 19: mod_base = OTHER; note = 2'-O-methyluridine-3'-phosphate
  modified_base 20: mod_base = OTHER; note = 2'-O-methyladenosine-3'-phosphate
  modified_base 21: mod_base = OTHER; note = 2'-O-methylcytidine-3'- phosphorothioate
  modified_base 22: mod_base = OTHER; note = 2'-O-methyluridine-3'-phosphorothioate
  modified_base 23: mod_base = OTHER; note = 2'-O-methylguanosine-3'-phosphate
atatatagactttggaagtactg

SEQ ID NO: 2474 - RNA, 21 nt, synthetic construct
  source 1..21: mol_type = other RNA
  modified_base 1: mod_base = OTHER; note = 2'-O-methyluridine-3'-phosphorothioate
  modified_base 2: mod_base = OTHER; note = 2'-O-methyluridine-3'-phosphorothioate
  modified_base 3: mod_base = OTHER; note = 2'-O-methyladenosine-3'-phosphate
  modified_base 4: mod_base = OTHER; note = 2'-O-methyluridine-3'-phosphate
  modified_base 5: mod_base = OTHER; note = 2'-O-methylguanosine-3'-phosphate
  modified_base 6: mod_base = OTHER; note = 2'-O-methyladenosine-3'-phosphate
  modified_base 7: mod_base = OTHER; note = 2'-fluoroadenosine-3'-phosphate
  modified_base 8: mod_base = OTHER; note = 2'-O-methylcytidine-3'-phosphate
  modified_base 9: mod_base = OTHER; note = 2'-fluoroadenosine-3'-phosphate
  modified_base 10: mod_base = OTHER; note = 2'-fluoroadenosine-3'-phosphate
  modified_base 11: mod_base = OTHER; note = 2'-fluorocytidine-3'-phosphate
  modified_base 12: mod_base = OTHER; note = 2'-O-methyladenosine-3'-phosphate
  modified_base 13: mod_base = OTHER; note = 2'-O-methyluridine-3'-phosphate
  modified_base 14: mod_base = OTHER; note = 2'-O-methylguanosine-3'-phosphate
  modified_base 15: mod_base = OTHER; note = 2'-O-methylcytidine-3'-phosphate
  modified_base 16: mod_base = OTHER; note = 2'-O-methyluridine-3'-phosphate
  modified_base 17: mod_base = OTHER; note = 2'-O-methyladenosine-3'-phosphate
  modified_base 18: mod_base = OTHER; note = 2'-O-methyladenosine-3'-phosphate
  modified_base 19: mod_base = OTHER; note = 2'-O-methyladenosine-3'-phosphate
  modified_base 20: mod_base = OTHER; note = 2'-O-methyluridine-3'-phosphate
  modified_base 21: mod_base = OTHER; note 2'-O-methylcytidine-3'-phosphate-N-[tris(GalNAc-alkyl)-amid odecanoyl)]-4-hydroxyprolinol (Hyp-(GalNAc-alkyl)3)
ttatgaacaacatgctaaatc

SEQ ID NO: 2475 - RNA, 23 nt, synthetic construct
  source 1..23: mol_type = other RNA
  modified_base 1: mod_base = OTHER; note = 2'-O-methylguanosine-3'- phosphorothioate
  modified_base 2: mod_base = OTHER; note = 2'-fluoroadenosine-3'-phosphorothioate
  modified_base 3: mod_base = OTHER; note = 2'-O-methyluridine-3'-phosphate
  modified_base 4: mod_base = OTHER; note = 2'-O-methyluridine-3'-phosphate
  modified_base 5: mod_base = OTHER; note = 2'-O-methyluridine-3'-phosphate
  modified_base 6: mod_base = OTHER; note = 2'-fluoroadenosine-3'-phosphate
  modified_base 7: mod_base = OTHER; note = 2'-O-methylguanosine-3'-phosphate
  modified_base 8: mod_base = OTHER; note = 2'-fluorocytidine-3'-phosphate
  modified_base 9: mod_base = OTHER; note = 2'-fluoroadenosine-3'-phosphate
  modified_base 10: mod_base = OTHER; note = 2'-O-methyluridine-3'-phosphate
  modified_base 11: mod_base = OTHER; note = 2'-O-methylguanosine-3'-phosphate
  modified_base 12: mod_base = OTHER; note = 2'-O-methyluridine-3'-phosphate
  modified_base 13: mod_base = OTHER; note = 2'-O-methyluridine-3'-phosphate
  modified_base 14: mod_base = OTHER; note = 2'-fluoroguanosine-3'-phosphate
  modified_base 15: mod_base = OTHER; note = 2'-O-methyluridine-3'-phosphate
  modified_base 16: mod_base = OTHER; note = 2'-fluorouridine-3'-phosphate
  modified_base 17: mod_base = OTHER; note = 2'-O-methylcytidine-3'-phosphate
  modified_base 18: mod_base = OTHER; note = 2'-O-methyladenosine-3'-phosphate
  modified_base 19: mod_base = OTHER; note = 2'-O-methyluridine-3'-phosphate
  modified_base 20: mod_base = OTHER; note = 2'-O-methyladenosine-3'-phosphate
  modified_base 21: mod_base = OTHER; note = 2'-O-methyladenosine-3'- phosphorothioate
  modified_base 22: mod_base = OTHER; note = 2'-O-methyluridine-3'-phosphorothioate
  modified_base 23: mod_base = OTHER; note = 2'-O-methylcytidine-3'-phosphate
gatttagcatgttgttcataatc

SEQ ID NO: 2476 - RNA, 21 nt, synthetic construct
  source 1..21: mol_type = other RNA
  modified_base 1: mod_base = OTHER; note = 2'-O-methyluridine-3'-phosphorothioate
  modified_base 2: mod_base = OTHER; note = 2'-O-methyladenosine-3'- phosphorothioate
  modified_base 3: mod_base = OTHER; note = 2'-O-methyluridine-3'-phosphate
  modified_base 4: mod_base = OTHER; note = 2'-O-methylguanosine-3'-phosphate
  modified_base 5: mod_base = OTHER; note = 2'-O-methyladenosine-3'-phosphate
  modified_base 6: mod_base = OTHER; note = 2'-O-methyladenosine-3'-phosphate
  modified_base 7: mod_base = OTHER; note = 2'-fluorocytidine-3'-phosphate
  modified_base 8: mod_base = OTHER; note = 2'-O-methyladenosine-3'-phosphate
  modified_base 9: mod_base = OTHER; note = 2'-fluoroadenosine-3'-phosphate
  modified_base 10: mod_base = OTHER; note = 2'-fluorocytidine-3'-phosphate
  modified_base 11: mod_base = OTHER; note = 2'-fluoroadenosine-3'-phosphate
  modified_base 12: mod_base = OTHER; note = 2'-O-methyluridine-3'-phosphate
  modified_base 13: mod_base = OTHER; note = 2'-O-methylguanosine-3'-phosphate
  modified_base 14: mod_base = OTHER; note = 2'-O-methylcytidine-3'-phosphate
  modified_base 15: mod_base = OTHER; note = 2'-O-methyluridine-3'-phosphate
  modified_base 16: mod_base = OTHER; note = 2'-O-methyladenosine-3'-phosphate
  modified_base 17: mod_base = OTHER; note = 2'-O-methyladenosine-3'-phosphate
  modified_base 18: mod_base = OTHER; note = 2'-O-methyladenosine-3'-phosphate
  modified_base 19: mod_base = OTHER; note = 2'-O-methyluridine-3'-phosphate
  modified_base 20: mod_base = OTHER; note = 2'-O-methylcytidine-3'-phosphate
  modified_base 21: mod_base = OTHER; note 2'-O-methyladenosine-3'-phosphate-N-[tris(GalNAc-alkyl)-ami dodecanoyl)]-4-hydroxyprolinol (Hyp-(GalNAc-alkyl)3)
tatgaacaacatgctaaatca

SEQ ID NO: 2477 - RNA, 23 nt, synthetic construct
  source 1..23: mol_type = other RNA
  modified_base 1: mod_base = OTHER; note = 2'-O-methyluridine-3'-phosphorothioate
  modified_base 2: mod_base = OTHER; note = 2'-fluoroguanosine-3'-phosphorothioate
  modified_base 3: mod_base = OTHER; note = 2'-O-methyladenosine-3'-phosphate
  modified_base 4: mod_base = OTHER; note = 2'-O-methyluridine-3'-phosphate
  modified_base 5: mod_base = OTHER; note = 2'-O-methyluridine-3'-phosphate
  modified_base 6: mod_base = OTHER; note = 2'-fluorouridine-3'-phosphate
  modified_base 7: mod_base = OTHER; note = 2'-O-methyladenosine-3'-phosphate
  modified_base 8: mod_base = OTHER; note = 2'-fluoroguanosine-3'-phosphate
  modified_base 9: mod_base = OTHER; note = 2'-fluorocytidine-3'-phosphate
  modified_base 10: mod_base = OTHER; note = 2'-O-methyladenosine-3'-phosphate
  modified_base 11: mod_base = OTHER; note = 2'-O-methyluridine-3'-phosphate
  modified_base 12: mod_base = OTHER; note = 2'-O-methylguanosine-3'-phosphate
  modified_base 13: mod_base = OTHER; note = 2'-O-methyluridine-3'-phosphate
  modified_base 14: mod_base = OTHER; note = 2'-fluorouridine-3'-phosphate
  modified_base 15: mod_base = OTHER; note = 2'-O-methylguanosine-3'-phosphate
  modified_base 16: mod_base = OTHER; note = 2'-fluorouridine-3'-phosphate
  modified_base 17: mod_base = OTHER; note = 2'-O-methyluridine-3'-phosphate
  modified_base 18: mod_base = OTHER; note = 2'-O-methylcytidine-3'-phosphate
  modified_base 19: mod_base = OTHER; note = 2'-O-methyladenosine-3'-phosphate
  modified_base 20: mod_base = OTHER; note = 2'-O-methyluridine-3'-phosphate
  modified_base 21: mod_base = OTHER; note = 2'-O-methyladenosine-3'- phosphorothioate
  modified_base 22: mod_base = OTHER; note = 2'-O-methyladenosine-3'- phosphorothioate
  modified_base 23: mod_base = OTHER; note = 2'-O-methyluridine-3'-phosphate
tgatttagcatgttgttcataat

SEQ ID NO: 2478 - RNA, 21 nt, synthetic construct
  source 1..21: mol_type = other RNA
  modified_base 1: mod_base = OTHER; note = 2'-O-methyladenosine-3'- phosphorothioate
  modified_base 2: mod_base = OTHER; note = 2'-O-methyluridine-3'-phosphorothioate
  modified_base 3: mod_base = OTHER; note = 2'-O-methylguanosine-3'-phosphate
  modified_base 4: mod_base = OTHER; note = 2'-O-methyladenosine-3'-phosphate
  modified_base 5: mod_base = OTHER; note = 2'-O-methyluridine-3'-phosphate
  modified_base 6: mod_base = OTHER; note = 2'-O-methyluridine-3'-phosphate
  modified_base 7: mod_base = OTHER; note = 2'-fluoroadenosine-3'-phosphate
  modified_base 8: mod_base = OTHER; note = 2'-O-methyluridine-3'-phosphate
  modified_base 9: mod_base = OTHER; note = 2'-fluoroguanosine-3'-phosphate
  modified_base 10: mod_base = OTHER; note = 2'-fluoroadenosine-3'-phosphate
  modified_base 11: mod_base = OTHER; note = 2'-fluoroadenosine-3'-phosphate
  modified_base 12: mod_base = OTHER; note = 2'-O-methylcytidine-3'-phosphate
  modified_base 13: mod_base = OTHER; note = 2'-O-methyladenosine-3'-phosphate
  modified_base 14: mod_base = OTHER; note = 2'-O-methyladenosine-3'-phosphate
  modified_base 15: mod_base = OTHER; note = 2'-O-methylcytidine-3'-phosphate
  modified_base 16: mod_base = OTHER; note = 2'-O-methyladenosine-3'-phosphate
  modified_base 17: mod_base = OTHER; note = 2'-O-methyluridine-3'-phosphate
  modified_base 18: mod_base = OTHER; note = 2'-O-methylguanosine-3'-phosphate
  modified_base 19: mod_base = OTHER; note = 2'-O-methylcytidine-3'-phosphate
  modified_base 20: mod_base = OTHER; note = 2'-O-methyluridine-3'-phosphate
  modified_base 21: mod_base = OTHER; note 2'-O-methyladenosine-3'-phosphate-N-[tris(GalNAc-alkyl)-ami dodecanoyl)]-4-hydroxyprolinol (Hyp-(GalNAc-alkyl)3)
atgattatgaacaacatgcta

SEQ ID NO: 2479 - RNA, 23 nt, synthetic construct
  source 1..23: mol_type = other RNA
  modified_base 1: mod_base = OTHER; note = 2'-O-methyluridine-3'-phosphorothioate
  modified_base 2: mod_base = OTHER; note = 2'-fluoroadenosine-3'-phosphorothioate
  modified_base 3: mod_base = OTHER; note = 2'-O-methylguanosine-3'-phosphate
  modified_base 4: mod_base = OTHER; note = 2'-O-methylcytidine-3'-phosphate
  modified_base 5: mod_base = OTHER; note = 2'-O-methyladenosine-3'-phosphate
  modified_base 6: mod_base = OTHER; note = 2'-fluorouridine-3'-phosphate
  modified_base 7: mod_base = OTHER; note = 2'-O-methylguanosine-3'-phosphate
  modified_base 8: mod_base = OTHER; note = 2'-fluorouridine-3'-phosphate
  modified_base 9: mod_base = OTHER; note = 2'-fluorouridine-3'-phosphate
  modified_base 10: mod_base = OTHER; note = 2'-O-methylguanosine-3'-phosphate
  modified_base 11: mod_base = OTHER; note = 2'-O-methyluridine-3'-phosphate
  modified_base 12: mod_base = OTHER; note = 2'-O-methyluridine-3'-phosphate
  modified_base 13: mod_base = OTHER; note = 2'-O-methylcytidine-3'-phosphate
  modified_base 14: mod_base = OTHER; note = 2'-fluoroadenosine-3'-phosphate
  modified_base 15: mod_base = OTHER; note = 2'-O-methyluridine-3'-phosphate
  modified_base 16: mod_base = OTHER; note = 2'-fluoroadenosine-3'-phosphate
  modified_base 17: mod_base = OTHER; note = 2'-O-methyladenosine-3'-phosphate
  modified_base 18: mod_base = OTHER; note = 2'-O-methyluridine-3'-phosphate
  modified_base 19: mod_base = OTHER; note = 2'-O-methylcytidine-3'-phosphate
  modified_base 20: mod_base = OTHER; note = 2'-O-methyladenosine-3'-phosphate
  modified_base 21: mod_base = OTHER; note = 2'-O-methyluridine-3'-phosphorothioate
  modified_base 22: mod_base = OTHER; note = 2'-O-methyluridine-3'-phosphorothioate
  modified_base 23: mod_base = OTHER; note = 2'-O-methylguanosine-3'-phosphate
tagcatgttgttcataatcattg

SEQ ID NO: 2480 - RNA, 21 nt, synthetic construct
  source 1..21: mol_type = other RNA
  modified_base 1: mod_base = OTHER; note = 2'-O-methyladenosine-3'- phosphorothioate
  modified_base 2: mod_base = OTHER; note = 2'-O-methyladenosine-3'- phosphorothioate
  modified_base 3: mod_base = OTHER; note = 2'-O-methyluridine-3'-phosphate
  modified_base 4: mod_base = OTHER; note = 2'-O-methylguanosine-3'-phosphate
  modified_base 5: mod_base = OTHER; note = 2'-O-methyladenosine-3'-phosphate
  modified_base 6: mod_base = OTHER; note = 2'-O-methyluridine-3'-phosphate
  modified_base 7: mod_base = OTHER; note = 2'-fluorouridine-3'-phosphate
  modified_base 8: mod_base = OTHER; note = 2'-O-methyladenosine-3'-phosphate
  modified_base 9: mod_base = OTHER; note = 2'-fluorouridine-3'-phosphate
  modified_base 10: mod_base = OTHER; note = 2'-fluoroguanosine-3'-phosphate
  modified_base 11: mod_base = OTHER; note = 2'-fluoroadenosine-3'-phosphate
  modified_base 12: mod_base = OTHER; note = 2'-O-methyladenosine-3'-phosphate
  modified_base 13: mod_base = OTHER; note = 2'-O-methylcytidine-3'-phosphate
  modified_base 14: mod_base = OTHER; note = 2'-O-methyladenosine-3'-phosphate
  modified_base 15: mod_base = OTHER; note = 2'-O-methyladenosine-3'-phosphate
  modified_base 16: mod_base = OTHER; note = 2'-O-methylcytidine-3'-phosphate
  modified_base 17: mod_base = OTHER; note = 2'-O-methyladenosine-3'-phosphate
  modified_base 18: mod_base = OTHER; note = 2'-O-methyluridine-3'-phosphate
  modified_base 19: mod_base = OTHER; note = 2'-O-methylguanosine-3'-phosphate
  modified_base 20: mod_base = OTHER; note = 2'-O-methylcytidine-3'-phosphate
  modified_base 21: mod_base = OTHER; note 2'-O-methyluridine-3'-phosphate-N-[tris(GalNAc-alkyl)-amido decanoyl)]-4-hydroxyprolinol (Hyp-(GalNAc-alkyl)3)
aatgattatgaacaacatgct

SEQ ID NO: 2481 - RNA, 23 nt, synthetic construct
  source 1..23: mol_type = other RNA
  modified_base 1: mod_base = OTHER; note = 2'-O-methyladenosine-3'- phosphorothioate
  modified_base 2: mod_base = OTHER; note = 2'-fluoroguanosine-3'-phosphorothioate
  modified_base 3: mod_base = OTHER; note = 2'-O-methylcytidine-3'-phosphate
  modified_base 4: mod_base = OTHER; note = 2'-O-methyladenosine-3'-phosphate
  modified_base 5: mod_base = OTHER; note = 2'-O-methyluridine-3'-phosphate
  modified_base 6: mod_base = OTHER; note = 2'-fluoroguanosine-3'-phosphate
  modified_base 7: mod_base = OTHER; note = 2'-O-methyluridine-3'-phosphate
  modified_base 8: mod_base = OTHER; note = 2'-fluorouridine-3'-phosphate
  modified_base 9: mod_base = OTHER; note = 2'-fluoroguanosine-3'-phosphate
  modified_base 10: mod_base = OTHER; note = 2'-O-methyluridine-3'-phosphate
  modified_base 11: mod_base = OTHER; note = 2'-O-methyluridine-3'-phosphate
  modified_base 12: mod_base = OTHER; note = 2'-O-methylcytidine-3'-phosphate
  modified_base 13: mod_base = OTHER; note = 2'-O-methyladenosine-3'-phosphate
  modified_base 14: mod_base = OTHER; note = 2'-fluorouridine-3'-phosphate
  modified_base 15: mod_base = OTHER; note = 2'-O-methyladenosine-3'-phosphate
  modified_base 16: mod_base = OTHER; note = 2'-fluoroadenosine-3'-phosphate
  modified_base 17: mod_base = OTHER; note = 2'-O-methyluridine-3'-phosphate
  modified_base 18: mod_base = OTHER; note = 2'-O-methylcytidine-3'-phosphate
  modified_base 19: mod_base = OTHER; note = 2'-O-methyladenosine-3'-phosphate
  modified_base 20: mod_base = OTHER; note = 2'-O-methyluridine-3'-phosphate
  modified_base 21: mod_base = OTHER; note = 2'-O-methyluridine-3'-phosphorothioate
  modified_base 22: mod_base = OTHER; note = 2'-O-methylguanosine-3'- phosphorothioate
  modified_base 23: mod_base = OTHER; note = 2'-O-methyladenosine-3'-phosphate
agcatgttgttcataatcattga

SEQ ID NO: 2482 - RNA, 21 nt, synthetic construct
  source 1..21: mol_type = other RNA
  modified_base 1: mod_base = OTHER; note = 2'-O-methyladenosine-3'- phosphorothioate
  modified_base 2: mod_base = OTHER; note = 2'-O-methyladenosine-3'- phosphorothioate
  modified_base 3: mod_base = OTHER; note = 2'-O-methyluridine-3'-phosphate
  modified_base 4: mod_base = OTHER; note = 2'-O-methyluridine-3'-phosphate
  modified_base 5: mod_base = OTHER; note = 2'-O-methylcytidine-3'-phosphate
  modified_base 6: mod_base = OTHER; note = 2'-O-methylcytidine-3'-phosphate
  modified_base 7: mod_base = OTHER; note = 2'-fluorocytidine-3'-phosphate
  modified_base 8: mod_base = OTHER; note = 2'-O-methylcytidine-3'-phosphate
  modified_base 9: mod_base = OTHER; note = 2'-fluoroadenosine-3'-phosphate
  modified_base 10: mod_base = OTHER; note = 2'-fluorocytidine-3'-phosphate
  modified_base 11: mod_base = OTHER; note = 2'-fluorouridine-3'-phosphate
  modified_base 12: mod_base = OTHER; note = 2'-O-methyluridine-3'-phosphate
  modified_base 13: mod_base = OTHER; note = 2'-O-methylcytidine-3'-phosphate
  modified_base 14: mod_base = OTHER; note = 2'-O-methyladenosine-3'-phosphate
  modified_base 15: mod_base = OTHER; note = 2'-O-methyladenosine-3'-phosphate
  modified_base 16: mod_base = OTHER; note = 2'-O-methyluridine-3'-phosphate
  modified_base 17: mod_base = OTHER; note = 2'-O-methyladenosine-3'-phosphate
  modified_base 18: mod_base = OTHER; note = 2'-O-methylcytidine-3'-phosphate
  modified_base 19: mod_base = OTHER; note = 2'-O-methyladenosine-3'-phosphate
  modified_base 20: mod_base = OTHER; note = 2'-O-methyladenosine-3'-phosphate
  modified_base 21: mod_base = OTHER; note 2'-O-methyladenosine-3'-phosphate-N-[tris(GalNAc-alkyl)-ami dodecanoyl)]-4-hydroxyprolinol (Hyp-(GalNAc-alkyl)3)
aattccccacttcaatacaaa

SEQ ID NO: 2483 - RNA, 23 nt, synthetic construct
  source 1..23: mol_type = other RNA
  modified_base 1: mod_base = OTHER; note = 2'-O-methyluridine-3'-phosphorothioate
  modified_base 2: mod_base = OTHER; note = 2'-fluorouridine -3'-phosphorothioate
  modified_base 3: mod_base = OTHER; note = 2'-O-methyluridine-3'-phosphate
  modified_base 4: mod_base = OTHER; note = 2'-O-methylguanosine-3'-phosphate
  modified_base 5: mod_base = OTHER; note = 2'-O-methyluridine-3'-phosphate
  modified_base 6: mod_base = OTHER; note = 2'-fluoroadenosine-3'-phosphate
  modified_base 7: mod_base = OTHER; note = 2'-O-methyluridine-3'-phosphate
  modified_base 8: mod_base = OTHER; note = 2'-fluorouridine-3'-phosphate
  modified_base 9: mod_base = OTHER; note = 2'-fluoroguanosine-3'-phosphate
  modified_base 10: mod_base = OTHER; note = 2'-O-methyladenosine-3'-phosphate
  modified_base 11: mod_base = OTHER; note = 2'-O-methyladenosine-3'-phosphate
  modified_base 12: mod_base = OTHER; note = 2'-O-methylguanosine-3'-phosphate
  modified_base 13: mod_base = OTHER; note = 2'-O-methyluridine-3'-phosphate
  modified_base 14: mod_base = OTHER; note = 2'-fluoroguanosine-3'-phosphate
  modified_base 15: mod_base = OTHER; note = 2'-O-methylguanosine-3'-phosphate
  modified_base 16: mod_base = OTHER; note = 2'-fluoroguanosine-3'-phosphate
  modified_base 17: mod_base = OTHER; note = 2'-O-methylguanosine-3'-phosphate
  modified_base 18: mod_base = OTHER; note = 2'-O-methyladenosine-3'-phosphate
  modified_base 19: mod_base = OTHER; note = 2'-O-methyladenosine-3'-phosphate
  modified_base 20: mod_base = OTHER; note = 2'-O-methyluridine-3'-phosphate
  modified_base 21: mod_base = OTHER; note = 2'-O-methyluridine-3'-phosphorothioate
  modified_base 22: mod_base = OTHER; note = 2'-O-methyladenosine-3'- phosphorothioate
  modified_base 23: mod_base = OTHER; note = 2'-O-methylcytidine-3'-phosphate
tttgtattgaagtggggaattac

SEQ ID NO: 2484 - RNA, 21 nt, synthetic construct
  source 1..21: mol_type = other RNA
  modified_base 1: mod_base = OTHER; note = 2'-O-methyladenosine-3'- phosphorothioate
  modified_base 2: mod_base = OTHER; note = 2'-O-methyluridine-3'-phosphorothioate
  modified_base 3: mod_base = OTHER; note = 2'-O-methyluridine-3'-phosphate
  modified_base 4: mod_base = OTHER; note = 2'-O-methylcytidine-3'-phosphate
  modified_base 5: mod_base = OTHER; note = 2'-O-methylcytidine-3'-phosphate
  modified_base 6: mod_base = OTHER; note = 2'-O-methylcytidine-3'-phosphate
  modified_base 7: mod_base = OTHER; note = 2'-fluorocytidine-3'-phosphate
  modified_base 8: mod_base = OTHER; note = 2'-O-methyladenosine-3'-phosphate
  modified_base 9: mod_base = OTHER; note = 2'-fluorocytidine-3'-phosphate
  modified_base 10: mod_base = OTHER; note = 2'-fluorouridine-3'-phosphate
  modified_base 11: mod_base = OTHER; note = 2'-fluorouridine-3'-phosphate
  modified_base 12: mod_base = OTHER; note = 2'-O-methylcytidine-3'-phosphate
  modified_base 13: mod_base = OTHER; note = 2'-O-methyladenosine-3'-phosphate
  modified_base 14: mod_base = OTHER; note = 2'-O-methyladenosine-3'-phosphate
  modified_base 15: mod_base = OTHER; note = 2'-O-methyluridine-3'-phosphate
  modified_base 16: mod_base = OTHER; note = 2'-O-methyladenosine-3'-phosphate
  modified_base 17: mod_base = OTHER; note = 2'-O-methylcytidine-3'-phosphate
  modified_base 18: mod_base = OTHER; note = 2'-O-methyladenosine-3'-phosphate
  modified_base 19: mod_base = OTHER; note = 2'-O-methyladenosine-3'-phosphate
  modified_base 20: mod_base = OTHER; note = 2'-O-methyladenosine-3'-phosphate
  modified_base 21: mod_base = OTHER; note 2'-O-methylguanosine-3'-phosphate-N-[tris(GalNAc-alkyl)-ami dodecanoyl)]-4-hydroxyprolinol (Hyp-(GalNAc-alkyl)3)
attccccacttcaatacaaag

SEQ ID NO: 2485 - RNA, 23 nt, synthetic construct
  source 1..23: mol_type = other RNA
  modified_base 1: mod_base = OTHER; note = 2'-O-methylcytidine-3'- phosphorothioate
  modified_base 2: mod_base = OTHER; note = 2'-fluorouridine -3'-phosphorothioate
  modified_base 3: mod_base = OTHER; note = 2'-O-methyluridine-3'-phosphate
  modified_base 4: mod_base = OTHER; note = 2'-O-methyluridine-3'-phosphate
  modified_base 5: mod_base = OTHER; note = 2'-O-methylguanosine-3'-phosphate
  modified_base 6: mod_base = OTHER; note = 2'-fluorouridine-3'-phosphate
  modified_base 7: mod_base = OTHER; note = 2'-O-methyladenosine-3'-phosphate
  modified_base 8: mod_base = OTHER; note = 2'-fluorouridine-3'-phosphate
  modified_base 9: mod_base = OTHER; note = 2'-fluorouridine-3'-phosphate
  modified_base 10: mod_base = OTHER; note = 2'-O-methylguanosine-3'-phosphate
  modified_base 11: mod_base = OTHER; note = 2'-O-methyladenosine-3'-phosphate
  modified_base 12: mod_base = OTHER; note = 2'-O-methyladenosine-3'-phosphate
  modified_base 13: mod_base = OTHER; note = 2'-O-methylguanosine-3'-phosphate
  modified_base 14: mod_base = OTHER; note = 2'-fluorouridine-3'-phosphate
  modified_base 15: mod_base = OTHER; note = 2'-O-methylguanosine-3'-phosphate
  modified_base 16: mod_base = OTHER; note = 2'-fluoroguanosine-3'-phosphate
  modified_base 17: mod_base = OTHER; note = 2'-O-methylguanosine-3'-phosphate
  modified_base 18: mod_base = OTHER; note = 2'-O-methylguanosine-3'-phosphate
  modified_base 19: mod_base = OTHER; note = 2'-O-methyladenosine-3'-phosphate
  modified_base 20: mod_base = OTHER; note = 2'-O-methyladenosine-3'-phosphate
  modified_base 21: mod_base = OTHER; note = 2'-O-methyluridine-3'-phosphorothioate
  modified_base 22: mod_base = OTHER; note = 2'-O-methyluridine-3'-phosphorothioate
  modified_base 23: mod_base = OTHER; note = 2'-O-methyladenosine-3'-phosphate
ctttgtattgaagtggggaatta

SEQ ID NO: 2486 - RNA, 21 nt, synthetic construct
  source 1..21: mol_type = other RNA
  modified_base 1: mod_base = OTHER; note = 2'-O-methylcytidine-3'- phosphorothioate
  modified_base 2: mod_base = OTHER; note = 2'-O-methyluridine-3'-phosphorothioate
  modified_base 3: mod_base = OTHER; note = 2'-O-methylguanosine-3'-phosphate
  modified_base 4: mod_base = OTHER; note = 2'-O-methyluridine-3'-phosphate
  modified_base 5: mod_base = OTHER; note = 2'-O-methyladenosine-3'-phosphate
  modified_base 6: mod_base = OTHER; note = 2'-O-methyladenosine-3'-phosphate
  modified_base 7: mod_base = OTHER; note = 2'-fluorouridine-3'-phosphate
  modified_base 8: mod_base = OTHER; note = 2'-O-methyluridine-3'-phosphate
  modified_base 9: mod_base = OTHER; note = 2'-fluorocytidine-3'-phosphate
  modified_base 10: mod_base = OTHER; note = 2'-fluorocytidine-3'-phosphate
  modified_base 11: mod_base = OTHER; note = 2'-fluorocytidine-3'-phosphate
  modified_base 12: mod_base = OTHER; note = 2'-O-methylcytidine-3'-phosphate
  modified_base 13: mod_base = OTHER; note = 2'-O-methyladenosine-3'-phosphate
  modified_base 14: mod_base = OTHER; note = 2'-O-methylcytidine-3'-phosphate
  modified_base 15: mod_base = OTHER; note = 2'-O-methyluridine-3'-phosphate
  modified_base 16: mod_base = OTHER; note = 2'-O-methyluridine-3'-phosphate
  modified_base 17: mod_base = OTHER; note = 2'-O-methylcytidine-3'-phosphate
  modified_base 18: mod_base = OTHER; note = 2'-O-methyladenosine-3'-phosphate
  modified_base 19: mod_base = OTHER; note = 2'-O-methyladenosine-3'-phosphate
  modified_base 20: mod_base = OTHER; note = 2'-O-methyluridine-3'-phosphate
  modified_base 21: mod_base = OTHER; note 2'-O-methyladenosine-3'-phosphate-N-[tris(GalNAc-alkyl)-ami dodecanoyl)]-4-hydroxyprolinol (Hyp-(GalNAc-alkyl)3)
ctgtaattccccacttcaata

SEQ ID NO: 2487 - RNA, 23 nt, synthetic construct
  source 1..23: mol_type = other RNA
  modified_base 1: mod_base = OTHER; note = 2'-O-methyluridine-3'-phosphorothioate
  modified_base 2: mod_base = OTHER; note = 2'-fluoroadenosine-3'-phosphorothioate
  modified_base 3: mod_base = OTHER; note = 2'-O-methyluridine-3'-phosphate
  modified_base 4: mod_base = OTHER; note = 2'-O-methyluridine-3'-phosphate
  modified_base 5: mod_base = OTHER; note = 2'-O-methylguanosine-3'-phosphate
  modified_base 6: mod_base = OTHER; note = 2'-fluoroadenosine-3'-phosphate
  modified_base 7: mod_base = OTHER; note = 2'-O-methyladenosine-3'-phosphate
  modified_base 8: mod_base = OTHER; note = 2'-fluoroguanosine-3'-phosphate
  modified_base 9: mod_base = OTHER; note = 2'-fluorouridine-3'-phosphate
  modified_base 10: mod_base = OTHER; note = 2'-O-methylguanosine-3'-phosphate
  modified_base 11: mod_base = OTHER; note = 2'-O-methylguanosine-3'-phosphate
  modified_base 12: mod_base = OTHER; note = 2'-O-methylguanosine-3'-phosphate
  modified_base 13: mod_base = OTHER; note = 2'-O-methylguanosine-3'-phosphate
  modified_base 14: mod_base = OTHER; note = 2'-fluoroadenosine-3'-phosphate
  modified_base 15: mod_base = OTHER; note = 2'-O-methyladenosine-3'-phosphate
  modified_base 16: mod_base = OTHER; note = 2'-fluorouridine-3'-phosphate
  modified_base 17: mod_base = OTHER; note = 2'-O-methyluridine-3'-phosphate
  modified_base 18: mod_base = OTHER; note = 2'-O-methyladenosine-3'-phosphate
  modified_base 19: mod_base = OTHER; note = 2'-O-methylcytidine-3'-phosphate
  modified_base 20: mod_base = OTHER; note = 2'-O-methyladenosine-3'-phosphate
  modified_base 21: mod_base = OTHER; note = 2'-O-methylguanosine-3'- phosphorothioate
  modified_base 22: mod_base = OTHER; note = 2'-O-methyladenosine-3'- phosphorothioate
  modified_base 23: mod_base = OTHER; note = 2'-O-methylcytidine-3'-phosphate
tattgaagtggggaattacagac

SEQ ID NO: 2488 - RNA, 21 nt, synthetic construct
  source 1..21: mol_type = other RNA
  modified_base 1: mod_base = OTHER; note = 2'-O-methyluridine-3'-phosphorothioate
  modified_base 2: mod_base = OTHER; note = 2'-O-methylcytidine-3'- phosphorothioate
  modified_base 3: mod_base = OTHER; note = 2'-O-methyluridine-3'-phosphate
  modified_base 4: mod_base = OTHER; note = 2'-O-methylguanosine-3'-phosphate
  modified_base 5: mod_base = OTHER; note = 2'-O-methyluridine-3'-phosphate
  modified_base 6: mod_base = OTHER; note = 2'-O-methyladenosine-3'-phosphate
  modified_base 7: mod_base = OTHER; note = 2'-fluoroadenosine-3'-phosphate
  modified_base 8: mod_base = OTHER; note = 2'-O-methyluridine-3'-phosphate
  modified_base 9: mod_base = OTHER; note = 2'-fluorouridine-3'-phosphate
  modified_base 10: mod_base = OTHER; note = 2'-fluorocytidine-3'-phosphate
  modified_base 11: mod_base = OTHER; note = 2'-fluorocytidine-3'-phosphate
  modified_base 12: mod_base = OTHER; note = 2'-O-methylcytidine-3'-phosphate
  modified_base 13: mod_base = OTHER; note = 2'-O-methylcytidine-3'-phosphate
  modified_base 14: mod_base = OTHER; note = 2'-O-methyladenosine-3'-phosphate
  modified_base 15: mod_base = OTHER; note = 2'-O-methylcytidine-3'-phosphate
  modified_base 16: mod_base = OTHER; note = 2'-O-methyluridine-3'-phosphate
  modified_base 17: mod_base = OTHER; note = 2'-O-methyluridine-3'-phosphate
  modified_base 18: mod_base = OTHER; note = 2'-O-methylcytidine-3'-phosphate
  modified_base 19: mod_base = OTHER; note = 2'-O-methyladenosine-3'-phosphate
  modified_base 20: mod_base = OTHER; note = 2'-O-methyladenosine-3'-phosphate
  modified_base 21: mod_base = OTHER; note 2'-O-methyluridine-3'-phosphate-N-[tris(GalNAc-alkyl)-amido decanoyl)]-4-hydroxyprolinol (Hyp-(GalNAc-alkyl)3)
tctgtaattccccacttcaat

SEQ ID NO: 2489 - RNA, 23 nt, synthetic construct
  source 1..23: mol_type = other RNA
  modified_base 1: mod_base = OTHER; note = 2'-O-methyladenosine-3'- phosphorothioate
  modified_base 2: mod_base = OTHER; note = 2'-fluorouridine -3'-phosphorothioate
  modified_base 3: mod_base = OTHER; note = 2'-O-methyluridine-3'-phosphate
  modified_base 4: mod_base = OTHER; note = 2'-O-methylguanosine-3'-phosphate
  modified_base 5: mod_base = OTHER; note = 2'-O-methyladenosine-3'-phosphate
  modified_base 6: mod_base = OTHER; note = 2'-fluoroadenosine-3'-phosphate
  modified_base 7: mod_base = OTHER; note = 2'-O-methylguanosine-3'-phosphate
  modified_base 8: mod_base = OTHER; note = 2'-fluorouridine-3'-phosphate
  modified_base 9: mod_base = OTHER; note = 2'-fluoroguanosine-3'-phosphate
  modified_base 10: mod_base = OTHER; note = 2'-O-methylguanosine-3'-phosphate
  modified_base 11: mod_base = OTHER; note = 2'-O-methylguanosine-3'-phosphate
  modified_base 12: mod_base = OTHER; note = 2'-O-methylguanosine-3'-phosphate
  modified_base 13: mod_base = OTHER; note = 2'-O-methyladenosine-3'-phosphate
  modified_base 14: mod_base = OTHER; note = 2'-fluoroadenosine-3'-phosphate
  modified_base 15: mod_base = OTHER; note = 2'-O-methyluridine-3'-phosphate
  modified_base 16: mod_base = OTHER; note = 2'-fluorouridine-3'-phosphate
  modified_base 17: mod_base = OTHER; note = 2'-O-methyladenosine-3'-phosphate
  modified_base 18: mod_base = OTHER; note = 2'-O-methylcytidine-3'-phosphate
  modified_base 19: mod_base = OTHER; note = 2'-O-methyladenosine-3'-phosphate
  modified_base 20: mod_base = OTHER; note = 2'-O-methylguanosine-3'-phosphate
  modified_base 21: mod_base = OTHER; note = 2'-O-methyladenosine-3'- phosphorothioate
  modified_base 22: mod_base = OTHER; note = 2'-O-methylcytidine-3'- phosphorothioate
  modified_base 23: mod_base = OTHER; note = 2'-O-methyluridine-3'-phosphate
attgaagtggggaattacagact

SEQ ID NO: 2490 - RNA, 21 nt, synthetic construct
  source 1..21: mol_type = other RNA
  modified_base 1: mod_base = OTHER; note = 2'-O-methyluridine-3'-phosphorothioate
  modified_base 2: mod_base = OTHER; note = 2'-O-methylguanosine-3'- phosphorothioate
  modified_base 3: mod_base = OTHER; note = 2'-O-methyladenosine-3'-phosphate
  modified_base 4: mod_base = OTHER; note = 2'-O-methyluridine-3'-phosphate
  modified_base 5: mod_base = OTHER; note = 2'-O-methylguanosine-3'-phosphate
  modified_base 6: mod_base = OTHER; note = 2'-O-methyluridine-3'-phosphate
  modified_base 7: mod_base = OTHER; note = 2'-fluoroguanosine-3'-phosphate
  modified_base 8: mod_base = OTHER; note = 2'-O-methylcytidine-3'-phosphate
  modified_base 9: mod_base = OTHER; note = 2'-fluoroguanosine-3'-phosphate
  modified_base 10: mod_base = OTHER; note = 2'-fluorouridine-3'-phosphate
  modified_base 11: mod_base = OTHER; note = 2'-fluoroadenosine-3'-phosphate
  modified_base 12: mod_base = OTHER; note = 2'-O-methyladenosine-3'-phosphate
  modified_base 13: mod_base = OTHER; note = 2'-O-methylcytidine-3'-phosphate
  modified_base 14: mod_base = OTHER; note = 2'-O-methyladenosine-3'-phosphate
  modified_base 15: mod_base = OTHER; note = 2'-O-methylguanosine-3'-phosphate
  modified_base 16: mod_base = OTHER; note = 2'-O-methyladenosine-3'-phosphate
  modified_base 17: mod_base = OTHER; note = 2'-O-methyluridine-3'-phosphate
  modified_base 18: mod_base = OTHER; note = 2'-O-methyluridine-3'-phosphate
  modified_base 19: mod_base = OTHER; note = 2'-O-methylcytidine-3'-phosphate
  modified_base 20: mod_base = OTHER; note = 2'-O-methyladenosine-3'-phosphate
  modified_base 21: mod_base = OTHER; note 2'-O-methyladenosine-3'-phosphate-N-[tris(GalNAc-alkyl)-ami dodecanoyl)]-4-hydroxyprolinol (Hyp-(GalNAc-alkyl)3)
tgatgtgcgtaacagattcaa

SEQ ID NO: 2491 - RNA, 23 nt, synthetic construct
  source 1..23: mol_type = other RNA
  modified_base 1: mod_base = OTHER; note = 2'-O-methyluridine-3'-phosphorothioate
  modified_base 2: mod_base = OTHER; note = 2'-fluorouridine -3'-phosphorothioate
  modified_base 3: mod_base = OTHER; note = 2'-O-methylguanosine-3'-phosphate
  modified_base 4: mod_base = OTHER; note = 2'-O-methyladenosine-3'-phosphate
  modified_base 5: mod_base = OTHER; note = 2'-O-methyladenosine-3'-phosphate
  modified_base 6: mod_base = OTHER; note = 2'-fluorouridine-3'-phosphate
  modified_base 7: mod_base = OTHER; note = 2'-O-methylcytidine-3'-phosphate
  modified_base 8: mod_base = OTHER; note = 2'-fluorouridine-3'-phosphate
  modified_base 9: mod_base = OTHER; note = 2'-fluoroguanosine-3'-phosphate
  modified_base 10: mod_base = OTHER; note = 2'-O-methyluridine-3'-phosphate
  modified_base 11: mod_base = OTHER; note = 2'-O-methyluridine-3'-phosphate
  modified_base 12: mod_base = OTHER; note = 2'-O-methyladenosine-3'-phosphate
  modified_base 13: mod_base = OTHER; note = 2'-O-methylcytidine-3'-phosphate
  modified_base 14: mod_base = OTHER; note = 2'-fluoroguanosine-3'-phosphate
  modified_base 15: mod_base = OTHER; note = 2'-O-methylcytidine-3'-phosphate
  modified_base 16: mod_base = OTHER; note = 2'-fluoroadenosine-3'-phosphate
  modified_base 17: mod_base = OTHER; note = 2'-O-methylcytidine-3'-phosphate
  modified_base 18: mod_base = OTHER; note = 2'-O-methyladenosine-3'-phosphate
  modified_base 19: mod_base = OTHER; note = 2'-O-methyluridine-3'-phosphate
  modified_base 20: mod_base = OTHER; note = 2'-O-methylcytidine-3'-phosphate
  modified_base 21: mod_base = OTHER; note = 2'-O-methyladenosine-3'- phosphorothioate
  modified_base 22: mod_base = OTHER; note = 2'-O-methyluridine-3'-phosphorothioate
  modified_base 23: mod_base = OTHER; note = 2'-O-methylcytidine-3'-phosphate
ttgaatctgttacgcacatcatc

SEQ ID NO: 2492 - RNA, 21 nt, synthetic construct
  source 1..21: mol_type = other RNA
  modified_base 1: mod_base = OTHER; note = 2'-O-methylguanosine-3'- phosphorothioate
  modified_base 2: mod_base = OTHER; note = 2'-O-methyladenosine-3'- phosphorothioate
  modified_base 3: mod_base = OTHER; note = 2'-O-methyluridine-3'-phosphate
  modified_base 4: mod_base = OTHER; note = 2'-O-methylguanosine-3'-phosphate
  modified_base 5: mod_base = OTHER; note = 2'-O-methyluridine-3'-phosphate
  modified_base 6: mod_base = OTHER; note = 2'-O-methylguanosine-3'-phosphate
  modified_base 7: mod_base = OTHER; note = 2'-fluorocytidine-3'-phosphate
  modified_base 8: mod_base = OTHER; note = 2'-O-methylguanosine-3'-phosphate
  modified_base 9: mod_base = OTHER; note = 2'-fluorouridine-3'-phosphate
  modified_base 10: mod_base = OTHER; note = 2'-fluoroadenosine-3'-phosphate
  modified_base 11: mod_base = OTHER; note = 2'-fluoroadenosine-3'-phosphate
  modified_base 12: mod_base = OTHER; note = 2'-O-methylcytidine-3'-phosphate
  modified_base 13: mod_base = OTHER; note = 2'-O-methyladenosine-3'-phosphate
  modified_base 14: mod_base = OTHER; note = 2'-O-methylguanosine-3'-phosphate
  modified_base 15: mod_base = OTHER; note = 2'-O-methyladenosine-3'-phosphate
  modified_base 16: mod_base = OTHER; note = 2'-O-methyluridine-3'-phosphate
  modified_base 17: mod_base = OTHER; note = 2'-O-methyluridine-3'-phosphate
  modified_base 18: mod_base = OTHER; note = 2'-O-methylcytidine-3'-phosphate
  modified_base 19: mod_base = OTHER; note = 2'-O-methyladenosine-3'-phosphate
  modified_base 20: mod_base = OTHER; note = 2'-O-methyladenosine-3'-phosphate
  modified_base 21: mod_base = OTHER; note 2'-O-methyladenosine-3'-phosphate-N-[tris(GalNAc-alkyl)-ami dodecanoyl)]-4-hydroxyprolinol (Hyp-(GalNAc-alkyl)3)
gatgtgcgtaacagattcaaa

SEQ ID NO: 2493 - RNA, 23 nt, synthetic construct
  source 1..23: mol_type = other RNA
  modified_base 1: mod_base = OTHER; note = 2'-O-methyluridine-3'-phosphorothioate
  modified_base 2: mod_base = OTHER; note = 2'-fluorouridine -3'-phosphorothioate
  modified_base 3: mod_base = OTHER; note = 2'-O-methyluridine-3'-phosphate
  modified_base 4: mod_base = OTHER; note = 2'-O-methylguanosine-3'-phosphate
  modified_base 5: mod_base = OTHER; note = 2'-O-methyladenosine-3'-phosphate
  modified_base 6: mod_base = OTHER; note = 2'-fluoroadenosine-3'-phosphate
  modified_base 7: mod_base = OTHER; note = 2'-O-methyluridine-3'-phosphate
  modified_base 8: mod_base = OTHER; note = 2'-fluorocytidine-3'-phosphate
  modified_base 9: mod_base = OTHER; note = 2'-fluorouridine-3'-phosphate
  modified_base 10: mod_base = OTHER; note = 2'-O-methylguanosine-3'-phosphate
  modified_base 11: mod_base = OTHER; note = 2'-O-methyluridine-3'-phosphate
  modified_base 12: mod_base = OTHER; note = 2'-O-methyluridine-3'-phosphate
  modified_base 13: mod_base = OTHER; note = 2'-O-methyladenosine-3'-phosphate
  modified_base 14: mod_base = OTHER; note = 2'-fluorocytidine-3'-phosphate
  modified_base 15: mod_base = OTHER; note = 2'-O-methylguanosine-3'-phosphate
  modified_base 16: mod_base = OTHER; note = 2'-fluorocytidine-3'-phosphate
  modified_base 17: mod_base = OTHER; note = 2'-O-methyladenosine-3'-phosphate
  modified_base 18: mod_base = OTHER; note = 2'-O-methylcytidine-3'-phosphate
  modified_base 19: mod_base = OTHER; note = 2'-O-methyladenosine-3'-phosphate
  modified_base 20: mod_base = OTHER; note = 2'-O-methyluridine-3'-phosphate
  modified_base 21: mod_base = OTHER; note = 2'-O-methylcytidine-3'- phosphorothioate
  modified_base 22: mod_base = OTHER; note = 2'-O-methyladenosine-3'- phosphorothioate
  modified_base 23: mod_base = OTHER; note = 2'-O-methyluridine-3'-phosphate
tttgaatctgttacgcacatcat

SEQ ID NO: 2494 - RNA, 21 nt, synthetic construct
  source 1..21: mol_type = other RNA
  modified_base 1: mod_base = OTHER; note = 2'-O-methyluridine-3'-phosphorothioate
  modified_base 2: mod_base = OTHER; note = 2'-O-methylguanosine-3'- phosphorothioate
  modified_base 3: mod_base = OTHER; note = 2'-O-methylguanosine-3'-phosphate
  modified_base 4: mod_base = OTHER; note = 2'-O-methyladenosine-3'-phosphate
  modified_base 5: mod_base = OTHER; note = 2'-O-methyluridine-3'-phosphate
  modified_base 6: mod_base = OTHER; note = 2'-O-methylguanosine-3'-phosphate
  modified_base 7: mod_base = OTHER; note = 2'-fluoroadenosine-3'-phosphate
  modified_base 8: mod_base = OTHER; note = 2'-O-methyluridine-3'-phosphate
  modified_base 9: mod_base = OTHER; note = 2'-fluoroguanosine-3'-phosphate
  modified_base 10: mod_base = OTHER; note = 2'-fluorouridine-3'-phosphate
  modified_base 11: mod_base = OTHER; note = 2'-fluoroguanosine-3'-phosphate
  modified_base 12: mod_base = OTHER; note = 2'-O-methylcytidine-3'-phosphate
  modified_base 13: mod_base = OTHER; note = 2'-O-methylguanosine-3'-phosphate
  modified_base 14: mod_base = OTHER; note = 2'-O-methyluridine-3'-phosphate
  modified_base 15: mod_base = OTHER; note = 2'-O-methyladenosine-3'-phosphate
  modified_base 16: mod_base = OTHER; note = 2'-O-methyladenosine-3'-phosphate
  modified_base 17: mod_base = OTHER; note = 2'-O-methylcytidine-3'-phosphate
  modified_base 18: mod_base = OTHER; note = 2'-O-methyladenosine-3'-phosphate
  modified_base 19: mod_base = OTHER; note = 2'-O-methylguanosine-3'-phosphate
  modified_base 20: mod_base = OTHER; note = 2'-O-methyladenosine-3'-phosphate
  modified_base 21: mod_base = OTHER; note 2'-O-methyluridine-3'-phosphate-N-[tris(GalNAc-alkyl)-amido decanoyl)]-4-hydroxyprolinol (Hyp-(GalNAc-alkyl)3)
tggatgatgtgcgtaacagat

SEQ ID NO: 2495 - RNA, 23 nt, synthetic construct
  source 1..23: mol_type = other RNA
  modified_base 1: mod_base = OTHER; note = 2'-O-methyladenosine-3'- phosphorothioate
  modified_base 2: mod_base = OTHER; note = 2'-fluorouridine -3'-phosphorothioate
  modified_base 3: mod_base = OTHER; note = 2'-O-methylcytidine-3'-phosphate
  modified_base 4: mod_base = OTHER; note = 2'-O-methyluridine-3'-phosphate
  modified_base 5: mod_base = OTHER; note = 2'-O-methylguanosine-3'-phosphate
  modified_base 6: mod_base = OTHER; note = 2'-fluorouridine-3'-phosphate
  modified_base 7: mod_base = OTHER; note = 2'-O-methyluridine-3'-phosphate
  modified_base 8: mod_base = OTHER; note = 2'-fluoroadenosine-3'-phosphate
  modified_base 9: mod_base = OTHER; note = 2'-fluorocytidine-3'-phosphate
  modified_base 10: mod_base = OTHER; note = 2'-O-methylguanosine-3'-phosphate
  modified_base 11: mod_base = OTHER; note = 2'-O-methylcytidine-3'-phosphate
  modified_base 12: mod_base = OTHER; note = 2'-O-methyladenosine-3'-phosphate
  modified_base 13: mod_base = OTHER; note = 2'-O-methylcytidine-3'-phosphate
  modified_base 14: mod_base = OTHER; note = 2'-fluoroadenosine-3'-phosphate
  modified_base 15: mod_base = OTHER; note = 2'-O-methyluridine-3'-phosphate
  modified_base 16: mod_base = OTHER; note = 2'-fluorocytidine-3'-phosphate
  modified_base 17: mod_base = OTHER; note = 2'-O-methyladenosine-3'-phosphate
  modified_base 18: mod_base = OTHER; note = 2'-O-methyluridine-3'-phosphate
  modified_base 19: mod_base = OTHER; note = 2'-O-methylcytidine-3'-phosphate
  modified_base 20: mod_base = OTHER; note = 2'-O-methylcytidine-3'-phosphate
  modified_base 21: mod_base = OTHER; note = 2'-O-methyladenosine-3'- phosphorothioate
  modified_base 22: mod_base = OTHER; note = 2'-O-methylguanosine-3'- phosphorothioate
  modified_base 23: mod_base = OTHER; note = 2'-O-methyladenosine-3'-phosphate
atctgttacgcacatcatccaga

SEQ ID NO: 2496 - RNA, 21 nt, synthetic construct
  source 1..21: mol_type = other RNA
  modified_base 1: mod_base = OTHER; note = 2'-O-methylcytidine-3'- phosphorothioate
  modified_base 2: mod_base = OTHER; note = 2'-O-methyluridine-3'-phosphorothioate
  modified_base 3: mod_base = OTHER; note = 2'-O-methylguanosine-3'-phosphate
  modified_base 4: mod_base = OTHER; note = 2'-O-methylguanosine-3'-phosphate
  modified_base 5: mod_base = OTHER; note = 2'-O-methyladenosine-3'-phosphate
  modified_base 6: mod_base = OTHER; note = 2'-O-methyluridine-3'-phosphate
  modified_base 7: mod_base = OTHER; note = 2'-fluoroguanosine-3'-phosphate
  modified_base 8: mod_base = OTHER; note = 2'-O-methyladenosine-3'-phosphate
  modified_base 9: mod_base = OTHER; note = 2'-fluorouridine-3'-phosphate
  modified_base 10: mod_base = OTHER; note = 2'-fluoroguanosine-3'-phosphate
  modified_base 11: mod_base = OTHER; note = 2'-fluorouridine-3'-phosphate
  modified_base 12: mod_base = OTHER; note = 2'-O-methylguanosine-3'-phosphate
  modified_base 13: mod_base = OTHER; note = 2'-O-methylcytidine-3'-phosphate
  modified_base 14: mod_base = OTHER; note = 2'-O-methylguanosine-3'-phosphate
  modified_base 15: mod_base = OTHER; note = 2'-O-methyluridine-3'-phosphate
  modified_base 16: mod_base = OTHER; note = 2'-O-methyladenosine-3'-phosphate
  modified_base 17: mod_base = OTHER; note = 2'-O-methyladenosine-3'-phosphate
  modified_base 18: mod_base = OTHER; note = 2'-O-methylcytidine-3'-phosphate
  modified_base 19: mod_base = OTHER; note = 2'-O-methyladenosine-3'-phosphate
  modified_base 20: mod_base = OTHER; note = 2'-O-methylguanosine-3'-phosphate
  modified_base 21: mod_base = OTHER; note 2'-O-methyladenosine-3'-phosphate-N-[tris(GalNAc-alkyl)-ami dodecanoyl)]-4-hydroxyprolinol (Hyp-(GalNAc-alkyl)3)
ctggatgatgtgcgtaacaga

SEQ ID NO: 2497 - RNA, 23 nt, synthetic construct
  source 1..23: mol_type = other RNA
  modified_base 1: mod_base = OTHER; note = 2'-O-methyluridine-3'-phosphorothioate
  modified_base 2: mod_base = OTHER; note = 2'-fluorocytidine-3'-phosphorothioate
  modified_base 3: mod_base = OTHER; note = 2'-O-methyluridine-3'-phosphate
  modified_base 4: mod_base = OTHER; note = 2'-O-methylguanosine-3'-phosphate
  modified_base 5: mod_base = OTHER; note = 2'-O-methyluridine-3'-phosphate
  modified_base 6: mod_base = OTHER; note = 2'-fluorouridine-3'-phosphate
  modified_base 7: mod_base = OTHER; note = 2'-O-methyladenosine-3'-phosphate
  modified_base 8: mod_base = OTHER; note = 2'-fluorocytidine-3'-phosphate
  modified_base 9: mod_base = OTHER; note = 2'-fluoroguanosine-3'-phosphate
  modified_base 10: mod_base = OTHER; note = 2'-O-methylcytidine-3'-phosphate
  modified_base 11: mod_base = OTHER; note = 2'-O-methyladenosine-3'-phosphate
  modified_base 12: mod_base = OTHER; note = 2'-O-methylcytidine-3'-phosphate
  modified_base 13: mod_base = OTHER; note = 2'-O-methyladenosine-3'-phosphate
  modified_base 14: mod_base = OTHER; note = 2'-fluorouridine-3'-phosphate
  modified_base 15: mod_base = OTHER; note = 2'-O-methylcytidine-3'-phosphate
  modified_base 16: mod_base = OTHER; note = 2'-fluoroadenosine-3'-phosphate
  modified_base 17: mod_base = OTHER; note = 2'-O-methyluridine-3'-phosphate
  modified_base 18: mod_base = OTHER; note = 2'-O-methylcytidine-3'-phosphate
  modified_base 19: mod_base = OTHER; note = 2'-O-methylcytidine-3'-phosphate
  modified_base 20: mod_base = OTHER; note = 2'-O-methyladenosine-3'-phosphate
  modified_base 21: mod_base = OTHER; note = 2'-O-methylguanosine-3'- phosphorothioate
  modified_base 22: mod_base = OTHER; note = 2'-O-methyladenosine-3'- phosphorothioate
  modified_base 23: mod_base = OTHER; note = 2'-O-methylcytidine-3'-phosphate
tctgttacgcacatcatccagac

SEQ ID NO: 2498 - RNA, 21 nt, synthetic construct
  source 1..21: mol_type = other RNA
  modified_base 1: mod_base = OTHER; note = 2'-O-methylguanosine-3'- phosphorothioate
  modified_base 2: mod_base = OTHER; note = 2'-O-methyladenosine-3'- phosphorothioate
  modified_base 3: mod_base = OTHER; note = 2'-O-methyladenosine-3'-phosphate
  modified_base 4: mod_base = OTHER; note = 2'-O-methyluridine-3'-phosphate
  modified_base 5: mod_base = OTHER; note = 2'-O-methylguanosine-3'-phosphate
  modified_base 6: mod_base = OTHER; note = 2'-O-methylguanosine-3'-phosphate
  modified_base 7: mod_base = OTHER; note = 2'-fluoroguanosine-3'-phosphate
  modified_base 8: mod_base = OTHER; note = 2'-O-methyluridine-3'-phosphate
  modified_base 9: mod_base = OTHER; note = 2'-fluoroguanosine-3'-phosphate
  modified_base 10: mod_base = OTHER; note = 2'-fluoroguanosine-3'-phosphate
  modified_base 11: mod_base = OTHER; note = 2'-fluorocytidine-3'-phosphate
  modified_base 12: mod_base = OTHER; note = 2'-O-methylguanosine-3'-phosphate
  modified_base 13: mod_base = OTHER; note = 2'-O-methylguanosine-3'-phosphate
  modified_base 14: mod_base = OTHER; note = 2'-O-methyluridine-3'-phosphate
  modified_base 15: mod_base = OTHER; note = 2'-O-methyladenosine-3'-phosphate
  modified_base 16: mod_base = OTHER; note = 2'-O-methyladenosine-3'-phosphate
  modified_base 17: mod_base = OTHER; note = 2'-O-methyluridine-3'-phosphate
  modified_base 18: mod_base = OTHER; note = 2'-O-methyluridine-3'-phosphate
  modified_base 19: mod_base = OTHER; note = 2'-O-methylguanosine-3'-phosphate
  modified_base 20: mod_base = OTHER; note = 2'-O-methylguanosine-3'-phosphate
  modified_base 21: mod_base = OTHER; note 2'-O-methyluridine-3'-phosphate-N-[tris(GalNAc-alkyl)-amido decanoyl)]-4-hydroxyprolinol (Hyp-(GalNAc-alkyl)3)
gaatgggtggcggtaattggt

SEQ ID NO: 2499 - RNA, 23 nt, synthetic construct
  source 1..23: mol_type = other RNA
  modified_base 1: mod_base = OTHER; note = 2'-O-methyladenosine-3'- phosphorothioate
  modified_base 2: mod_base = OTHER; note = 2'-fluorocytidine-3'-phosphorothioate
  modified_base 3: mod_base = OTHER; note = 2'-O-methylcytidine-3'-phosphate
  modified_base 4: mod_base = OTHER; note = 2'-O-methyladenosine-3'-phosphate
  modified_base 5: mod_base = OTHER; note = 2'-O-methyladenosine-3'-phosphate
  modified_base 6: mod_base = OTHER; note = 2'-fluorouridine-3'-phosphate
  modified_base 7: mod_base = OTHER; note = 2'-O-methyluridine-3'-phosphate
  modified_base 8: mod_base = OTHER; note = 2'-fluoroadenosine-3'-phosphate
  modified_base 9: mod_base = OTHER; note = 2'-fluorocytidine-3'-phosphate
  modified_base 10: mod_base = OTHER; note = 2'-O-methylcytidine-3'-phosphate
  modified_base 11: mod_base = OTHER; note = 2'-O-methylguanosine-3'-phosphate
  modified_base 12: mod_base = OTHER; note = 2'-O-methylcytidine-3'-phosphate
  modified_base 13: mod_base = OTHER; note = 2'-O-methylcytidine-3'-phosphate
  modified_base 14: mod_base = OTHER; note = 2'-fluoroadenosine-3'-phosphate
  modified_base 15: mod_base = OTHER; note = 2'-O-methylcytidine-3'-phosphate
  modified_base 16: mod_base = OTHER; note = 2'-fluorocytidine-3'-phosphate
  modified_base 17: mod_base = OTHER; note = 2'-O-methylcytidine-3'-phosphate
  modified_base 18: mod_base = OTHER; note = 2'-O-methyladenosine-3'-phosphate
  modified_base 19: mod_base = OTHER; note = 2'-O-methyluridine-3'-phosphate
  modified_base 20: mod_base = OTHER; note = 2'-O-methyluridine-3'-phosphate
  modified_base 21: mod_base = OTHER; note = 2'-O-methylcytidine-3'- phosphorothioate
  modified_base 22: mod_base = OTHER; note = 2'-O-methylcytidine-3'- phosphorothioate
  modified_base 23: mod_base = OTHER; note = 2'-O-methyladenosine-3'-phosphate
accaattaccgccacccattcca

SEQ ID NO: 2500 - RNA, 21 nt, synthetic construct
  source 1..21: mol_type = other RNA
  modified_base 1: mod_base = OTHER; note = 2'-O-methyladenosine-3'- phosphorothioate
  modified_base 2: mod_base = OTHER; note = 2'-O-methyladenosine-3'- phosphorothioate
  modified_base 3: mod_base = OTHER; note = 2'-O-methyluridine-3'-phosphate
  modified_base 4: mod_base = OTHER; note = 2'-O-methylguanosine-3'-phosphate
  modified_base 5: mod_base = OTHER; note = 2'-O-methylguanosine-3'-phosphate
  modified_base 6: mod_base = OTHER; note = 2'-O-methylguanosine-3'-phosphate
  modified_base 7: mod_base = OTHER; note = 2'-fluorouridine-3'-phosphate
  modified_base 8: mod_base = OTHER; note = 2'-O-methylguanosine-3'-phosphate
  modified_base 9: mod_base = OTHER; note = 2'-fluoroguanosine-3'-phosphate
  modified_base 10: mod_base = OTHER; note = 2'-fluorocytidine-3'-phosphate
  modified_base 11: mod_base = OTHER; note = 2'-fluoroguanosine-3'-phosphate
  modified_base 12: mod_base = OTHER; note = 2'-O-methylguanosine-3'-phosphate
  modified_base 13: mod_base = OTHER; note = 2'-O-methyluridine-3'-phosphate
  modified_base 14: mod_base = OTHER; note = 2'-O-methyladenosine-3'-phosphate
  modified_base 15: mod_base = OTHER; note = 2'-O-methyladenosine-3'-phosphate
  modified_base 16: mod_base = OTHER; note = 2'-O-methyluridine-3'-phosphate
  modified_base 17: mod_base = OTHER; note = 2'-O-methyluridine-3'-phosphate
  modified_base 18: mod_base = OTHER; note = 2'-O-methylguanosine-3'-phosphate
  modified_base 19: mod_base = OTHER; note = 2'-O-methylguanosine-3'-phosphate
  modified_base 20: mod_base = OTHER; note = 2'-O-methyluridine-3'-phosphate
  modified_base 21: mod_base = OTHER; note 2'-O-methylguanosine-3'-phosphate-N-[tris(GalNAc-alkyl)-ami dodecanoyl)]-4-hydroxyprolinol (Hyp-(GalNAc-alkyl)3)
aatgggtggcggtaattggtg

SEQ ID NO: 2501 - RNA, 23 nt, synthetic construct
  source 1..23: mol_type = other RNA
  modified_base 1: mod_base = OTHER; note = 2'-O-methylcytidine-3'- phosphorothioate
  modified_base 2: mod_base = OTHER; note = 2'-fluoroadenosine-3'-phosphorothioate
  modified_base 3: mod_base = OTHER; note = 2'-O-methylcytidine-3'-phosphate
  modified_base 4: mod_base = OTHER; note = 2'-O-methylcytidine-3'-phosphate
  modified_base 5: mod_base = OTHER; note = 2'-O-methyladenosine-3'-phosphate
  modified_base 6: mod_base = OTHER; note = 2'-fluoroadenosine-3'-phosphate
  modified_base 7: mod_base = OTHER; note = 2'-O-methyluridine-3'-phosphate
  modified_base 8: mod_base = OTHER; note = 2'-fluorouridine-3'-phosphate
  modified_base 9: mod_base = OTHER; note = 2'-fluoroadenosine-3'-phosphate
  modified_base 10: mod_base = OTHER; note = 2'-O-methylcytidine-3'-phosphate
  modified_base 11: mod_base = OTHER; note = 2'-O-methylcytidine-3'-phosphate
  modified_base 12: mod_base = OTHER; note = 2'-O-methylguanosine-3'-phosphate
  modified_base 13: mod_base = OTHER; note = 2'-O-methylcytidine-3'-phosphate
  modified_base 14: mod_base = OTHER; note = 2'-fluorocytidine-3'-phosphate
  modified_base 15: mod_base = OTHER; note = 2'-O-methyladenosine-3'-phosphate
  modified_base 16: mod_base = OTHER; note = 2'-fluorocytidine-3'-phosphate
  modified_base 17: mod_base = OTHER; note = 2'-O-methylcytidine-3'-phosphate
  modified_base 18: mod_base = OTHER; note = 2'-O-methylcytidine-3'-phosphate
  modified_base 19: mod_base = OTHER; note = 2'-O-methyladenosine-3'-phosphate
  modified_base 20: mod_base = OTHER; note = 2'-O-methyluridine-3'-phosphate
  modified_base 21: mod_base = OTHER; note = 2'-O-methyluridine-3'-phosphorothioate
  modified_base 22: mod_base = OTHER; note = 2'-O-methylcytidine-3'- phosphorothioate
  modified_base 23: mod_base = OTHER; note = 2'-O-methylcytidine-3'-phosphate
caccaattaccgccacccattcc

SEQ ID NO: 2502 - RNA, 21 nt, synthetic construct
  source 1..21: mol_type = other RNA
  modified_base 1: mod_base = OTHER; note = 2'-O-methyladenosine-3'- phosphorothioate
  modified_base 2: mod_base = OTHER; note = 2'-O-methyluridine-3'-phosphorothioate
  modified_base 3: mod_base = OTHER; note = 2'-O-methyluridine-3'-phosphate
  modified_base 4: mod_base = OTHER; note = 2'-O-methylguanosine-3'-phosphate
  modified_base 5: mod_base = OTHER; note = 2'-O-methylguanosine-3'-phosphate
  modified_base 6: mod_base = OTHER; note = 2'-O-methyladenosine-3'-phosphate
  modified_base 7: mod_base = OTHER; note = 2'-fluoroadenosine-3'-phosphate
  modified_base 8: mod_base = OTHER; note = 2'-O-methyluridine-3'-phosphate
  modified_base 9: mod_base = OTHER; note = 2'-fluoroguanosine-3'-phosphate
  modified_base 10: mod_base = OTHER; note = 2'-fluoroguanosine-3'-phosphate
  modified_base 11: mod_base = OTHER; note = 2'-fluoroguanosine-3'-phosphate
  modified_base 12: mod_base = OTHER; note = 2'-O-methyluridine-3'-phosphate
  modified_base 13: mod_base = OTHER; note = 2'-O-methylguanosine-3'-phosphate
  modified_base 14: mod_base = OTHER; note = 2'-O-methylguanosine-3'-phosphate
  modified_base 15: mod_base = OTHER; note = 2'-O-methylcytidine-3'-phosphate
  modified_base 16: mod_base = OTHER; note = 2'-O-methylguanosine-3'-phosphate
  modified_base 17: mod_base = OTHER; note = 2'-O-methylguanosine-3'-phosphate
  modified_base 18: mod_base = OTHER; note = 2'-O-methyluridine-3'-phosphate
  modified_base 19: mod_base = OTHER; note = 2'-O-methyladenosine-3'-phosphate
  modified_base 20: mod_base = OTHER; note = 2'-O-methyladenosine-3'-phosphate
  modified_base 21: mod_base = OTHER; note 2'-O-methyluridine-3'-phosphate-N-[tris(GalNAc-alkyl)-amido decanoyl)]-4-hydroxyprolinol (Hyp-(GalNAc-alkyl)3)
attggaatgggtggcggtaat

SEQ ID NO: 2503 - RNA, 23 nt, synthetic construct
  source 1..23: mol_type = other RNA
  modified_base 1: mod_base = OTHER; note = 2'-O-methyladenosine-3'- phosphorothioate
  modified_base 2: mod_base = OTHER; note = 2'-fluorouridine -3'-phosphorothioate
  modified_base 3: mod_base = OTHER; note = 2'-O-methyluridine-3'-phosphate
  modified_base 4: mod_base = OTHER; note = 2'-O-methyladenosine-3'-phosphate
  modified_base 5: mod_base = OTHER; note = 2'-O-methylcytidine-3'-phosphate
  modified_base 6: mod_base = OTHER; note = 2'-fluorocytidine-3'-phosphate
  modified_base 7: mod_base = OTHER; note = 2'-O-methylguanosine-3'-phosphate
  modified_base 8: mod_base = OTHER; note = 2'-fluorocytidine-3'-phosphate
  modified_base 9: mod_base = OTHER; note = 2'-fluorocytidine-3'-phosphate
  modified_base 10: mod_base = OTHER; note = 2'-O-methyladenosine-3'-phosphate
  modified_base 11: mod_base = OTHER; note = 2'-O-methylcytidine-3'-phosphate
  modified_base 12: mod_base = OTHER; note = 2'-O-methylcytidine-3'-phosphate
  modified_base 13: mod_base = OTHER; note = 2'-O-methylcytidine-3'-phosphate
  modified_base 14: mod_base = OTHER; note = 2'-fluoroadenosine-3'-phosphate
  modified_base 15: mod_base = OTHER; note = 2'-O-methyluridine-3'-phosphate
  modified_base 16: mod_base = OTHER; note = 2'-fluorouridine-3'-phosphate
  modified_base 17: mod_base = OTHER; note = 2'-O-methylcytidine-3'-phosphate
  modified_base 18: mod_base = OTHER; note = 2'-O-methylcytidine-3'-phosphate
  modified_base 19: mod_base = OTHER; note = 2'-O-methyladenosine-3'-phosphate
  modified_base 20: mod_base = OTHER; note = 2'-O-methyladenosine-3'-phosphate
  modified_base 21: mod_base = OTHER; note = 2'-O-methyluridine-3'-phosphorothioate
  modified_base 22: mod_base = OTHER; note = 2'-O-methyluridine-3'-phosphorothioate
  modified_base 23: mod_base = OTHER; note = 2'-O-methylcytidine-3'-phosphate
attaccgccacccattccaattc

SEQ ID NO: 2504 - RNA, 21 nt, synthetic construct
  source 1..21: mol_type = other RNA
  modified_base 1: mod_base = OTHER; note = 2'-O-methyladenosine-3'- phosphorothioate
  modified_base 2: mod_base = OTHER; note = 2'-O-methyladenosine-3'- phosphorothioate
  modified_base 3: mod_base = OTHER; note = 2'-O-methyluridine-3'-phosphate
  modified_base 4: mod_base = OTHER; note = 2'-O-methyluridine-3'-phosphate
  modified_base 5: mod_base = OTHER; note = 2'-O-methylguanosine-3'-phosphate
  modified_base 6: mod_base = OTHER; note = 2'-O-methylguanosine-3'-phosphate
  modified_base 7: mod_base = OTHER; note = 2'-fluoroadenosine-3'-phosphate
  modified_base 8: mod_base = OTHER; note = 2'-O-methyladenosine-3'-phosphate
  modified_base 9: mod_base = OTHER; note = 2'-fluorouridine-3'-phosphate
  modified_base 10: mod_base = OTHER; note = 2'-fluoroguanosine-3'-phosphate
  modified_base 11: mod_base = OTHER; note = 2'-fluoroguanosine-3'-phosphate
  modified_base 12: mod_base = OTHER; note = 2'-O-methylguanosine-3'-phosphate
  modified_base 13: mod_base = OTHER; note = 2'-O-methyluridine-3'-phosphate
  modified_base 14: mod_base = OTHER; note = 2'-O-methylguanosine-3'-phosphate
  modified_base 15: mod_base = OTHER; note = 2'-O-methylguanosine-3'-phosphate
  modified_base 16: mod_base = OTHER; note = 2'-O-methylcytidine-3'-phosphate
  modified_base 17: mod_base = OTHER; note = 2'-O-methylguanosine-3'-phosphate
  modified_base 18: mod_base = OTHER; note = 2'-O-methylguanosine-3'-phosphate
  modified_base 19: mod_base = OTHER; note = 2'-O-methyluridine-3'-phosphate
  modified_base 20: mod_base = OTHER; note = 2'-O-methyladenosine-3'-phosphate
  modified_base 21: mod_base = OTHER; note 2'-O-methyladenosine-3'-phosphate-N-[tris(GalNAc-alkyl)-ami dodecanoyl)]-4-hydroxyprolinol (Hyp-(GalNAc-alkyl)3)
aattggaatgggtggcggtaa

SEQ ID NO: 2505 - RNA, 23 nt, synthetic construct
  source 1..23: mol_type = other RNA
  modified_base 1: mod_base = OTHER; note = 2'-O-methyluridine-3'-phosphorothioate
  modified_base 2: mod_base = OTHER; note = 2'-fluorouridine -3'-phosphorothioate
  modified_base 3: mod_base = OTHER; note = 2'-O-methyladenosine-3'-phosphate
  modified_base 4: mod_base = OTHER; note = 2'-O-methylcytidine-3'-phosphate
  modified_base 5: mod_base = OTHER; note = 2'-O-methylcytidine-3'-phosphate
  modified_base 6: mod_base = OTHER; note = 2'-fluoroguanosine-3'-phosphate
  modified_base 7: mod_base = OTHER; note = 2'-O-methylcytidine-3'-phosphate
  modified_base 8: mod_base = OTHER; note = 2'-fluorocytidine-3'-phosphate
  modified_base 9: mod_base = OTHER; note = 2'-fluoroadenosine-3'-phosphate
  modified_base 10: mod_base = OTHER; note = 2'-O-methylcytidine-3'-phosphate
  modified_base 11: mod_base = OTHER; note = 2'-O-methylcytidine-3'-phosphate
  modified_base 12: mod_base = OTHER; note = 2'-O-methylcytidine-3'-phosphate
  modified_base 13: mod_base = OTHER; note = 2'-O-methyladenosine-3'-phosphate
  modified_base 14: mod_base = OTHER; note = 2'-fluorouridine-3'-phosphate
  modified_base 15: mod_base = OTHER; note = 2'-O-methyluridine-3'-phosphate
  modified_base 16: mod_base = OTHER; note = 2'-fluorocytidine-3'-phosphate
  modified_base 17: mod_base = OTHER; note = 2'-O-methylcytidine-3'-phosphate
  modified_base 18: mod_base = OTHER; note = 2'-O-methyladenosine-3'-phosphate
  modified_base 19: mod_base = OTHER; note = 2'-O-methyladenosine-3'-phosphate
  modified_base 20: mod_base = OTHER; note = 2'-O-methyluridine-3'-phosphate
  modified_base 21: mod_base = OTHER; note = 2'-O-methyluridine-3'-phosphorothioate
  modified_base 22: mod_base = OTHER; note = 2'-O-methylcytidine-3'- phosphorothioate
  modified_base 23: mod_base = OTHER; note = 2'-O-methyluridine-3'-phosphate
ttaccgccacccattccaattct

SEQ ID NO: 2506 - RNA, 21 nt, synthetic construct
  source 1..21: mol_type = other RNA
  modified_base 1: mod_base = OTHER; note = 2'-O-methyluridine-3'-phosphorothioate
  modified_base 2: mod_base = OTHER; note = 2'-O-methylcytidine-3'- phosphorothioate
  modified_base 3: mod_base = OTHER; note = 2'-O-methylcytidine-3'-phosphate
  modified_base 4: mod_base = OTHER; note = 2'-O-methylguanosine-3'-phosphate
  modified_base 5: mod_base = OTHER; note = 2'-O-methylguanosine-3'-phosphate
  modified_base 6: mod_base = OTHER; note = 2'-O-methyladenosine-3'-phosphate
  modified_base 7: mod_base = OTHER; note = 2'-fluoroadenosine-3'-phosphate
  modified_base 8: mod_base = OTHER; note = 2'-O-methyluridine-3'-phosphate
  modified_base 9: mod_base = OTHER; note = 2'-fluoroguanosine-3'-phosphate
  modified_base 10: mod_base = OTHER; note = 2'-fluorouridine-3'-phosphate
  modified_base 11: mod_base = OTHER; note = 2'-fluorouridine-3'-phosphate
  modified_base 12: mod_base = OTHER; note = 2'-O-methylguanosine-3'-phosphate
  modified_base 13: mod_base = OTHER; note = 2'-O-methylcytidine-3'-phosphate
  modified_base 14: mod_base = OTHER; note = 2'-O-methyluridine-3'-phosphate
  modified_base 15: mod_base = OTHER; note = 2'-O-methylguanosine-3'-phosphate
  modified_base 16: mod_base = OTHER; note = 2'-O-methyladenosine-3'-phosphate
  modified_base 17: mod_base = OTHER; note = 2'-O-methyladenosine-3'-phosphate
  modified_base 18: mod_base = OTHER; note = 2'-O-methyladenosine-3'-phosphate
  modified_base 19: mod_base = OTHER; note = 2'-O-methylcytidine-3'-phosphate
  modified_base 20: mod_base = OTHER; note = 2'-O-methyladenosine-3'-phosphate
  modified_base 21: mod_base = OTHER; note 2'-O-methylguanosine-3'-phosphate-N-[tris(GalNAc-alkyl)-ami dodecanoyl)]-4-hydroxyprolinol (Hyp-(GalNAc-alkyl)3)
tccggaatgttgctgaaacag

SEQ ID NO: 2507 - RNA, 23 nt, synthetic construct
  source 1..23: mol_type = other RNA
  modified_base 1: mod_base = OTHER; note = 2'-O-methylcytidine-3'- phosphorothioate
  modified_base 2: mod_base = OTHER; note = 2'-fluorouridine -3'-phosphorothioate
  modified_base 3: mod_base = OTHER; note = 2'-O-methylguanosine-3'-phosphate
  modified_base 4: mod_base = OTHER; note = 2'-O-methyluridine-3'-phosphate
  modified_base 5: mod_base = OTHER; note = 2'-O-methyluridine-3'-phosphate
  modified_base 6: mod_base = OTHER; note = 2'-fluorouridine-3'-phosphate
  modified_base 7: mod_base = OTHER; note = 2'-O-methylcytidine-3'-phosphate
  modified_base 8: mod_base = OTHER; note = 2'-fluoroadenosine-3'-phosphate
  modified_base 9: mod_base = OTHER; note = 2'-fluoroguanosine-3'-phosphate
  modified_base 10: mod_base = OTHER; note = 2'-O-methylcytidine-3'-phosphate
  modified_base 11: mod_base = OTHER; note = 2'-O-methyladenosine-3'-phosphate
  modified_base 12: mod_base = OTHER; note = 2'-O-methyladenosine-3'-phosphate
  modified_base 13: mod_base = OTHER; note = 2'-O-methylcytidine-3'-phosphate
  modified_base 14: mod_base = OTHER; note = 2'-fluoroadenosine-3'-phosphate
  modified_base 15: mod_base = OTHER; note = 2'-O-methyluridine-3'-phosphate
  modified_base 16: mod_base = OTHER; note = 2'-fluorouridine-3'-phosphate
  modified_base 17: mod_base = OTHER; note = 2'-O-methylcytidine-3'-phosphate
  modified_base 18: mod_base = OTHER; note = 2'-O-methylcytidine-3'-phosphate
  modified_base 19: mod_base = OTHER; note = 2'-O-methylguanosine-3'-phosphate
  modified_base 20: mod_base = OTHER; note = 2'-O-methylguanosine-3'-phosphate
  modified_base 21: mod_base = OTHER; note = 2'-O-methyladenosine-3'- phosphorothioate
  modified_base 22: mod_base = OTHER; note = 2'-O-methylguanosine-3'- phosphorothioate
  modified_base 23: mod_base = OTHER; note = 2'-O-methylcytidine-3'-phosphate
ctgtttcagcaacattccggagc

SEQ ID NO: 2508 - RNA, 21 nt, synthetic construct
  source 1..21: mol_type = other RNA
  modified_base 1: mod_base = OTHER; note = 2'-O-methylcytidine-3'- phosphorothioate
  modified_base 2: mod_base = OTHER; note = 2'-O-methylcytidine-3'- phosphorothioate
  modified_base 3: mod_base = OTHER; note = 2'-O-methylguanosine-3'-phosphate
  modified_base 4: mod_base = OTHER; note = 2'-O-methylguanosine-3'-phosphate
  modified_base 5: mod_base = OTHER; note = 2'-O-methyladenosine-3'-phosphate
  modified_base 6: mod_base = OTHER; note = 2'-O-methyladenosine-3'-phosphate
  modified_base 7: mod_base = OTHER; note = 2'-fluorouridine-3'-phosphate
  modified_base 8: mod_base = OTHER; note = 2'-O-methylguanosine-3'-phosphate
  modified_base 9: mod_base = OTHER; note = 2'-fluorouridine-3'-phosphate
  modified_base 10: mod_base = OTHER; note = 2'-fluorouridine-3'-phosphate
  modified_base 11: mod_base = OTHER; note = 2'-fluoroguanosine-3'-phosphate
  modified_base 12: mod_base = OTHER; note = 2'-O-methylcytidine-3'-phosphate
  modified_base 13: mod_base = OTHER; note = 2'-O-methyluridine-3'-phosphate
  modified_base 14: mod_base = OTHER; note = 2'-O-methylguanosine-3'-phosphate
  modified_base 15: mod_base = OTHER; note = 2'-O-methyladenosine-3'-phosphate
  modified_base 16: mod_base = OTHER; note = 2'-O-methyladenosine-3'-phosphate
  modified_base 17: mod_base = OTHER; note = 2'-O-methyladenosine-3'-phosphate
  modified_base 18: mod_base = OTHER; note = 2'-O-methylcytidine-3'-phosphate
  modified_base 19: mod_base = OTHER; note = 2'-O-methyladenosine-3'-phosphate
  modified_base 20: mod_base = OTHER; note = 2'-O-methylguanosine-3'-phosphate
  modified_base 21: mod_base = OTHER; note 2'-O-methyladenosine-3'-phosphate-N-[tris(GalNAc-alkyl)-ami dodecanoyl)]-4-hydroxyprolinol (Hyp-(GalNAc-alkyl)3)
ccggaatgttgctgaaacaga

SEQ ID NO: 2509 - RNA, 23 nt, synthetic construct
  source 1..23: mol_type = other RNA
  modified_base 1: mod_base = OTHER; note = 2'-O-methyluridine-3'-phosphorothioate
  modified_base 2: mod_base = OTHER; note = 2'-fluorocytidine-3'-phosphorothioate
  modified_base 3: mod_base = OTHER; note = 2'-O-methyluridine-3'-phosphate
  modified_base 4: mod_base = OTHER; note = 2'-O-methylguanosine-3'-phosphate
  modified_base 5: mod_base = OTHER; note = 2'-O-methyluridine-3'-phosphate
  modified_base 6: mod_base = OTHER; note = 2'-fluorouridine-3'-phosphate
  modified_base 7: mod_base = OTHER; note = 2'-O-methyluridine-3'-phosphate
  modified_base 8: mod_base = OTHER; note = 2'-fluorocytidine-3'-phosphate
  modified_base 9: mod_base = OTHER; note = 2'-fluoroadenosine-3'-phosphate
  modified_base 10: mod_base = OTHER; note = 2'-O-methylguanosine-3'-phosphate
  modified_base 11: mod_base = OTHER; note = 2'-O-methylcytidine-3'-phosphate
  modified_base 12: mod_base = OTHER; note = 2'-O-methyladenosine-3'-phosphate
  modified_base 13: mod_base = OTHER; note = 2'-O-methyladenosine-3'-phosphate
  modified_base 14: mod_base = OTHER; note = 2'-fluorocytidine-3'-phosphate
  modified_base 15: mod_base = OTHER; note = 2'-O-methyladenosine-3'-phosphate
  modified_base 16: mod_base = OTHER; note = 2'-fluorouridine-3'-phosphate
  modified_base 17: mod_base = OTHER; note = 2'-O-methyluridine-3'-phosphate
  modified_base 18: mod_base = OTHER; note = 2'-O-methylcytidine-3'-phosphate
  modified_base 19: mod_base = OTHER; note = 2'-O-methylcytidine-3'-phosphate
  modified_base 20: mod_base = OTHER; note = 2'-O-methylguanosine-3'-phosphate
  modified_base 21: mod_base = OTHER; note = 2'-O-methylguanosine-3'- phosphorothioate
  modified_base 22: mod_base = OTHER; note = 2'-O-methyladenosine-3'- phosphorothioate
  modified_base 23: mod_base = OTHER; note = 2'-O-methylguanosine-3'-phosphate
tctgtttcagcaacattccggag

SEQ ID NO: 2510 - RNA, 21 nt, synthetic construct
  source 1..21: mol_type = other RNA
  modified_base 1: mod_base = OTHER; note = 2'-O-methyladenosine-3'- phosphorothioate
  modified_base 2: mod_base = OTHER; note = 2'-O-methyluridine-3'-phosphorothioate
  modified_base 3: mod_base = OTHER; note = 2'-O-methylguanosine-3'-phosphate
  modified_base 4: mod_base = OTHER; note = 2'-O-methylcytidine-3'-phosphate
  modified_base 5: mod_base = OTHER; note = 2'-O-methyluridine-3'-phosphate
  modified_base 6: mod_base = OTHER; note = 2'-O-methylcytidine-3'-phosphate
  modified_base 7: mod_base = OTHER; note = 2'-fluorocytidine-3'-phosphate
  modified_base 8: mod_base = OTHER; note = 2'-O-methylguanosine-3'-phosphate
  modified_base 9: mod_base = OTHER; note = 2'-fluoroguanosine-3'-phosphate
  modified_base 10: mod_base = OTHER; note = 2'-fluoroadenosine-3'-phosphate
  modified_base 11: mod_base = OTHER; note = 2'-fluoroadenosine-3'-phosphate
  modified_base 12: mod_base = OTHER; note = 2'-O-methyluridine-3'-phosphate
  modified_base 13: mod_base = OTHER; note = 2'-O-methylguanosine-3'-phosphate
  modified_base 14: mod_base = OTHER; note = 2'-O-methyluridine-3'-phosphate
  modified_base 15: mod_base = OTHER; note = 2'-O-methyluridine-3'-phosphate
  modified_base 16: mod_base = OTHER; note = 2'-O-methylguanosine-3'-phosphate
  modified_base 17: mod_base = OTHER; note = 2'-O-methylcytidine-3'-phosphate
  modified_base 18: mod_base = OTHER; note = 2'-O-methyluridine-3'-phosphate
  modified_base 19: mod_base = OTHER; note = 2'-O-methylguanosine-3'-phosphate
  modified_base 20: mod_base = OTHER; note = 2'-O-methyladenosine-3'-phosphate
  modified_base 21: mod_base = OTHER; note 2'-O-methyladenosine-3'-phosphate-N-[tris(GalNAc-alkyl)-ami dodecanoyl)]-4-hydroxyprolinol (Hyp-(GalNAc-alkyl)3)
atgctccggaatgttgctgaa

SEQ ID NO: 2511 - RNA, 23 nt, synthetic construct
  source 1..23: mol_type = other RNA
  modified_base 1: mod_base = OTHER; note = 2'-O-methyluridine-3'-phosphorothioate
  modified_base 2: mod_base = OTHER; note = 2'-fluorouridine -3'-phosphorothioate
  modified_base 3: mod_base = OTHER; note = 2'-O-methylcytidine-3'-phosphate
  modified_base 4: mod_base = OTHER; note = 2'-O-methyladenosine-3'-phosphate
  modified_base 5: mod_base = OTHER; note = 2'-O-methylguanosine-3'-phosphate
  modified_base 6: mod_base = OTHER; note = 2'-fluorocytidine-3'-phosphate
  modified_base 7: mod_base = OTHER; note = 2'-O-methyladenosine-3'-phosphate
  modified_base 8: mod_base = OTHER; note = 2'-fluoroadenosine-3'-phosphate
  modified_base 9: mod_base = OTHER; note = 2'-fluorocytidine-3'-phosphate
  modified_base 10: mod_base = OTHER; note = 2'-O-methyladenosine-3'-phosphate
  modified_base 11: mod_base = OTHER; note = 2'-O-methyluridine-3'-phosphate
  modified_base 12: mod_base = OTHER; note = 2'-O-methyluridine-3'-phosphate
  modified_base 13: mod_base = OTHER; note = 2'-O-methylcytidine-3'-phosphate
  modified_base 14: mod_base = OTHER; note = 2'-fluorocytidine-3'-phosphate
  modified_base 15: mod_base = OTHER; note = 2'-O-methylguanosine-3'-phosphate
  modified_base 16: mod_base = OTHER; note = 2'-fluoroguanosine-3'-phosphate
  modified_base 17: mod_base = OTHER; note = 2'-O-methyladenosine-3'-phosphate
  modified_base 18: mod_base = OTHER; note = 2'-O-methylguanosine-3'-phosphate
  modified_base 19: mod_base = OTHER; note = 2'-O-methylcytidine-3'-phosphate
  modified_base 20: mod_base = OTHER; note = 2'-O-methyladenosine-3'-phosphate
  modified_base 21: mod_base = OTHER; note = 2'-O-methyluridine-3'-phosphorothioate
  modified_base 22: mod_base = OTHER; note = 2'-O-methylcytidine-3'- phosphorothioate
  modified_base 23: mod_base = OTHER; note = 2'-O-methylcytidine-3'-phosphate
ttcagcaacattccggagcatcc

SEQ ID NO: 2512 - RNA, 21 nt, synthetic construct
  source 1..21: mol_type = other RNA
  modified_base 1: mod_base = OTHER; note = 2'-O-methylguanosine-3'- phosphorothioate
  modified_base 2: mod_base = OTHER; note = 2'-O-methyladenosine-3'- phosphorothioate
  modified_base 3: mod_base = OTHER; note = 2'-O-methyluridine-3'-phosphate
  modified_base 4: mod_base = OTHER; note = 2'-O-methylguanosine-3'-phosphate
  modified_base 5: mod_base = OTHER; note = 2'-O-methylcytidine-3'-phosphate
  modified_base 6: mod_base = OTHER; note = 2'-O-methyluridine-3'-phosphate
  modified_base 7: mod_base = OTHER; note = 2'-fluorocytidine-3'-phosphate
  modified_base 8: mod_base = OTHER; note = 2'-O-methylcytidine-3'-phosphate
  modified_base 9: mod_base = OTHER; note = 2'-fluoroguanosine-3'-phosphate
  modified_base 10: mod_base = OTHER; note = 2'-fluoroguanosine-3'-phosphate
  modified_base 11: mod_base = OTHER; note = 2'-fluoroadenosine-3'-phosphate
  modified_base 12: mod_base = OTHER; note = 2'-O-methyladenosine-3'-phosphate
  modified_base 13: mod_base = OTHER; note = 2'-O-methyluridine-3'-phosphate
  modified_base 14: mod_base = OTHER; note = 2'-O-methylguanosine-3'-phosphate
  modified_base 15: mod_base = OTHER; note = 2'-O-methyluridine-3'-phosphate
  modified_base 16: mod_base = OTHER; note = 2'-O-methyluridine-3'-phosphate
  modified_base 17: mod_base = OTHER; note = 2'-O-methylguanosine-3'-phosphate
  modified_base 18: mod_base = OTHER; note = 2'-O-methylcytidine-3'-phosphate
  modified_base 19: mod_base = OTHER; note = 2'-O-methyluridine-3'-phosphate
  modified_base 20: mod_base = OTHER; note = 2'-O-methylguanosine-3'-phosphate
  modified_base 21: mod_base = OTHER; note 2'-O-methyladenosine-3'-phosphate-N-[tris(GalNAc-alkyl)-ami dodecanoyl)]-4-hydroxyprolinol (Hyp-(GalNAc-alkyl)3)
gatgctccggaatgttgctga

SEQ ID NO: 2513 - RNA, 23 nt, synthetic construct
  source 1..23: mol_type = other RNA
  modified_base 1: mod_base = OTHER; note = 2'-O-methyluridine-3'-phosphorothioate
  modified_base 2: mod_base = OTHER; note = 2'-fluorocytidine-3'-phosphorothioate
  modified_base 3: mod_base = OTHER; note = 2'-O-methyladenosine-3'-phosphate
  modified_base 4: mod_base = OTHER; note = 2'-O-methylguanosine-3'-phosphate
  modified_base 5: mod_base = OTHER; note = 2'-O-methylcytidine-3'-phosphate
  modified_base 6: mod_base = OTHER; note = 2'-fluoroadenosine-3'-phosphate
  modified_base 7: mod_base = OTHER; note = 2'-O-methyladenosine-3'-phosphate
  modified_base 8: mod_base = OTHER; note = 2'-fluorocytidine-3'-phosphate
  modified_base 9: mod_base = OTHER; note = 2'-fluoroadenosine-3'-phosphate
  modified_base 10: mod_base = OTHER; note = 2'-O-methyluridine-3'-phosphate
  modified_base 11: mod_base = OTHER; note = 2'-O-methyluridine-3'-phosphate
  modified_base 12: mod_base = OTHER; note = 2'-O-methylcytidine-3'-phosphate
  modified_base 13: mod_base = OTHER; note = 2'-O-methylcytidine-3'-phosphate
  modified_base 14: mod_base = OTHER; note = 2'-fluoroguanosine-3'-phosphate
  modified_base 15: mod_base = OTHER; note = 2'-O-methylguanosine-3'-phosphate
  modified_base 16: mod_base = OTHER; note = 2'-fluoroadenosine-3'-phosphate
  modified_base 17: mod_base = OTHER; note = 2'-O-methylguanosine-3'-phosphate
  modified_base 18: mod_base = OTHER; note = 2'-O-methylcytidine-3'-phosphate
  modified_base 19: mod_base = OTHER; note = 2'-O-methyladenosine-3'-phosphate
  modified_base 20: mod_base = OTHER; note = 2'-O-methyluridine-3'-phosphate
  modified_base 21: mod_base = OTHER; note = 2'-O-methylcytidine-3'- phosphorothioate
  modified_base 22: mod_base = OTHER; note = 2'-O-methylcytidine-3'- phosphorothioate
  modified_base 23: mod_base = OTHER; note = 2'-O-methyluridine-3'-phosphate
tcagcaacattccggagcatcct

SEQ ID NO: 2514 - RNA, 21 nt, synthetic construct
  source 1..21: mol_type = other RNA
  modified_base 1: mod_base = OTHER; note = 2'-O-methyluridine-3'-phosphorothioate
  modified_base 2: mod_base = OTHER; note = 2'-O-methylguanosine-3'- phosphorothioate
  modified_base 3: mod_base = OTHER; note = 2'-O-methyluridine-3'-phosphate
  modified_base 4: mod_base = OTHER; note = 2'-O-methylcytidine-3'-phosphate
  modified_base 5: mod_base = OTHER; note = 2'-O-methylcytidine-3'-phosphate
  modified_base 6: mod_base = OTHER; note = 2'-O-methyluridine-3'-phosphate
  modified_base 7: mod_base = OTHER; note = 2'-fluorocytidine-3'-phosphate
  modified_base 8: mod_base = OTHER; note = 2'-O-methylguanosine-3'-phosphate
  modified_base 9: mod_base = OTHER; note = 2'-fluoroadenosine-3'-phosphate
  modified_base 10: mod_base = OTHER; note = 2'-fluoroguanosine-3'-phosphate
  modified_base 11: mod_base = OTHER; note = 2'-fluoroadenosine-3'-phosphate
  modified_base 12: mod_base = OTHER; note = 2'-O-methyluridine-3'-phosphate
  modified_base 13: mod_base = OTHER; note = 2'-O-methyladenosine-3'-phosphate
  modified_base 14: mod_base = OTHER; note = 2'-O-methylcytidine-3'-phosphate
  modified_base 15: mod_base = OTHER; note = 2'-O-methyluridine-3'-phosphate
  modified_base 16: mod_base = OTHER; note = 2'-O-methyladenosine-3'-phosphate
  modified_base 17: mod_base = OTHER; note = 2'-O-methyladenosine-3'-phosphate
  modified_base 18: mod_base = OTHER; note = 2'-O-methyladenosine-3'-phosphate
  modified_base 19: mod_base = OTHER; note = 2'-O-methylguanosine-3'-phosphate
  modified_base 20: mod_base = OTHER; note = 2'-O-methylguanosine-3'-phosphate
  modified_base 21: mod_base = OTHER; note 2'-O-methyladenosine-3'-phosphate-N-[tris(GalNAc-alkyl)-ami dodecanoyl)]-4-hydroxyprolinol (Hyp-(GalNAc-alkyl)3)
tgtcctcgagatactaaagga

SEQ ID NO: 2515 - RNA, 23 nt, synthetic construct
  source 1..23: mol_type = other RNA
  modified_base 1: mod_base = OTHER; note = 2'-O-methyluridine-3'-phosphorothioate
  modified_base 2: mod_base = OTHER; note = 2'-fluorocytidine-3'-phosphorothioate
  modified_base 3: mod_base = OTHER; note = 2'-O-methylcytidine-3'-phosphate
  modified_base 4: mod_base = OTHER; note = 2'-O-methyluridine-3'-phosphate
  modified_base 5: mod_base = OTHER; note = 2'-O-methyluridine-3'-phosphate
  modified_base 6: mod_base = OTHER; note = 2'-fluorouridine-3'-phosphate
  modified_base 7: mod_base = OTHER; note = 2'-O-methyladenosine-3'-phosphate
  modified_base 8: mod_base = OTHER; note = 2'-fluoroguanosine-3'-phosphate
  modified_base 9: mod_base = OTHER; note = 2'-fluorouridine-3'-phosphate
  modified_base 10: mod_base = OTHER; note = 2'-O-methyladenosine-3'-phosphate
  modified_base 11: mod_base = OTHER; note = 2'-O-methyluridine-3'-phosphate
  modified_base 12: mod_base = OTHER; note = 2'-O-methylcytidine-3'-phosphate
  modified_base 13: mod_base = OTHER; note = 2'-O-methyluridine-3'-phosphate
  modified_base 14: mod_base = OTHER; note = 2'-fluorocytidine-3'-phosphate
  modified_base 15: mod_base = OTHER; note = 2'-O-methylguanosine-3'-phosphate
  modified_base 16: mod_base = OTHER; note = 2'-fluoroadenosine-3'-phosphate
  modified_base 17: mod_base = OTHER; note = 2'-O-methylguanosine-3'-phosphate
  modified_base 18: mod_base = OTHER; note = 2'-O-methylguanosine-3'-phosphate
  modified_base 19: mod_base = OTHER; note = 2'-O-methyladenosine-3'-phosphate
  modified_base 20: mod_base = OTHER; note = 2'-O-methylcytidine-3'-phosphate
  modified_base 21: mod_base = OTHER; note = 2'-O-methyladenosine-3'- phosphorothioate
  modified_base 22: mod_base = OTHER; note = 2'-O-methyluridine-3'-phosphorothioate
  modified_base 23: mod_base = OTHER; note = 2'-O-methylcytidine-3'-phosphate
tcctttagtatctcgaggacatc

SEQ ID NO: 2516 - RNA, 21 nt, synthetic construct
  source 1..21: mol_type = other RNA
  modified_base 1: mod_base = OTHER; note = 2'-O-methylguanosine-3'- phosphorothioate
  modified_base 2: mod_base = OTHER; note = 2'-O-methyluridine-3'-phosphorothioate
  modified_base 3: mod_base = OTHER; note = 2'-O-methylcytidine-3'-phosphate
  modified_base 4: mod_base = OTHER; note = 2'-O-methylcytidine-3'-phosphate
  modified_base 5: mod_base = OTHER; note = 2'-O-methyluridine-3'-phosphate
  modified_base 6: mod_base = OTHER; note = 2'-O-methylcytidine-3'-phosphate
  modified_base 7: mod_base = OTHER; note = 2'-fluoroguanosine-3'-phosphate
  modified_base 8: mod_base = OTHER; note = 2'-O-methyladenosine-3'-phosphate
  modified_base 9: mod_base = OTHER; note = 2'-fluoroguanosine-3'-phosphate
  modified_base 10: mod_base = OTHER; note = 2'-fluoroadenosine-3'-phosphate
  modified_base 11: mod_base = OTHER; note = 2'-fluorouridine-3'-phosphate
  modified_base 12: mod_base = OTHER; note = 2'-O-methyladenosine-3'-phosphate
  modified_base 13: mod_base = OTHER; note = 2'-O-methylcytidine-3'-phosphate
  modified_base 14: mod_base = OTHER; note = 2'-O-methyluridine-3'-phosphate
  modified_base 15: mod_base = OTHER; note = 2'-O-methyladenosine-3'-phosphate
  modified_base 16: mod_base = OTHER; note = 2'-O-methyladenosine-3'-phosphate
  modified_base 17: mod_base = OTHER; note = 2'-O-methyladenosine-3'-phosphate
  modified_base 18: mod_base = OTHER; note = 2'-O-methylguanosine-3'-phosphate
  modified_base 19: mod_base = OTHER; note = 2'-O-methylguanosine-3'-phosphate
  modified_base 20: mod_base = OTHER; note = 2'-O-methyladenosine-3'-phosphate
  modified_base 21: mod_base = OTHER; note 2'-O-methyladenosine-3'-phosphate-N-[tris(GalNAc-alkyl)-ami dodecanoyl)]-4-hydroxyprolinol (Hyp-(GalNAc-alkyl)3)
gtcctcgagatactaaaggaa

SEQ ID NO: 2517 - RNA, 23 nt, synthetic construct
  source 1..23: mol_type = other RNA
  modified_base 1: mod_base = OTHER; note = 2'-O-methyluridine-3'-phosphorothioate
  modified_base 2: mod_base = OTHER; note = 2'-fluorouridine -3'-phosphorothioate
  modified_base 3: mod_base = OTHER; note = 2'-O-methylcytidine-3'-phosphate
  modified_base 4: mod_base = OTHER; note = 2'-O-methylcytidine-3'-phosphate
  modified_base 5: mod_base = OTHER; note = 2'-O-methyluridine-3'-phosphate
  modified_base 6: mod_base = OTHER; note = 2'-fluorouridine-3'-phosphate
  modified_base 7: mod_base = OTHER; note = 2'-O-methyluridine-3'-phosphate
  modified_base 8: mod_base = OTHER; note = 2'-fluoroadenosine-3'-phosphate
  modified_base 9: mod_base = OTHER; note = 2'-fluoroguanosine-3'-phosphate
  modified_base 10: mod_base = OTHER; note = 2'-O-methyluridine-3'-phosphate
  modified_base 11: mod_base = OTHER; note = 2'-O-methyladenosine-3'-phosphate
  modified_base 12: mod_base = OTHER; note = 2'-O-methyluridine-3'-phosphate
  modified_base 13: mod_base = OTHER; note = 2'-O-methylcytidine-3'-phosphate
  modified_base 14: mod_base = OTHER; note = 2'-fluorouridine-3'-phosphate
  modified_base 15: mod_base = OTHER; note = 2'-O-methylcytidine-3'-phosphate
  modified_base 16: mod_base = OTHER; note = 2'-fluoroguanosine-3'-phosphate
  modified_base 17: mod_base = OTHER; note = 2'-O-methyladenosine-3'-phosphate
  modified_base 18: mod_base = OTHER; note = 2'-O-methylguanosine-3'-phosphate
  modified_base 19: mod_base = OTHER; note = 2'-O-methylguanosine-3'-phosphate
  modified_base 20: mod_base = OTHER; note = 2'-O-methyladenosine-3'-phosphate
  modified_base 21: mod_base = OTHER; note = 2'-O-methylcytidine-3'- phosphorothioate
  modified_base 22: mod_base = OTHER; note = 2'-O-methyladenosine-3'- phosphorothioate
  modified_base 23: mod_base = OTHER; note = 2'-O-methyluridine-3'-phosphate
ttcctttagtatctcgaggacat

SEQ ID NO: 2518 - RNA, 21 nt, synthetic construct
  source 1..21: mol_type = other RNA
  modified_base 1: mod_base = OTHER; note = 2'-O-methyladenosine-3'- phosphorothioate
  modified_base 2: mod_base = OTHER; note = 2'-O-methyladenosine-3'- phosphorothioate
  modified_base 3: mod_base = OTHER; note = 2'-O-methylguanosine-3'-phosphate
  modified_base 4: mod_base = OTHER; note = 2'-O-methyladenosine-3'-phosphate
  modified_base 5: mod_base = OTHER; note = 2'-O-methyluridine-3'-phosphate
  modified_base 6: mod_base = OTHER; note = 2'-O-methylguanosine-3'-phosphate
  modified_base 7: mod_base = OTHER; note = 2'-fluorouridine-3'-phosphate
  modified_base 8: mod_base = OTHER; note = 2'-O-methylcytidine-3'-phosphate
  modified_base 9: mod_base = OTHER; note = 2'-fluorocytidine-3'-phosphate
  modified_base 10: mod_base = OTHER; note = 2'-fluorouridine-3'-phosphate
  modified_base 11: mod_base = OTHER; note = 2'-fluorocytidine-3'-phosphate
  modified_base 12: mod_base = OTHER; note = 2'-O-methylguanosine-3'-phosphate
  modified_base 13: mod_base = OTHER; note = 2'-O-methyladenosine-3'-phosphate
  modified_base 14: mod_base = OTHER; note = 2'-O-methylguanosine-3'-phosphate
  modified_base 15: mod_base = OTHER; note = 2'-O-methyladenosine-3'-phosphate
  modified_base 16: mod_base = OTHER; note = 2'-O-methyluridine-3'-phosphate
  modified_base 17: mod_base = OTHER; note = 2'-O-methyladenosine-3'-phosphate
  modified_base 18: mod_base = OTHER; note = 2'-O-methylcytidine-3'-phosphate
  modified_base 19: mod_base = OTHER; note = 2'-O-methyluridine-3'-phosphate
  modified_base 20: mod_base = OTHER; note = 2'-O-methyladenosine-3'-phosphate
  modified_base 21: mod_base = OTHER; note 2'-O-methyladenosine-3'-phosphate-N-[tris(GalNAc-alkyl)-ami dodecanoyl)]-4-hydroxyprolinol (Hyp-(GalNAc-alkyl)3)
aagatgtcctcgagatactaa

SEQ ID NO: 2519 - RNA, 23 nt, synthetic construct
  source 1..23: mol_type = other RNA
  modified_base 1: mod_base = OTHER; note = 2'-O-methyluridine-3'-phosphorothioate
  modified_base 2: mod_base = OTHER; note = 2'-fluorouridine -3'-phosphorothioate
  modified_base 3: mod_base = OTHER; note = 2'-O-methyladenosine-3'-phosphate
  modified_base 4: mod_base = OTHER; note = 2'-O-methylguanosine-3'-phosphate
  modified_base 5: mod_base = OTHER; note = 2'-O-methyluridine-3'-phosphate
  modified_base 6: mod_base = OTHER; note = 2'-fluoroadenosine-3'-phosphate
  modified_base 7: mod_base = OTHER; note = 2'-O-methyluridine-3'-phosphate
  modified_base 8: mod_base = OTHER; note = 2'-fluorocytidine-3'-phosphate
  modified_base 9: mod_base = OTHER; note = 2'-fluorouridine-3'-phosphate
  modified_base 10: mod_base = OTHER; note = 2'-O-methylcytidine-3'-phosphate
  modified_base 11: mod_base = OTHER; note = 2'-O-methylguanosine-3'-phosphate
  modified_base 12: mod_base = OTHER; note = 2'-O-methyladenosine-3'-phosphate
  modified_base 13: mod_base = OTHER; note = 2'-O-methylguanosine-3'-phosphate
  modified_base 14: mod_base = OTHER; note = 2'-fluoroguanosine-3'-phosphate
  modified_base 15: mod_base = OTHER; note = 2'-O-methyladenosine-3'-phosphate
  modified_base 16: mod_base = OTHER; note = 2'-fluorocytidine-3'-phosphate
  modified_base 17: mod_base = OTHER; note = 2'-O-methyladenosine-3'-phosphate
  modified_base 18: mod_base = OTHER; note = 2'-O-methyluridine-3'-phosphate
  modified_base 19: mod_base = OTHER; note = 2'-O-methylcytidine-3'-phosphate
  modified_base 20: mod_base = OTHER; note = 2'-O-methyluridine-3'-phosphate
  modified_base 21: mod_base = OTHER; note = 2'-O-methyluridine-3'-phosphorothioate
  modified_base 22: mod_base = OTHER; note = 2'-O-methylguanosine-3'- phosphorothioate
  modified_base 23: mod_base = OTHER; note = 2'-O-methyladenosine-3'-phosphate
ttagtatctcgaggacatcttga

SEQ ID NO: 2520 - RNA, 21 nt, synthetic construct
  source 1..21: mol_type = other RNA
  modified_base 1: mod_base = OTHER; note = 2'-O-methylcytidine-3'- phosphorothioate
  modified_base 2: mod_base = OTHER; note = 2'-O-methyladenosine-3'- phosphorothioate
  modified_base 3: mod_base = OTHER; note = 2'-O-methyladenosine-3'-phosphate
  modified_base 4: mod_base = OTHER; note = 2'-O-methylguanosine-3'-phosphate
  modified_base 5: mod_base = OTHER; note = 2'-O-methyladenosine-3'-phosphate
  modified_base 6: mod_base = OTHER; note = 2'-O-methyluridine-3'-phosphate
  modified_base 7: mod_base = OTHER; note = 2'-fluoroguanosine-3'-phosphate
  modified_base 8: mod_base = OTHER; note = 2'-O-methyluridine-3'-phosphate
  modified_base 9: mod_base = OTHER; note = 2'-fluorocytidine-3'-phosphate
  modified_base 10: mod_base = OTHER; note = 2'-fluorocytidine-3'-phosphate
  modified_base 11: mod_base = OTHER; note = 2'-fluorouridine-3'-phosphate
  modified_base 12: mod_base = OTHER; note = 2'-O-methylcytidine-3'-phosphate
  modified_base 13: mod_base = OTHER; note = 2'-O-methylguanosine-3'-phosphate
  modified_base 14: mod_base = OTHER; note = 2'-O-methyladenosine-3'-phosphate
  modified_base 15: mod_base = OTHER; note = 2'-O-methylguanosine-3'-phosphate
  modified_base 16: mod_base = OTHER; note = 2'-O-methyladenosine-3'-phosphate
  modified_base 17: mod_base = OTHER; note = 2'-O-methyluridine-3'-phosphate
  modified_base 18: mod_base = OTHER; note = 2'-O-methyladenosine-3'-phosphate
  modified_base 19: mod_base = OTHER; note = 2'-O-methylcytidine-3'-phosphate
  modified_base 20: mod_base = OTHER; note = 2'-O-methyluridine-3'-phosphate
  modified_base 21: mod_base = OTHER; note 2'-O-methyladenosine-3'-phosphate-N-[tris(GalNAc-alkyl)-ami dodecanoyl)]-4-hydroxyprolinol (Hyp-(GalNAc-alkyl)3)
caagatgtcctcgagatacta

SEQ ID NO: 2521 - RNA, 23 nt, synthetic construct
  source 1..23: mol_type = other RNA
  modified_base 1: mod_base = OTHER; note = 2'-O-methyluridine-3'-phosphorothioate
  modified_base 2: mod_base = OTHER; note = 2'-fluoroadenosine-3'-phosphorothioate
  modified_base 3: mod_base = OTHER; note = 2'-O-methylguanosine-3'-phosphate
  modified_base 4: mod_base = OTHER; note = 2'-O-methyluridine-3'-phosphate
  modified_base 5: mod_base = OTHER; note = 2'-O-methyladenosine-3'-phosphate
  modified_base 6: mod_base = OTHER; note = 2'-fluorouridine-3'-phosphate
  modified_base 7: mod_base = OTHER; note = 2'-O-methylcytidine-3'-phosphate
  modified_base 8: mod_base = OTHER; note = 2'-fluorouridine-3'-phosphate
  modified_base 9: mod_base = OTHER; note = 2'-fluorocytidine-3'-phosphate
  modified_base 10: mod_base = OTHER; note = 2'-O-methylguanosine-3'-phosphate
  modified_base 11: mod_base = OTHER; note = 2'-O-methyladenosine-3'-phosphate
  modified_base 12: mod_base = OTHER; note = 2'-O-methylguanosine-3'-phosphate
  modified_base 13: mod_base = OTHER; note = 2'-O-methylguanosine-3'-phosphate
  modified_base 14: mod_base = OTHER; note = 2'-fluoroadenosine-3'-phosphate
  modified_base 15: mod_base = OTHER; note = 2'-O-methylcytidine-3'-phosphate
  modified_base 16: mod_base = OTHER; note = 2'-fluoroadenosine-3'-phosphate
  modified_base 17: mod_base = OTHER; note = 2'-O-methyluridine-3'-phosphate
  modified_base 18: mod_base = OTHER; note = 2'-O-methylcytidine-3'-phosphate
  modified_base 19: mod_base = OTHER; note = 2'-O-methyluridine-3'-phosphate
  modified_base 20: mod_base = OTHER; note = 2'-O-methyluridine-3'-phosphate
  modified_base 21: mod_base = OTHER; note = 2'-O-methylguanosine-3'- phosphorothioate
  modified_base 22: mod_base = OTHER; note = 2'-O-methyladenosine-3'- phosphorothioate
  modified_base 23: mod_base = OTHER; note = 2'-O-methyladenosine-3'-phosphate
tagtatctcgaggacatcttgaa

SEQ ID NO: 2522 - RNA, 21 nt, synthetic construct
  source 1..21: mol_type = other RNA
  modified_base 1: mod_base = OTHER; note = 2'-O-methyladenosine-3'- phosphorothioate
  modified_base 2: mod_base = OTHER; note = 2'-O-methylcytidine-3'- phosphorothioate
  modified_base 3: mod_base = OTHER; note = 2'-O-methyladenosine-3'-phosphate
  modified_base 4: mod_base = OTHER; note = 2'-O-methyladenosine-3'-phosphate
  modified_base 5: mod_base = OTHER; note = 2'-O-methylcytidine-3'-phosphate
  modified_base 6: mod_base = OTHER; note = 2'-O-methyladenosine-3'-phosphate
  modified_base 7: mod_base = OTHER; note = 2'-fluorouridine-3'-phosphate
  modified_base 8: mod_base = OTHER; note = 2'-O-methylguanosine-3'-phosphate
  modified_base 9: mod_base = OTHER; note = 2'-fluorocytidine-3'-phosphate
  modified_base 10: mod_base = OTHER; note = 2'-fluorouridine-3'-phosphate
  modified_base 11: mod_base = OTHER; note = 2'-fluoroadenosine-3'-phosphate
  modified_base 12: mod_base = OTHER; note = 2'-O-methyladenosine-3'-phosphate
  modified_base 13: mod_base = OTHER; note = 2'-O-methyladenosine-3'-phosphate
  modified_base 14: mod_base = OTHER; note = 2'-O-methyluridine-3'-phosphate
  modified_base 15: mod_base = OTHER; note = 2'-O-methylcytidine-3'-phosphate
  modified_base 16: mod_base = OTHER; note = 2'-O-methyladenosine-3'-phosphate
  modified_base 17: mod_base = OTHER; note = 2'-O-methylguanosine-3'-phosphate
  modified_base 18: mod_base = OTHER; note = 2'-O-methyluridine-3'-phosphate
  modified_base 19: mod_base = OTHER; note = 2'-O-methyladenosine-3'-phosphate
  modified_base 20: mod_base = OTHER; note = 2'-O-methylcytidine-3'-phosphate
  modified_base 21: mod_base = OTHER; note 2'-O-methyluridine-3'-phosphate-N-[tris(GalNAc-alkyl)-amido decanoyl)]-4-hydroxyprolinol (Hyp-(GalNAc-alkyl)3)
acaacatgctaaatcagtact

SEQ ID NO: 2523 - RNA, 23 nt, synthetic construct
  source 1..23: mol_type = other RNA
  modified_base 1: mod_base = OTHER; note = 2'-O-methyladenosine-3'- phosphorothioate
  modified_base 2: mod_base = OTHER; note = 2'-fluoroguanosine-3'-phosphorothioate
  modified_base 3: mod_base = OTHER; note = 2'-O-methyluridine-3'-phosphate
  modified_base 4: mod_base = OTHER; note = 2'-O-methyladenosine-3'-phosphate
  modified_base 5: mod_base = OTHER; note = 2'-O-methylcytidine-3'-phosphate
  modified_base 6: mod_base = OTHER; note = 2'-fluorouridine-3'-phosphate
  modified_base 7: mod_base = OTHER; note = 2'-O-methylguanosine-3'-phosphate
  modified_base 8: mod_base = OTHER; note = 2'-fluoroadenosine-3'-phosphate
  modified_base 9: mod_base = OTHER; note = 2'-fluorouridine-3'-phosphate
  modified_base 10: mod_base = OTHER; note = 2'-O-methyluridine-3'-phosphate
  modified_base 11: mod_base = OTHER; note = 2'-O-methyluridine-3'-phosphate
  modified_base 12: mod_base = OTHER; note = 2'-O-methyladenosine-3'-phosphate
  modified_base 13: mod_base = OTHER; note = 2'-O-methylguanosine-3'-phosphate
  modified_base 14: mod_base = OTHER; note = 2'-fluorocytidine-3'-phosphate
  modified_base 15: mod_base = OTHER; note = 2'-O-methyladenosine-3'-phosphate
  modified_base 16: mod_base = OTHER; note = 2'-fluorouridine-3'-phosphate
  modified_base 17: mod_base = OTHER; note = 2'-O-methylguanosine-3'-phosphate
  modified_base 18: mod_base = OTHER; note = 2'-O-methyluridine-3'-phosphate
  modified_base 19: mod_base = OTHER; note = 2'-O-methyluridine-3'-phosphate
  modified_base 20: mod_base = OTHER; note = 2'-O-methylguanosine-3'-phosphate
  modified_base 21: mod_base = OTHER; note = 2'-O-methyluridine-3'-phosphorothioate
  modified_base 22: mod_base = OTHER; note = 2'-O-methyluridine-3'-phosphorothioate
  modified_base 23: mod_base = OTHER; note = 2'-O-methylcytidine-3'-phosphate
agtactgatttagcatgttgttc

SEQ ID NO: 2524 - RNA, 21 nt, synthetic construct
  source 1..21: mol_type = other RNA
  modified_base 1: mod_base = OTHER; note = 2'-O-methylcytidine-3'- phosphorothioate
  modified_base 2: mod_base = OTHER; note = 2'-O-methyladenosine-3'- phosphorothioate
  modified_base 3: mod_base = OTHER; note = 2'-O-methyladenosine-3'-phosphate
  modified_base 4: mod_base = OTHER; note = 2'-O-methylcytidine-3'-phosphate
  modified_base 5: mod_base = OTHER; note = 2'-O-methyladenosine-3'-phosphate
  modified_base 6: mod_base = OTHER; note = 2'-O-methyluridine-3'-phosphate
  modified_base 7: mod_base = OTHER; note = 2'-fluoroguanosine-3'-phosphate
  modified_base 8: mod_base = OTHER; note = 2'-O-methylcytidine-3'-phosphate
  modified_base 9: mod_base = OTHER; note = 2'-fluorouridine-3'-phosphate
  modified_base 10: mod_base = OTHER; note = 2'-fluoroadenosine-3'-phosphate
  modified_base 11: mod_base = OTHER; note = 2'-fluoroadenosine-3'-phosphate
  modified_base 12: mod_base = OTHER; note = 2'-O-methyladenosine-3'-phosphate
  modified_base 13: mod_base = OTHER; note = 2'-O-methyluridine-3'-phosphate
  modified_base 14: mod_base = OTHER; note = 2'-O-methylcytidine-3'-phosphate
  modified_base 15: mod_base = OTHER; note = 2'-O-methyladenosine-3'-phosphate
  modified_base 16: mod_base = OTHER; note = 2'-O-methylguanosine-3'-phosphate
  modified_base 17: mod_base = OTHER; note = 2'-O-methyluridine-3'-phosphate
  modified_base 18: mod_base = OTHER; note = 2'-O-methyladenosine-3'-phosphate
  modified_base 19: mod_base = OTHER; note = 2'-O-methylcytidine-3'-phosphate
  modified_base 20: mod_base = OTHER; note = 2'-O-methyluridine-3'-phosphate
  modified_base 21: mod_base = OTHER; note 2'-O-methyluridine-3'-phosphate-N-[tris(GalNAc-alkyl)-amido decanoyl)]-4-hydroxyprolinol (Hyp-(GalNAc-alkyl)3)
caacatgctaaatcagtactt

SEQ ID NO: 2525 - RNA, 23 nt, synthetic construct
  source 1..23: mol_type = other RNA
  modified_base 1: mod_base = OTHER; note = 2'-O-methyladenosine-3'- phosphorothioate
  modified_base 2: mod_base = OTHER; note = 2'-fluoroadenosine-3'-phosphorothioate
  modified_base 3: mod_base = OTHER; note = 2'-O-methylguanosine-3'-phosphate
  modified_base 4: mod_base = OTHER; note = 2'-O-methyluridine-3'-phosphate
  modified_base 5: mod_base = OTHER; note = 2'-O-methyladenosine-3'-phosphate
  modified_base 6: mod_base = OTHER; note = 2'-fluorocytidine-3'-phosphate
  modified_base 7: mod_base = OTHER; note = 2'-O-methyluridine-3'-phosphate
  modified_base 8: mod_base = OTHER; note = 2'-fluoroguanosine-3'-phosphate
  modified_base 9: mod_base = OTHER; note = 2'-fluoroadenosine-3'-phosphate
  modified_base 10: mod_base = OTHER; note = 2'-O-methyluridine-3'-phosphate
  modified_base 11: mod_base = OTHER; note = 2'-O-methyluridine-3'-phosphate
  modified_base 12: mod_base = OTHER; note = 2'-O-methyluridine-3'-phosphate
  modified_base 13: mod_base = OTHER; note = 2'-O-methyladenosine-3'-phosphate
  modified_base 14: mod_base = OTHER; note = 2'-fluoroguanosine-3'-phosphate
  modified_base 15: mod_base = OTHER; note = 2'-O-methylcytidine-3'-phosphate
  modified_base 16: mod_base = OTHER; note = 2'-fluoroadenosine-3'-phosphate
  modified_base 17: mod_base = OTHER; note = 2'-O-methyluridine-3'-phosphate
  modified_base 18: mod_base = OTHER; note = 2'-O-methylguanosine-3'-phosphate
  modified_base 19: mod_base = OTHER; note = 2'-O-methyluridine-3'-phosphate
  modified_base 20: mod_base = OTHER; note = 2'-O-methyluridine-3'-phosphate
  modified_base 21: mod_base = OTHER; note = 2'-O-methylguanosine-3'- phosphorothioate
  modified_base 22: mod_base = OTHER; note = 2'-O-methyluridine-3'-phosphorothioate
  modified_base 23: mod_base = OTHER; note = 2'-O-methyluridine-3'-phosphate
aagtactgatttagcatgttgtt

SEQ ID NO: 2526 - RNA, 21 nt, synthetic construct
  source 1..21: mol_type = other RNA
  modified_base 1: mod_base = OTHER; note = 2'-O-methyladenosine-3'- phosphorothioate
  modified_base 2: mod_base = OTHER; note = 2'-O-methyluridine-3'-phosphorothioate
  modified_base 3: mod_base = OTHER; note = 2'-O-methylguanosine-3'-phosphate
  modified_base 4: mod_base = OTHER; note = 2'-O-methyladenosine-3'-phosphate
  modified_base 5: mod_base = OTHER; note = 2'-O-methyladenosine-3'-phosphate
  modified_base 6: mod_base = OTHER; note = 2'-O-methylcytidine-3'-phosphate
  modified_base 7: mod_base = OTHER; note = 2'-fluoroadenosine-3'-phosphate
  modified_base 8: mod_base = OTHER; note = 2'-O-methyladenosine-3'-phosphate
  modified_base 9: mod_base = OTHER; note = 2'-fluorocytidine-3'-phosphate
  modified_base 10: mod_base = OTHER; note = 2'-fluoroadenosine-3'-phosphate
  modified_base 11: mod_base = OTHER; note = 2'-fluorouridine-3'-phosphate
  modified_base 12: mod_base = OTHER; note = 2'-O-methylguanosine-3'-phosphate
  modified_base 13: mod_base = OTHER; note = 2'-O-methylcytidine-3'-phosphate
  modified_base 14: mod_base = OTHER; note = 2'-O-methyluridine-3'-phosphate
  modified_base 15: mod_base = OTHER; note = 2'-O-methyladenosine-3'-phosphate
  modified_base 16: mod_base = OTHER; note = 2'-O-methyladenosine-3'-phosphate
  modified_base 17: mod_base = OTHER; note = 2'-O-methyladenosine-3'-phosphate
  modified_base 18: mod_base = OTHER; note = 2'-O-methyluridine-3'-phosphate
  modified_base 19: mod_base = OTHER; note = 2'-O-methylcytidine-3'-phosphate
  modified_base 20: mod_base = OTHER; note = 2'-O-methyladenosine-3'-phosphate
  modified_base 21: mod_base = OTHER; note 2'-O-methylguanosine-3'-phosphate-N-[tris(GalNAc-alkyl)-ami dodecanoyl)]-4-hydroxyprolinol (Hyp-(GalNAc-alkyl)3)
atgaacaacatgctaaatcag

SEQ ID NO: 2527 - RNA, 23 nt, synthetic construct
  source 1..23: mol_type = other RNA
  modified_base 1: mod_base = OTHER; note = 2'-O-methylcytidine-3'- phosphorothioate
  modified_base 2: mod_base = OTHER; note = 2'-fluorouridine -3'-phosphorothioate
  modified_base 3: mod_base = OTHER; note = 2'-O-methylguanosine-3'-phosphate
  modified_base 4: mod_base = OTHER; note = 2'-O-methyladenosine-3'-phosphate
  modified_base 5: mod_base = OTHER; note = 2'-O-methyluridine-3'-phosphate
  modified_base 6: mod_base = OTHER; note = 2'-fluorouridine-3'-phosphate
  modified_base 7: mod_base = OTHER; note = 2'-O-methyluridine-3'-phosphate
  modified_base 8: mod_base = OTHER; note = 2'-fluoroadenosine-3'-phosphate
  modified_base 9: mod_base = OTHER; note = 2'-fluoroguanosine-3'-phosphate
  modified_base 10: mod_base = OTHER; note = 2'-O-methylcytidine-3'-phosphate
  modified_base 11: mod_base = OTHER; note = 2'-O-methyladenosine-3'-phosphate
  modified_base 12: mod_base = OTHER; note = 2'-O-methyluridine-3'-phosphate
  modified_base 13: mod_base = OTHER; note = 2'-O-methylguanosine-3'-phosphate
  modified_base 14: mod_base = OTHER; note = 2'-fluorouridine-3'-phosphate
  modified_base 15: mod_base = OTHER; note = 2'-O-methyluridine-3'-phosphate
  modified_base 16: mod_base = OTHER; note = 2'-fluoroguanosine-3'-phosphate
  modified_base 17: mod_base = OTHER; note = 2'-O-methyluridine-3'-phosphate
  modified_base 18: mod_base = OTHER; note = 2'-O-methyluridine-3'-phosphate
  modified_base 19: mod_base = OTHER; note = 2'-O-methylcytidine-3'-phosphate
  modified_base 20: mod_base = OTHER; note = 2'-O-methyladenosine-3'-phosphate
  modified_base 21: mod_base = OTHER; note = 2'-O-methyluridine-3'-phosphorothioate
  modified_base 22: mod_base = OTHER; note = 2'-O-methyladenosine-3'- phosphorothioate
  modified_base 23: mod_base = OTHER; note = 2'-O-methyladenosine-3'-phosphate
ctgatttagcatgttgttcataa

SEQ ID NO: 2528 - RNA, 21 nt, synthetic construct
  source 1..21: mol_type = other RNA
  modified_base 1: mod_base = OTHER; note = 2'-O-methyluridine-3'-phosphorothioate
  modified_base 2: mod_base = OTHER; note = 2'-O-methyladenosine-3'- phosphorothioate
  modified_base 3: mod_base = OTHER; note = 2'-O-methyluridine-3'-phosphate
  modified_base 4: mod_base = OTHER; note = 2'-O-methylguanosine-3'-phosphate
  modified_base 5: mod_base = OTHER; note = 2'-O-methyladenosine-3'-phosphate
  modified_base 6: mod_base = OTHER; note = 2'-O-methyladenosine-3'-phosphate
  modified_base 7: mod_base = OTHER; note = 2'-fluorocytidine-3'-phosphate
  modified_base 8: mod_base = OTHER; note = 2'-O-methyladenosine-3'-phosphate
  modified_base 9: mod_base = OTHER; note = 2'-fluoroadenosine-3'-phosphate
  modified_base 10: mod_base = OTHER; note = 2'-fluorocytidine-3'-phosphate
  modified_base 11: mod_base = OTHER; note = 2'-fluoroadenosine-3'-phosphate
  modified_base 12: mod_base = OTHER; note = 2'-O-methyluridine-3'-phosphate
  modified_base 13: mod_base = OTHER; note = 2'-O-methylguanosine-3'-phosphate
  modified_base 14: mod_base = OTHER; note = 2'-O-methylcytidine-3'-phosphate
  modified_base 15: mod_base = OTHER; note = 2'-O-methyluridine-3'-phosphate
  modified_base 16: mod_base = OTHER; note = 2'-O-methyladenosine-3'-phosphate
  modified_base 17: mod_base = OTHER; note = 2'-O-methyladenosine-3'-phosphate
  modified_base 18: mod_base = OTHER; note = 2'-O-methyladenosine-3'-phosphate
  modified_base 19: mod_base = OTHER; note = 2'-O-methyluridine-3'-phosphate
  modified_base 20: mod_base = OTHER; note = 2'-O-methylcytidine-3'-phosphate
  modified_base 21: mod_base = OTHER; note 2'-O-methyladenosine-3'-phosphate-N-[tris(GalNAc-alkyl)-ami dodecanoyl)]-4-hydroxyprolinol (Hyp-(GalNAc-alkyl)3)
tatgaacaacatgctaaatca

SEQ ID NO: 2529 - RNA, 23 nt, synthetic construct
  source 1..23: mol_type = other RNA
  modified_base 1: mod_base = OTHER; note = 2'-O-methyluridine-3'-phosphorothioate
  modified_base 2: mod_base = OTHER; note = 2'-fluoroguanosine-3'-phosphorothioate
  modified_base 3: mod_base = OTHER; note = 2'-O-methyladenosine-3'-phosphate
  modified_base 4: mod_base = OTHER; note = 2'-O-methyluridine-3'-phosphate
  modified_base 5: mod_base = OTHER; note = 2'-O-methyluridine-3'-phosphate
  modified_base 6: mod_base = OTHER; note = 2'-fluorouridine-3'-phosphate
  modified_base 7: mod_base = OTHER; note = 2'-O-methyladenosine-3'-phosphate
  modified_base 8: mod_base = OTHER; note = 2'-fluoroguanosine-3'-phosphate
  modified_base 9: mod_base = OTHER; note = 2'-fluorocytidine-3'-phosphate
  modified_base 10: mod_base = OTHER; note = 2'-O-methyladenosine-3'-phosphate
  modified_base 11: mod_base = OTHER; note = 2'-O-methyluridine-3'-phosphate
  modified_base 12: mod_base = OTHER; note = 2'-O-methylguanosine-3'-phosphate
  modified_base 13: mod_base = OTHER; note = 2'-O-methyluridine-3'-phosphate
  modified_base 14: mod_base = OTHER; note = 2'-fluorouridine-3'-phosphate
  modified_base 15: mod_base = OTHER; note = 2'-O-methylguanosine-3'-phosphate
  modified_base 16: mod_base = OTHER; note = 2'-fluorouridine-3'-phosphate
  modified_base 17: mod_base = OTHER; note = 2'-O-methyluridine-3'-phosphate
  modified_base 18: mod_base = OTHER; note = 2'-O-methylcytidine-3'-phosphate
  modified_base 19: mod_base = OTHER; note = 2'-O-methyladenosine-3'-phosphate
  modified_base 20: mod_base = OTHER; note = 2'-O-methyluridine-3'-phosphate
  modified_base 21: mod_base = OTHER; note = 2'-O-methyladenosine-3'- phosphorothioate
  modified_base 22: mod_base = OTHER; note = 2'-O-methyladenosine-3'- phosphorothioate
  modified_base 23: mod_base = OTHER; note = 2'-O-methyluridine-3'-phosphate
tgatttagcatgttgttcataat

SEQ ID NO: 2530 - RNA, 21 nt, synthetic construct
  source 1..21: mol_type = other RNA
  modified_base 1: mod_base = OTHER; note = 2'-O-methylguanosine-3'- phosphorothioate
  modified_base 2: mod_base = OTHER; note = 2'-O-methylcytidine-3'- phosphorothioate
  modified_base 3: mod_base = OTHER; note = 2'-O-methylcytidine-3'-phosphate
  modified_base 4: mod_base = OTHER; note = 2'-O-methyladenosine-3'-phosphate
  modified_base 5: mod_base = OTHER; note = 2'-O-methyladenosine-3'-phosphate
  modified_base 6: mod_base = OTHER; note = 2'-O-methylguanosine-3'-phosphate
  modified_base 7: mod_base = OTHER; note = 2'-fluoroguanosine-3'-phosphate
  modified_base 8: mod_base = OTHER; note = 2'-O-methylcytidine-3'-phosphate
  modified_base 9: mod_base = OTHER; note = 2'-fluorouridine-3'-phosphate
  modified_base 10: mod_base = OTHER; note = 2'-fluoroguanosine-3'-phosphate
  modified_base 11: mod_base = OTHER; note = 2'-fluorouridine-3'-phosphate
  modified_base 12: mod_base = OTHER; note = 2'-O-methylguanosine-3'-phosphate
  modified_base 13: mod_base = OTHER; note = 2'-O-methyluridine-3'-phosphate
  modified_base 14: mod_base = OTHER; note = 2'-O-methyluridine-3'-phosphate
  modified_base 15: mod_base = OTHER; note = 2'-O-methyluridine-3'-phosphate
  modified_base 16: mod_base = OTHER; note = 2'-O-methylguanosine-3'-phosphate
  modified_base 17: mod_base = OTHER; note = 2'-O-methyluridine-3'-phosphate
  modified_base 18: mod_base = OTHER; note = 2'-O-methylguanosine-3'-phosphate
  modified_base 19: mod_base = OTHER; note = 2'-O-methylguanosine-3'-phosphate
  modified_base 20: mod_base = OTHER; note = 2'-O-methylguanosine-3'-phosphate
  modified_base 21: mod_base = OTHER; note 2'-O-methylguanosine-3'-phosphate-N-[tris(GalNAc-alkyl)-ami dodecanoyl)]-4-hydroxyprolinol (Hyp-(GalNAc-alkyl)3)
gccaaggctgtgtttgtgggg

SEQ ID NO: 2531 - RNA, 23 nt, synthetic construct
  source 1..23: mol_type = other RNA
  modified_base 1: mod_base = OTHER; note = 2'-O-methylcytidine-3'- phosphorothioate
  modified_base 2: mod_base = OTHER; note = 2'-fluorocytidine-3'-phosphorothioate
  modified_base 3: mod_base = OTHER; note = 2'-O-methylcytidine-3'-phosphate
  modified_base 4: mod_base = OTHER; note = 2'-O-methylcytidine-3'-phosphate
  modified_base 5: mod_base = OTHER; note = 2'-O-methyladenosine-3'-phosphate
  modified_base 6: mod_base = OTHER; note = 2'-fluorocytidine-3'-phosphate
  modified_base 7: mod_base = OTHER; note = 2'-O-methyladenosine-3'-phosphate
  modified_base 8: mod_base = OTHER; note = 2'-fluoroadenosine-3'-phosphate
  modified_base 9: mod_base = OTHER; note = 2'-fluoroadenosine-3'-phosphate
  modified_base 10: mod_base = OTHER; note = 2'-O-methylcytidine-3'-phosphate
  modified_base 11: mod_base = OTHER; note = 2'-O-methyladenosine-3'-phosphate
  modified_base 12: mod_base = OTHER; note = 2'-O-methylcytidine-3'-phosphate
  modified_base 13: mod_base = OTHER; note = 2'-O-methyladenosine-3'-phosphate
  modified_base 14: mod_base = OTHER; note = 2'-fluoroguanosine-3'-phosphate
  modified_base 15: mod_base = OTHER; note = 2'-O-methylcytidine-3'-phosphate
  modified_base 16: mod_base = OTHER; note = 2'-fluorocytidine-3'-phosphate
  modified_base 17: mod_base = OTHER; note = 2'-O-methyluridine-3'-phosphate
  modified_base 18: mod_base = OTHER; note = 2'-O-methyluridine-3'-phosphate
  modified_base 19: mod_base = OTHER; note = 2'-O-methylguanosine-3'-phosphate
  modified_base 20: mod_base = OTHER; note = 2'-O-methylguanosine-3'-phosphate
  modified_base 21: mod_base = OTHER; note = 2'-O-methylcytidine-3'- phosphorothioate
  modified_base 22: mod_base = OTHER; note = 2'-O-methylguanosine-3'- phosphorothioate
  modified_base 23: mod_base = OTHER; note = 2'-O-methylcytidine-3'-phosphate
ccccacaaacacagccttggcgc

SEQ ID NO: 2532 - RNA, 21 nt, synthetic construct
  source 1..21: mol_type = other RNA
  modified_base 1: mod_base = OTHER; note = 2'-O-methylcytidine-3'- phosphorothioate
  modified_base 2: mod_base = OTHER; note = 2'-O-methylcytidine-3'- phosphorothioate
  modified_base 3: mod_base = OTHER; note = 2'-O-methyladenosine-3'-phosphate
  modified_base 4: mod_base = OTHER; note = 2'-O-methyladenosine-3'-phosphate
  modified_base 5: mod_base = OTHER; note = 2'-O-methylguanosine-3'-phosphate
  modified_base 6: mod_base = OTHER; note = 2'-O-methylguanosine-3'-phosphate
  modified_base 7: mod_base = OTHER; note = 2'-fluorocytidine-3'-phosphate
  modified_base 8: mod_base = OTHER; note = 2'-O-methyluridine-3'-phosphate
  modified_base 9: mod_base = OTHER; note = 2'-fluoroguanosine-3'-phosphate
  modified_base 10: mod_base = OTHER; note = 2'-fluorouridine-3'-phosphate
  modified_base 11: mod_base = OTHER; note = 2'-fluoroguanosine-3'-phosphate
  modified_base 12: mod_base = OTHER; note = 2'-O-methyluridine-3'-phosphate
  modified_base 13: mod_base = OTHER; note = 2'-O-methyluridine-3'-phosphate
  modified_base 14: mod_base = OTHER; note = 2'-O-methyluridine-3'-phosphate
  modified_base 15: mod_base = OTHER; note = 2'-O-methylguanosine-3'-phosphate
  modified_base 16: mod_base = OTHER; note = 2'-O-methyluridine-3'-phosphate
  modified_base 17: mod_base = OTHER; note = 2'-O-methylguanosine-3'-phosphate
  modified_base 18: mod_base = OTHER; note = 2'-O-methylguanosine-3'-phosphate
  modified_base 19: mod_base = OTHER; note = 2'-O-methylguanosine-3'-phosphate
  modified_base 20: mod_base = OTHER; note = 2'-O-methylguanosine-3'-phosphate
  modified_base 21: mod_base = OTHER; note 2'-O-methyladenosine-3'-phosphate-N-[tris(GalNAc-alkyl)-ami dodecanoyl)]-4-hydroxyprolinol (Hyp-(GalNAc-alkyl)3)
ccaaggctgtgtttgtgggga

SEQ ID NO: 2533 - RNA, 23 nt, synthetic construct
  source 1..23: mol_type = other RNA
  modified_base 1: mod_base = OTHER; note = 2'-O-methyluridine-3'-phosphorothioate
  modified_base 2: mod_base = OTHER; note = 2'-fluorocytidine-3'-phosphorothioate
  modified_base 3: mod_base = OTHER; note = 2'-O-methylcytidine-3'-phosphate
  modified_base 4: mod_base = OTHER; note = 2'-O-methylcytidine-3'-phosphate
  modified_base 5: mod_base = OTHER; note = 2'-O-methylcytidine-3'-phosphate
  modified_base 6: mod_base = OTHER; note = 2'-fluoroadenosine-3'-phosphate
  modified_base 7: mod_base = OTHER; note = 2'-O-methylcytidine-3'-phosphate
  modified_base 8: mod_base = OTHER; note = 2'-fluoroadenosine-3'-phosphate
  modified_base 9: mod_base = OTHER; note = 2'-fluoroadenosine-3'-phosphate
  modified_base 10: mod_base = OTHER; note = 2'-O-methyladenosine-3'-phosphate
  modified_base 11: mod_base = OTHER; note = 2'-O-methylcytidine-3'-phosphate
  modified_base 12: mod_base = OTHER; note = 2'-O-methyladenosine-3'-phosphate
  modified_base 13: mod_base = OTHER; note = 2'-O-methylcytidine-3'-phosphate
  modified_base 14: mod_base = OTHER; note = 2'-fluoroadenosine-3'-phosphate
  modified_base 15: mod_base = OTHER; note = 2'-O-methylguanosine-3'-phosphate
  modified_base 16: mod_base = OTHER; note = 2'-fluorocytidine-3'-phosphate
  modified_base 17: mod_base = OTHER; note = 2'-O-methylcytidine-3'-phosphate
  modified_base 18: mod_base = OTHER; note = 2'-O-methyluridine-3'-phosphate
  modified_base 19: mod_base = OTHER; note = 2'-O-methyluridine-3'-phosphate
  modified_base 20: mod_base = OTHER; note = 2'-O-methylguanosine-3'-phosphate
  modified_base 21: mod_base = OTHER; note = 2'-O-methylguanosine-3'- phosphorothioate
  modified_base 22: mod_base = OTHER; note = 2'-O-methylcytidine-3'- phosphorothioate
  modified_base 23: mod_base = OTHER; note = 2'-O-methylguanosine-3'-phosphate
tccccacaaacacagccttggcg

SEQ ID NO: 2534 - RNA, 21 nt, synthetic construct
  source 1..21: mol_type = other RNA
  modified_base 1: mod_base = OTHER; note = 2'-O-methyluridine-3'-phosphorothioate
  modified_base 2: mod_base = OTHER; note = 2'-O-methylguanosine-3'- phosphorothioate
  modified_base 3: mod_base = OTHER; note = 2'-O-methylguanosine-3'-phosphate
  modified_base 4: mod_base = OTHER; note = 2'-O-methylcytidine-3'-phosphate
  modified_base 5: mod_base = OTHER; note = 2'-O-methylguanosine-3'-phosphate
  modified_base 6: mod_base = OTHER; note = 2'-O-methylcytidine-3'-phosphate
  modified_base 7: mod_base = OTHER; note = 2'-fluorocytidine-3'-phosphate
  modified_base 8: mod_base = OTHER; note = 2'-O-methyladenosine-3'-phosphate
  modified_base 9: mod_base = OTHER; note = 2'-fluoroadenosine-3'-phosphate
  modified_base 10: mod_base = OTHER; note = 2'-fluoroguanosine-3'-phosphate
  modified_base 11: mod_base = OTHER; note = 2'-fluoroguanosine-3'-phosphate
  modified_base 12: mod_base = OTHER; note = 2'-O-methylcytidine-3'-phosphate
  modified_base 13: mod_base = OTHER; note = 2'-O-methyluridine-3'-phosphate
  modified_base 14: mod_base = OTHER; note = 2'-O-methylguanosine-3'-phosphate
  modified_base 15: mod_base = OTHER; note = 2'-O-methyluridine-3'-phosphate
  modified_base 16: mod_base = OTHER; note = 2'-O-methylguanosine-3'-phosphate
  modified_base 17: mod_base = OTHER; note = 2'-O-methyluridine-3'-phosphate
  modified_base 18: mod_base = OTHER; note = 2'-O-methyluridine-3'-phosphate
  modified_base 19: mod_base = OTHER; note = 2'-O-methyluridine-3'-phosphate
  modified_base 20: mod_base = OTHER; note = 2'-O-methylguanosine-3'-phosphate
  modified_base 21: mod_base = OTHER; note 2'-O-methyluridine-3'-phosphate-N-[tris(GalNAc-alkyl)-amido decanoyl)]-4-hydroxyprolinol (Hyp-(GalNAc-alkyl)3)
tggcgccaaggctgtgtttgt

SEQ ID NO: 2535 - RNA, 23 nt, synthetic construct
  source 1..23: mol_type = other RNA
  modified_base 1: mod_base = OTHER; note = 2'-O-methyladenosine-3'- phosphorothioate
  modified_base 2: mod_base = OTHER; note = 2'-fluorocytidine-3'-phosphorothioate
  modified_base 3: mod_base = OTHER; note = 2'-O-methyladenosine-3'-phosphate
  modified_base 4: mod_base = OTHER; note = 2'-O-methyladenosine-3'-phosphate
  modified_base 5: mod_base = OTHER; note = 2'-O-methyladenosine-3'-phosphate
  modified_base 6: mod_base = OTHER; note = 2'-fluorocytidine-3'-phosphate
  modified_base 7: mod_base = OTHER; note = 2'-O-methyladenosine-3'-phosphate
  modified_base 8: mod_base = OTHER; note = 2'-fluorocytidine-3'-phosphate
  modified_base 9: mod_base = OTHER; note = 2'-fluoroadenosine-3'-phosphate
  modified_base 10: mod_base = OTHER; note = 2'-O-methylguanosine-3'-phosphate
  modified_base 11: mod_base = OTHER; note = 2'-O-methylcytidine-3'-phosphate
  modified_base 12: mod_base = OTHER; note = 2'-O-methylcytidine-3'-phosphate
  modified_base 13: mod_base = OTHER; note = 2'-O-methyluridine-3'-phosphate
  modified_base 14: mod_base = OTHER; note = 2'-fluorouridine-3'-phosphate
  modified_base 15: mod_base = OTHER; note = 2'-O-methylguanosine-3'-phosphate
  modified_base 16: mod_base = OTHER; note = 2'-fluoroguanosine-3'-phosphate
  modified_base 17: mod_base = OTHER; note = 2'-O-methylcytidine-3'-phosphate
  modified_base 18: mod_base = OTHER; note = 2'-O-methylguanosine-3'-phosphate
  modified_base 19: mod_base = OTHER; note = 2'-O-methylcytidine-3'-phosphate
  modified_base 20: mod_base = OTHER; note = 2'-O-methylcytidine-3'-phosphate
  modified_base 21: mod_base = OTHER; note = 2'-O-methyladenosine-3'- phosphorothioate
  modified_base 22: mod_base = OTHER; note = 2'-O-methyladenosine-3'- phosphorothioate
  modified_base 23: mod_base = OTHER; note = 2'-O-methylguanosine-3'-phosphate
acaaacacagccttggcgccaag

SEQ ID NO: 2536 - RNA, 21 nt, synthetic construct
  source 1..21: mol_type = other RNA
  modified_base 1: mod_base = OTHER; note = 2'-O-methyluridine-3'-phosphorothioate
  modified_base 2: mod_base = OTHER; note = 2'-O-methyluridine-3'-phosphorothioate
  modified_base 3: mod_base = OTHER; note = 2'-O-methylguanosine-3'-phosphate
  modified_base 4: mod_base = OTHER; note = 2'-O-methylguanosine-3'-phosphate
  modified_base 5: mod_base = OTHER; note = 2'-O-methylcytidine-3'-phosphate
  modified_base 6: mod_base = OTHER; note = 2'-O-methylguanosine-3'-phosphate
  modified_base 7: mod_base = OTHER; note = 2'-fluorocytidine-3'-phosphate
  modified_base 8: mod_base = OTHER; note = 2'-O-methylcytidine-3'-phosphate
  modified_base 9: mod_base = OTHER; note = 2'-fluoroadenosine-3'-phosphate
  modified_base 10: mod_base = OTHER; note = 2'-fluoroadenosine-3'-phosphate
  modified_base 11: mod_base = OTHER; note = 2'-fluoroguanosine-3'-phosphate
  modified_base 12: mod_base = OTHER; note = 2'-O-methylguanosine-3'-phosphate
  modified_base 13: mod_base = OTHER; note = 2'-O-methylcytidine-3'-phosphate
  modified_base 14: mod_base = OTHER; note = 2'-O-methyluridine-3'-phosphate
  modified_base 15: mod_base = OTHER; note = 2'-O-methylguanosine-3'-phosphate
  modified_base 16: mod_base = OTHER; note = 2'-O-methyluridine-3'-phosphate
  modified_base 17: mod_base = OTHER; note = 2'-O-methylguanosine-3'-phosphate
  modified_base 18: mod_base = OTHER; note = 2'-O-methyluridine-3'-phosphate
  modified_base 19: mod_base = OTHER; note = 2'-O-methyluridine-3'-phosphate
  modified_base 20: mod_base = OTHER; note = 2'-O-methyluridine-3'-phosphate
  modified_base 21: mod_base = OTHER; note 2'-O-methylguanosine-3'-phosphate-N-[tris(GalNAc-alkyl)-ami dodecanoyl)]-4-hydroxyprolinol (Hyp-(GalNAc-alkyl)3)
ttggcgccaaggctgtgtttg

SEQ ID NO: 2537 - RNA, 23 nt, synthetic construct
  source 1..23: mol_type = other RNA
  modified_base 1: mod_base = OTHER; note = 2'-O-methylcytidine-3'- phosphorothioate
  modified_base 2: mod_base = OTHER; note = 2'-fluoroadenosine-3'-phosphorothioate
  modified_base 3: mod_base = OTHER; note = 2'-O-methyladenosine-3'-phosphate
  modified_base 4: mod_base = OTHER; note = 2'-O-methyladenosine-3'-phosphate
  modified_base 5: mod_base = OTHER; note = 2'-O-methylcytidine-3'-phosphate
  modified_base 6: mod_base = OTHER; note = 2'-fluoroadenosine-3'-phosphate
  modified_base 7: mod_base = OTHER; note = 2'-O-methylcytidine-3'-phosphate
  modified_base 8: mod_base = OTHER; note = 2'-fluoroadenosine-3'-phosphate
  modified_base 9: mod_base = OTHER; note = 2'-fluoroguanosine-3'-phosphate
  modified_base 10: mod_base = OTHER; note = 2'-O-methylcytidine-3'-phosphate
  modified_base 11: mod_base = OTHER; note = 2'-O-methylcytidine-3'-phosphate
  modified_base 12: mod_base = OTHER; note = 2'-O-methyluridine-3'-phosphate
  modified_base 13: mod_base = OTHER; note = 2'-O-methyluridine-3'-phosphate
  modified_base 14: mod_base = OTHER; note = 2'-fluoroguanosine-3'-phosphate
  modified_base 15: mod_base = OTHER; note = 2'-O-methylguanosine-3'-phosphate
  modified_base 16: mod_base = OTHER; note = 2'-fluorocytidine-3'-phosphate
  modified_base 17: mod_base = OTHER; note = 2'-O-methylguanosine-3'-phosphate
  modified_base 18: mod_base = OTHER; note = 2'-O-methylcytidine-3'-phosphate
  modified_base 19: mod_base = OTHER; note = 2'-O-methylcytidine-3'-phosphate
  modified_base 20: mod_base = OTHER; note = 2'-O-methyladenosine-3'-phosphate
  modified_base 21: mod_base = OTHER; note = 2'-O-methyladenosine-3'- phosphorothioate
  modified_base 22: mod_base = OTHER; note = 2'-O-methylguanosine-3'- phosphorothioate
  modified_base 23: mod_base = OTHER; note = 2'-O-methyladenosine-3'-phosphate
caaacacagccttggcgccaaga

SEQ ID NO: 2538 - RNA, 21 nt, synthetic construct
  source 1..21: mol_type = other RNA
  modified_base 1: mod_base = OTHER; note = 2'-O-methyluridine-3'-phosphorothioate
  modified_base 2: mod_base = OTHER; note = 2'-O-methylguanosine-3'- phosphorothioate
  modified_base 3: mod_base = OTHER; note = 2'-O-methyladenosine-3'-phosphate
  modified_base 4: mod_base = OTHER; note = 2'-O-methyladenosine-3'-phosphate
  modified_base 5: mod_base = OTHER; note = 2'-O-methyladenosine-3'-phosphate
  modified_base 6: mod_base = OTHER; note = 2'-O-methylguanosine-3'-phosphate
  modified_base 7: mod_base = OTHER; note = 2'-fluorocytidine-3'-phosphate
  modified_base 8: mod_base = OTHER; note = 2'-O-methyluridine-3'-phosphate
  modified_base 9: mod_base = OTHER; note = 2'-fluorocytidine-3'-phosphate
  modified_base 10: mod_base = OTHER; note = 2'-fluorouridine-3'-phosphate
  modified_base 11: mod_base = OTHER; note = 2'-fluoroguanosine-3'-phosphate
  modified_base 12: mod_base = OTHER; note = 2'-O-methylguanosine-3'-phosphate
  modified_base 13: mod_base = OTHER; note = 2'-O-methylcytidine-3'-phosphate
  modified_base 14: mod_base = OTHER; note = 2'-O-methyluridine-3'-phosphate
  modified_base 15: mod_base = OTHER; note = 2'-O-methylcytidine-3'-phosphate
  modified_base 16: mod_base = OTHER; note = 2'-O-methyluridine-3'-phosphate
  modified_base 17: mod_base = OTHER; note = 2'-O-methyluridine-3'-phosphate
  modified_base 18: mod_base = OTHER; note = 2'-O-methylguanosine-3'-phosphate
  modified_base 19: mod_base = OTHER; note = 2'-O-methylguanosine-3'-phosphate
  modified_base 20: mod_base = OTHER; note = 2'-O-methylcytidine-3'-phosphate
  modified_base 21: mod_base = OTHER; note 2'-O-methylguanosine-3'-phosphate-N-[tris(GalNAc-alkyl)-ami dodecanoyl)]-4-hydroxyprolinol (Hyp-(GalNAc-alkyl)3)
tgaaagctctggctcttggcg

SEQ ID NO: 2539 - RNA, 23 nt, synthetic construct
  source 1..23: mol_type = other RNA
  modified_base 1: mod_base = OTHER; note = 2'-O-methylcytidine-3'- phosphorothioate
  modified_base 2: mod_base = OTHER; note = 2'-fluoroguanosine-3'-phosphorothioate
  modified_base 3: mod_base = OTHER; note = 2'-O-methylcytidine-3'-phosphate
  modified_base 4: mod_base = OTHER; note = 2'-O-methylcytidine-3'-phosphate
  modified_base 5: mod_base = OTHER; note = 2'-O-methyladenosine-3'-phosphate
  modified_base 6: mod_base = OTHER; note = 2'-fluoroadenosine-3'-phosphate
  modified_base 7: mod_base = OTHER; note = 2'-O-methylguanosine-3'-phosphate
  modified_base 8: mod_base = OTHER; note = 2'-fluoroadenosine-3'-phosphate
  modified_base 9: mod_base = OTHER; note = 2'-fluoroguanosine-3'-phosphate
  modified_base 10: mod_base = OTHER; note = 2'-O-methylcytidine-3'-phosphate
  modified_base 11: mod_base = OTHER; note = 2'-O-methylcytidine-3'-phosphate
  modified_base 12: mod_base = OTHER; note = 2'-O-methyladenosine-3'-phosphate
  modified_base 13: mod_base = OTHER; note = 2'-O-methylguanosine-3'-phosphate
  modified_base 14: mod_base = OTHER; note = 2'-fluoroadenosine-3'-phosphate
  modified_base 15: mod_base = OTHER; note = 2'-O-methylguanosine-3'-phosphate
  modified_base 16: mod_base = OTHER; note = 2'-fluorocytidine-3'-phosphate
  modified_base 17: mod_base = OTHER; note = 2'-O-methyluridine-3'-phosphate
  modified_base 18: mod_base = OTHER; note = 2'-O-methyluridine-3'-phosphate
  modified_base 19: mod_base = OTHER; note = 2'-O-methyluridine-3'-phosphate
  modified_base 20: mod_base = OTHER; note = 2'-O-methylcytidine-3'-phosphate
  modified_base 21: mod_base = OTHER; note = 2'-O-methyladenosine-3'- phosphorothioate
  modified_base 22: mod_base = OTHER; note = 2'-O-methylguanosine-3'- phosphorothioate
  modified_base 23: mod_base = OTHER; note = 2'-O-methyladenosine-3'-phosphate
cgccaagagccagagctttcaga

SEQ ID NO: 2540 - RNA, 21 nt, synthetic construct
  source 1..21: mol_type = other RNA
  modified_base 1: mod_base = OTHER; note = 2'-O-methylguanosine-3'- phosphorothioate
  modified_base 2: mod_base = OTHER; note = 2'-O-methyladenosine-3'- phosphorothioate
  modified_base 3: mod_base = OTHER; note = 2'-O-methyladenosine-3'-phosphate
  modified_base 4: mod_base = OTHER; note = 2'-O-methyladenosine-3'-phosphate
  modified_base 5: mod_base = OTHER; note = 2'-O-methylguanosine-3'-phosphate
  modified_base 6: mod_base = OTHER; note = 2'-O-methylcytidine-3'-phosphate
  modified_base 7: mod_base = OTHER; note = 2'-fluorouridine-3'-phosphate
  modified_base 8: mod_base = OTHER; note = 2'-O-methylcytidine-3'-phosphate
  modified_base 9: mod_base = OTHER; note = 2'-fluorouridine-3'-phosphate
  modified_base 10: mod_base = OTHER; note = 2'-fluoroguanosine-3'-phosphate
  modified_base 11: mod_base = OTHER; note = 2'-fluoroguanosine-3'-phosphate
  modified_base 12: mod_base = OTHER; note = 2'-O-methylcytidine-3'-phosphate
  modified_base 13: mod_base = OTHER; note = 2'-O-methyluridine-3'-phosphate
  modified_base 14: mod_base = OTHER; note = 2'-O-methylcytidine-3'-phosphate
  modified_base 15: mod_base = OTHER; note = 2'-O-methyluridine-3'-phosphate
  modified_base 16: mod_base = OTHER; note = 2'-O-methyluridine-3'-phosphate
  modified_base 17: mod_base = OTHER; note = 2'-O-methylguanosine-3'-phosphate
  modified_base 18: mod_base = OTHER; note = 2'-O-methylguanosine-3'-phosphate
  modified_base 19: mod_base = OTHER; note = 2'-O-methylcytidine-3'-phosphate
  modified_base 20: mod_base = OTHER; note = 2'-O-methylguanosine-3'-phosphate
  modified_base 21: mod_base = OTHER; note 2'-O-methylcytidine-3'-phosphate-N-[tris(GalNAc-alkyl)-amid odecanoyl)]-4-hydroxyprolinol (Hyp-(GalNAc-alkyl)3)
gaaagctctggctcttggcgc

SEQ ID NO: 2541 - RNA, 23 nt, synthetic construct
  source 1..23: mol_type = other RNA
  modified_base 1: mod_base = OTHER; note = 2'-O-methylguanosine-3'- phosphorothioate
  modified_base 2: mod_base = OTHER; note = 2'-fluorocytidine-3'-phosphorothioate
  modified_base 3: mod_base = OTHER; note = 2'-O-methylguanosine-3'-phosphate
  modified_base 4: mod_base = OTHER; note = 2'-O-methylcytidine-3'-phosphate
  modified_base 5: mod_base = OTHER; note = 2'-O-methylcytidine-3'-phosphate
  modified_base 6: mod_base = OTHER; note = 2'-fluoroadenosine-3'-phosphate
  modified_base 7: mod_base = OTHER; note = 2'-O-methyladenosine-3'-phosphate
  modified_base 8: mod_base = OTHER; note = 2'-fluoroguanosine-3'-phosphate
  modified_base 9: mod_base = OTHER; note = 2'-fluoroadenosine-3'-phosphate
  modified_base 10: mod_base = OTHER; note = 2'-O-methylguanosine-3'-phosphate
  modified_base 11: mod_base = OTHER; note = 2'-O-methylcytidine-3'-phosphate
  modified_base 12: mod_base = OTHER; note = 2'-O-methylcytidine-3'-phosphate
  modified_base 13: mod_base = OTHER; note = 2'-O-methyladenosine-3'-phosphate
  modified_base 14: mod_base = OTHER; note = 2'-fluoroguanosine-3'-phosphate
  modified_base 15: mod_base = OTHER; note = 2'-O-methyladenosine-3'-phosphate
  modified_base 16: mod_base = OTHER; note = 2'-fluoroguanosine-3'-phosphate
  modified_base 17: mod_base = OTHER; note = 2'-O-methylcytidine-3'-phosphate
  modified_base 18: mod_base = OTHER; note = 2'-O-methyluridine-3'-phosphate
  modified_base 19: mod_base = OTHER; note = 2'-O-methyluridine-3'-phosphate
  modified_base 20: mod_base = OTHER; note = 2'-O-methyluridine-3'-phosphate
  modified_base 21: mod_base = OTHER; note = 2'-O-methylcytidine-3'- phosphorothioate
  modified_base 22: mod_base = OTHER; note = 2'-O-methyladenosine-3'- phosphorothioate
  modified_base 23: mod_base = OTHER; note = 2'-O-methylguanosine-3'-phosphate
gcgccaagagccagagctttcag

SEQ ID NO: 2542 - RNA, 21 nt, synthetic construct
  source 1..21: mol_type = other RNA
  modified_base 1: mod_base = OTHER; note = 2'-O-methylguanosine-3'- phosphorothioate
  modified_base 2: mod_base = OTHER; note = 2'-O-methyluridine-3'-phosphorothioate
  modified_base 3: mod_base = OTHER; note = 2'-O-methyluridine-3'-phosphate
  modified_base 4: mod_base = OTHER; note = 2'-O-methylcytidine-3'-phosphate
  modified_base 5: mod_base = OTHER; note = 2'-O-methyluridine-3'-phosphate
  modified_base 6: mod_base = OTHER; note = 2'-O-methylguanosine-3'-phosphate
  modified_base 7: mod_base = OTHER; note = 2'-fluoroadenosine-3'-phosphate
  modified_base 8: mod_base = OTHER; note = 2'-O-methyladenosine-3'-phosphate
  modified_base 9: mod_base = OTHER; note = 2'-fluoroadenosine-3'-phosphate
  modified_base 10: mod_base = OTHER; note = 2'-fluoroguanosine-3'-phosphate
  modified_base 11: mod_base = OTHER; note = 2'-fluorocytidine-3'-phosphate
  modified_base 12: mod_base = OTHER; note = 2'-O-methyluridine-3'-phosphate
  modified_base 13: mod_base = OTHER; note = 2'-O-methylcytidine-3'-phosphate
  modified_base 14: mod_base = OTHER; note = 2'-O-methyluridine-3'-phosphate
  modified_base 15: mod_base = OTHER; note = 2'-O-methylguanosine-3'-phosphate
  modified_base 16: mod_base = OTHER; note = 2'-O-methylguanosine-3'-phosphate
  modified_base 17: mod_base = OTHER; note = 2'-O-methylcytidine-3'-phosphate
  modified_base 18: mod_base = OTHER; note = 2'-O-methyluridine-3'-phosphate
  modified_base 19: mod_base = OTHER; note = 2'-O-methylcytidine-3'-phosphate
  modified_base 20: mod_base = OTHER; note = 2'-O-methyluridine-3'-phosphate
  modified_base 21: mod_base = OTHER; note 2'-O-methyluridine-3'-phosphate-N-[tris(GalNAc-alkyl)-amido decanoyl)]-4-hydroxyprolinol (Hyp-(GalNAc-alkyl)3)
gttctgaaagctctggctctt

SEQ ID NO: 2543 - RNA, 23 nt, synthetic construct
  source 1..23: mol_type = other RNA
  modified_base 1: mod_base = OTHER; note = 2'-O-methyladenosine-3'- phosphorothioate
  modified_base 2: mod_base = OTHER; note = 2'-fluoroadenosine-3'-phosphorothioate
  modified_base 3: mod_base = OTHER; note = 2'-O-methylguanosine-3'-phosphate
  modified_base 4: mod_base = OTHER; note = 2'-O-methyladenosine-3'-phosphate
  modified_base 5: mod_base = OTHER; note = 2'-O-methylguanosine-3'-phosphate
  modified_base 6: mod_base = OTHER; note = 2'-fluorocytidine-3'-phosphate
  modified_base 7: mod_base = OTHER; note = 2'-O-methylcytidine-3'-phosphate
  modified_base 8: mod_base = OTHER; note = 2'-fluoroadenosine-3'-phosphate
  modified_base 9: mod_base = OTHER; note = 2'-fluoroguanosine-3'-phosphate
  modified_base 10: mod_base = OTHER; note = 2'-O-methyladenosine-3'-phosphate
  modified_base 11: mod_base = OTHER; note = 2'-O-methylguanosine-3'-phosphate
  modified_base 12: mod_base = OTHER; note = 2'-O-methylcytidine-3'-phosphate
  modified_base 13: mod_base = OTHER; note = 2'-O-methyluridine-3'-phosphate
  modified_base 14: mod_base = OTHER; note = 2'-fluorouridine-3'-phosphate
  modified_base 15: mod_base = OTHER; note = 2'-O-methyluridine-3'-phosphate
  modified_base 16: mod_base = OTHER; note = 2'-fluorocytidine-3'-phosphate
  modified_base 17: mod_base = OTHER; note = 2'-O-methyladenosine-3'-phosphate
  modified_base 18: mod_base = OTHER; note = 2'-O-methylguanosine-3'-phosphate
  modified_base 19: mod_base = OTHER; note = 2'-O-methyladenosine-3'-phosphate
  modified_base 20: mod_base = OTHER; note = 2'-O-methyladenosine-3'-phosphate
  modified_base 21: mod_base = OTHER; note = 2'-O-methylcytidine-3'- phosphorothioate
  modified_base 22: mod_base = OTHER; note = 2'-O-methyladenosine-3'- phosphorothioate
  modified_base 23: mod_base = OTHER; note = 2'-O-methyluridine-3'-phosphate
aagagccagagctttcagaacat

SEQ ID NO: 2544 - RNA, 21 nt, synthetic construct
  source 1..21: mol_type = other RNA
  modified_base 1: mod_base = OTHER; note = 2'-O-methyluridine-3'-phosphorothioate
  modified_base 2: mod_base = OTHER; note = 2'-O-methylguanosine-3'- phosphorothioate
  modified_base 3: mod_base = OTHER; note = 2'-O-methyluridine-3'-phosphate
  modified_base 4: mod_base = OTHER; note = 2'-O-methyluridine-3'-phosphate
  modified_base 5: mod_base = OTHER; note = 2'-O-methylcytidine-3'-phosphate
  modified_base 6: mod_base = OTHER; note = 2'-O-methyluridine-3'-phosphate
  modified_base 7: mod_base = OTHER; note = 2'-fluoroguanosine-3'-phosphate
  modified_base 8: mod_base = OTHER; note = 2'-O-methyladenosine-3'-phosphate
  modified_base 9: mod_base = OTHER; note = 2'-fluoroadenosine-3'-phosphate
  modified_base 10: mod_base = OTHER; note = 2'-fluoroadenosine-3'-phosphate
  modified_base 11: mod_base = OTHER; note = 2'-fluoroguanosine-3'-phosphate
  modified_base 12: mod_base = OTHER; note = 2'-O-methylcytidine-3'-phosphate
  modified_base 13: mod_base = OTHER; note = 2'-O-methyluridine-3'-phosphate
  modified_base 14: mod_base = OTHER; note = 2'-O-methylcytidine-3'-phosphate
  modified_base 15: mod_base = OTHER; note = 2'-O-methyluridine-3'-phosphate
  modified_base 16: mod_base = OTHER; note = 2'-O-methylguanosine-3'-phosphate
  modified_base 17: mod_base = OTHER; note = 2'-O-methylguanosine-3'-phosphate
  modified_base 18: mod_base = OTHER; note = 2'-O-methylcytidine-3'-phosphate
  modified_base 19: mod_base = OTHER; note = 2'-O-methyluridine-3'-phosphate
  modified_base 20: mod_base = OTHER; note = 2'-O-methylcytidine-3'-phosphate
  modified_base 21: mod_base = OTHER; note 2'-O-methyluridine-3'-phosphate-N-[tris(GalNAc-alkyl)-amido decanoyl)]-4-hydroxyprolinol (Hyp-(GalNAc-alkyl)3)
tgttctgaaagctctggctct

SEQ ID NO: 2545 - RNA, 23 nt, synthetic construct
  source 1..23: mol_type = other RNA
  modified_base 1: mod_base = OTHER; note = 2'-O-methyladenosine-3'- phosphorothioate
  modified_base 2: mod_base = OTHER; note = 2'-fluoroguanosine-3'-phosphorothioate
  modified_base 3: mod_base = OTHER; note = 2'-O-methyladenosine-3'-phosphate
  modified_base 4: mod_base = OTHER; note = 2'-O-methylguanosine-3'-phosphate
  modified_base 5: mod_base = OTHER; note = 2'-O-methylcytidine-3'-phosphate
  modified_base 6: mod_base = OTHER; note = 2'-fluorocytidine-3'-phosphate
  modified_base 7: mod_base = OTHER; note = 2'-O-methyladenosine-3'-phosphate
  modified_base 8: mod_base = OTHER; note = 2'-fluoroguanosine-3'-phosphate
  modified_base 9: mod_base = OTHER; note = 2'-fluoroadenosine-3'-phosphate
  modified_base 10: mod_base = OTHER; note = 2'-O-methylguanosine-3'-phosphate
  modified_base 11: mod_base = OTHER; note = 2'-O-methylcytidine-3'-phosphate
  modified_base 12: mod_base = OTHER; note = 2'-O-methyluridine-3'-phosphate
  modified_base 13: mod_base = OTHER; note = 2'-O-methyluridine-3'-phosphate
  modified_base 14: mod_base = OTHER; note = 2'-fluorouridine-3'-phosphate
  modified_base 15: mod_base = OTHER; note = 2'-O-methylcytidine-3'-phosphate
  modified_base 16: mod_base = OTHER; note = 2'-fluoroadenosine-3'-phosphate
  modified_base 17: mod_base = OTHER; note = 2'-O-methylguanosine-3'-phosphate
  modified_base 18: mod_base = OTHER; note = 2'-O-methyladenosine-3'-phosphate
  modified_base 19: mod_base = OTHER; note = 2'-O-methyladenosine-3'-phosphate
  modified_base 20: mod_base = OTHER; note = 2'-O-methylcytidine-3'-phosphate
  modified_base 21: mod_base = OTHER; note = 2'-O-methyladenosine-3'- phosphorothioate
  modified_base 22: mod_base = OTHER; note = 2'-O-methyluridine-3'-phosphorothioate
  modified_base 23: mod_base = OTHER; note = 2'-O-methylcytidine-3'-phosphate
agagccagagctttcagaacatc

SEQ ID NO: 2546 - RNA, 21 nt, synthetic construct
  source 1..21: mol_type = other RNA
  modified_base 1: mod_base = OTHER; note = 2'-O-methylcytidine-3'- phosphorothioate
  modified_base 2: mod_base = OTHER; note = 2'-O-methyladenosine-3'- phosphorothioate
  modified_base 3: mod_base = OTHER; note = 2'-O-methylguanosine-3'-phosphate
  modified_base 4: mod_base = OTHER; note = 2'-O-methylcytidine-3'-phosphate
  modified_base 5: mod_base = OTHER; note = 2'-O-methylcytidine-3'-phosphate
  modified_base 6: mod_base = OTHER; note = 2'-O-methyladenosine-3'-phosphate
  modified_base 7: mod_base = OTHER; note = 2'-fluorocytidine-3'-phosphate
  modified_base 8: mod_base = OTHER; note = 2'-O-methyluridine-3'-phosphate
  modified_base 9: mod_base = OTHER; note = 2'-fluoroadenosine-3'-phosphate
  modified_base 10: mod_base = OTHER; note = 2'-fluorouridine-3'-phosphate
  modified_base 11: mod_base = OTHER; note = 2'-fluorouridine-3'-phosphate
  modified_base 12: mod_base = OTHER; note = 2'-O-methylguanosine-3'-phosphate
  modified_base 13: mod_base = OTHER; note = 2'-O-methyladenosine-3'-phosphate
  modified_base 14: mod_base = OTHER; note = 2'-O-methyluridine-3'-phosphate
  modified_base 15: mod_base = OTHER; note = 2'-O-methylguanosine-3'-phosphate
  modified_base 16: mod_base = OTHER; note = 2'-O-methyluridine-3'-phosphate
  modified_base 17: mod_base = OTHER; note = 2'-O-methyluridine-3'-phosphate
  modified_base 18: mod_base = OTHER; note = 2'-O-methylcytidine-3'-phosphate
  modified_base 19: mod_base = OTHER; note = 2'-O-methyluridine-3'-phosphate
  modified_base 20: mod_base = OTHER; note = 2'-O-methylguanosine-3'-phosphate
  modified_base 21: mod_base = OTHER; note 2'-O-methylcytidine-3'-phosphate-N-[tris(GalNAc-alkyl)-amid odecanoyl)]-4-hydroxyprolinol (Hyp-(GalNAc-alkyl)3)
cagccactattgatgttctgc

SEQ ID NO: 2547 - RNA, 23 nt, synthetic construct
  source 1..23: mol_type = other RNA
  modified_base 1: mod_base = OTHER; note = 2'-O-methylguanosine-3'- phosphorothioate
  modified_base 2: mod_base = OTHER; note = 2'-fluorocytidine-3'-phosphorothioate
  modified_base 3: mod_base = OTHER; note = 2'-O-methyladenosine-3'-phosphate
  modified_base 4: mod_base = OTHER; note = 2'-O-methylguanosine-3'-phosphate
  modified_base 5: mod_base = OTHER; note = 2'-O-methyladenosine-3'-phosphate
  modified_base 6: mod_base = OTHER; note = 2'-fluoroadenosine-3'-phosphate
  modified_base 7: mod_base = OTHER; note = 2'-O-methylcytidine-3'-phosphate
  modified_base 8: mod_base = OTHER; note = 2'-fluoroadenosine-3'-phosphate
  modified_base 9: mod_base = OTHER; note = 2'-fluorouridine-3'-phosphate
  modified_base 10: mod_base = OTHER; note = 2'-O-methylcytidine-3'-phosphate
  modified_base 11: mod_base = OTHER; note = 2'-O-methyladenosine-3'-phosphate
  modified_base 12: mod_base = OTHER; note = 2'-O-methyladenosine-3'-phosphate
  modified_base 13: mod_base = OTHER; note = 2'-O-methyluridine-3'-phosphate
  modified_base 14: mod_base = OTHER; note = 2'-fluoroadenosine-3'-phosphate
  modified_base 15: mod_base = OTHER; note = 2'-O-methylguanosine-3'-phosphate
  modified_base 16: mod_base = OTHER; note = 2'-fluorouridine-3'-phosphate
  modified_base 17: mod_base = OTHER; note = 2'-O-methylguanosine-3'-phosphate
  modified_base 18: mod_base = OTHER; note = 2'-O-methylguanosine-3'-phosphate
  modified_base 19: mod_base = OTHER; note = 2'-O-methylcytidine-3'-phosphate
  modified_base 20: mod_base = OTHER; note = 2'-O-methyluridine-3'-phosphate
  modified_base 21: mod_base = OTHER; note = 2'-O-methylguanosine-3'- phosphorothioate
  modified_base 22: mod_base = OTHER; note = 2'-O-methylguanosine-3'- phosphorothioate
  modified_base 23: mod_base = OTHER; note = 2'-O-methylcytidine-3'-phosphate
gcagaacatcaatagtggctggc

SEQ ID NO: 2548 - RNA, 21 nt, synthetic construct
  source 1..21: mol_type = other RNA
  modified_base 1: mod_base = OTHER; note = 2'-O-methyladenosine-3'- phosphorothioate
  modified_base 2: mod_base = OTHER; note = 2'-O-methylguanosine-3'- phosphorothioate
  modified_base 3: mod_base = OTHER; note = 2'-O-methylcytidine-3'-phosphate
  modified_base 4: mod_base = OTHER; note = 2'-O-methylcytidine-3'-phosphate
  modified_base 5: mod_base = OTHER; note = 2'-O-methyladenosine-3'-phosphate
  modified_base 6: mod_base = OTHER; note = 2'-O-methylcytidine-3'-phosphate
  modified_base 7: mod_base = OTHER; note = 2'-fluorouridine-3'-phosphate
  modified_base 8: mod_base = OTHER; note = 2'-O-methyladenosine-3'-phosphate
  modified_base 9: mod_base = OTHER; note = 2'-fluorouridine-3'-phosphate
  modified_base 10: mod_base = OTHER; note = 2'-fluorouridine-3'-phosphate
  modified_base 11: mod_base = OTHER; note = 2'-fluoroguanosine-3'-phosphate
  modified_base 12: mod_base = OTHER; note = 2'-O-methyladenosine-3'-phosphate
  modified_base 13: mod_base = OTHER; note = 2'-O-methyluridine-3'-phosphate
  modified_base 14: mod_base = OTHER; note = 2'-O-methylguanosine-3'-phosphate
  modified_base 15: mod_base = OTHER; note = 2'-O-methyluridine-3'-phosphate
  modified_base 16: mod_base = OTHER; note = 2'-O-methyluridine-3'-phosphate
  modified_base 17: mod_base = OTHER; note = 2'-O-methylcytidine-3'-phosphate
  modified_base 18: mod_base = OTHER; note = 2'-O-methyluridine-3'-phosphate
  modified_base 19: mod_base = OTHER; note = 2'-O-methylguanosine-3'-phosphate
  modified_base 20: mod_base = OTHER; note = 2'-O-methylcytidine-3'-phosphate
  modified_base 21: mod_base = OTHER; note 2'-O-methylcytidine-3'-phosphate-N-[tris(GalNAc-alkyl)-amid odecanoyl)]-4-hydroxyprolinol (Hyp-(GalNAc-alkyl)3)
agccactattgatgttctgcc

SEQ ID NO: 2549 - RNA, 23 nt, synthetic construct
  source 1..23: mol_type = other RNA
  modified_base 1: mod_base = OTHER; note = 2'-O-methylguanosine-3'- phosphorothioate
  modified_base 2: mod_base = OTHER; note = 2'-fluoroguanosine-3'-phosphorothioate
  modified_base 3: mod_base = OTHER; note = 2'-O-methylcytidine-3'-phosphate
  modified_base 4: mod_base = OTHER; note = 2'-O-methyladenosine-3'-phosphate
  modified_base 5: mod_base = OTHER; note = 2'-O-methylguanosine-3'-phosphate
  modified_base 6: mod_base = OTHER; note = 2'-fluoroadenosine-3'-phosphate
  modified_base 7: mod_base = OTHER; note = 2'-O-methyladenosine-3'-phosphate
  modified_base 8: mod_base = OTHER; note = 2'-fluorocytidine-3'-phosphate
  modified_base 9: mod_base = OTHER; note = 2'-fluoroadenosine-3'-phosphate
  modified_base 10: mod_base = OTHER; note = 2'-O-methyluridine-3'-phosphate
  modified_base 11: mod_base = OTHER; note = 2'-O-methylcytidine-3'-phosphate
  modified_base 12: mod_base = OTHER; note = 2'-O-methyladenosine-3'-phosphate
  modified_base 13: mod_base = OTHER; note = 2'-O-methyladenosine-3'-phosphate
  modified_base 14: mod_base = OTHER; note = 2'-fluorouridine-3'-phosphate
  modified_base 15: mod_base = OTHER; note = 2'-O-methyladenosine-3'-phosphate
  modified_base 16: mod_base = OTHER; note = 2'-fluoroguanosine-3'-phosphate
  modified_base 17: mod_base = OTHER; note = 2'-O-methyluridine-3'-phosphate
  modified_base 18: mod_base = OTHER; note = 2'-O-methylguanosine-3'-phosphate
  modified_base 19: mod_base = OTHER; note = 2'-O-methylguanosine-3'-phosphate
  modified_base 20: mod_base = OTHER; note = 2'-O-methylcytidine-3'-phosphate
  modified_base 21: mod_base = OTHER; note = 2'-O-methyluridine-3'-phosphorothioate
  modified_base 22: mod_base = OTHER; note = 2'-O-methylguanosine-3'- phosphorothioate
  modified_base 23: mod_base = OTHER; note = 2'-O-methylguanosine-3'-phosphate
ggcagaacatcaatagtggctgg

SEQ ID NO: 2550 - RNA, 21 nt, synthetic construct
  source 1..21: mol_type = other RNA
  modified_base 1: mod_base = OTHER; note = 2'-O-methylguanosine-3'- phosphorothioate
  modified_base 2: mod_base = OTHER; note = 2'-O-methyluridine-3'-phosphorothioate
  modified_base 3: mod_base = OTHER; note = 2'-O-methylguanosine-3'-phosphate
  modified_base 4: mod_base = OTHER; note = 2'-O-methylcytidine-3'-phosphate
  modified_base 5: mod_base = OTHER; note = 2'-O-methylcytidine-3'-phosphate
  modified_base 6: mod_base = OTHER; note = 2'-O-methyladenosine-3'-phosphate
  modified_base 7: mod_base = OTHER; note = 2'-fluoroguanosine-3'-phosphate
  modified_base 8: mod_base = OTHER; note = 2'-O-methylcytidine-3'-phosphate
  modified_base 9: mod_base = OTHER; note = 2'-fluorocytidine-3'-phosphate
  modified_base 10: mod_base = OTHER; note = 2'-fluoroadenosine-3'-phosphate
  modified_base 11: mod_base = OTHER; note = 2'-fluorocytidine-3'-phosphate
  modified_base 12: mod_base = OTHER; note = 2'-O-methyluridine-3'-phosphate
  modified_base 13: mod_base = OTHER; note = 2'-O-methyladenosine-3'-phosphate
  modified_base 14: mod_base = OTHER; note = 2'-O-methyluridine-3'-phosphate
  modified_base 15: mod_base = OTHER; note = 2'-O-methyluridine-3'-phosphate
  modified_base 16: mod_base = OTHER; note = 2'-O-methylguanosine-3'-phosphate
  modified_base 17: mod_base = OTHER; note = 2'-O-methyladenosine-3'-phosphate
  modified_base 18: mod_base = OTHER; note = 2'-O-methyluridine-3'-phosphate
  modified_base 19: mod_base = OTHER; note = 2'-O-methylguanosine-3'-phosphate
  modified_base 20: mod_base = OTHER; note = 2'-O-methyluridine-3'-phosphate
  modified_base 21: mod_base = OTHER; note 2'-O-methyluridine-3'-phosphate-N-[tris(GalNAc-alkyl)-amido decanoyl)]-4-hydroxyprolinol (Hyp-(GalNAc-alkyl)3)
gtgccagccactattgatgtt

SEQ ID NO: 2551 - RNA, 23 nt, synthetic construct
  source 1..23: mol_type = other RNA
  modified_base 1: mod_base = OTHER; note = 2'-O-methyladenosine-3'- phosphorothioate
  modified_base 2: mod_base = OTHER; note = 2'-fluoroadenosine-3'-phosphorothioate
  modified_base 3: mod_base = OTHER; note = 2'-O-methylcytidine-3'-phosphate
  modified_base 4: mod_base = OTHER; note = 2'-O-methyladenosine-3'-phosphate
  modified_base 5: mod_base = OTHER; note = 2'-O-methyluridine-3'-phosphate
  modified_base 6: mod_base = OTHER; note = 2'-fluorocytidine-3'-phosphate
  modified_base 7: mod_base = OTHER; note = 2'-O-methyladenosine-3'-phosphate
  modified_base 8: mod_base = OTHER; note = 2'-fluoroadenosine-3'-phosphate
  modified_base 9: mod_base = OTHER; note = 2'-fluorouridine-3'-phosphate
  modified_base 10: mod_base = OTHER; note = 2'-O-methyladenosine-3'-phosphate
  modified_base 11: mod_base = OTHER; note = 2'-O-methylguanosine-3'-phosphate
  modified_base 12: mod_base = OTHER; note = 2'-O-methyluridine-3'-phosphate
  modified_base 13: mod_base = OTHER; note = 2'-O-methylguanosine-3'-phosphate
  modified_base 14: mod_base = OTHER; note = 2'-fluoroguanosine-3'-phosphate
  modified_base 15: mod_base = OTHER; note = 2'-O-methylcytidine-3'-phosphate
  modified_base 16: mod_base = OTHER; note = 2'-fluorouridine-3'-phosphate
  modified_base 17: mod_base = OTHER; note = 2'-O-methylguanosine-3'-phosphate
  modified_base 18: mod_base = OTHER; note = 2'-O-methylguanosine-3'-phosphate
  modified_base 19: mod_base = OTHER; note = 2'-O-methylcytidine-3'-phosphate
  modified_base 20: mod_base = OTHER; note = 2'-O-methyladenosine-3'-phosphate
  modified_base 21: mod_base = OTHER; note = 2'-O-methylcytidine-3'- phosphorothioate
  modified_base 22: mod_base = OTHER; note = 2'-O-methylcytidine-3'- phosphorothioate
  modified_base 23: mod_base = OTHER; note = 2'-O-methylcytidine-3'-phosphate
aacatcaatagtggctggcaccc

SEQ ID NO: 2552 - RNA, 21 nt, synthetic construct
  source 1..21: mol_type = other RNA
  modified_base 1: mod_base = OTHER; note = 2'-O-methylguanosine-3'- phosphorothioate
  modified_base 2: mod_base = OTHER; note = 2'-O-methylguanosine-3'- phosphorothioate
  modified_base 3: mod_base = OTHER; note = 2'-O-methyluridine-3'-phosphate
  modified_base 4: mod_base = OTHER; note = 2'-O-methylguanosine-3'-phosphate
  modified_base 5: mod_base = OTHER; note = 2'-O-methylcytidine-3'-phosphate
  modified_base 6: mod_base = OTHER; note = 2'-O-methylcytidine-3'-phosphate
  modified_base 7: mod_base = OTHER; note = 2'-fluoroadenosine-3'-phosphate
  modified_base 8: mod_base = OTHER; note = 2'-O-methylguanosine-3'-phosphate
  modified_base 9: mod_base = OTHER; note = 2'-fluorocytidine-3'-phosphate
  modified_base 10: mod_base = OTHER; note = 2'-fluorocytidine-3'-phosphate
  modified_base 11: mod_base = OTHER; note = 2'-fluoroadenosine-3'-phosphate
  modified_base 12: mod_base = OTHER; note = 2'-O-methylcytidine-3'-phosphate
  modified_base 13: mod_base = OTHER; note = 2'-O-methyluridine-3'-phosphate
  modified_base 14: mod_base = OTHER; note = 2'-O-methyladenosine-3'-phosphate
  modified_base 15: mod_base = OTHER; note = 2'-O-methyluridine-3'-phosphate
  modified_base 16: mod_base = OTHER; note = 2'-O-methyluridine-3'-phosphate
  modified_base 17: mod_base = OTHER; note = 2'-O-methylguanosine-3'-phosphate
  modified_base 18: mod_base = OTHER; note = 2'-O-methyladenosine-3'-phosphate
  modified_base 19: mod_base = OTHER; note = 2'-O-methyluridine-3'-phosphate
  modified_base 20: mod_base = OTHER; note = 2'-O-methylguanosine-3'-phosphate
  modified_base 21: mod_base = OTHER; note 2'-O-methyluridine-3'-phosphate-N-[tris(GalNAc-alkyl)-amido decanoyl)]-4-hydroxyprolinol (Hyp-(GalNAc-alkyl)3)
ggtgccagccactattgatgt

SEQ ID NO: 2553 - RNA, 23 nt, synthetic construct
  source 1..23: mol_type = other RNA
  modified_base 1: mod_base = OTHER; note = 2'-O-methyladenosine-3'- phosphorothioate
  modified_base 2: mod_base = OTHER; note = 2'-fluorocytidine-3'-phosphorothioate
  modified_base 3: mod_base = OTHER; note = 2'-O-methyladenosine-3'-phosphate
  modified_base 4: mod_base = OTHER; note = 2'-O-methyluridine-3'-phosphate
  modified_base 5: mod_base = OTHER; note = 2'-O-methylcytidine-3'-phosphate
  modified_base 6: mod_base = OTHER; note = 2'-fluoroadenosine-3'-phosphate
  modified_base 7: mod_base = OTHER; note = 2'-O-methyladenosine-3'-phosphate
  modified_base 8: mod_base = OTHER; note = 2'-fluorouridine-3'-phosphate
  modified_base 9: mod_base = OTHER; note = 2'-fluoroadenosine-3'-phosphate
  modified_base 10: mod_base = OTHER; note = 2'-O-methylguanosine-3'-phosphate
  modified_base 11: mod_base = OTHER; note = 2'-O-methyluridine-3'-phosphate
  modified_base 12: mod_base = OTHER; note = 2'-O-methylguanosine-3'-phosphate
  modified_base 13: mod_base = OTHER; note = 2'-O-methylguanosine-3'-phosphate
  modified_base 14: mod_base = OTHER; note = 2'-fluorocytidine-3'-phosphate
  modified_base 15: mod_base = OTHER; note = 2'-O-methyluridine-3'-phosphate
  modified_base 16: mod_base = OTHER; note = 2'-fluoroguanosine-3'-phosphate
  modified_base 17: mod_base = OTHER; note = 2'-O-methylguanosine-3'-phosphate
  modified_base 18: mod_base = OTHER; note = 2'-O-methylcytidine-3'-phosphate
  modified_base 19: mod_base = OTHER; note = 2'-O-methyladenosine-3'-phosphate
  modified_base 20: mod_base = OTHER; note = 2'-O-methylcytidine-3'-phosphate
  modified_base 21: mod_base = OTHER; note = 2'-O-methylcytidine-3'- phosphorothioate
  modified_base 22: mod_base = OTHER; note = 2'-O-methylcytidine-3'- phosphorothioate
  modified_base 23: mod_base = OTHER; note = 2'-O-methylcytidine-3'-phosphate
acatcaatagtggctggcacccc

SEQ ID NO: 2554 - RNA, 21 nt, synthetic construct
  source 1..21: mol_type = other RNA
  modified_base 1: mod_base = OTHER; note = 2'-O-methyladenosine-3'- phosphorothioate
  modified_base 2: mod_base = OTHER; note = 2'-O-methylcytidine-3'- phosphorothioate
  modified_base 3: mod_base = OTHER; note = 2'-O-methyladenosine-3'-phosphate
  modified_base 4: mod_base = OTHER; note = 2'-O-methyladenosine-3'-phosphate
  modified_base 5: mod_base = OTHER; note = 2'-O-methylguanosine-3'-phosphate
  modified_base 6: mod_base = OTHER; note = 2'-O-methylguanosine-3'-phosphate
  modified_base 7: mod_base = OTHER; note = 2'-fluoroadenosine-3'-phosphate
  modified_base 8: mod_base = OTHER; note = 2'-O-methylcytidine-3'-phosphate
  modified_base 9: mod_base = OTHER; note = 2'-fluorocytidine-3'-phosphate
  modified_base 10: mod_base = OTHER; note = 2'-fluoroguanosine-3'-phosphate
  modified_base 11: mod_base = OTHER; note = 2'-fluoroadenosine-3'-phosphate
  modified_base 12: mod_base = OTHER; note = 2'-O-methylguanosine-3'-phosphate
  modified_base 13: mod_base = OTHER; note = 2'-O-methyladenosine-3'-phosphate
  modified_base 14: mod_base = OTHER; note = 2'-O-methyladenosine-3'-phosphate
  modified_base 15: mod_base = OTHER; note = 2'-O-methylguanosine-3'-phosphate
  modified_base 16: mod_base = OTHER; note = 2'-O-methyluridine-3'-phosphate
  modified_base 17: mod_base = OTHER; note = 2'-O-methylcytidine-3'-phosphate
  modified_base 18: mod_base = OTHER; note = 2'-O-methyladenosine-3'-phosphate
  modified_base 19: mod_base = OTHER; note = 2'-O-methylcytidine-3'-phosphate
  modified_base 20: mod_base = OTHER; note = 2'-O-methylcytidine-3'-phosphate
  modified_base 21: mod_base = OTHER; note 2'-O-methyladenosine-3'-phosphate-N-[tris(GalNAc-alkyl)-ami dodecanoyl)]-4-hydroxyprolinol (Hyp-(GalNAc-alkyl)3)
acaaggaccgagaagtcacca

SEQ ID NO: 2555 - RNA, 23 nt, synthetic construct
  source 1..23: mol_type = other RNA
  modified_base 1: mod_base = OTHER; note = 2'-O-methyluridine-3'-phosphorothioate
  modified_base 2: mod_base = OTHER; note = 2'-fluoroguanosine-3'-phosphorothioate
  modified_base 3: mod_base = OTHER; note = 2'-O-methylguanosine-3'-phosphate
  modified_base 4: mod_base = OTHER; note = 2'-O-methyluridine-3'-phosphate
  modified_base 5: mod_base = OTHER; note = 2'-O-methylguanosine-3'-phosphate
  modified_base 6: mod_base = OTHER; note = 2'-fluoroadenosine-3'-phosphate
  modified_base 7: mod_base = OTHER; note = 2'-O-methylcytidine-3'-phosphate
  modified_base 8: mod_base = OTHER; note = 2'-fluorouridine-3'-phosphate
  modified_base 9: mod_base = OTHER; note = 2'-fluorouridine-3'-phosphate
  modified_base 10: mod_base = OTHER; note = 2'-O-methylcytidine-3'-phosphate
  modified_base 11: mod_base = OTHER; note = 2'-O-methyluridine-3'-phosphate
  modified_base 12: mod_base = OTHER; note = 2'-O-methylcytidine-3'-phosphate
  modified_base 13: mod_base = OTHER; note = 2'-O-methylguanosine-3'-phosphate
  modified_base 14: mod_base = OTHER; note = 2'-fluoroguanosine-3'-phosphate
  modified_base 15: mod_base = OTHER; note = 2'-O-methyluridine-3'-phosphate
  modified_base 16: mod_base = OTHER; note = 2'-fluorocytidine-3'-phosphate
  modified_base 17: mod_base = OTHER; note = 2'-O-methylcytidine-3'-phosphate
  modified_base 18: mod_base = OTHER; note = 2'-O-methyluridine-3'-phosphate
  modified_base 19: mod_base = OTHER; note = 2'-O-methyluridine-3'-phosphate
  modified_base 20: mod_base = OTHER; note = 2'-O-methylguanosine-3'-phosphate
  modified_base 21: mod_base = OTHER; note = 2'-O-methyluridine-3'-phosphorothioate
  modified_base 22: mod_base = OTHER; note = 2'-O-methyladenosine-3'- phosphorothioate
  modified_base 23: mod_base = OTHER; note = 2'-O-methylguanosine-3'-phosphate
tggtgacttctcggtccttgtag

SEQ ID NO: 2556 - RNA, 21 nt, synthetic construct
  source 1..21: mol_type = other RNA
  modified_base 1: mod_base = OTHER; note = 2'-O-methylcytidine-3'- phosphorothioate
  modified_base 2: mod_base = OTHER; note = 2'-O-methyladenosine-3'- phosphorothioate
  modified_base 3: mod_base = OTHER; note = 2'-O-methyladenosine-3'-phosphate
  modified_base 4: mod_base = OTHER; note = 2'-O-methylguanosine-3'-phosphate
  modified_base 5: mod_base = OTHER; note = 2'-O-methylguanosine-3'-phosphate
  modified_base 6: mod_base = OTHER; note = 2'-O-methyladenosine-3'-phosphate
  modified_base 7: mod_base = OTHER; note = 2'-fluorocytidine-3'-phosphate
  modified_base 8: mod_base = OTHER; note = 2'-O-methylcytidine-3'-phosphate
  modified_base 9: mod_base = OTHER; note = 2'-fluoroguanosine-3'-phosphate
  modified_base 10: mod_base = OTHER; note = 2'-fluoroadenosine-3'-phosphate
  modified_base 11: mod_base = OTHER; note = 2'-fluoroguanosine-3'-phosphate
  modified_base 12: mod_base = OTHER; note = 2'-O-methyladenosine-3'-phosphate
  modified_base 13: mod_base = OTHER; note = 2'-O-methyladenosine-3'-phosphate
  modified_base 14: mod_base = OTHER; note = 2'-O-methylguanosine-3'-phosphate
  modified_base 15: mod_base = OTHER; note = 2'-O-methyluridine-3'-phosphate
  modified_base 16: mod_base = OTHER; note = 2'-O-methylcytidine-3'-phosphate
  modified_base 17: mod_base = OTHER; note = 2'-O-methyladenosine-3'-phosphate
  modified_base 18: mod_base = OTHER; note = 2'-O-methylcytidine-3'-phosphate
  modified_base 19: mod_base = OTHER; note = 2'-O-methylcytidine-3'-phosphate
  modified_base 20: mod_base = OTHER; note = 2'-O-methyladenosine-3'-phosphate
  modified_base 21: mod_base = OTHER; note 2'-O-methyladenosine-3'-phosphate-N-[tris(GalNAc-alkyl)-ami dodecanoyl)]-4-hydroxyprolinol (Hyp-(GalNAc-alkyl)3)
caaggaccgagaagtcaccaa

SEQ ID NO: 2557 - RNA, 23 nt, synthetic construct
  source 1..23: mol_type = other RNA
  modified_base 1: mod_base = OTHER; note = 2'-O-methyluridine-3'-phosphorothioate
  modified_base 2: mod_base = OTHER; note = 2'-fluorouridine -3'-phosphorothioate
  modified_base 3: mod_base = OTHER; note = 2'-O-methylguanosine-3'-phosphate
  modified_base 4: mod_base = OTHER; note = 2'-O-methylguanosine-3'-phosphate
  modified_base 5: mod_base = OTHER; note = 2'-O-methyluridine-3'-phosphate
  modified_base 6: mod_base = OTHER; note = 2'-fluoroguanosine-3'-phosphate
  modified_base 7: mod_base = OTHER; note = 2'-O-methyladenosine-3'-phosphate
  modified_base 8: mod_base = OTHER; note = 2'-fluorocytidine-3'-phosphate
  modified_base 9: mod_base = OTHER; note = 2'-fluorouridine-3'-phosphate
  modified_base 10: mod_base = OTHER; note = 2'-O-methyluridine-3'-phosphate
  modified_base 11: mod_base = OTHER; note = 2'-O-methylcytidine-3'-phosphate
  modified_base 12: mod_base = OTHER; note = 2'-O-methyluridine-3'-phosphate
  modified_base 13: mod_base = OTHER; note = 2'-O-methylcytidine-3'-phosphate
  modified_base 14: mod_base = OTHER; note = 2'-fluoroguanosine-3'-phosphate
  modified_base 15: mod_base = OTHER; note = 2'-O-methylguanosine-3'-phosphate
  modified_base 16: mod_base = OTHER; note = 2'-fluorouridine-3'-phosphate
  modified_base 17: mod_base = OTHER; note = 2'-O-methylcytidine-3'-phosphate
  modified_base 18: mod_base = OTHER; note = 2'-O-methylcytidine-3'-phosphate
  modified_base 19: mod_base = OTHER; note = 2'-O-methyluridine-3'-phosphate
  modified_base 20: mod_base = OTHER; note = 2'-O-methyluridine-3'-phosphate
  modified_base 21: mod_base = OTHER; note = 2'-O-methylguanosine-3'- phosphorothioate
  modified_base 22: mod_base = OTHER; note = 2'-O-methyluridine-3'-phosphorothioate
  modified_base 23: mod_base = OTHER; note = 2'-O-methyladenosine-3'-phosphate
ttggtgacttctcggtccttgta

SEQ ID NO: 2558 - RNA, 21 nt, synthetic construct
  source 1..21: mol_type = other RNA
  modified_base 1: mod_base = OTHER; note = 2'-O-methyladenosine-3'- phosphorothioate
  modified_base 2: mod_base = OTHER; note = 2'-O-methyluridine-3'-phosphorothioate
  modified_base 3: mod_base = OTHER; note = 2'-O-methylcytidine-3'-phosphate
  modified_base 4: mod_base = OTHER; note = 2'-O-methyluridine-3'-phosphate
  modified_base 5: mod_base = OTHER; note = 2'-O-methyladenosine-3'-phosphate
  modified_base 6: mod_base = OTHER; note = 2'-O-methylcytidine-3'-phosphate
  modified_base 7: mod_base = OTHER; note = 2'-fluoroadenosine-3'-phosphate
  modified_base 8: mod_base = OTHER; note = 2'-O-methyladenosine-3'-phosphate
  modified_base 9: mod_base = OTHER; note = 2'-fluoroguanosine-3'-phosphate
  modified_base 10: mod_base = OTHER; note = 2'-fluoroguanosine-3'-phosphate
  modified_base 11: mod_base = OTHER; note = 2'-fluoroadenosine-3'-phosphate
  modified_base 12: mod_base = OTHER; note = 2'-O-methylcytidine-3'-phosphate
  modified_base 13: mod_base = OTHER; note = 2'-O-methylcytidine-3'-phosphate
  modified_base 14: mod_base = OTHER; note = 2'-O-methylguanosine-3'-phosphate
  modified_base 15: mod_base = OTHER; note = 2'-O-methyladenosine-3'-phosphate
  modified_base 16: mod_base = OTHER; note = 2'-O-methylguanosine-3'-phosphate
  modified_base 17: mod_base = OTHER; note = 2'-O-methyladenosine-3'-phosphate
  modified_base 18: mod_base = OTHER; note = 2'-O-methyladenosine-3'-phosphate
  modified_base 19: mod_base = OTHER; note = 2'-O-methylguanosine-3'-phosphate
  modified_base 20: mod_base = OTHER; note = 2'-O-methyluridine-3'-phosphate
  modified_base 21: mod_base = OTHER; note 2'-O-methylcytidine-3'-phosphate-N-[tris(GalNAc-alkyl)-amid odecanoyl)]-4-hydroxyprolinol (Hyp-(GalNAc-alkyl)3)
atctacaaggaccgagaagtc

SEQ ID NO: 2559 - RNA, 23 nt, synthetic construct
  source 1..23: mol_type = other RNA
  modified_base 1: mod_base = OTHER; note = 2'-O-methylguanosine-3'- phosphorothioate
  modified_base 2: mod_base = OTHER; note = 2'-fluoroadenosine-3'-phosphorothioate
  modified_base 3: mod_base = OTHER; note = 2'-O-methylcytidine-3'-phosphate
  modified_base 4: mod_base = OTHER; note = 2'-O-methyluridine-3'-phosphate
  modified_base 5: mod_base = OTHER; note = 2'-O-methyluridine-3'-phosphate
  modified_base 6: mod_base = OTHER; note = 2'-fluorocytidine-3'-phosphate
  modified_base 7: mod_base = OTHER; note = 2'-O-methyluridine-3'-phosphate
  modified_base 8: mod_base = OTHER; note = 2'-fluorocytidine-3'-phosphate
  modified_base 9: mod_base = OTHER; note = 2'-fluoroguanosine-3'-phosphate
  modified_base 10: mod_base = OTHER; note = 2'-O-methylguanosine-3'-phosphate
  modified_base 11: mod_base = OTHER; note = 2'-O-methyluridine-3'-phosphate
  modified_base 12: mod_base = OTHER; note = 2'-O-methylcytidine-3'-phosphate
  modified_base 13: mod_base = OTHER; note = 2'-O-methylcytidine-3'-phosphate
  modified_base 14: mod_base = OTHER; note = 2'-fluorouridine-3'-phosphate
  modified_base 15: mod_base = OTHER; note = 2'-O-methyluridine-3'-phosphate
  modified_base 16: mod_base = OTHER; note = 2'-fluoroguanosine-3'-phosphate
  modified_base 17: mod_base = OTHER; note = 2'-O-methyluridine-3'-phosphate
  modified_base 18: mod_base = OTHER; note = 2'-O-methyladenosine-3'-phosphate
  modified_base 19: mod_base = OTHER; note = 2'-O-methylguanosine-3'-phosphate
  modified_base 20: mod_base = OTHER; note = 2'-O-methyladenosine-3'-phosphate
  modified_base 21: mod_base = OTHER; note = 2'-O-methyluridine-3'-phosphorothioate
  modified_base 22: mod_base = OTHER; note = 2'-O-methyladenosine-3'- phosphorothioate
  modified_base 23: mod_base = OTHER; note = 2'-O-methyluridine-3'-phosphate
gacttctcggtccttgtagatat

SEQ ID NO: 2560 - RNA, 21 nt, synthetic construct
  source 1..21: mol_type = other RNA
  modified_base 1: mod_base = OTHER; note = 2'-O-methyluridine-3'-phosphorothioate
  modified_base 2: mod_base = OTHER; note = 2'-O-methyladenosine-3'- phosphorothioate
  modified_base 3: mod_base = OTHER; note = 2'-O-methyluridine-3'-phosphate
  modified_base 4: mod_base = OTHER; note = 2'-O-methylcytidine-3'-phosphate
  modified_base 5: mod_base = OTHER; note = 2'-O-methyluridine-3'-phosphate
  modified_base 6: mod_base = OTHER; note = 2'-O-methyladenosine-3'-phosphate
  modified_base 7: mod_base = OTHER; note = 2'-fluorocytidine-3'-phosphate
  modified_base 8: mod_base = OTHER; note = 2'-O-methyladenosine-3'-phosphate
  modified_base 9: mod_base = OTHER; note = 2'-fluoroadenosine-3'-phosphate
  modified_base 10: mod_base = OTHER; note = 2'-fluoroguanosine-3'-phosphate
  modified_base 11: mod_base = OTHER; note = 2'-fluoroguanosine-3'-phosphate
  modified_base 12: mod_base = OTHER; note = 2'-O-methyladenosine-3'-phosphate
  modified_base 13: mod_base = OTHER; note = 2'-O-methylcytidine-3'-phosphate
  modified_base 14: mod_base = OTHER; note = 2'-O-methylcytidine-3'-phosphate
  modified_base 15: mod_base = OTHER; note = 2'-O-methylguanosine-3'-phosphate
  modified_base 16: mod_base = OTHER; note = 2'-O-methyladenosine-3'-phosphate
  modified_base 17: mod_base = OTHER; note = 2'-O-methylguanosine-3'-phosphate
  modified_base 18: mod_base = OTHER; note = 2'-O-methyladenosine-3'-phosphate
  modified_base 19: mod_base = OTHER; note = 2'-O-methyladenosine-3'-phosphate
  modified_base 20: mod_base = OTHER; note = 2'-O-methylguanosine-3'-phosphate
  modified_base 21: mod_base = OTHER; note 2'-O-methyluridine-3'-phosphate-N-[tris(GalNAc-alkyl)-amido decanoyl)]-4-hydroxyprolinol (Hyp-(GalNAc-alkyl)3)
tatctacaaggaccgagaagt

SEQ ID NO: 2561 - RNA, 23 nt, synthetic construct
  source 1..23: mol_type = other RNA
  modified_base 1: mod_base = OTHER; note = 2'-O-methyladenosine-3'- phosphorothioate
  modified_base 2: mod_base = OTHER; note = 2'-fluorocytidine-3'-phosphorothioate
  modified_base 3: mod_base = OTHER; note = 2'-O-methyluridine-3'-phosphate
  modified_base 4: mod_base = OTHER; note = 2'-O-methyluridine-3'-phosphate
  modified_base 5: mod_base = OTHER; note = 2'-O-methylcytidine-3'-phosphate
  modified_base 6: mod_base = OTHER; note = 2'-fluorouridine-3'-phosphate
  modified_base 7: mod_base = OTHER; note = 2'-O-methylcytidine-3'-phosphate
  modified_base 8: mod_base = OTHER; note = 2'-fluoroguanosine-3'-phosphate
  modified_base 9: mod_base = OTHER; note = 2'-fluoroguanosine-3'-phosphate
  modified_base 10: mod_base = OTHER; note = 2'-O-methyluridine-3'-phosphate
  modified_base 11: mod_base = OTHER; note = 2'-O-methylcytidine-3'-phosphate
  modified_base 12: mod_base = OTHER; note = 2'-O-methylcytidine-3'-phosphate
  modified_base 13: mod_base = OTHER; note = 2'-O-methyluridine-3'-phosphate
  modified_base 14: mod_base = OTHER; note = 2'-fluorouridine-3'-phosphate
  modified_base 15: mod_base = OTHER; note = 2'-O-methylguanosine-3'-phosphate
  modified_base 16: mod_base = OTHER; note = 2'-fluorouridine-3'-phosphate
  modified_base 17: mod_base = OTHER; note = 2'-O-methyladenosine-3'-phosphate
  modified_base 18: mod_base = OTHER; note = 2'-O-methylguanosine-3'-phosphate
  modified_base 19: mod_base = OTHER; note = 2'-O-methyladenosine-3'-phosphate
  modified_base 20: mod_base = OTHER; note = 2'-O-methyluridine-3'-phosphate
  modified_base 21: mod_base = OTHER; note = 2'-O-methyladenosine-3'- phosphorothioate
  modified_base 22: mod_base = OTHER; note = 2'-O-methyluridine-3'-phosphorothioate
  modified_base 23: mod_base = OTHER; note = 2'-O-methyladenosine-3'-phosphate
acttctcggtccttgtagatata

SEQ ID NO: 2562 - RNA, 21 nt, synthetic construct
  source 1..21: mol_type = other RNA
  modified_base 1: mod_base = OTHER; note = 2'-O-methylcytidine-3'- phosphorothioate
  modified_base 2: mod_base = OTHER; note = 2'-O-methyladenosine-3'- phosphorothioate
  modified_base 3: mod_base = OTHER; note = 2'-O-methylguanosine-3'-phosphate
  modified_base 4: mod_base = OTHER; note = 2'-O-methyladenosine-3'-phosphate
  modified_base 5: mod_base = OTHER; note = 2'-O-methyladenosine-3'-phosphate
  modified_base 6: mod_base = OTHER; note = 2'-O-methyluridine-3'-phosphate
  modified_base 7: mod_base = OTHER; note = 2'-fluoroguanosine-3'-phosphate
  modified_base 8: mod_base = OTHER; note = 2'-O-methyluridine-3'-phosphate
  modified_base 9: mod_base = OTHER; note = 2'-fluoroguanosine-3'-phosphate
  modified_base 10: mod_base = OTHER; note = 2'-fluoroadenosine-3'-phosphate
  modified_base 11: mod_base = OTHER; note = 2'-fluoroadenosine-3'-phosphate
  modified_base 12: mod_base = OTHER; note = 2'-O-methyladenosine-3'-phosphate
  modified_base 13: mod_base = OTHER; note = 2'-O-methylguanosine-3'-phosphate
  modified_base 14: mod_base = OTHER; note = 2'-O-methyluridine-3'-phosphate
  modified_base 15: mod_base = OTHER; note = 2'-O-methylcytidine-3'-phosphate
  modified_base 16: mod_base = OTHER; note = 2'-O-methyladenosine-3'-phosphate
  modified_base 17: mod_base = OTHER; note = 2'-O-methyluridine-3'-phosphate
  modified_base 18: mod_base = OTHER; note = 2'-O-methylcytidine-3'-phosphate
  modified_base 19: mod_base = OTHER; note = 2'-O-methylguanosine-3'-phosphate
  modified_base 20: mod_base = OTHER; note = 2'-O-methyladenosine-3'-phosphate
  modified_base 21: mod_base = OTHER; note 2'-O-methylcytidine-3'-phosphate-N-[tris(GalNAc-alkyl)-amid odecanoyl)]-4-hydroxyprolinol (Hyp-(GalNAc-alkyl)3)
cagaatgtgaaagtcatcgac

SEQ ID NO: 2563 - RNA, 23 nt, synthetic construct
  source 1..23: mol_type = other RNA
  modified_base 1: mod_base = OTHER; note = 2'-O-methylguanosine-3'- phosphorothioate
  modified_base 2: mod_base = OTHER; note = 2'-fluorouridine -3'-phosphorothioate
  modified_base 3: mod_base = OTHER; note = 2'-O-methylcytidine-3'-phosphate
  modified_base 4: mod_base = OTHER; note = 2'-O-methylguanosine-3'-phosphate
  modified_base 5: mod_base = OTHER; note = 2'-O-methyladenosine-3'-phosphate
  modified_base 6: mod_base = OTHER; note = 2'-fluorouridine-3'-phosphate
  modified_base 7: mod_base = OTHER; note = 2'-O-methylguanosine-3'-phosphate
  modified_base 8: mod_base = OTHER; note = 2'-fluoroadenosine-3'-phosphate
  modified_base 9: mod_base = OTHER; note = 2'-fluorocytidine-3'-phosphate
  modified_base 10: mod_base = OTHER; note = 2'-O-methyluridine-3'-phosphate
  modified_base 11: mod_base = OTHER; note = 2'-O-methyluridine-3'-phosphate
  modified_base 12: mod_base = OTHER; note = 2'-O-methyluridine-3'-phosphate
  modified_base 13: mod_base = OTHER; note = 2'-O-methylcytidine-3'-phosphate
  modified_base 14: mod_base = OTHER; note = 2'-fluoroadenosine-3'-phosphate
  modified_base 15: mod_base = OTHER; note = 2'-O-methylcytidine-3'-phosphate
  modified_base 16: mod_base = OTHER; note = 2'-fluoroadenosine-3'-phosphate
  modified_base 17: mod_base = OTHER; note = 2'-O-methyluridine-3'-phosphate
  modified_base 18: mod_base = OTHER; note = 2'-O-methyluridine-3'-phosphate
  modified_base 19: mod_base = OTHER; note = 2'-O-methylcytidine-3'-phosphate
  modified_base 20: mod_base = OTHER; note = 2'-O-methyluridine-3'-phosphate
  modified_base 21: mod_base = OTHER; note = 2'-O-methylguanosine-3'- phosphorothioate
  modified_base 22: mod_base = OTHER; note = 2'-O-methylguanosine-3'- phosphorothioate
  modified_base 23: mod_base = OTHER; note = 2'-O-methylcytidine-3'-phosphate
gtcgatgactttcacattctggc

SEQ ID NO: 2564 - RNA, 21 nt, synthetic construct
  source 1..21: mol_type = other RNA
  modified_base 1: mod_base = OTHER; note = 2'-O-methyladenosine-3'- phosphorothioate
  modified_base 2: mod_base = OTHER; note = 2'-O-methylguanosine-3'- phosphorothioate
  modified_base 3: mod_base = OTHER; note = 2'-O-methyladenosine-3'-phosphate
  modified_base 4: mod_base = OTHER; note = 2'-O-methyladenosine-3'-phosphate
  modified_base 5: mod_base = OTHER; note = 2'-O-methyluridine-3'-phosphate
  modified_base 6: mod_base = OTHER; note = 2'-O-methylguanosine-3'-phosphate
  modified_base 7: mod_base = OTHER; note = 2'-fluorouridine-3'-phosphate
  modified_base 8: mod_base = OTHER; note = 2'-O-methylguanosine-3'-phosphate
  modified_base 9: mod_base = OTHER; note = 2'-fluoroadenosine-3'-phosphate
  modified_base 10: mod_base = OTHER; note = 2'-fluoroadenosine-3'-phosphate
  modified_base 11: mod_base = OTHER; note = 2'-fluoroadenosine-3'-phosphate
  modified_base 12: mod_base = OTHER; note = 2'-O-methylguanosine-3'-phosphate
  modified_base 13: mod_base = OTHER; note = 2'-O-methyluridine-3'-phosphate
  modified_base 14: mod_base = OTHER; note = 2'-O-methylcytidine-3'-phosphate
  modified_base 15: mod_base = OTHER; note = 2'-O-methyladenosine-3'-phosphate
  modified_base 16: mod_base = OTHER; note = 2'-O-methyluridine-3'-phosphate
  modified_base 17: mod_base = OTHER; note = 2'-O-methylcytidine-3'-phosphate
  modified_base 18: mod_base = OTHER; note = 2'-O-methylguanosine-3'-phosphate
  modified_base 19: mod_base = OTHER; note = 2'-O-methyladenosine-3'-phosphate
  modified_base 20: mod_base = OTHER; note = 2'-O-methylcytidine-3'-phosphate
  modified_base 21: mod_base = OTHER; note 2'-O-methyladenosine-3'-phosphate-N-[tris(GalNAc-alkyl)-ami dodecanoyl)]-4-hydroxyprolinol (Hyp-(GalNAc-alkyl)3)
agaatgtgaaagtcatcgaca

SEQ ID NO: 2565 - RNA, 23 nt, synthetic construct
  source 1..23: mol_type = other RNA
  modified_base 1: mod_base = OTHER; note = 2'-O-methyluridine-3'-phosphorothioate
  modified_base 2: mod_base = OTHER; note = 2'-fluoroguanosine-3'-phosphorothioate
  modified_base 3: mod_base = OTHER; note = 2'-O-methyluridine-3'-phosphate
  modified_base 4: mod_base = OTHER; note = 2'-O-methylcytidine-3'-phosphate
  modified_base 5: mod_base = OTHER; note = 2'-O-methylguanosine-3'-phosphate
  modified_base 6: mod_base = OTHER; note = 2'-fluoroadenosine-3'-phosphate
  modified_base 7: mod_base = OTHER; note = 2'-O-methyluridine-3'-phosphate
  modified_base 8: mod_base = OTHER; note = 2'-fluoroguanosine-3'-phosphate
  modified_base 9: mod_base = OTHER; note = 2'-fluoroadenosine-3'-phosphate
  modified_base 10: mod_base = OTHER; note = 2'-O-methylcytidine-3'-phosphate
  modified_base 11: mod_base = OTHER; note = 2'-O-methyluridine-3'-phosphate
  modified_base 12: mod_base = OTHER; note = 2'-O-methyluridine-3'-phosphate
  modified_base 13: mod_base = OTHER; note = 2'-O-methyluridine-3'-phosphate
  modified_base 14: mod_base = OTHER; note = 2'-fluorocytidine-3'-phosphate
  modified_base 15: mod_base = OTHER; note = 2'-O-methyladenosine-3'-phosphate
  modified_base 16: mod_base = OTHER; note = 2'-fluorocytidine-3'-phosphate
  modified_base 17: mod_base = OTHER; note = 2'-O-methyladenosine-3'-phosphate
  modified_base 18: mod_base = OTHER; note = 2'-O-methyluridine-3'-phosphate
  modified_base 19: mod_base = OTHER; note = 2'-O-methyluridine-3'-phosphate
  modified_base 20: mod_base = OTHER; note = 2'-O-methylcytidine-3'-phosphate
  modified_base 21: mod_base = OTHER; note = 2'-O-methyluridine-3'-phosphorothioate
  modified_base 22: mod_base = OTHER; note = 2'-O-methylguanosine-3'- phosphorothioate
  modified_base 23: mod_base = OTHER; note = 2'-O-methylguanosine-3'-phosphate
tgtcgatgactttcacattctgg

SEQ ID NO: 2566 - RNA, 21 nt, synthetic construct
  source 1..21: mol_type = other RNA
  modified_base 1: mod_base = OTHER; note = 2'-O-methylguanosine-3'- phosphorothioate
  modified_base 2: mod_base = OTHER; note = 2'-O-methyluridine-3'-phosphorothioate
  modified_base 3: mod_base = OTHER; note = 2'-O-methylguanosine-3'-phosphate
  modified_base 4: mod_base = OTHER; note = 2'-O-methylcytidine-3'-phosphate
  modified_base 5: mod_base = OTHER; note = 2'-O-methylcytidine-3'-phosphate
  modified_base 6: mod_base = OTHER; note = 2'-O-methyladenosine-3'-phosphate
  modified_base 7: mod_base = OTHER; note = 2'-fluoroguanosine-3'-phosphate
  modified_base 8: mod_base = OTHER; note = 2'-O-methyladenosine-3'-phosphate
  modified_base 9: mod_base = OTHER; note = 2'-fluoroadenosine-3'-phosphate
  modified_base 10: mod_base = OTHER; note = 2'-fluorouridine-3'-phosphate
  modified_base 11: mod_base = OTHER; note = 2'-fluoroguanosine-3'-phosphate
  modified_base 12: mod_base = OTHER; note = 2'-O-methyluridine-3'-phosphate
  modified_base 13: mod_base = OTHER; note = 2'-O-methylguanosine-3'-phosphate
  modified_base 14: mod_base = OTHER; note = 2'-O-methyladenosine-3'-phosphate
  modified_base 15: mod_base = OTHER; note = 2'-O-methyladenosine-3'-phosphate
  modified_base 16: mod_base = OTHER; note = 2'-O-methyladenosine-3'-phosphate
  modified_base 17: mod_base = OTHER; note = 2'-O-methylguanosine-3'-phosphate
  modified_base 18: mod_base = OTHER; note = 2'-O-methyluridine-3'-phosphate
  modified_base 19: mod_base = OTHER; note = 2'-O-methylcytidine-3'-phosphate
  modified_base 20: mod_base = OTHER; note = 2'-O-methyladenosine-3'-phosphate
  modified_base 21: mod_base = OTHER; note 2'-O-methyluridine-3'-phosphate-N-[tris(GalNAc-alkyl)-amido decanoyl)]-4-hydroxyprolinol (Hyp-(GalNAc-alkyl)3)
gtgccagaatgtgaaagtcat

SEQ ID NO: 2567 - RNA, 23 nt, synthetic construct
  source 1..23: mol_type = other RNA
  modified_base 1: mod_base = OTHER; note = 2'-O-methyladenosine-3'- phosphorothioate
  modified_base 2: mod_base = OTHER; note = 2'-fluorouridine -3'-phosphorothioate
  modified_base 3: mod_base = OTHER; note = 2'-O-methylguanosine-3'-phosphate
  modified_base 4: mod_base = OTHER; note = 2'-O-methyladenosine-3'-phosphate
  modified_base 5: mod_base = OTHER; note = 2'-O-methylcytidine-3'-phosphate
  modified_base 6: mod_base = OTHER; note = 2'-fluorouridine-3'-phosphate
  modified_base 7: mod_base = OTHER; note = 2'-O-methyluridine-3'-phosphate
  modified_base 8: mod_base = OTHER; note = 2'-fluorouridine-3'-phosphate
  modified_base 9: mod_base = OTHER; note = 2'-fluorocytidine-3'-phosphate
  modified_base 10: mod_base = OTHER; note = 2'-O-methyladenosine-3'-phosphate
  modified_base 11: mod_base = OTHER; note = 2'-O-methylcytidine-3'-phosphate
  modified_base 12: mod_base = OTHER; note = 2'-O-methyladenosine-3'-phosphate
  modified_base 13: mod_base = OTHER; note = 2'-O-methyluridine-3'-phosphate
  modified_base 14: mod_base = OTHER; note = 2'-fluorouridine-3'-phosphate
  modified_base 15: mod_base = OTHER; note = 2'-O-methylcytidine-3'-phosphate
  modified_base 16: mod_base = OTHER; note = 2'-fluorouridine-3'-phosphate
  modified_base 17: mod_base = OTHER; note = 2'-O-methylguanosine-3'-phosphate
  modified_base 18: mod_base = OTHER; note = 2'-O-methylguanosine-3'-phosphate
  modified_base 19: mod_base = OTHER; note = 2'-O-methylcytidine-3'-phosphate
  modified_base 20: mod_base = OTHER; note = 2'-O-methyladenosine-3'-phosphate
  modified_base 21: mod_base = OTHER; note = 2'-O-methylcytidine-3'- phosphorothioate
  modified_base 22: mod_base = OTHER; note = 2'-O-methylcytidine-3'- phosphorothioate
  modified_base 23: mod_base = OTHER; note = 2'-O-methylcytidine-3'-phosphate
atgactttcacattctggcaccc

SEQ ID NO: 2568 - RNA, 21 nt, synthetic construct
  source 1..21: mol_type = other RNA
  modified_base 1: mod_base = OTHER; note = 2'-O-methylguanosine-3'- phosphorothioate
  modified_base 2: mod_base = OTHER; note = 2'-O-methylguanosine-3'- phosphorothioate
  modified_base 3: mod_base = OTHER; note = 2'-O-methyluridine-3'-phosphate
  modified_base 4: mod_base = OTHER; note = 2'-O-methylguanosine-3'-phosphate
  modified_base 5: mod_base = OTHER; note = 2'-O-methylcytidine-3'-phosphate
  modified_base 6: mod_base = OTHER; note = 2'-O-methylcytidine-3'-phosphate
  modified_base 7: mod_base = OTHER; note = 2'-fluoroadenosine-3'-phosphate
  modified_base 8: mod_base = OTHER; note = 2'-O-methylguanosine-3'-phosphate
  modified_base 9: mod_base = OTHER; note = 2'-fluoroadenosine-3'-phosphate
  modified_base 10: mod_base = OTHER; note = 2'-fluoroadenosine-3'-phosphate
  modified_base 11: mod_base = OTHER; note = 2'-fluorouridine-3'-phosphate
  modified_base 12: mod_base = OTHER; note = 2'-O-methylguanosine-3'-phosphate
  modified_base 13: mod_base = OTHER; note = 2'-O-methyluridine-3'-phosphate
  modified_base 14: mod_base = OTHER; note = 2'-O-methylguanosine-3'-phosphate
  modified_base 15: mod_base = OTHER; note = 2'-O-methyladenosine-3'-phosphate
  modified_base 16: mod_base = OTHER; note = 2'-O-methyladenosine-3'-phosphate
  modified_base 17: mod_base = OTHER; note = 2'-O-methyladenosine-3'-phosphate
  modified_base 18: mod_base = OTHER; note = 2'-O-methylguanosine-3'-phosphate
  modified_base 19: mod_base = OTHER; note = 2'-O-methyluridine-3'-phosphate
  modified_base 20: mod_base = OTHER; note = 2'-O-methylcytidine-3'-phosphate
  modified_base 21: mod_base = OTHER; note 2'-O-methyladenosine-3'-phosphate-N-[tris(GalNAc-alkyl)-ami dodecanoyl)]-4-hydroxyprolinol (Hyp-(GalNAc-alkyl)3)
ggtgccagaatgtgaaagtca

SEQ ID NO: 2569 - RNA, 23 nt, synthetic construct
  source 1..23: mol_type = other RNA
  modified_base 1: mod_base = OTHER; note = 2'-O-methyluridine-3'-phosphorothioate
  modified_base 2: mod_base = OTHER; note = 2'-fluoroguanosine-3'-phosphorothioate
  modified_base 3: mod_base = OTHER; note = 2'-O-methyladenosine-3'-phosphate
  modified_base 4: mod_base = OTHER; note = 2'-O-methylcytidine-3'-phosphate
  modified_base 5: mod_base = OTHER; note = 2'-O-methyluridine-3'-phosphate
  modified_base 6: mod_base = OTHER; note = 2'-fluorouridine-3'-phosphate
  modified_base 7: mod_base = OTHER; note = 2'-O-methyluridine-3'-phosphate
  modified_base 8: mod_base = OTHER; note = 2'-fluorocytidine-3'-phosphate
  modified_base 9: mod_base = OTHER; note = 2'-fluoroadenosine-3'-phosphate
  modified_base 10: mod_base = OTHER; note = 2'-O-methylcytidine-3'-phosphate
  modified_base 11: mod_base = OTHER; note = 2'-O-methyladenosine-3'-phosphate
  modified_base 12: mod_base = OTHER; note = 2'-O-methyluridine-3'-phosphate
  modified_base 13: mod_base = OTHER; note = 2'-O-methyluridine-3'-phosphate
  modified_base 14: mod_base = OTHER; note = 2'-fluorocytidine-3'-phosphate
  modified_base 15: mod_base = OTHER; note = 2'-O-methyluridine-3'-phosphate
  modified_base 16: mod_base = OTHER; note = 2'-fluoroguanosine-3'-phosphate
  modified_base 17: mod_base = OTHER; note = 2'-O-methylguanosine-3'-phosphate
  modified_base 18: mod_base = OTHER; note = 2'-O-methylcytidine-3'-phosphate
  modified_base 19: mod_base = OTHER; note = 2'-O-methyladenosine-3'-phosphate
  modified_base 20: mod_base = OTHER; note = 2'-O-methylcytidine-3'-phosphate
  modified_base 21: mod_base = OTHER; note = 2'-O-methylcytidine-3'- phosphorothioate
  modified_base 22: mod_base = OTHER; note = 2'-O-methylcytidine-3'- phosphorothioate
  modified_base 23: mod_base = OTHER; note = 2'-O-methyladenosine-3'-phosphate
tgactttcacattctggcaccca

SEQ ID NO: 2570 - RNA, 21 nt, synthetic construct
  source 1..21: mol_type = other RNA
  modified_base 1: mod_base = OTHER; note = 2'-O-methyladenosine-3'- phosphorothioate
  modified_base 2: mod_base = OTHER; note = 2'-O-methylguanosine-3'- phosphorothioate
  modified_base 3: mod_base = OTHER; note = 2'-O-methyladenosine-3'-phosphate
  modified_base 4: mod_base = OTHER; note = 2'-O-methyluridine-3'-phosphate
  modified_base 5: mod_base = OTHER; note = 2'-O-methylguanosine-3'-phosphate
  modified_base 6: mod_base = OTHER; note = 2'-O-methyluridine-3'-phosphate
  modified_base 7: mod_base = OTHER; note = 2'-fluorocytidine-3'-phosphate
  modified_base 8: mod_base = OTHER; note = 2'-O-methylcytidine-3'-phosphate
  modified_base 9: mod_base = OTHER; note = 2'-fluorouridine-3'-phosphate
  modified_base 10: mod_base = OTHER; note = 2'-fluorocytidine-3'-phosphate
  modified_base 11: mod_base = OTHER; note = 2'-fluoroguanosine-3'-phosphate
  modified_base 12: mod_base = OTHER; note = 2'-O-methyladenosine-3'-phosphate
  modified_base 13: mod_base = OTHER; note = 2'-O-methylguanosine-3'-phosphate
  modified_base 14: mod_base = OTHER; note = 2'-O-methyladenosine-3'-phosphate
  modified_base 15: mod_base = OTHER; note = 2'-O-methyluridine-3'-phosphate
  modified_base 16: mod_base = OTHER; note = 2'-O-methyladenosine-3'-phosphate
  modified_base 17: mod_base = OTHER; note = 2'-O-methylcytidine-3'-phosphate
  modified_base 18: mod_base = OTHER; note = 2'-O-methyluridine-3'-phosphate
  modified_base 19: mod_base = OTHER; note = 2'-O-methyladenosine-3'-phosphate
  modified_base 20: mod_base = OTHER; note = 2'-O-methyladenosine-3'-phosphate
  modified_base 21: mod_base = OTHER; note 2'-O-methyladenosine-3'-phosphate-N-[tris(GalNAc-alkyl)-ami dodecanoyl)]-4-hydroxyprolinol (Hyp-(GalNAc-alkyl)3)
agatgtcctcgagatactaaa

SEQ ID NO: 2571 - RNA, 23 nt, synthetic construct
  source 1..23: mol_type = other RNA
  modified_base 1: mod_base = OTHER; note = 2'-O-methyluridine-3'-phosphorothioate
  modified_base 2: mod_base = OTHER; note = 2'-fluorouridine -3'-phosphorothioate
  modified_base 3: mod_base = OTHER; note = 2'-O-methyluridine-3'-phosphate
  modified_base 4: mod_base = OTHER; note = 2'-O-methyladenosine-3'-phosphate
  modified_base 5: mod_base = OTHER; note = 2'-O-methylguanosine-3'-phosphate
  modified_base 6: mod_base = OTHER; note = 2'-fluorouridine-3'-phosphate
  modified_base 7: mod_base = OTHER; note = 2'-O-methyladenosine-3'-phosphate
  modified_base 8: mod_base = OTHER; note = 2'-fluorouridine-3'-phosphate
  modified_base 9: mod_base = OTHER; note = 2'-fluorocytidine-3'-phosphate
  modified_base 10: mod_base = OTHER; note = 2'-O-methyluridine-3'-phosphate
  modified_base 11: mod_base = OTHER; note = 2'-O-methylcytidine-3'-phosphate
  modified_base 12: mod_base = OTHER; note = 2'-O-methylguanosine-3'-phosphate
  modified_base 13: mod_base = OTHER; note = 2'-O-methyladenosine-3'-phosphate
  modified_base 14: mod_base = OTHER; note = 2'-fluoroguanosine-3'-phosphate
  modified_base 15: mod_base = OTHER; note = 2'-O-methylguanosine-3'-phosphate
  modified_base 16: mod_base = OTHER; note = 2'-fluoroadenosine-3'-phosphate
  modified_base 17: mod_base = OTHER; note = 2'-O-methylcytidine-3'-phosphate
  modified_base 18: mod_base = OTHER; note = 2'-O-methyladenosine-3'-phosphate
  modified_base 19: mod_base = OTHER; note = 2'-O-methyluridine-3'-phosphate
  modified_base 20: mod_base = OTHER; note = 2'-O-methylcytidine-3'-phosphate
  modified_base 21: mod_base = OTHER; note = 2'-O-methyluridine-3'-phosphorothioate
  modified_base 22: mod_base = OTHER; note = 2'-O-methyluridine-3'-phosphorothioate
  modified_base 23: mod_base = OTHER; note = 2'-O-methylguanosine-3'-phosphate
tttagtatctcgaggacatcttg

SEQ ID NO: 2572 - RNA, 21 nt, synthetic construct
  source 1..21: mol_type = other RNA
  modified_base 1: mod_base = OTHER; note = 2'-O-methylguanosine-3'- phosphorothioate
  modified_base 2: mod_base = OTHER; note = 2'-O-methyladenosine-3'- phosphorothioate
  modified_base 3: mod_base = OTHER; note = 2'-O-methyluridine-3'-phosphate
  modified_base 4: mod_base = OTHER; note = 2'-O-methylguanosine-3'-phosphate
  modified_base 5: mod_base = OTHER; note = 2'-O-methyluridine-3'-phosphate
  modified_base 6: mod_base = OTHER; note = 2'-O-methylcytidine-3'-phosphate
  modified_base 7: mod_base = OTHER; note = 2'-fluorocytidine-3'-phosphate
  modified_base 8: mod_base = OTHER; note = 2'-O-methyluridine-3'-phosphate
  modified_base 9: mod_base = OTHER; note = 2'-fluorocytidine-3'-phosphate
  modified_base 10: mod_base = OTHER; note = 2'-fluoroguanosine-3'-phosphate
  modified_base 11: mod_base = OTHER; note = 2'-fluoroadenosine-3'-phosphate
  modified_base 12: mod_base = OTHER; note = 2'-O-methylguanosine-3'-phosphate
  modified_base 13: mod_base = OTHER; note = 2'-O-methyladenosine-3'-phosphate
  modified_base 14: mod_base = OTHER; note = 2'-O-methyluridine-3'-phosphate
  modified_base 15: mod_base = OTHER; note = 2'-O-methyladenosine-3'-phosphate
  modified_base 16: mod_base = OTHER; note = 2'-O-methylcytidine-3'-phosphate
  modified_base 17: mod_base = OTHER; note = 2'-O-methyluridine-3'-phosphate
  modified_base 18: mod_base = OTHER; note = 2'-O-methyladenosine-3'-phosphate
  modified_base 19: mod_base = OTHER; note = 2'-O-methyladenosine-3'-phosphate
  modified_base 20: mod_base = OTHER; note = 2'-O-methyladenosine-3'-phosphate
  modified_base 21: mod_base = OTHER; note 2'-O-methylguanosine-3'-phosphate-N-[tris(GalNAc-alkyl)-ami dodecanoyl)]-4-hydroxyprolinol (Hyp-(GalNAc-alkyl)3)
gatgtcctcgagatactaaag

SEQ ID NO: 2573 - RNA, 23 nt, synthetic construct
  source 1..23: mol_type = other RNA
  modified_base 1: mod_base = OTHER; note = 2'-O-methylcytidine-3'- phosphorothioate
  modified_base 2: mod_base = OTHER; note = 2'-fluorouridine -3'-phosphorothioate
  modified_base 3: mod_base = OTHER; note = 2'-O-methyluridine-3'-phosphate
  modified_base 4: mod_base = OTHER; note = 2'-O-methyluridine-3'-phosphate
  modified_base 5: mod_base = OTHER; note = 2'-O-methyladenosine-3'-phosphate
  modified_base 6: mod_base = OTHER; note = 2'-fluoroguanosine-3'-phosphate
  modified_base 7: mod_base = OTHER; note = 2'-O-methyluridine-3'-phosphate
  modified_base 8: mod_base = OTHER; note = 2'-fluoroadenosine-3'-phosphate
  modified_base 9: mod_base = OTHER; note = 2'-fluorouridine-3'-phosphate
  modified_base 10: mod_base = OTHER; note = 2'-O-methylcytidine-3'-phosphate
  modified_base 11: mod_base = OTHER; note = 2'-O-methyluridine-3'-phosphate
  modified_base 12: mod_base = OTHER; note = 2'-O-methylcytidine-3'-phosphate
  modified_base 13: mod_base = OTHER; note = 2'-O-methylguanosine-3'-phosphate
  modified_base 14: mod_base = OTHER; note = 2'-fluoroadenosine-3'-phosphate
  modified_base 15: mod_base = OTHER; note = 2'-O-methylguanosine-3'-phosphate
  modified_base 16: mod_base = OTHER; note = 2'-fluoroguanosine-3'-phosphate
  modified_base 17: mod_base = OTHER; note = 2'-O-methyladenosine-3'-phosphate
  modified_base 18: mod_base = OTHER; note = 2'-O-methylcytidine-3'-phosphate
  modified_base 19: mod_base = OTHER; note = 2'-O-methyladenosine-3'-phosphate
  modified_base 20: mod_base = OTHER; note = 2'-O-methyluridine-3'-phosphate
  modified_base 21: mod_base = OTHER; note = 2'-O-methylcytidine-3'- phosphorothioate
  modified_base 22: mod_base = OTHER; note = 2'-O-methyluridine-3'-phosphorothioate
  modified_base 23: mod_base = OTHER; note = 2'-O-methyluridine-3'-phosphate
ctttagtatctcgaggacatctt

SEQ ID NO: 2574 - RNA, 21 nt, synthetic construct
  source 1..21: mol_type = other RNA
  modified_base 1: mod_base = OTHER; note = 2'-O-methyluridine-3'-phosphorothioate
  modified_base 2: mod_base = OTHER; note = 2'-O-methyluridine-3'-phosphorothioate
  modified_base 3: mod_base = OTHER; note = 2'-O-methylcytidine-3'-phosphate
  modified_base 4: mod_base = OTHER; note = 2'-O-methyladenosine-3'-phosphate
  modified_base 5: mod_base = OTHER; note = 2'-O-methyladenosine-3'-phosphate
  modified_base 6: mod_base = OTHER; note = 2'-O-methylguanosine-3'-phosphate
  modified_base 7: mod_base = OTHER; note = 2'-fluoroadenosine-3'-phosphate
  modified_base 8: mod_base = OTHER; note = 2'-O-methyluridine-3'-phosphate
  modified_base 9: mod_base = OTHER; note = 2'-fluoroguanosine-3'-phosphate
  modified_base 10: mod_base = OTHER; note = 2'-fluorouridine-3'-phosphate
  modified_base 11: mod_base = OTHER; note = 2'-fluorocytidine-3'-phosphate
  modified_base 12: mod_base = OTHER; note = 2'-O-methylcytidine-3'-phosphate
  modified_base 13: mod_base = OTHER; note = 2'-O-methyluridine-3'-phosphate
  modified_base 14: mod_base = OTHER; note = 2'-O-methylcytidine-3'-phosphate
  modified_base 15: mod_base = OTHER; note = 2'-O-methylguanosine-3'-phosphate
  modified_base 16: mod_base = OTHER; note = 2'-O-methyladenosine-3'-phosphate
  modified_base 17: mod_base = OTHER; note = 2'-O-methylguanosine-3'-phosphate
  modified_base 18: mod_base = OTHER; note = 2'-O-methyladenosine-3'-phosphate
  modified_base 19: mod_base = OTHER; note = 2'-O-methyluridine-3'-phosphate
  modified_base 20: mod_base = OTHER; note = 2'-O-methyladenosine-3'-phosphate
  modified_base 21: mod_base = OTHER; note 2'-O-methylcytidine-3'-phosphate-N-[tris(GalNAc-alkyl)-amid odecanoyl)]-4-hydroxyprolinol (Hyp-(GalNAc-alkyl)3)
ttcaagatgtcctcgagatac

SEQ ID NO: 2575 - RNA, 23 nt, synthetic construct
  source 1..23: mol_type = other RNA
  modified_base 1: mod_base = OTHER; note = 2'-O-methylguanosine-3'- phosphorothioate
  modified_base 2: mod_base = OTHER; note = 2'-fluorouridine -3'-phosphorothioate
  modified_base 3: mod_base = OTHER; note = 2'-O-methyladenosine-3'-phosphate
  modified_base 4: mod_base = OTHER; note = 2'-O-methyluridine-3'-phosphate
  modified_base 5: mod_base = OTHER; note = 2'-O-methylcytidine-3'-phosphate
  modified_base 6: mod_base = OTHER; note = 2'-fluorouridine-3'-phosphate
  modified_base 7: mod_base = OTHER; note = 2'-O-methylcytidine-3'-phosphate
  modified_base 8: mod_base = OTHER; note = 2'-fluoroguanosine-3'-phosphate
  modified_base 9: mod_base = OTHER; note = 2'-fluoroadenosine-3'-phosphate
  modified_base 10: mod_base = OTHER; note = 2'-O-methylguanosine-3'-phosphate
  modified_base 11: mod_base = OTHER; note = 2'-O-methylguanosine-3'-phosphate
  modified_base 12: mod_base = OTHER; note = 2'-O-methyladenosine-3'-phosphate
  modified_base 13: mod_base = OTHER; note = 2'-O-methylcytidine-3'-phosphate
  modified_base 14: mod_base = OTHER; note = 2'-fluoroadenosine-3'-phosphate
  modified_base 15: mod_base = OTHER; note = 2'-O-methyluridine-3'-phosphate
  modified_base 16: mod_base = OTHER; note = 2'-fluorocytidine-3'-phosphate
  modified_base 17: mod_base = OTHER; note = 2'-O-methyluridine-3'-phosphate
  modified_base 18: mod_base = OTHER; note = 2'-O-methyluridine-3'-phosphate
  modified_base 19: mod_base = OTHER; note = 2'-O-methylguanosine-3'-phosphate
  modified_base 20: mod_base = OTHER; note = 2'-O-methyladenosine-3'-phosphate
  modified_base 21: mod_base = OTHER; note = 2'-O-methyladenosine-3'- phosphorothioate
  modified_base 22: mod_base = OTHER; note = 2'-O-methylcytidine-3'- phosphorothioate
  modified_base 23: mod_base = OTHER; note = 2'-O-methyladenosine-3'-phosphate
gtatctcgaggacatcttgaaca

SEQ ID NO: 2576 - RNA, 21 nt, synthetic construct
  source 1..21: mol_type = other RNA
  modified_base 1: mod_base = OTHER; note = 2'-O-methylguanosine-3'- phosphorothioate
  modified_base 2: mod_base = OTHER; note = 2'-O-methyluridine-3'-phosphorothioate
  modified_base 3: mod_base = OTHER; note = 2'-O-methyluridine-3'-phosphate
  modified_base 4: mod_base = OTHER; note = 2'-O-methylcytidine-3'-phosphate
  modified_base 5: mod_base = OTHER; note = 2'-O-methyladenosine-3'-phosphate
  modified_base 6: mod_base = OTHER; note = 2'-O-methyladenosine-3'-phosphate
  modified_base 7: mod_base = OTHER; note = 2'-fluoroguanosine-3'-phosphate
  modified_base 8: mod_base = OTHER; note = 2'-O-methyladenosine-3'-phosphate
  modified_base 9: mod_base = OTHER; note = 2'-fluorouridine-3'-phosphate
  modified_base 10: mod_base = OTHER; note = 2'-fluoroguanosine-3'-phosphate
  modified_base 11: mod_base = OTHER; note = 2'-fluorouridine-3'-phosphate
  modified_base 12: mod_base = OTHER; note = 2'-O-methylcytidine-3'-phosphate
  modified_base 13: mod_base = OTHER; note = 2'-O-methylcytidine-3'-phosphate
  modified_base 14: mod_base = OTHER; note = 2'-O-methyluridine-3'-phosphate
  modified_base 15: mod_base = OTHER; note = 2'-O-methylcytidine-3'-phosphate
  modified_base 16: mod_base = OTHER; note = 2'-O-methylguanosine-3'-phosphate
  modified_base 17: mod_base = OTHER; note = 2'-O-methyladenosine-3'-phosphate
  modified_base 18: mod_base = OTHER; note = 2'-O-methylguanosine-3'-phosphate
  modified_base 19: mod_base = OTHER; note = 2'-O-methyladenosine-3'-phosphate
  modified_base 20: mod_base = OTHER; note = 2'-O-methyluridine-3'-phosphate
  modified_base 21: mod_base = OTHER; note 2'-O-methyladenosine-3'-phosphate-N-[tris(GalNAc-alkyl)-ami dodecanoyl)]-4-hydroxyprolinol (Hyp-(GalNAc-alkyl)3)
gttcaagatgtcctcgagata

SEQ ID NO: 2577 - RNA, 23 nt, synthetic construct
  source 1..23: mol_type = other RNA
  modified_base 1: mod_base = OTHER; note = 2'-O-methyluridine-3'-phosphorothioate
  modified_base 2: mod_base = OTHER; note = 2'-fluoroadenosine-3'-phosphorothioate
  modified_base 3: mod_base = OTHER; note = 2'-O-methyluridine-3'-phosphate
  modified_base 4: mod_base = OTHER; note = 2'-O-methylcytidine-3'-phosphate
  modified_base 5: mod_base = OTHER; note = 2'-O-methyluridine-3'-phosphate
  modified_base 6: mod_base = OTHER; note = 2'-fluorocytidine-3'-phosphate
  modified_base 7: mod_base = OTHER; note = 2'-O-methylguanosine-3'-phosphate
  modified_base 8: mod_base = OTHER; note = 2'-fluoroadenosine-3'-phosphate
  modified_base 9: mod_base = OTHER; note = 2'-fluoroguanosine-3'-phosphate
  modified_base 10: mod_base = OTHER; note = 2'-O-methylguanosine-3'-phosphate
  modified_base 11: mod_base = OTHER; note = 2'-O-methyladenosine-3'-phosphate
  modified_base 12: mod_base = OTHER; note = 2'-O-methylcytidine-3'-phosphate
  modified_base 13: mod_base = OTHER; note = 2'-O-methyladenosine-3'-phosphate
  modified_base 14: mod_base = OTHER; note = 2'-fluorouridine-3'-phosphate
  modified_base 15: mod_base = OTHER; note = 2'-O-methylcytidine-3'-phosphate
  modified_base 16: mod_base = OTHER; note = 2'-fluorouridine-3'-phosphate
  modified_base 17: mod_base = OTHER; note = 2'-O-methyluridine-3'-phosphate
  modified_base 18: mod_base = OTHER; note = 2'-O-methylguanosine-3'-phosphate
  modified_base 19: mod_base = OTHER; note = 2'-O-methyladenosine-3'-phosphate
  modified_base 20: mod_base = OTHER; note = 2'-O-methyladenosine-3'-phosphate
  modified_base 21: mod_base = OTHER; note = 2'-O-methylcytidine-3'- phosphorothioate
  modified_base 22: mod_base = OTHER; note = 2'-O-methyladenosine-3'- phosphorothioate
  modified_base 23: mod_base = OTHER; note = 2'-O-methylcytidine-3'-phosphate
tatctcgaggacatcttgaacac

SEQ ID NO: 2578 - RNA, 21 nt, synthetic construct
  source 1..21: mol_type = other RNA
  modified_base 1: mod_base = OTHER; note = 2'-O-methylguanosine-3'- phosphorothioate
  modified_base 2: mod_base = OTHER; note = 2'-O-methyluridine-3'-phosphorothioate
  modified_base 3: mod_base = OTHER; note = 2'-O-methylguanosine-3'-phosphate
  modified_base 4: mod_base = OTHER; note = 2'-O-methylguanosine-3'-phosphate
  modified_base 5: mod_base = OTHER; note = 2'-O-methyladenosine-3'-phosphate
  modified_base 6: mod_base = OTHER; note = 2'-O-methylcytidine-3'-phosphate
  modified_base 7: mod_base = OTHER; note = 2'-fluorouridine-3'-phosphate
  modified_base 8: mod_base = OTHER; note = 2'-O-methyluridine-3'-phosphate
  modified_base 9: mod_base = OTHER; note = 2'-fluoroguanosine-3'-phosphate
  modified_base 10: mod_base = OTHER; note = 2'-fluorocytidine-3'-phosphate
  modified_base 11: mod_base = OTHER; note = 2'-fluorouridine-3'-phosphate
  modified_base 12: mod_base = OTHER; note = 2'-O-methylguanosine-3'-phosphate
  modified_base 13: mod_base = OTHER; note = 2'-O-methylcytidine-3'-phosphate
  modified_base 14: mod_base = OTHER; note = 2'-O-methyladenosine-3'-phosphate
  modified_base 15: mod_base = OTHER; note = 2'-O-methyluridine-3'-phosphate
  modified_base 16: mod_base = OTHER; note = 2'-O-methyladenosine-3'-phosphate
  modified_base 17: mod_base = OTHER; note = 2'-O-methyluridine-3'-phosphate
  modified_base 18: mod_base = OTHER; note = 2'-O-methylguanosine-3'-phosphate
  modified_base 19: mod_base = OTHER; note = 2'-O-methyluridine-3'-phosphate
  modified_base 20: mod_base = OTHER; note = 2'-O-methylguanosine-3'-phosphate
  modified_base 21: mod_base = OTHER; note 2'-O-methylguanosine-3'-phosphate-N-[tris(GalNAc-alkyl)-ami dodecanoyl)]-4-hydroxyprolinol (Hyp-(GalNAc-alkyl)3)
gtggacttgctgcatatgtgg

SEQ ID NO: 2579 - RNA, 23 nt, synthetic construct
  source 1..23: mol_type = other RNA
  modified_base 1: mod_base = OTHER; note = 2'-O-methylcytidine-3'- phosphorothioate
  modified_base 2: mod_base = OTHER; note = 2'-fluorocytidine-3'-phosphorothioate
  modified_base 3: mod_base = OTHER; note = 2'-O-methyladenosine-3'-phosphate
  modified_base 4: mod_base = OTHER; note = 2'-O-methylcytidine-3'-phosphate
  modified_base 5: mod_base = OTHER; note = 2'-O-methyladenosine-3'-phosphate
  modified_base 6: mod_base = OTHER; note = 2'-fluorouridine-3'-phosphate
  modified_base 7: mod_base = OTHER; note = 2'-O-methyladenosine-3'-phosphate
  modified_base 8: mod_base = OTHER; note = 2'-fluorouridine-3'-phosphate
  modified_base 9: mod_base = OTHER; note = 2'-fluoroguanosine-3'-phosphate
  modified_base 10: mod_base = OTHER; note = 2'-O-methylcytidine-3'-phosphate
  modified_base 11: mod_base = OTHER; note = 2'-O-methyladenosine-3'-phosphate
  modified_base 12: mod_base = OTHER; note = 2'-O-methylguanosine-3'-phosphate
  modified_base 13: mod_base = OTHER; note = 2'-O-methylcytidine-3'-phosphate
  modified_base 14: mod_base = OTHER; note = 2'-fluoroadenosine-3'-phosphate
  modified_base 15: mod_base = OTHER; note = 2'-O-methyladenosine-3'-phosphate
  modified_base 16: mod_base = OTHER; note = 2'-fluoroguanosine-3'-phosphate
  modified_base 17: mod_base = OTHER; note = 2'-O-methyluridine-3'-phosphate
  modified_base 18: mod_base = OTHER; note = 2'-O-methylcytidine-3'-phosphate
  modified_base 19: mod_base = OTHER; note = 2'-O-methylcytidine-3'-phosphate
  modified_base 20: mod_base = OTHER; note = 2'-O-methyladenosine-3'-phosphate
  modified_base 21: mod_base = OTHER; note = 2'-O-methylcytidine-3'- phosphorothioate
  modified_base 22: mod_base = OTHER; note = 2'-O-methyluridine-3'-phosphorothioate
  modified_base 23: mod_base = OTHER; note = 2'-O-methylguanosine-3'-phosphate
ccacatatgcagcaagtccactg

SEQ ID NO: 2580 - RNA, 21 nt, synthetic construct
  source 1..21: mol_type = other RNA
  modified_base 1: mod_base = OTHER; note = 2'-O-methyluridine-3'-phosphorothioate
  modified_base 2: mod_base = OTHER; note = 2'-O-methylguanosine-3'- phosphorothioate
  modified_base 3: mod_base = OTHER; note = 2'-O-methylguanosine-3'-phosphate
  modified_base 4: mod_base = OTHER; note = 2'-O-methyladenosine-3'-phosphate
  modified_base 5: mod_base = OTHER; note = 2'-O-methylcytidine-3'-phosphate
  modified_base 6: mod_base = OTHER; note = 2'-O-methyluridine-3'-phosphate
  modified_base 7: mod_base = OTHER; note = 2'-fluorouridine-3'-phosphate
  modified_base 8: mod_base = OTHER; note = 2'-O-methylguanosine-3'-phosphate
  modified_base 9: mod_base = OTHER; note = 2'-fluorocytidine-3'-phosphate
  modified_base 10: mod_base = OTHER; note = 2'-fluorouridine-3'-phosphate
  modified_base 11: mod_base = OTHER; note = 2'-fluoroguanosine-3'-phosphate
  modified_base 12: mod_base = OTHER; note = 2'-O-methylcytidine-3'-phosphate
  modified_base 13: mod_base = OTHER; note = 2'-O-methyladenosine-3'-phosphate
  modified_base 14: mod_base = OTHER; note = 2'-O-methyluridine-3'-phosphate
  modified_base 15: mod_base = OTHER; note = 2'-O-methyladenosine-3'-phosphate
  modified_base 16: mod_base = OTHER; note = 2'-O-methyluridine-3'-phosphate
  modified_base 17: mod_base = OTHER; note = 2'-O-methylguanosine-3'-phosphate
  modified_base 18: mod_base = OTHER; note = 2'-O-methyluridine-3'-phosphate
  modified_base 19: mod_base = OTHER; note = 2'-O-methylguanosine-3'-phosphate
  modified_base 20: mod_base = OTHER; note = 2'-O-methylguanosine-3'-phosphate
  modified_base 21: mod_base = OTHER; note 2'-O-methylcytidine-3'-phosphate-N-[tris(GalNAc-alkyl)-amid odecanoyl)]-4-hydroxyprolinol (Hyp-(GalNAc-alkyl)3)
tggacttgctgcatatgtggc

SEQ ID NO: 2581 - RNA, 23 nt, synthetic construct
  source 1..23: mol_type = other RNA
  modified_base 1: mod_base = OTHER; note = 2'-O-methylguanosine-3'- phosphorothioate
  modified_base 2: mod_base = OTHER; note = 2'-fluorocytidine-3'-phosphorothioate
  modified_base 3: mod_base = OTHER; note = 2'-O-methylcytidine-3'-phosphate
  modified_base 4: mod_base = OTHER; note = 2'-O-methyladenosine-3'-phosphate
  modified_base 5: mod_base = OTHER; note = 2'-O-methylcytidine-3'-phosphate
  modified_base 6: mod_base = OTHER; note = 2'-fluoroadenosine-3'-phosphate
  modified_base 7: mod_base = OTHER; note = 2'-O-methyluridine-3'-phosphate
  modified_base 8: mod_base = OTHER; note = 2'-fluoroadenosine-3'-phosphate
  modified_base 9: mod_base = OTHER; note = 2'-fluorouridine-3'-phosphate
  modified_base 10: mod_base = OTHER; note = 2'-O-methylguanosine-3'-phosphate
  modified_base 11: mod_base = OTHER; note = 2'-O-methylcytidine-3'-phosphate
  modified_base 12: mod_base = OTHER; note = 2'-O-methyladenosine-3'-phosphate
  modified_base 13: mod_base = OTHER; note = 2'-O-methylguanosine-3'-phosphate
  modified_base 14: mod_base = OTHER; note = 2'-fluorocytidine-3'-phosphate
  modified_base 15: mod_base = OTHER; note = 2'-O-methyladenosine-3'-phosphate
  modified_base 16: mod_base = OTHER; note = 2'-fluoroadenosine-3'-phosphate
  modified_base 17: mod_base = OTHER; note = 2'-O-methylguanosine-3'-phosphate
  modified_base 18: mod_base = OTHER; note = 2'-O-methyluridine-3'-phosphate
  modified_base 19: mod_base = OTHER; note = 2'-O-methylcytidine-3'-phosphate
  modified_base 20: mod_base = OTHER; note = 2'-O-methylcytidine-3'-phosphate
  modified_base 21: mod_base = OTHER; note = 2'-O-methyladenosine-3'- phosphorothioate
  modified_base 22: mod_base = OTHER; note = 2'-O-methylcytidine-3'- phosphorothioate
  modified_base 23: mod_base = OTHER; note = 2'-O-methyluridine-3'-phosphate
gccacatatgcagcaagtccact

SEQ ID NO: 2582 - RNA, 21 nt, synthetic construct
  source 1..21: mol_type = other RNA
  modified_base 1: mod_base = OTHER; note = 2'-O-methylguanosine-3'- phosphorothioate
  modified_base 2: mod_base = OTHER; note = 2'-O-methyladenosine-3'- phosphorothioate
  modified_base 3: mod_base = OTHER; note = 2'-O-methylcytidine-3'-phosphate
  modified_base 4: mod_base = OTHER; note = 2'-O-methyladenosine-3'-phosphate
  modified_base 5: mod_base = OTHER; note = 2'-O-methylguanosine-3'-phosphate
  modified_base 6: mod_base = OTHER; note = 2'-O-methyluridine-3'-phosphate
  modified_base 7: mod_base = OTHER; note = 2'-fluoroguanosine-3'-phosphate
  modified_base 8: mod_base = OTHER; note = 2'-O-methylguanosine-3'-phosphate
  modified_base 9: mod_base = OTHER; note = 2'-fluoroadenosine-3'-phosphate
  modified_base 10: mod_base = OTHER; note = 2'-fluorocytidine-3'-phosphate
  modified_base 11: mod_base = OTHER; note = 2'-fluorouridine-3'-phosphate
  modified_base 12: mod_base = OTHER; note = 2'-O-methyluridine-3'-phosphate
  modified_base 13: mod_base = OTHER; note = 2'-O-methylguanosine-3'-phosphate
  modified_base 14: mod_base = OTHER; note = 2'-O-methylcytidine-3'-phosphate
  modified_base 15: mod_base = OTHER; note = 2'-O-methyluridine-3'-phosphate
  modified_base 16: mod_base = OTHER; note = 2'-O-methylguanosine-3'-phosphate
  modified_base 17: mod_base = OTHER; note = 2'-O-methylcytidine-3'-phosphate
  modified_base 18: mod_base = OTHER; note = 2'-O-methyladenosine-3'-phosphate
  modified_base 19: mod_base = OTHER; note = 2'-O-methyluridine-3'-phosphate
  modified_base 20: mod_base = OTHER; note = 2'-O-methyladenosine-3'-phosphate
  modified_base 21: mod_base = OTHER; note 2'-O-methyluridine-3'-phosphate-N-[tris(GalNAc-alkyl)-amido decanoyl)]-4-hydroxyprolinol (Hyp-(GalNAc-alkyl)3)
gacagtggacttgctgcatat

SEQ ID NO: 2583 - RNA, 23 nt, synthetic construct
  source 1..23: mol_type = other RNA
  modified_base 1: mod_base = OTHER; note = 2'-O-methyladenosine-3'- phosphorothioate
  modified_base 2: mod_base = OTHER; note = 2'-fluorouridine -3'-phosphorothioate
  modified_base 3: mod_base = OTHER; note = 2'-O-methyladenosine-3'-phosphate
  modified_base 4: mod_base = OTHER; note = 2'-O-methyluridine-3'-phosphate
  modified_base 5: mod_base = OTHER; note = 2'-O-methylguanosine-3'-phosphate
  modified_base 6: mod_base = OTHER; note = 2'-fluorocytidine-3'-phosphate
  modified_base 7: mod_base = OTHER; note = 2'-O-methyladenosine-3'-phosphate
  modified_base 8: mod_base = OTHER; note = 2'-fluoroguanosine-3'-phosphate
  modified_base 9: mod_base = OTHER; note = 2'-fluorocytidine-3'-phosphate
  modified_base 10: mod_base = OTHER; note = 2'-O-methyladenosine-3'-phosphate
  modified_base 11: mod_base = OTHER; note = 2'-O-methyladenosine-3'-phosphate
  modified_base 12: mod_base = OTHER; note = 2'-O-methylguanosine-3'-phosphate
  modified_base 13: mod_base = OTHER; note = 2'-O-methyluridine-3'-phosphate
  modified_base 14: mod_base = OTHER; note = 2'-fluorocytidine-3'-phosphate
  modified_base 15: mod_base = OTHER; note = 2'-O-methylcytidine-3'-phosphate
  modified_base 16: mod_base = OTHER; note = 2'-fluoroadenosine-3'-phosphate
  modified_base 17: mod_base = OTHER; note = 2'-O-methylcytidine-3'-phosphate
  modified_base 18: mod_base = OTHER; note = 2'-O-methyluridine-3'-phosphate
  modified_base 19: mod_base = OTHER; note = 2'-O-methylguanosine-3'-phosphate
  modified_base 20: mod_base = OTHER; note = 2'-O-methyluridine-3'-phosphate
  modified_base 21: mod_base = OTHER; note = 2'-O-methylcytidine-3'- phosphorothioate
  modified_base 22: mod_base = OTHER; note = 2'-O-methylguanosine-3'- phosphorothioate
  modified_base 23: mod_base = OTHER; note = 2'-O-methyluridine-3'-phosphate
atatgcagcaagtccactgtcgt

SEQ ID NO: 2584 - RNA, 21 nt, synthetic construct
  source 1..21: mol_type = other RNA
  modified_base 1: mod_base = OTHER; note = 2'-O-methylcytidine-3'- phosphorothioate
  modified_base 2: mod_base = OTHER; note = 2'-O-methylguanosine-3'- phosphorothioate
  modified_base 3: mod_base = OTHER; note = 2'-O-methyladenosine-3'-phosphate
  modified_base 4: mod_base = OTHER; note = 2'-O-methylcytidine-3'-phosphate
  modified_base 5: mod_base = OTHER; note = 2'-O-methyladenosine-3'-phosphate
  modified_base 6: mod_base = OTHER; note = 2'-O-methylguanosine-3'-phosphate
  modified_base 7: mod_base = OTHER; note = 2'-fluorouridine-3'-phosphate
  modified_base 8: mod_base = OTHER; note = 2'-O-methylguanosine-3'-phosphate
  modified_base 9: mod_base = OTHER; note = 2'-fluoroguanosine-3'-phosphate
  modified_base 10: mod_base = OTHER; note = 2'-fluoroadenosine-3'-phosphate
  modified_base 11: mod_base = OTHER; note = 2'-fluorocytidine-3'-phosphate
  modified_base 12: mod_base = OTHER; note = 2'-O-methyluridine-3'-phosphate
  modified_base 13: mod_base = OTHER; note = 2'-O-methyluridine-3'-phosphate
  modified_base 14: mod_base = OTHER; note = 2'-O-methylguanosine-3'-phosphate
  modified_base 15: mod_base = OTHER; note = 2'-O-methylcytidine-3'-phosphate
  modified_base 16: mod_base = OTHER; note = 2'-O-methyluridine-3'-phosphate
  modified_base 17: mod_base = OTHER; note = 2'-O-methylguanosine-3'-phosphate
  modified_base 18: mod_base = OTHER; note = 2'-O-methylcytidine-3'-phosphate
  modified_base 19: mod_base = OTHER; note = 2'-O-methyladenosine-3'-phosphate
  modified_base 20: mod_base = OTHER; note = 2'-O-methyluridine-3'-phosphate
  modified_base 21: mod_base = OTHER; note 2'-O-methyladenosine-3'-phosphate-N-[tris(GalNAc-alkyl)-ami dodecanoyl)]-4-hydroxyprolinol (Hyp-(GalNAc-alkyl)3)
cgacagtggacttgctgcata

SEQ ID NO: 2585 - RNA, 23 nt, synthetic construct
  source 1..23: mol_type = other RNA
  modified_base 1: mod_base = OTHER; note = 2'-O-methyluridine-3'-phosphorothioate
  modified_base 2: mod_base = OTHER; note = 2'-fluoroadenosine-3'-phosphorothioate
  modified_base 3: mod_base = OTHER; note = 2'-O-methyluridine-3'-phosphate
  modified_base 4: mod_base = OTHER; note = 2'-O-methylguanosine-3'-phosphate
  modified_base 5: mod_base = OTHER; note = 2'-O-methylcytidine-3'-phosphate
  modified_base 6: mod_base = OTHER; note = 2'-fluoroadenosine-3'-phosphate
  modified_base 7: mod_base = OTHER; note = 2'-O-methylguanosine-3'-phosphate
  modified_base 8: mod_base = OTHER; note = 2'-fluorocytidine-3'-phosphate
  modified_base 9: mod_base = OTHER; note = 2'-fluoroadenosine-3'-phosphate
  modified_base 10: mod_base = OTHER; note = 2'-O-methyladenosine-3'-phosphate
  modified_base 11: mod_base = OTHER; note = 2'-O-methylguanosine-3'-phosphate
  modified_base 12: mod_base = OTHER; note = 2'-O-methyluridine-3'-phosphate
  modified_base 13: mod_base = OTHER; note = 2'-O-methylcytidine-3'-phosphate
  modified_base 14: mod_base = OTHER; note = 2'-fluorocytidine-3'-phosphate
  modified_base 15: mod_base = OTHER; note = 2'-O-methyladenosine-3'-phosphate
  modified_base 16: mod_base = OTHER; note = 2'-fluorocytidine-3'-phosphate
  modified_base 17: mod_base = OTHER; note = 2'-O-methyluridine-3'-phosphate
  modified_base 18: mod_base = OTHER; note = 2'-O-methylguanosine-3'-phosphate
  modified_base 19: mod_base = OTHER; note = 2'-O-methyluridine-3'-phosphate
  modified_base 20: mod_base = OTHER; note = 2'-O-methylcytidine-3'-phosphate
  modified_base 21: mod_base = OTHER; note = 2'-O-methylguanosine-3'- phosphorothioate
  modified_base 22: mod_base = OTHER; note = 2'-O-methyluridine-3'-phosphorothioate
  modified_base 23: mod_base = OTHER; note = 2'-O-methylcytidine-3'-phosphate
tatgcagcaagtccactgtcgtc

SEQ ID NO: 2586 - RNA, 21 nt, synthetic construct
  source 1..21: mol_type = other RNA
  modified_base 1: mod_base = OTHER; note = 2'-O-methyladenosine-3'- phosphorothioate
  modified_base 2: mod_base = OTHER; note = 2'-O-methyladenosine-3'- phosphorothioate
  modified_base 3: mod_base = OTHER; note = 2'-O-methylcytidine-3'-phosphate
  modified_base 4: mod_base = OTHER; note = 2'-O-methylcytidine-3'-phosphate
  modified_base 5: mod_base = OTHER; note = 2'-O-methyladenosine-3'-phosphate
  modified_base 6: mod_base = OTHER; note = 2'-O-methylguanosine-3'-phosphate
  modified_base 7: mod_base = OTHER; note = 2'-fluorouridine-3'-phosphate
  modified_base 8: mod_base = OTHER; note = 2'-O-methyladenosine-3'-phosphate
  modified_base 9: mod_base = OTHER; note = 2'-fluorocytidine-3'-phosphate
  modified_base 10: mod_base = OTHER; note = 2'-fluorouridine-3'-phosphate
  modified_base 11: mod_base = OTHER; note = 2'-fluorouridine-3'-phosphate
  modified_base 12: mod_base = OTHER; note = 2'-O-methyluridine-3'-phosphate
  modified_base 13: mod_base = OTHER; note = 2'-O-methyladenosine-3'-phosphate
  modified_base 14: mod_base = OTHER; note = 2'-O-methyluridine-3'-phosphate
  modified_base 15: mod_base = OTHER; note = 2'-O-methylcytidine-3'-phosphate
  modified_base 16: mod_base = OTHER; note = 2'-O-methyladenosine-3'-phosphate
  modified_base 17: mod_base = OTHER; note = 2'-O-methyluridine-3'-phosphate
  modified_base 18: mod_base = OTHER; note = 2'-O-methyluridine-3'-phosphate
  modified_base 19: mod_base = OTHER; note = 2'-O-methyluridine-3'-phosphate
  modified_base 20: mod_base = OTHER; note = 2'-O-methyluridine-3'-phosphate
  modified_base 21: mod_base = OTHER; note 2'-O-methylcytidine-3'-phosphate-N-[tris(GalNAc-alkyl)-amid odecanoyl)]-4-hydroxyprolinol (Hyp-(GalNAc-alkyl)3)
aaccagtactttatcattttc

SEQ ID NO: 2587 - RNA, 23 nt, synthetic construct
  source 1..23: mol_type = other RNA
  modified_base 1: mod_base = OTHER; note = 2'-O-methylguanosine-3'- phosphorothioate
  modified_base 2: mod_base = OTHER; note = 2'-fluoroadenosine-3'-phosphorothioate
  modified_base 3: mod_base = OTHER; note = 2'-O-methyladenosine-3'-phosphate
  modified_base 4: mod_base = OTHER; note = 2'-O-methyladenosine-3'-phosphate
  modified_base 5: mod_base = OTHER; note = 2'-O-methyladenosine-3'-phosphate
  modified_base 6: mod_base = OTHER; note = 2'-fluorouridine-3'-phosphate
  modified_base 7: mod_base = OTHER; note = 2'-O-methylguanosine-3'-phosphate
  modified_base 8: mod_base = OTHER; note = 2'-fluoroadenosine-3'-phosphate
  modified_base 9: mod_base = OTHER; note = 2'-fluorouridine-3'-phosphate
  modified_base 10: mod_base = OTHER; note = 2'-O-methyladenosine-3'-phosphate
  modified_base 11: mod_base = OTHER; note = 2'-O-methyladenosine-3'-phosphate
  modified_base 12: mod_base = OTHER; note = 2'-O-methyladenosine-3'-phosphate
  modified_base 13: mod_base = OTHER; note = 2'-O-methylguanosine-3'-phosphate
  modified_base 14: mod_base = OTHER; note = 2'-fluorouridine-3'-phosphate
  modified_base 15: mod_base = OTHER; note = 2'-O-methyladenosine-3'-phosphate
  modified_base 16: mod_base = OTHER; note = 2'-fluorocytidine-3'-phosphate
  modified_base 17: mod_base = OTHER; note = 2'-O-methyluridine-3'-phosphate
  modified_base 18: mod_base = OTHER; note = 2'-O-methylguanosine-3'-phosphate
  modified_base 19: mod_base = OTHER; note = 2'-O-methylguanosine-3'-phosphate
  modified_base 20: mod_base = OTHER; note = 2'-O-methyluridine-3'-phosphate
  modified_base 21: mod_base = OTHER; note = 2'-O-methyluridine-3'-phosphorothioate
  modified_base 22: mod_base = OTHER; note = 2'-O-methyluridine-3'-phosphorothioate
  modified_base 23: mod_base = OTHER; note = 2'-O-methylcytidine-3'-phosphate
gaaaatgataaagtactggtttc

SEQ ID NO: 2588 - RNA, 21 nt, synthetic construct
  source 1..21: mol_type = other RNA
  modified_base 1: mod_base = OTHER; note = 2'-O-methyladenosine-3'- phosphorothioate
  modified_base 2: mod_base = OTHER; note = 2'-O-methylcytidine-3'- phosphorothioate
  modified_base 3: mod_base = OTHER; note = 2'-O-methylcytidine-3'-phosphate
  modified_base 4: mod_base = OTHER; note = 2'-O-methyladenosine-3'-phosphate
  modified_base 5: mod_base = OTHER; note = 2'-O-methylguanosine-3'-phosphate
  modified_base 6: mod_base = OTHER; note = 2'-O-methyluridine-3'-phosphate
  modified_base 7: mod_base = OTHER; note = 2'-fluoroadenosine-3'-phosphate
  modified_base 8: mod_base = OTHER; note = 2'-O-methylcytidine-3'-phosphate
  modified_base 9: mod_base = OTHER; note = 2'-fluorouridine-3'-phosphate
  modified_base 10: mod_base = OTHER; note = 2'-fluorouridine-3'-phosphate
  modified_base 11: mod_base = OTHER; note = 2'-fluorouridine-3'-phosphate
  modified_base 12: mod_base = OTHER; note = 2'-O-methyladenosine-3'-phosphate
  modified_base 13: mod_base = OTHER; note = 2'-O-methyluridine-3'-phosphate
  modified_base 14: mod_base = OTHER; note = 2'-O-methylcytidine-3'-phosphate
  modified_base 15: mod_base = OTHER; note = 2'-O-methyladenosine-3'-phosphate
  modified_base 16: mod_base = OTHER; note = 2'-O-methyluridine-3'-phosphate
  modified_base 17: mod_base = OTHER; note = 2'-O-methyluridine-3'-phosphate
  modified_base 18: mod_base = OTHER; note = 2'-O-methyluridine-3'-phosphate
  modified_base 19: mod_base = OTHER; note = 2'-O-methyluridine-3'-phosphate
  modified_base 20: mod_base = OTHER; note = 2'-O-methylcytidine-3'-phosphate
  modified_base 21: mod_base = OTHER; note 2'-O-methyluridine-3'-phosphate-N-[tris(GalNAc-alkyl)-amido decanoyl)]-4-hydroxyprolinol (Hyp-(GalNAc-alkyl)3)
accagtactttatcattttct

SEQ ID NO: 2589 - RNA, 23 nt, synthetic construct
  source 1..23: mol_type = other RNA
  modified_base 1: mod_base = OTHER; note = 2'-O-methyladenosine-3'- phosphorothioate
  modified_base 2: mod_base = OTHER; note = 2'-fluoroguanosine-3'-phosphorothioate
  modified_base 3: mod_base = OTHER; note = 2'-O-methyladenosine-3'-phosphate
  modified_base 4: mod_base = OTHER; note = 2'-O-methyladenosine-3'-phosphate
  modified_base 5: mod_base = OTHER; note = 2'-O-methyladenosine-3'-phosphate
  modified_base 6: mod_base = OTHER; note = 2'-fluoroadenosine-3'-phosphate
  modified_base 7: mod_base = OTHER; note = 2'-O-methyluridine-3'-phosphate
  modified_base 8: mod_base = OTHER; note = 2'-fluoroguanosine-3'-phosphate
  modified_base 9: mod_base = OTHER; note = 2'-fluoroadenosine-3'-phosphate
  modified_base 10: mod_base = OTHER; note = 2'-O-methyluridine-3'-phosphate
  modified_base 11: mod_base = OTHER; note = 2'-O-methyladenosine-3'-phosphate
  modified_base 12: mod_base = OTHER; note = 2'-O-methyladenosine-3'-phosphate
  modified_base 13: mod_base = OTHER; note = 2'-O-methyladenosine-3'-phosphate
  modified_base 14: mod_base = OTHER; note = 2'-fluoroguanosine-3'-phosphate
  modified_base 15: mod_base = OTHER; note = 2'-O-methyluridine-3'-phosphate
  modified_base 16: mod_base = OTHER; note = 2'-fluoroadenosine-3'-phosphate
  modified_base 17: mod_base = OTHER; note = 2'-O-methylcytidine-3'-phosphate
  modified_base 18: mod_base = OTHER; note = 2'-O-methyluridine-3'-phosphate
  modified_base 19: mod_base = OTHER; note = 2'-O-methylguanosine-3'-phosphate
  modified_base 20: mod_base = OTHER; note = 2'-O-methylguanosine-3'-phosphate
  modified_base 21: mod_base = OTHER; note = 2'-O-methyluridine-3'-phosphorothioate
  modified_base 22: mod_base = OTHER; note = 2'-O-methyluridine-3'-phosphorothioate
  modified_base 23: mod_base = OTHER; note = 2'-O-methyluridine-3'-phosphate
agaaaatgataaagtactggttt

SEQ ID NO: 2590 - RNA, 21 nt, synthetic construct
  source 1..21: mol_type = other RNA
  modified_base 1: mod_base = OTHER; note = 2'-O-methyluridine-3'-phosphorothioate
  modified_base 2: mod_base = OTHER; note = 2'-O-methyluridine-3'-phosphorothioate
  modified_base 3: mod_base = OTHER; note = 2'-O-methylguanosine-3'-phosphate
  modified_base 4: mod_base = OTHER; note = 2'-O-methyladenosine-3'-phosphate
  modified_base 5: mod_base = OTHER; note = 2'-O-methyladenosine-3'-phosphate
  modified_base 6: mod_base = OTHER; note = 2'-O-methyladenosine-3'-phosphate
  modified_base 7: mod_base = OTHER; note = 2'-fluorocytidine-3'-phosphate
  modified_base 8: mod_base = OTHER; note = 2'-O-methylcytidine-3'-phosphate
  modified_base 9: mod_base = OTHER; note = 2'-fluoroadenosine-3'-phosphate
  modified_base 10: mod_base = OTHER; note = 2'-fluoroguanosine-3'-phosphate
  modified_base 11: mod_base = OTHER; note = 2'-fluorouridine-3'-phosphate
  modified_base 12: mod_base = OTHER; note = 2'-O-methyladenosine-3'-phosphate
  modified_base 13: mod_base = OTHER; note = 2'-O-methylcytidine-3'-phosphate
  modified_base 14: mod_base = OTHER; note = 2'-O-methyluridine-3'-phosphate
  modified_base 15: mod_base = OTHER; note = 2'-O-methyluridine-3'-phosphate
  modified_base 16: mod_base = OTHER; note = 2'-O-methyluridine-3'-phosphate
  modified_base 17: mod_base = OTHER; note = 2'-O-methyladenosine-3'-phosphate
  modified_base 18: mod_base = OTHER; note = 2'-O-methyluridine-3'-phosphate
  modified_base 19: mod_base = OTHER; note = 2'-O-methylcytidine-3'-phosphate
  modified_base 20: mod_base = OTHER; note = 2'-O-methyladenosine-3'-phosphate
  modified_base 21: mod_base = OTHER; note 2'-O-methyluridine-3'-phosphate-N-[tris(GalNAc-alkyl)-amido decanoyl)]-4-hydroxyprolinol (Hyp-(GalNAc-alkyl)3)
ttgaaaccagtactttatcat

SEQ ID NO: 2591 - RNA, 23 nt, synthetic construct
  source 1..23: mol_type = other RNA
  modified_base 1: mod_base = OTHER; note = 2'-O-methyladenosine-3'- phosphorothioate
  modified_base 2: mod_base = OTHER; note = 2'-fluorouridine -3'-phosphorothioate
  modified_base 3: mod_base = OTHER; note = 2'-O-methylguanosine-3'-phosphate
  modified_base 4: mod_base = OTHER; note = 2'-O-methyladenosine-3'-phosphate
  modified_base 5: mod_base = OTHER; note = 2'-O-methyluridine-3'-phosphate
  modified_base 6: mod_base = OTHER; note = 2'-fluoroadenosine-3'-phosphate
  modified_base 7: mod_base = OTHER; note = 2'-O-methyladenosine-3'-phosphate
  modified_base 8: mod_base = OTHER; note = 2'-fluoroadenosine-3'-phosphate
  modified_base 9: mod_base = OTHER; note = 2'-fluoroguanosine-3'-phosphate
  modified_base 10: mod_base = OTHER; note = 2'-O-methyluridine-3'-phosphate
  modified_base 11: mod_base = OTHER; note = 2'-O-methyladenosine-3'-phosphate
  modified_base 12: mod_base = OTHER; note = 2'-O-methylcytidine-3'-phosphate
  modified_base 13: mod_base = OTHER; note = 2'-O-methyluridine-3'-phosphate
  modified_base 14: mod_base = OTHER; note = 2'-fluoroguanosine-3'-phosphate
  modified_base 15: mod_base = OTHER; note = 2'-O-methylguanosine-3'-phosphate
  modified_base 16: mod_base = OTHER; note = 2'-fluorouridine-3'-phosphate
  modified_base 17: mod_base = OTHER; note = 2'-O-methyluridine-3'-phosphate
  modified_base 18: mod_base = OTHER; note = 2'-O-methyluridine-3'-phosphate
  modified_base 19: mod_base = OTHER; note = 2'-O-methylcytidine-3'-phosphate
  modified_base 20: mod_base = OTHER; note = 2'-O-methyladenosine-3'-phosphate
  modified_base 21: mod_base = OTHER; note = 2'-O-methyladenosine-3'- phosphorothioate
  modified_base 22: mod_base = OTHER; note = 2'-O-methyladenosine-3'- phosphorothioate
  modified_base 23: mod_base = OTHER; note = 2'-O-methyladenosine-3'-phosphate
atgataaagtactggtttcaaaa

SEQ ID NO: 2592 - RNA, 21 nt, synthetic construct
  source 1..21: mol_type = other RNA
  modified_base 1: mod_base = OTHER; note = 2'-O-methyluridine-3'-phosphorothioate
  modified_base 2: mod_base = OTHER; note = 2'-O-methyluridine-3'-phosphorothioate
  modified_base 3: mod_base = OTHER; note = 2'-O-methyluridine-3'-phosphate
  modified_base 4: mod_base = OTHER; note = 2'-O-methylguanosine-3'-phosphate
  modified_base 5: mod_base = OTHER; note = 2'-O-methyladenosine-3'-phosphate
  modified_base 6: mod_base = OTHER; note = 2'-O-methyladenosine-3'-phosphate
  modified_base 7: mod_base = OTHER; note = 2'-fluoroadenosine-3'-phosphate
  modified_base 8: mod_base = OTHER; note = 2'-O-methylcytidine-3'-phosphate
  modified_base 9: mod_base = OTHER; note = 2'-fluorocytidine-3'-phosphate
  modified_base 10: mod_base = OTHER; note = 2'-fluoroadenosine-3'-phosphate
  modified_base 11: mod_base = OTHER; note = 2'-fluoroguanosine-3'-phosphate
  modified_base 12: mod_base = OTHER; note = 2'-O-methyluridine-3'-phosphate
  modified_base 13: mod_base = OTHER; note = 2'-O-methyladenosine-3'-phosphate
  modified_base 14: mod_base = OTHER; note = 2'-O-methylcytidine-3'-phosphate
  modified_base 15: mod_base = OTHER; note = 2'-O-methyluridine-3'-phosphate
  modified_base 16: mod_base = OTHER; note = 2'-O-methyluridine-3'-phosphate
  modified_base 17: mod_base = OTHER; note = 2'-O-methyluridine-3'-phosphate
  modified_base 18: mod_base = OTHER; note = 2'-O-methyladenosine-3'-phosphate
  modified_base 19: mod_base = OTHER; note = 2'-O-methyluridine-3'-phosphate
  modified_base 20: mod_base = OTHER; note = 2'-O-methylcytidine-3'-phosphate
  modified_base 21: mod_base = OTHER; note 2'-O-methyladenosine-3'-phosphate-N-[tris(GalNAc-alkyl)-ami dodecanoyl)]-4-hydroxyprolinol (Hyp-(GalNAc-alkyl)3)
tttgaaaccagtactttatca

SEQ ID NO: 2593 - RNA, 23 nt, synthetic construct
  source 1..23: mol_type = other RNA
  modified_base 1: mod_base = OTHER; note = 2'-O-methyluridine-3'-phosphorothioate
  modified_base 2: mod_base = OTHER; note = 2'-fluoroguanosine-3'-phosphorothioate
  modified_base 3: mod_base = OTHER; note = 2'-O-methyladenosine-3'-phosphate
  modified_base 4: mod_base = OTHER; note = 2'-O-methyluridine-3'-phosphate
  modified_base 5: mod_base = OTHER; note = 2'-O-methyladenosine-3'-phosphate
  modified_base 6: mod_base = OTHER; note = 2'-fluoroadenosine-3'-phosphate
  modified_base 7: mod_base = OTHER; note = 2'-O-methyladenosine-3'-phosphate
  modified_base 8: mod_base = OTHER; note = 2'-fluoroguanosine-3'-phosphate
  modified_base 9: mod_base = OTHER; note = 2'-fluorouridine-3'-phosphate
  modified_base 10: mod_base = OTHER; note = 2'-O-methyladenosine-3'-phosphate
  modified_base 11: mod_base = OTHER; note = 2'-O-methylcytidine-3'-phosphate
  modified_base 12: mod_base = OTHER; note = 2'-O-methyluridine-3'-phosphate
  modified_base 13: mod_base = OTHER; note = 2'-O-methylguanosine-3'-phosphate
  modified_base 14: mod_base = OTHER; note = 2'-fluoroguanosine-3'-phosphate
  modified_base 15: mod_base = OTHER; note = 2'-O-methyluridine-3'-phosphate
  modified_base 16: mod_base = OTHER; note = 2'-fluorouridine-3'-phosphate
  modified_base 17: mod_base = OTHER; note = 2'-O-methyluridine-3'-phosphate
  modified_base 18: mod_base = OTHER; note = 2'-O-methylcytidine-3'-phosphate
  modified_base 19: mod_base = OTHER; note = 2'-O-methyladenosine-3'-phosphate
  modified_base 20: mod_base = OTHER; note = 2'-O-methyladenosine-3'-phosphate
  modified_base 21: mod_base = OTHER; note = 2'-O-methyladenosine-3'- phosphorothioate
  modified_base 22: mod_base = OTHER; note = 2'-O-methyladenosine-3'- phosphorothioate
  modified_base 23: mod_base = OTHER; note = 2'-O-methyluridine-3'-phosphate
tgataaagtactggtttcaaaat

SEQ ID NO: 2594 - RNA, 21 nt, synthetic construct
  source 1..21: mol_type = other RNA
  modified_base 1: mod_base = OTHER; note = 2'-O-methylcytidine-3'- phosphorothioate
  modified_base 2: mod_base = OTHER; note = 2'-O-methylguanosine-3'- phosphorothioate
  modified_base 3: mod_base = OTHER; note = 2'-O-methyladenosine-3'-phosphate
  modified_base 4: mod_base = OTHER; note = 2'-O-methylguanosine-3'-phosphate
  modified_base 5: mod_base = OTHER; note = 2'-O-methyladenosine-3'-phosphate
  modified_base 6: mod_base = OTHER; note = 2'-O-methyladenosine-3'-phosphate
  modified_base 7: mod_base = OTHER; note = 2'-fluoroguanosine-3'-phosphate
  modified_base 8: mod_base = OTHER; note = 2'-O-methyluridine-3'-phosphate
  modified_base 9: mod_base = OTHER; note = 2'-fluorocytidine-3'-phosphate
  modified_base 10: mod_base = OTHER; note = 2'-fluoroadenosine-3'-phosphate
  modified_base 11: mod_base = OTHER; note = 2'-fluorocytidine-3'-phosphate
  modified_base 12: mod_base = OTHER; note = 2'-O-methylcytidine-3'-phosphate
  modified_base 13: mod_base = OTHER; note = 2'-O-methyladenosine-3'-phosphate
  modified_base 14: mod_base = OTHER; note = 2'-O-methyladenosine-3'-phosphate
  modified_base 15: mod_base = OTHER; note = 2'-O-methylguanosine-3'-phosphate
  modified_base 16: mod_base = OTHER; note = 2'-O-methyladenosine-3'-phosphate
  modified_base 17: mod_base = OTHER; note = 2'-O-methyladenosine-3'-phosphate
  modified_base 18: mod_base = OTHER; note = 2'-O-methylguanosine-3'-phosphate
  modified_base 19: mod_base = OTHER; note = 2'-O-methylcytidine-3'-phosphate
  modified_base 20: mod_base = OTHER; note = 2'-O-methyluridine-3'-phosphate
  modified_base 21: mod_base = OTHER; note 2'-O-methyladenosine-3'-phosphate-N-[tris(GalNAc-alkyl)-ami dodecanoyl)]-4-hydroxyprolinol (Hyp-(GalNAc-alkyl)3)
cgagaagtcaccaagaagcta

SEQ ID NO: 2595 - RNA, 23 nt, synthetic construct
  source 1..23: mol_type = other RNA
  modified_base 1: mod_base = OTHER; note = 2'-O-methyluridine-3'-phosphorothioate
  modified_base 2: mod_base = OTHER; note = 2'-fluoroadenosine-3'-phosphorothioate
  modified_base 3: mod_base = OTHER; note = 2'-O-methylguanosine-3'-phosphate
  modified_base 4: mod_base = OTHER; note = 2'-O-methylcytidine-3'-phosphate
  modified_base 5: mod_base = OTHER; note = 2'-O-methyluridine-3'-phosphate
  modified_base 6: mod_base = OTHER; note = 2'-fluorouridine-3'-phosphate
  modified_base 7: mod_base = OTHER; note = 2'-O-methylcytidine-3'-phosphate
  modified_base 8: mod_base = OTHER; note = 2'-fluorouridine-3'-phosphate
  modified_base 9: mod_base = OTHER; note = 2'-fluorouridine-3'-phosphate
  modified_base 10: mod_base = OTHER; note = 2'-O-methylguanosine-3'-phosphate
  modified_base 11: mod_base = OTHER; note = 2'-O-methylguanosine-3'-phosphate
  modified_base 12: mod_base = OTHER; note = 2'-O-methyluridine-3'-phosphate
  modified_base 13: mod_base = OTHER; note = 2'-O-methylguanosine-3'-phosphate
  modified_base 14: mod_base = OTHER; note = 2'-fluoroadenosine-3'-phosphate
  modified_base 15: mod_base = OTHER; note = 2'-O-methylcytidine-3'-phosphate
  modified_base 16: mod_base = OTHER; note = 2'-fluorouridine-3'-phosphate
  modified_base 17: mod_base = OTHER; note = 2'-O-methyluridine-3'-phosphate
  modified_base 18: mod_base = OTHER; note = 2'-O-methylcytidine-3'-phosphate
  modified_base 19: mod_base = OTHER; note = 2'-O-methyluridine-3'-phosphate
  modified_base 20: mod_base = OTHER; note = 2'-O-methylcytidine-3'-phosphate
  modified_base 21: mod_base = OTHER; note = 2'-O-methylguanosine-3'- phosphorothioate
  modified_base 22: mod_base = OTHER; note = 2'-O-methylguanosine-3'- phosphorothioate
  modified_base 23: mod_base = OTHER; note = 2'-O-methyluridine-3'-phosphate
tagcttcttggtgacttctcggt

SEQ ID NO: 2596 - RNA, 21 nt, synthetic construct
  source 1..21: mol_type = other RNA
  modified_base 1: mod_base = OTHER; note = 2'-O-methylguanosine-3'- phosphorothioate
  modified_base 2: mod_base = OTHER; note = 2'-O-methyladenosine-3'- phosphorothioate
  modified_base 3: mod_base = OTHER; note = 2'-O-methylguanosine-3'-phosphate
  modified_base 4: mod_base = OTHER; note = 2'-O-methyladenosine-3'-phosphate
  modified_base 5: mod_base = OTHER; note = 2'-O-methyladenosine-3'-phosphate
  modified_base 6: mod_base = OTHER; note = 2'-O-methylguanosine-3'-phosphate
  modified_base 7: mod_base = OTHER; note = 2'-fluorouridine-3'-phosphate
  modified_base 8: mod_base = OTHER; note = 2'-O-methylcytidine-3'-phosphate
  modified_base 9: mod_base = OTHER; note = 2'-fluoroadenosine-3'-phosphate
  modified_base 10: mod_base = OTHER; note = 2'-fluorocytidine-3'-phosphate
  modified_base 11: mod_base = OTHER; note = 2'-fluorocytidine-3'-phosphate
  modified_base 12: mod_base = OTHER; note = 2'-O-methyladenosine-3'-phosphate
  modified_base 13: mod_base = OTHER; note = 2'-O-methyladenosine-3'-phosphate
  modified_base 14: mod_base = OTHER; note = 2'-O-methylguanosine-3'-phosphate
  modified_base 15: mod_base = OTHER; note = 2'-O-methyladenosine-3'-phosphate
  modified_base 16: mod_base = OTHER; note = 2'-O-methyladenosine-3'-phosphate
  modified_base 17: mod_base = OTHER; note = 2'-O-methylguanosine-3'-phosphate
  modified_base 18: mod_base = OTHER; note = 2'-O-methylcytidine-3'-phosphate
  modified_base 19: mod_base = OTHER; note = 2'-O-methyluridine-3'-phosphate
  modified_base 20: mod_base = OTHER; note = 2'-O-methyladenosine-3'-phosphate
  modified_base 21: mod_base = OTHER; note 2'-O-methylguanosine-3'-phosphate-N-[tris(GalNAc-alkyl)-ami dodecanoyl)]-4-hydroxyprolinol (Hyp-(GalNAc-alkyl)3)
gagaagtcaccaagaagctag

SEQ ID NO: 2597 - RNA, 23 nt, synthetic construct
  source 1..23: mol_type = other RNA
  modified_base 1: mod_base = OTHER; note = 2'-O-methylcytidine-3'- phosphorothioate
  modified_base 2: mod_base = OTHER; note = 2'-fluorouridine -3'-phosphorothioate
  modified_base 3: mod_base = OTHER; note = 2'-O-methyladenosine-3'-phosphate
  modified_base 4: mod_base = OTHER; note = 2'-O-methylguanosine-3'-phosphate
  modified_base 5: mod_base = OTHER; note = 2'-O-methylcytidine-3'-phosphate
  modified_base 6: mod_base = OTHER; note = 2'-fluorouridine-3'-phosphate
  modified_base 7: mod_base = OTHER; note = 2'-O-methyluridine-3'-phosphate
  modified_base 8: mod_base = OTHER; note = 2'-fluorocytidine-3'-phosphate
  modified_base 9: mod_base = OTHER; note = 2'-fluorouridine-3'-phosphate
  modified_base 10: mod_base = OTHER; note = 2'-O-methyluridine-3'-phosphate
  modified_base 11: mod_base = OTHER; note = 2'-O-methylguanosine-3'-phosphate
  modified_base 12: mod_base = OTHER; note = 2'-O-methylguanosine-3'-phosphate
  modified_base 13: mod_base = OTHER; note = 2'-O-methyluridine-3'-phosphate
  modified_base 14: mod_base = OTHER; note = 2'-fluoroguanosine-3'-phosphate
  modified_base 15: mod_base = OTHER; note = 2'-O-methyladenosine-3'-phosphate
  modified_base 16: mod_base = OTHER; note = 2'-fluorocytidine-3'-phosphate
  modified_base 17: mod_base = OTHER; note = 2'-O-methyluridine-3'-phosphate
  modified_base 18: mod_base = OTHER; note = 2'-O-methyluridine-3'-phosphate
  modified_base 19: mod_base = OTHER; note = 2'-O-methylcytidine-3'-phosphate
  modified_base 20: mod_base = OTHER; note = 2'-O-methyluridine-3'-phosphate
  modified_base 21: mod_base = OTHER; note = 2'-O-methylcytidine-3'- phosphorothioate
  modified_base 22: mod_base = OTHER; note = 2'-O-methylguanosine-3'- phosphorothioate
  modified_base 23: mod_base = OTHER; note = 2'-O-methylguanosine-3'-phosphate
ctagcttcttggtgacttctcgg

SEQ ID NO: 2598 - RNA, 21 nt, synthetic construct
  source 1..21: mol_type = other RNA
  modified_base 1: mod_base = OTHER; note = 2'-O-methylguanosine-3'- phosphorothioate
  modified_base 2: mod_base = OTHER; note = 2'-O-methylguanosine-3'- phosphorothioate
  modified_base 3: mod_base = OTHER; note = 2'-O-methyladenosine-3'-phosphate
  modified_base 4: mod_base = OTHER; note = 2'-O-methylcytidine-3'-phosphate
  modified_base 5: mod_base = OTHER; note = 2'-O-methylcytidine-3'-phosphate
  modified_base 6: mod_base = OTHER; note = 2'-O-methylguanosine-3'-phosphate
  modified_base 7: mod_base = OTHER; note = 2'-fluoroadenosine-3'-phosphate
  modified_base 8: mod_base = OTHER; note = 2'-O-methylguanosine-3'-phosphate
  modified_base 9: mod_base = OTHER; note = 2'-fluoroadenosine-3'-phosphate
  modified_base 10: mod_base = OTHER; note = 2'-fluoroadenosine-3'-phosphate
  modified_base 11: mod_base = OTHER; note = 2'-fluoroguanosine-3'-phosphate
  modified_base 12: mod_base = OTHER; note = 2'-O-methyluridine-3'-phosphate
  modified_base 13: mod_base = OTHER; note = 2'-O-methylcytidine-3'-phosphate
  modified_base 14: mod_base = OTHER; note = 2'-O-methyladenosine-3'-phosphate
  modified_base 15: mod_base = OTHER; note = 2'-O-methylcytidine-3'-phosphate
  modified_base 16: mod_base = OTHER; note = 2'-O-methylcytidine-3'-phosphate
  modified_base 17: mod_base = OTHER; note = 2'-O-methyladenosine-3'-phosphate
  modified_base 18: mod_base = OTHER; note = 2'-O-methyladenosine-3'-phosphate
  modified_base 19: mod_base = OTHER; note = 2'-O-methylguanosine-3'-phosphate
  modified_base 20: mod_base = OTHER; note = 2'-O-methyladenosine-3'-phosphate
  modified_base 21: mod_base = OTHER; note 2'-O-methyladenosine-3'-phosphate-N-[tris(GalNAc-alkyl)-ami dodecanoyl)]-4-hydroxyprolinol (Hyp-(GalNAc-alkyl)3)
ggaccgagaagtcaccaagaa

SEQ ID NO: 2599 - RNA, 23 nt, synthetic construct
  source 1..23: mol_type = other RNA
  modified_base 1: mod_base = OTHER; note = 2'-O-methyluridine-3'-phosphorothioate
  modified_base 2: mod_base = OTHER; note = 2'-fluorouridine -3'-phosphorothioate
  modified_base 3: mod_base = OTHER; note = 2'-O-methylcytidine-3'-phosphate
  modified_base 4: mod_base = OTHER; note = 2'-O-methyluridine-3'-phosphate
  modified_base 5: mod_base = OTHER; note = 2'-O-methyluridine-3'-phosphate
  modified_base 6: mod_base = OTHER; note = 2'-fluoroguanosine-3'-phosphate
  modified_base 7: mod_base = OTHER; note = 2'-O-methylguanosine-3'-phosphate
  modified_base 8: mod_base = OTHER; note = 2'-fluorouridine-3'-phosphate
  modified_base 9: mod_base = OTHER; note = 2'-fluoroguanosine-3'-phosphate
  modified_base 10: mod_base = OTHER; note = 2'-O-methyladenosine-3'-phosphate
  modified_base 11: mod_base = OTHER; note = 2'-O-methylcytidine-3'-phosphate
  modified_base 12: mod_base = OTHER; note = 2'-O-methyluridine-3'-phosphate
  modified_base 13: mod_base = OTHER; note = 2'-O-methyluridine-3'-phosphate
  modified_base 14: mod_base = OTHER; note = 2'-fluorocytidine-3'-phosphate
  modified_base 15: mod_base = OTHER; note = 2'-O-methyluridine-3'-phosphate
  modified_base 16: mod_base = OTHER; note = 2'-fluorocytidine-3'-phosphate
  modified_base 17: mod_base = OTHER; note = 2'-O-methylguanosine-3'-phosphate
  modified_base 18: mod_base = OTHER; note = 2'-O-methylguanosine-3'-phosphate
  modified_base 19: mod_base = OTHER; note = 2'-O-methyluridine-3'-phosphate
  modified_base 20: mod_base = OTHER; note = 2'-O-methylcytidine-3'-phosphate
  modified_base 21: mod_base = OTHER; note = 2'-O-methylcytidine-3'- phosphorothioate
  modified_base 22: mod_base = OTHER; note = 2'-O-methyluridine-3'-phosphorothioate
  modified_base 23: mod_base = OTHER; note = 2'-O-methyluridine-3'-phosphate
ttcttggtgacttctcggtcctt

SEQ ID NO: 2600 - RNA, 21 nt, synthetic construct
  source 1..21: mol_type = other RNA
  modified_base 1: mod_base = OTHER; note = 2'-O-methyladenosine-3'- phosphorothioate
  modified_base 2: mod_base = OTHER; note = 2'-O-methylguanosine-3'- phosphorothioate
  modified_base 3: mod_base = OTHER; note = 2'-O-methylguanosine-3'-phosphate
  modified_base 4: mod_base = OTHER; note = 2'-O-methyladenosine-3'-phosphate
  modified_base 5: mod_base = OTHER; note = 2'-O-methylcytidine-3'-phosphate
  modified_base 6: mod_base = OTHER; note = 2'-O-methylcytidine-3'-phosphate
  modified_base 7: mod_base = OTHER; note = 2'-fluoroguanosine-3'-phosphate
  modified_base 8: mod_base = OTHER; note = 2'-O-methyladenosine-3'-phosphate
  modified_base 9: mod_base = OTHER; note = 2'-fluoroguanosine-3'-phosphate
  modified_base 10: mod_base = OTHER; note = 2'-fluoroadenosine-3'-phosphate
  modified_base 11: mod_base = OTHER; note = 2'-fluoroadenosine-3'-phosphate
  modified_base 12: mod_base = OTHER; note = 2'-O-methylguanosine-3'-phosphate
  modified_base 13: mod_base = OTHER; note = 2'-O-methyluridine-3'-phosphate
  modified_base 14: mod_base = OTHER; note = 2'-O-methylcytidine-3'-phosphate
  modified_base 15: mod_base = OTHER; note = 2'-O-methyladenosine-3'-phosphate
  modified_base 16: mod_base = OTHER; note = 2'-O-methylcytidine-3'-phosphate
  modified_base 17: mod_base = OTHER; note = 2'-O-methylcytidine-3'-phosphate
  modified_base 18: mod_base = OTHER; note = 2'-O-methyladenosine-3'-phosphate
  modified_base 19: mod_base = OTHER; note = 2'-O-methyladenosine-3'-phosphate
  modified_base 20: mod_base = OTHER; note = 2'-O-methylguanosine-3'-phosphate
  modified_base 21: mod_base = OTHER; note 2'-O-methyladenosine-3'-phosphate-N-[tris(GalNAc-alkyl)-ami dodecanoyl)]-4-hydroxyprolinol (Hyp-(GalNAc-alkyl)3)
aggaccgagaagtcaccaaga

SEQ ID NO: 2601 - RNA, 23 nt, synthetic construct
  source 1..23: mol_type = other RNA
  modified_base 1: mod_base = OTHER; note = 2'-O-methyluridine-3'-phosphorothioate
  modified_base 2: mod_base = OTHER; note = 2'-fluorocytidine-3'-phosphorothioate
  modified_base 3: mod_base = OTHER; note = 2'-O-methyluridine-3'-phosphate
  modified_base 4: mod_base = OTHER; note = 2'-O-methyluridine-3'-phosphate
  modified_base 5: mod_base = OTHER; note = 2'-O-methylguanosine-3'-phosphate
  modified_base 6: mod_base = OTHER; note = 2'-fluoroguanosine-3'-phosphate
  modified_base 7: mod_base = OTHER; note = 2'-O-methyluridine-3'-phosphate
  modified_base 8: mod_base = OTHER; note = 2'-fluoroguanosine-3'-phosphate
  modified_base 9: mod_base = OTHER; note = 2'-fluoroadenosine-3'-phosphate
  modified_base 10: mod_base = OTHER; note = 2'-O-methylcytidine-3'-phosphate
  modified_base 11: mod_base = OTHER; note = 2'-O-methyluridine-3'-phosphate
  modified_base 12: mod_base = OTHER; note = 2'-O-methyluridine-3'-phosphate
  modified_base 13: mod_base = OTHER; note = 2'-O-methylcytidine-3'-phosphate
  modified_base 14: mod_base = OTHER; note = 2'-fluorouridine-3'-phosphate
  modified_base 15: mod_base = OTHER; note = 2'-O-methylcytidine-3'-phosphate
  modified_base 16: mod_base = OTHER; note = 2'-fluoroguanosine-3'-phosphate
  modified_base 17: mod_base = OTHER; note = 2'-O-methylguanosine-3'-phosphate
  modified_base 18: mod_base = OTHER; note = 2'-O-methyluridine-3'-phosphate
  modified_base 19: mod_base = OTHER; note = 2'-O-methylcytidine-3'-phosphate
  modified_base 20: mod_base = OTHER; note = 2'-O-methylcytidine-3'-phosphate
  modified_base 21: mod_base = OTHER; note = 2'-O-methyluridine-3'-phosphorothioate
  modified_base 22: mod_base = OTHER; note = 2'-O-methyluridine-3'-phosphorothioate
  modified_base 23: mod_base = OTHER; note = 2'-O-methylguanosine-3'-phosphate
tcttggtgacttctcggtccttg

SEQ ID NO: 2602 - RNA, 21 nt, synthetic construct
  source 1..21: mol_type = other RNA
  modified_base 1: mod_base = OTHER; note = 2'-O-methyluridine-3'-phosphorothioate
  modified_base 2: mod_base = OTHER; note = 2'-O-methylcytidine-3'- phosphorothioate
  modified_base 3: mod_base = OTHER; note = 2'-O-methyladenosine-3'-phosphate
  modified_base 4: mod_base = OTHER; note = 2'-O-methyladenosine-3'-phosphate
  modified_base 5: mod_base = OTHER; note = 2'-O-methyladenosine-3'-phosphate
  modified_base 6: mod_base = OTHER; note = 2'-O-methylguanosine-3'-phosphate
  modified_base 7: mod_base = OTHER; note = 2'-fluorouridine-3'-phosphate
  modified_base 8: mod_base = OTHER; note = 2'-O-methylguanosine-3'-phosphate
  modified_base 9: mod_base = OTHER; note = 2'-fluorouridine-3'-phosphate
  modified_base 10: mod_base = OTHER; note = 2'-fluorouridine-3'-phosphate
  modified_base 11: mod_base = OTHER; note = 2'-fluoroguanosine-3'-phosphate
  modified_base 12: mod_base = OTHER; note = 2'-O-methylguanosine-3'-phosphate
  modified_base 13: mod_base = OTHER; note = 2'-O-methyluridine-3'-phosphate
  modified_base 14: mod_base = OTHER; note = 2'-O-methyladenosine-3'-phosphate
  modified_base 15: mod_base = OTHER; note = 2'-O-methyladenosine-3'-phosphate
  modified_base 16: mod_base = OTHER; note = 2'-O-methyluridine-3'-phosphate
  modified_base 17: mod_base = OTHER; note = 2'-O-methylguanosine-3'-phosphate
  modified_base 18: mod_base = OTHER; note = 2'-O-methylcytidine-3'-phosphate
  modified_base 19: mod_base = OTHER; note = 2'-O-methylcytidine-3'-phosphate
  modified_base 20: mod_base = OTHER; note = 2'-O-methyluridine-3'-phosphate
  modified_base 21: mod_base = OTHER; note 2'-O-methylguanosine-3'-phosphate-N-[tris(GalNAc-alkyl)-ami dodecanoyl)]-4-hydroxyprolinol (Hyp-(GalNAc-alkyl)3)
tcaaagtgttggtaatgcctg

SEQ ID NO: 2603 - RNA, 23 nt, synthetic construct
  source 1..23: mol_type = other RNA
  modified_base 1: mod_base = OTHER; note = 2'-O-methylcytidine-3'- phosphorothioate
  modified_base 2: mod_base = OTHER; note = 2'-fluoroadenosine-3'-phosphorothioate
  modified_base 3: mod_base = OTHER; note = 2'-O-methylguanosine-3'-phosphate
  modified_base 4: mod_base = OTHER; note = 2'-O-methylguanosine-3'-phosphate
  modified_base 5: mod_base = OTHER; note = 2'-O-methylcytidine-3'-phosphate
  modified_base 6: mod_base = OTHER; note = 2'-fluoroadenosine-3'-phosphate
  modified_base 7: mod_base = OTHER; note = 2'-O-methyluridine-3'-phosphate
  modified_base 8: mod_base = OTHER; note = 2'-fluorouridine-3'-phosphate
  modified_base 9: mod_base = OTHER; note = 2'-fluoroadenosine-3'-phosphate
  modified_base 10: mod_base = OTHER; note = 2'-O-methylcytidine-3'-phosphate
  modified_base 11: mod_base = OTHER; note = 2'-O-methylcytidine-3'-phosphate
  modified_base 12: mod_base = OTHER; note = 2'-O-methyladenosine-3'-phosphate
  modified_base 13: mod_base = OTHER; note = 2'-O-methyladenosine-3'-phosphate
  modified_base 14: mod_base = OTHER; note = 2'-fluorocytidine-3'-phosphate
  modified_base 15: mod_base = OTHER; note = 2'-O-methyladenosine-3'-phosphate
  modified_base 16: mod_base = OTHER; note = 2'-fluorocytidine-3'-phosphate
  modified_base 17: mod_base = OTHER; note = 2'-O-methyluridine-3'-phosphate
  modified_base 18: mod_base = OTHER; note = 2'-O-methyluridine-3'-phosphate
  modified_base 19: mod_base = OTHER; note = 2'-O-methyluridine-3'-phosphate
  modified_base 20: mod_base = OTHER; note = 2'-O-methylguanosine-3'-phosphate
  modified_base 21: mod_base = OTHER; note = 2'-O-methyladenosine-3'- phosphorothioate
  modified_base 22: mod_base = OTHER; note = 2'-O-methyladenosine-3'- phosphorothioate
  modified_base 23: mod_base = OTHER; note = 2'-O-methylcytidine-3'-phosphate
caggcattaccaacactttgaac

SEQ ID NO: 2604 - RNA, 21 nt, synthetic construct
  source 1..21: mol_type = other RNA
  modified_base 1: mod_base = OTHER; note = 2'-O-methylcytidine-3'- phosphorothioate
  modified_base 2: mod_base = OTHER; note = 2'-O-methyladenosine-3'- phosphorothioate
  modified_base 3: mod_base = OTHER; note = 2'-O-methyladenosine-3'-phosphate
  modified_base 4: mod_base = OTHER; note = 2'-O-methyladenosine-3'-phosphate
  modified_base 5: mod_base = OTHER; note = 2'-O-methylguanosine-3'-phosphate
  modified_base 6: mod_base = OTHER; note = 2'-O-methyluridine-3'-phosphate
  modified_base 7: mod_base = OTHER; note = 2'-fluoroguanosine-3'-phosphate
  modified_base 8: mod_base = OTHER; note = 2'-O-methyluridine-3'-phosphate
  modified_base 9: mod_base = OTHER; note = 2'-fluorouridine-3'-phosphate
  modified_base 10: mod_base = OTHER; note = 2'-fluoroguanosine-3'-phosphate
  modified_base 11: mod_base = OTHER; note = 2'-fluoroguanosine-3'-phosphate
  modified_base 12: mod_base = OTHER; note = 2'-O-methyluridine-3'-phosphate
  modified_base 13: mod_base = OTHER; note = 2'-O-methyladenosine-3'-phosphate
  modified_base 14: mod_base = OTHER; note = 2'-O-methyladenosine-3'-phosphate
  modified_base 15: mod_base = OTHER; note = 2'-O-methyluridine-3'-phosphate
  modified_base 16: mod_base = OTHER; note = 2'-O-methylguanosine-3'-phosphate
  modified_base 17: mod_base = OTHER; note = 2'-O-methylcytidine-3'-phosphate
  modified_base 18: mod_base = OTHER; note = 2'-O-methylcytidine-3'-phosphate
  modified_base 19: mod_base = OTHER; note = 2'-O-methyluridine-3'-phosphate
  modified_base 20: mod_base = OTHER; note = 2'-O-methylguanosine-3'-phosphate
  modified_base 21: mod_base = OTHER; note 2'-O-methyladenosine-3'-phosphate-N-[tris(GalNAc-alkyl)-ami dodecanoyl)]-4-hydroxyprolinol (Hyp-(GalNAc-alkyl)3)
caaagtgttggtaatgcctga

SEQ ID NO: 2605 - RNA, 23 nt, synthetic construct
  source 1..23: mol_type = other RNA
  modified_base 1: mod_base = OTHER; note = 2'-O-methyluridine-3'-phosphorothioate
  modified_base 2: mod_base = OTHER; note = 2'-fluorocytidine-3'-phosphorothioate
  modified_base 3: mod_base = OTHER; note = 2'-O-methyladenosine-3'-phosphate
  modified_base 4: mod_base = OTHER; note = 2'-O-methylguanosine-3'-phosphate
  modified_base 5: mod_base = OTHER; note = 2'-O-methylguanosine-3'-phosphate
  modified_base 6: mod_base = OTHER; note = 2'-fluorocytidine-3'-phosphate
  modified_base 7: mod_base = OTHER; note = 2'-O-methyladenosine-3'-phosphate
  modified_base 8: mod_base = OTHER; note = 2'-fluorouridine-3'-phosphate
  modified_base 9: mod_base = OTHER; note = 2'-fluorouridine-3'-phosphate
  modified_base 10: mod_base = OTHER; note = 2'-O-methyladenosine-3'-phosphate
  modified_base 11: mod_base = OTHER; note = 2'-O-methylcytidine-3'-phosphate
  modified_base 12: mod_base = OTHER; note = 2'-O-methylcytidine-3'-phosphate
  modified_base 13: mod_base = OTHER; note = 2'-O-methyladenosine-3'-phosphate
  modified_base 14: mod_base = OTHER; note = 2'-fluoroadenosine-3'-phosphate
  modified_base 15: mod_base = OTHER; note = 2'-O-methylcytidine-3'-phosphate
  modified_base 16: mod_base = OTHER; note = 2'-fluoroadenosine-3'-phosphate
  modified_base 17: mod_base = OTHER; note = 2'-O-methylcytidine-3'-phosphate
  modified_base 18: mod_base = OTHER; note = 2'-O-methyluridine-3'-phosphate
  modified_base 19: mod_base = OTHER; note = 2'-O-methyluridine-3'-phosphate
  modified_base 20: mod_base = OTHER; note = 2'-O-methyluridine-3'-phosphate
  modified_base 21: mod_base = OTHER; note = 2'-O-methylguanosine-3'- phosphorothioate
  modified_base 22: mod_base = OTHER; note = 2'-O-methyladenosine-3'- phosphorothioate
  modified_base 23: mod_base = OTHER; note = 2'-O-methyladenosine-3'-phosphate
tcaggcattaccaacactttgaa

SEQ ID NO: 2606 - RNA, 21 nt, synthetic construct
  source 1..21: mol_type = other RNA
  modified_base 1: mod_base = OTHER; note = 2'-O-methyladenosine-3'- phosphorothioate
  modified_base 2: mod_base = OTHER; note = 2'-O-methylguanosine-3'- phosphorothioate
  modified_base 3: mod_base = OTHER; note = 2'-O-methylguanosine-3'-phosphate
  modified_base 4: mod_base = OTHER; note = 2'-O-methyluridine-3'-phosphate
  modified_base 5: mod_base = OTHER; note = 2'-O-methyluridine-3'-phosphate
  modified_base 6: mod_base = OTHER; note = 2'-O-methylcytidine-3'-phosphate
  modified_base 7: mod_base = OTHER; note = 2'-fluoroadenosine-3'-phosphate
  modified_base 8: mod_base = OTHER; note = 2'-O-methyladenosine-3'-phosphate
  modified_base 9: mod_base = OTHER; note = 2'-fluoroadenosine-3'-phosphate
  modified_base 10: mod_base = OTHER; note = 2'-fluoroguanosine-3'-phosphate
  modified_base 11: mod_base = OTHER; note = 2'-fluorouridine-3'-phosphate
  modified_base 12: mod_base = OTHER; note = 2'-O-methylguanosine-3'-phosphate
  modified_base 13: mod_base = OTHER; note = 2'-O-methyluridine-3'-phosphate
  modified_base 14: mod_base = OTHER; note = 2'-O-methyluridine-3'-phosphate
  modified_base 15: mod_base = OTHER; note = 2'-O-methylguanosine-3'-phosphate
  modified_base 16: mod_base = OTHER; note = 2'-O-methylguanosine-3'-phosphate
  modified_base 17: mod_base = OTHER; note = 2'-O-methyluridine-3'-phosphate
  modified_base 18: mod_base = OTHER; note = 2'-O-methyladenosine-3'-phosphate
  modified_base 19: mod_base = OTHER; note = 2'-O-methyladenosine-3'-phosphate
  modified_base 20: mod_base = OTHER; note = 2'-O-methyluridine-3'-phosphate
  modified_base 21: mod_base = OTHER; note 2'-O-methylguanosine-3'-phosphate-N-[tris(GalNAc-alkyl)-ami dodecanoyl)]-4-hydroxyprolinol (Hyp-(GalNAc-alkyl)3)
aggttcaaagtgttggtaatg

SEQ ID NO: 2607 - RNA, 23 nt, synthetic construct
  source 1..23: mol_type = other RNA
  modified_base 1: mod_base = OTHER; note = 2'-O-methylcytidine-3'- phosphorothioate
  modified_base 2: mod_base = OTHER; note = 2'-fluoroadenosine-3'-phosphorothioate
  modified_base 3: mod_base = OTHER; note = 2'-O-methyluridine-3'-phosphate
  modified_base 4: mod_base = OTHER; note = 2'-O-methyluridine-3'-phosphate
  modified_base 5: mod_base = OTHER; note = 2'-O-methyladenosine-3'-phosphate
  modified_base 6: mod_base = OTHER; note = 2'-fluorocytidine-3'-phosphate
  modified_base 7: mod_base = OTHER; note = 2'-O-methylcytidine-3'-phosphate
  modified_base 8: mod_base = OTHER; note = 2'-fluoroadenosine-3'-phosphate
  modified_base 9: mod_base = OTHER; note = 2'-fluoroadenosine-3'-phosphate
  modified_base 10: mod_base = OTHER; note = 2'-O-methylcytidine-3'-phosphate
  modified_base 11: mod_base = OTHER; note = 2'-O-methyladenosine-3'-phosphate
  modified_base 12: mod_base = OTHER; note = 2'-O-methylcytidine-3'-phosphate
  modified_base 13: mod_base = OTHER; note = 2'-O-methyluridine-3'-phosphate
  modified_base 14: mod_base = OTHER; note = 2'-fluorouridine-3'-phosphate
  modified_base 15: mod_base = OTHER; note = 2'-O-methyluridine-3'-phosphate
  modified_base 16: mod_base = OTHER; note = 2'-fluoroguanosine-3'-phosphate
  modified_base 17: mod_base = OTHER; note = 2'-O-methyladenosine-3'-phosphate
  modified_base 18: mod_base = OTHER; note = 2'-O-methyladenosine-3'-phosphate
  modified_base 19: mod_base = OTHER; note = 2'-O-methylcytidine-3'-phosphate
  modified_base 20: mod_base = OTHER; note = 2'-O-methylcytidine-3'-phosphate
  modified_base 21: mod_base = OTHER; note = 2'-O-methyluridine-3'-phosphorothioate
  modified_base 22: mod_base = OTHER; note = 2'-O-methylguanosine-3'- phosphorothioate
  modified_base 23: mod_base = OTHER; note = 2'-O-methyladenosine-3'-phosphate
cattaccaacactttgaacctga

SEQ ID NO: 2608 - RNA, 21 nt, synthetic construct
  source 1..21: mol_type = other RNA
  modified_base 1: mod_base = OTHER; note = 2'-O-methylcytidine-3'- phosphorothioate
  modified_base 2: mod_base = OTHER; note = 2'-O-methyladenosine-3'- phosphorothioate
  modified_base 3: mod_base = OTHER; note = 2'-O-methylguanosine-3'-phosphate
  modified_base 4: mod_base = OTHER; note = 2'-O-methylguanosine-3'-phosphate
  modified_base 5: mod_base = OTHER; note = 2'-O-methyluridine-3'-phosphate
  modified_base 6: mod_base = OTHER; note = 2'-O-methyluridine-3'-phosphate
  modified_base 7: mod_base = OTHER; note = 2'-fluorocytidine-3'-phosphate
  modified_base 8: mod_base = OTHER; note = 2'-O-methyladenosine-3'-phosphate
  modified_base 9: mod_base = OTHER; note = 2'-fluoroadenosine-3'-phosphate
  modified_base 10: mod_base = OTHER; note = 2'-fluoroadenosine-3'-phosphate
  modified_base 11: mod_base = OTHER; note = 2'-fluoroguanosine-3'-phosphate
  modified_base 12: mod_base = OTHER; note = 2'-O-methyluridine-3'-phosphate
  modified_base 13: mod_base = OTHER; note = 2'-O-methylguanosine-3'-phosphate
  modified_base 14: mod_base = OTHER; note = 2'-O-methyluridine-3'-phosphate
  modified_base 15: mod_base = OTHER; note = 2'-O-methyluridine-3'-phosphate
  modified_base 16: mod_base = OTHER; note = 2'-O-methylguanosine-3'-phosphate
  modified_base 17: mod_base = OTHER; note = 2'-O-methylguanosine-3'-phosphate
  modified_base 18: mod_base = OTHER; note = 2'-O-methyluridine-3'-phosphate
  modified_base 19: mod_base = OTHER; note = 2'-O-methyladenosine-3'-phosphate
  modified_base 20: mod_base = OTHER; note = 2'-O-methyladenosine-3'-phosphate
  modified_base 21: mod_base = OTHER; note 2'-O-methyluridine-3'-phosphate-N-[tris(GalNAc-alkyl)-amido decanoyl)]-4-hydroxyprolinol (Hyp-(GalNAc-alkyl)3)
caggttcaaagtgttggtaat

SEQ ID NO: 2609 - RNA, 23 nt, synthetic construct
  source 1..23: mol_type = other RNA
  modified_base 1: mod_base = OTHER; note = 2'-O-methyladenosine-3'- phosphorothioate
  modified_base 2: mod_base = OTHER; note = 2'-fluorouridine -3'-phosphorothioate
  modified_base 3: mod_base = OTHER; note = 2'-O-methyluridine-3'-phosphate
  modified_base 4: mod_base = OTHER; note = 2'-O-methyladenosine-3'-phosphate
  modified_base 5: mod_base = OTHER; note = 2'-O-methylcytidine-3'-phosphate
  modified_base 6: mod_base = OTHER; note = 2'-fluorocytidine-3'-phosphate
  modified_base 7: mod_base = OTHER; note = 2'-O-methyladenosine-3'-phosphate
  modified_base 8: mod_base = OTHER; note = 2'-fluoroadenosine-3'-phosphate
  modified_base 9: mod_base = OTHER; note = 2'-fluorocytidine-3'-phosphate
  modified_base 10: mod_base = OTHER; note = 2'-O-methyladenosine-3'-phosphate
  modified_base 11: mod_base = OTHER; note = 2'-O-methylcytidine-3'-phosphate
  modified_base 12: mod_base = OTHER; note = 2'-O-methyluridine-3'-phosphate
  modified_base 13: mod_base = OTHER; note = 2'-O-methyluridine-3'-phosphate
  modified_base 14: mod_base = OTHER; note = 2'-fluorouridine-3'-phosphate
  modified_base 15: mod_base = OTHER; note = 2'-O-methylguanosine-3'-phosphate
  modified_base 16: mod_base = OTHER; note = 2'-fluoroadenosine-3'-phosphate
  modified_base 17: mod_base = OTHER; note = 2'-O-methyladenosine-3'-phosphate
  modified_base 18: mod_base = OTHER; note = 2'-O-methylcytidine-3'-phosphate
  modified_base 19: mod_base = OTHER; note = 2'-O-methylcytidine-3'-phosphate
  modified_base 20: mod_base = OTHER; note = 2'-O-methyluridine-3'-phosphate
  modified_base 21: mod_base = OTHER; note = 2'-O-methylguanosine-3'- phosphorothioate
  modified_base 22: mod_base = OTHER; note = 2'-O-methyladenosine-3'- phosphorothioate
  modified_base 23: mod_base = OTHER; note = 2'-O-methylguanosine-3'-phosphate
attaccaacactttgaacctgag

SEQ ID NO: 2610 - RNA, 21 nt, synthetic construct
  source 1..21: mol_type = other RNA
  modified_base 1: mod_base = OTHER; note = 2'-O-methyluridine-3'-phosphorothioate
  modified_base 2: mod_base = OTHER; note = 2'-O-methyladenosine-3'- phosphorothioate
  modified_base 3: mod_base = OTHER; note = 2'-O-methyluridine-3'-phosphate
  modified_base 4: mod_base = OTHER; note = 2'-O-methyluridine-3'-phosphate
  modified_base 5: mod_base = OTHER; note = 2'-O-methyladenosine-3'-phosphate
  modified_base 6: mod_base = OTHER; note = 2'-O-methylcytidine-3'-phosphate
  modified_base 7: mod_base = OTHER; note = 2'-fluorouridine-3'-phosphate
  modified_base 8: mod_base = OTHER; note = 2'-O-methyluridine-3'-phosphate
  modified_base 9: mod_base = OTHER; note = 2'-fluoroguanosine-3'-phosphate
  modified_base 10: mod_base = OTHER; note = 2'-fluoroadenosine-3'-phosphate
  modified_base 11: mod_base = OTHER; note = 2'-fluorocytidine-3'-phosphate
  modified_base 12: mod_base = OTHER; note = 2'-O-methyladenosine-3'-phosphate
  modified_base 13: mod_base = OTHER; note = 2'-O-methyladenosine-3'-phosphate
  modified_base 14: mod_base = OTHER; note = 2'-O-methyladenosine-3'-phosphate
  modified_base 15: mod_base = OTHER; note = 2'-O-methylguanosine-3'-phosphate
  modified_base 16: mod_base = OTHER; note = 2'-O-methyladenosine-3'-phosphate
  modified_base 17: mod_base = OTHER; note = 2'-O-methylguanosine-3'-phosphate
  modified_base 18: mod_base = OTHER; note = 2'-O-methyladenosine-3'-phosphate
  modified_base 19: mod_base = OTHER; note = 2'-O-methylcytidine-3'-phosphate
  modified_base 20: mod_base = OTHER; note = 2'-O-methyladenosine-3'-phosphate
  modified_base 21: mod_base = OTHER; note 2'-O-methylcytidine-3'-phosphate-N-[tris(GalNAc-alkyl)-amid odecanoyl)]-4-hydroxyprolinol (Hyp-(GalNAc-alkyl)3)
tattacttgacaaagagacac

SEQ ID NO: 2611 - RNA, 23 nt, synthetic construct
  source 1..23: mol_type = other RNA
  modified_base 1: mod_base = OTHER; note = 2'-O-methylguanosine-3'- phosphorothioate
  modified_base 2: mod_base = OTHER; note = 2'-fluorouridine -3'-phosphorothioate
  modified_base 3: mod_base = OTHER; note = 2'-O-methylguanosine-3'-phosphate
  modified_base 4: mod_base = OTHER; note = 2'-O-methyluridine-3'-phosphate
  modified_base 5: mod_base = OTHER; note = 2'-O-methylcytidine-3'-phosphate
  modified_base 6: mod_base = OTHER; note = 2'-fluorouridine-3'-phosphate
  modified_base 7: mod_base = OTHER; note = 2'-O-methylcytidine-3'-phosphate
  modified_base 8: mod_base = OTHER; note = 2'-fluorouridine-3'-phosphate
  modified_base 9: mod_base = OTHER; note = 2'-fluorouridine-3'-phosphate
  modified_base 10: mod_base = OTHER; note = 2'-O-methyluridine-3'-phosphate
  modified_base 11: mod_base = OTHER; note = 2'-O-methylguanosine-3'-phosphate
  modified_base 12: mod_base = OTHER; note = 2'-O-methyluridine-3'-phosphate
  modified_base 13: mod_base = OTHER; note = 2'-O-methylcytidine-3'-phosphate
  modified_base 14: mod_base = OTHER; note = 2'-fluoroadenosine-3'-phosphate
  modified_base 15: mod_base = OTHER; note = 2'-O-methyladenosine-3'-phosphate
  modified_base 16: mod_base = OTHER; note = 2'-fluoroguanosine-3'-phosphate
  modified_base 17: mod_base = OTHER; note = 2'-O-methyluridine-3'-phosphate
  modified_base 18: mod_base = OTHER; note = 2'-O-methyladenosine-3'-phosphate
  modified_base 19: mod_base = OTHER; note = 2'-O-methyladenosine-3'-phosphate
  modified_base 20: mod_base = OTHER; note = 2'-O-methyluridine-3'-phosphate
  modified_base 21: mod_base = OTHER; note = 2'-O-methyladenosine-3'- phosphorothioate
  modified_base 22: mod_base = OTHER; note = 2'-O-methylcytidine-3'- phosphorothioate
  modified_base 23: mod_base = OTHER; note = 2'-O-methyladenosine-3'-phosphate
gtgtctctttgtcaagtaataca

SEQ ID NO: 2612 - RNA, 21 nt, synthetic construct
  source 1..21: mol_type = other RNA
  modified_base 1: mod_base = OTHER; note = 2'-O-methyladenosine-3'- phosphorothioate
  modified_base 2: mod_base = OTHER; note = 2'-O-methyluridine-3'-phosphorothioate
  modified_base 3: mod_base = OTHER; note = 2'-O-methyluridine-3'-phosphate
  modified_base 4: mod_base = OTHER; note = 2'-O-methyladenosine-3'-phosphate
  modified_base 5: mod_base = OTHER; note = 2'-O-methylcytidine-3'-phosphate
  modified_base 6: mod_base = OTHER; note = 2'-O-methyluridine-3'-phosphate
  modified_base 7: mod_base = OTHER; note = 2'-fluorouridine-3'-phosphate
  modified_base 8: mod_base = OTHER; note = 2'-O-methylguanosine-3'-phosphate
  modified_base 9: mod_base = OTHER; note = 2'-fluoroadenosine-3'-phosphate
  modified_base 10: mod_base = OTHER; note = 2'-fluorocytidine-3'-phosphate
  modified_base 11: mod_base = OTHER; note = 2'-fluoroadenosine-3'-phosphate
  modified_base 12: mod_base = OTHER; note = 2'-O-methyladenosine-3'-phosphate
  modified_base 13: mod_base = OTHER; note = 2'-O-methyladenosine-3'-phosphate
  modified_base 14: mod_base = OTHER; note = 2'-O-methylguanosine-3'-phosphate
  modified_base 15: mod_base = OTHER; note = 2'-O-methyladenosine-3'-phosphate
  modified_base 16: mod_base = OTHER; note = 2'-O-methylguanosine-3'-phosphate
  modified_base 17: mod_base = OTHER; note = 2'-O-methyladenosine-3'-phosphate
  modified_base 18: mod_base = OTHER; note = 2'-O-methylcytidine-3'-phosphate
  modified_base 19: mod_base = OTHER; note = 2'-O-methyladenosine-3'-phosphate
  modified_base 20: mod_base = OTHER; note = 2'-O-methylcytidine-3'-phosphate
  modified_base 21: mod_base = OTHER; note 2'-O-methyluridine-3'-phosphate-N-[tris(GalNAc-alkyl)-amido decanoyl)]-4-hydroxyprolinol (Hyp-(GalNAc-alkyl)3)
attacttgacaaagagacact

SEQ ID NO: 2613 - RNA, 23 nt, synthetic construct
  source 1..23: mol_type = other RNA
  modified_base 1: mod_base = OTHER; note = 2'-O-methyladenosine-3'- phosphorothioate
  modified_base 2: mod_base = OTHER; note = 2'-fluoroguanosine-3'-phosphorothioate
  modified_base 3: mod_base = OTHER; note = 2'-O-methyluridine-3'-phosphate
  modified_base 4: mod_base = OTHER; note = 2'-O-methylguanosine-3'-phosphate
  modified_base 5: mod_base = OTHER; note = 2'-O-methyluridine-3'-phosphate
  modified_base 6: mod_base = OTHER; note = 2'-fluorocytidine-3'-phosphate
  modified_base 7: mod_base = OTHER; note = 2'-O-methyluridine-3'-phosphate
  modified_base 8: mod_base = OTHER; note = 2'-fluorocytidine-3'-phosphate
  modified_base 9: mod_base = OTHER; note = 2'-fluorouridine-3'-phosphate
  modified_base 10: mod_base = OTHER; note = 2'-O-methyluridine-3'-phosphate
  modified_base 11: mod_base = OTHER; note = 2'-O-methyluridine-3'-phosphate
  modified_base 12: mod_base = OTHER; note = 2'-O-methylguanosine-3'-phosphate
  modified_base 13: mod_base = OTHER; note = 2'-O-methyluridine-3'-phosphate
  modified_base 14: mod_base = OTHER; note = 2'-fluorocytidine-3'-phosphate
  modified_base 15: mod_base = OTHER; note = 2'-O-methyladenosine-3'-phosphate
  modified_base 16: mod_base = OTHER; note = 2'-fluoroadenosine-3'-phosphate
  modified_base 17: mod_base = OTHER; note = 2'-O-methylguanosine-3'-phosphate
  modified_base 18: mod_base = OTHER; note = 2'-O-methyluridine-3'-phosphate
  modified_base 19: mod_base = OTHER; note = 2'-O-methyladenosine-3'-phosphate
  modified_base 20: mod_base = OTHER; note = 2'-O-methyladenosine-3'-phosphate
  modified_base 21: mod_base = OTHER; note = 2'-O-methyluridine-3'-phosphorothioate
  modified_base 22: mod_base = OTHER; note = 2'-O-methyladenosine-3'- phosphorothioate
  modified_base 23: mod_base = OTHER; note = 2'-O-methylcytidine-3'-phosphate
agtgtctctttgtcaagtaatac

SEQ ID NO: 2614 - RNA, 21 nt, synthetic construct
  source 1..21: mol_type = other RNA
  modified_base 1: mod_base = OTHER; note = 2'-O-methylcytidine-3'- phosphorothioate
  modified_base 2: mod_base = OTHER; note = 2'-O-methyladenosine-3'- phosphorothioate
  modified_base 3: mod_base = OTHER; note = 2'-O-methyluridine-3'-phosphate
  modified_base 4: mod_base = OTHER; note = 2'-O-methylguanosine-3'-phosphate
  modified_base 5: mod_base = OTHER; note = 2'-O-methyluridine-3'-phosphate
  modified_base 6: mod_base = OTHER; note = 2'-O-methyladenosine-3'-phosphate
  modified_base 7: mod_base = OTHER; note = 2'-fluorouridine-3'-phosphate
  modified_base 8: mod_base = OTHER; note = 2'-O-methyluridine-3'-phosphate
  modified_base 9: mod_base = OTHER; note = 2'-fluoroadenosine-3'-phosphate
  modified_base 10: mod_base = OTHER; note = 2'-fluorocytidine-3'-phosphate
  modified_base 11: mod_base = OTHER; note = 2'-fluorouridine-3'-phosphate
  modified_base 12: mod_base = OTHER; note = 2'-O-methyluridine-3'-phosphate
  modified_base 13: mod_base = OTHER; note = 2'-O-methylguanosine-3'-phosphate
  modified_base 14: mod_base = OTHER; note = 2'-O-methyladenosine-3'-phosphate
  modified_base 15: mod_base = OTHER; note = 2'-O-methylcytidine-3'-phosphate
  modified_base 16: mod_base = OTHER; note = 2'-O-methyladenosine-3'-phosphate
  modified_base 17: mod_base = OTHER; note = 2'-O-methyladenosine-3'-phosphate
  modified_base 18: mod_base = OTHER; note = 2'-O-methyladenosine-3'-phosphate
  modified_base 19: mod_base = OTHER; note = 2'-O-methylguanosine-3'-phosphate
  modified_base 20: mod_base = OTHER; note = 2'-O-methyladenosine-3'-phosphate
  modified_base 21: mod_base = OTHER; note 2'-O-methylguanosine-3'-phosphate-N-[tris(GalNAc-alkyl)-ami dodecanoyl)]-4-hydroxyprolinol (Hyp-(GalNAc-alkyl)3)
catgtattacttgacaaagag

SEQ ID NO: 2615 - RNA, 23 nt, synthetic construct
  source 1..23: mol_type = other RNA
  modified_base 1: mod_base = OTHER; note = 2'-O-methylcytidine-3'- phosphorothioate
  modified_base 2: mod_base = OTHER; note = 2'-fluorouridine -3'-phosphorothioate
  modified_base 3: mod_base = OTHER; note = 2'-O-methylcytidine-3'-phosphate
  modified_base 4: mod_base = OTHER; note = 2'-O-methyluridine-3'-phosphate
  modified_base 5: mod_base = OTHER; note = 2'-O-methyluridine-3'-phosphate
  modified_base 6: mod_base = OTHER; note = 2'-fluorouridine-3'-phosphate
  modified_base 7: mod_base = OTHER; note = 2'-O-methylguanosine-3'-phosphate
  modified_base 8: mod_base = OTHER; note = 2'-fluorouridine-3'-phosphate
  modified_base 9: mod_base = OTHER; note = 2'-fluorocytidine-3'-phosphate
  modified_base 10: mod_base = OTHER; note = 2'-O-methyladenosine-3'-phosphate
  modified_base 11: mod_base = OTHER; note = 2'-O-methyladenosine-3'-phosphate
  modified_base 12: mod_base = OTHER; note = 2'-O-methylguanosine-3'-phosphate
  modified_base 13: mod_base = OTHER; note = 2'-O-methyluridine-3'-phosphate
  modified_base 14: mod_base = OTHER; note = 2'-fluoroadenosine-3'-phosphate
  modified_base 15: mod_base = OTHER; note = 2'-O-methyladenosine-3'-phosphate
  modified_base 16: mod_base = OTHER; note = 2'-fluorouridine-3'-phosphate
  modified_base 17: mod_base = OTHER; note = 2'-O-methyladenosine-3'-phosphate
  modified_base 18: mod_base = OTHER; note = 2'-O-methylcytidine-3'-phosphate
  modified_base 19: mod_base = OTHER; note = 2'-O-methyladenosine-3'-phosphate
  modified_base 20: mod_base = OTHER; note = 2'-O-methyluridine-3'-phosphate
  modified_base 21: mod_base = OTHER; note = 2'-O-methylguanosine-3'- phosphorothioate
  modified_base 22: mod_base = OTHER; note = 2'-O-methylcytidine-3'- phosphorothioate
  modified_base 23: mod_base = OTHER; note = 2'-O-methyluridine-3'-phosphate
ctctttgtcaagtaatacatgct

SEQ ID NO: 2616 - RNA, 21 nt, synthetic construct
  source 1..21: mol_type = other RNA
  modified_base 1: mod_base = OTHER; note = 2'-O-methylguanosine-3'- phosphorothioate
  modified_base 2: mod_base = OTHER; note = 2'-O-methylcytidine-3'- phosphorothioate
  modified_base 3: mod_base = OTHER; note = 2'-O-methyladenosine-3'-phosphate
  modified_base 4: mod_base = OTHER; note = 2'-O-methyluridine-3'-phosphate
  modified_base 5: mod_base = OTHER; note = 2'-O-methylguanosine-3'-phosphate
  modified_base 6: mod_base = OTHER; note = 2'-O-methyluridine-3'-phosphate
  modified_base 7: mod_base = OTHER; note = 2'-fluoroadenosine-3'-phosphate
  modified_base 8: mod_base = OTHER; note = 2'-O-methyluridine-3'-phosphate
  modified_base 9: mod_base = OTHER; note = 2'-fluorouridine-3'-phosphate
  modified_base 10: mod_base = OTHER; note = 2'-fluoroadenosine-3'-phosphate
  modified_base 11: mod_base = OTHER; note = 2'-fluorocytidine-3'-phosphate
  modified_base 12: mod_base = OTHER; note = 2'-O-methyluridine-3'-phosphate
  modified_base 13: mod_base = OTHER; note = 2'-O-methyluridine-3'-phosphate
  modified_base 14: mod_base = OTHER; note = 2'-O-methylguanosine-3'-phosphate
  modified_base 15: mod_base = OTHER; note = 2'-O-methyladenosine-3'-phosphate
  modified_base 16: mod_base = OTHER; note = 2'-O-methylcytidine-3'-phosphate
  modified_base 17: mod_base = OTHER; note = 2'-O-methyladenosine-3'-phosphate
  modified_base 18: mod_base = OTHER; note = 2'-O-methyladenosine-3'-phosphate
  modified_base 19: mod_base = OTHER; note = 2'-O-methyladenosine-3'-phosphate
  modified_base 20: mod_base = OTHER; note = 2'-O-methylguanosine-3'-phosphate
  modified_base 21: mod_base = OTHER; note 2'-O-methyladenosine-3'-phosphate-N-[tris(GalNAc-alkyl)-ami dodecanoyl)]-4-hydroxyprolinol (Hyp-(GalNAc-alkyl)3)
gcatgtattacttgacaaaga

SEQ ID NO: 2617 - RNA, 23 nt, synthetic construct
  source 1..23: mol_type = other RNA
  modified_base 1: mod_base = OTHER; note = 2'-O-methyluridine-3'-phosphorothioate
  modified_base 2: mod_base = OTHER; note = 2'-fluorocytidine-3'-phosphorothioate
  modified_base 3: mod_base = OTHER; note = 2'-O-methyluridine-3'-phosphate
  modified_base 4: mod_base = OTHER; note = 2'-O-methyluridine-3'-phosphate
  modified_base 5: mod_base = OTHER; note = 2'-O-methyluridine-3'-phosphate
  modified_base 6: mod_base = OTHER; note = 2'-fluoroguanosine-3'-phosphate
  modified_base 7: mod_base = OTHER; note = 2'-O-methyluridine-3'-phosphate
  modified_base 8: mod_base = OTHER; note = 2'-fluorocytidine-3'-phosphate
  modified_base 9: mod_base = OTHER; note = 2'-fluoroadenosine-3'-phosphate
  modified_base 10: mod_base = OTHER; note = 2'-O-methyladenosine-3'-phosphate
  modified_base 11: mod_base = OTHER; note = 2'-O-methylguanosine-3'-phosphate
  modified_base 12: mod_base = OTHER; note = 2'-O-methyluridine-3'-phosphate
  modified_base 13: mod_base = OTHER; note = 2'-O-methyladenosine-3'-phosphate
  modified_base 14: mod_base = OTHER; note = 2'-fluoroadenosine-3'-phosphate
  modified_base 15: mod_base = OTHER; note = 2'-O-methyluridine-3'-phosphate
  modified_base 16: mod_base = OTHER; note = 2'-fluoroadenosine-3'-phosphate
  modified_base 17: mod_base = OTHER; note = 2'-O-methylcytidine-3'-phosphate
  modified_base 18: mod_base = OTHER; note = 2'-O-methyladenosine-3'-phosphate
  modified_base 19: mod_base = OTHER; note = 2'-O-methyluridine-3'-phosphate
  modified_base 20: mod_base = OTHER; note = 2'-O-methylguanosine-3'-phosphate
  modified_base 21: mod_base = OTHER; note = 2'-O-methylcytidine-3'- phosphorothioate
  modified_base 22: mod_base = OTHER; note = 2'-O-methyluridine-3'-phosphorothioate
  modified_base 23: mod_base = OTHER; note = 2'-O-methylguanosine-3'-phosphate
tctttgtcaagtaatacatgctg

SEQ ID NO: 2618 - RNA, 21 nt, synthetic construct
  source 1..21: mol_type = other RNA
  modified_base 1: mod_base = OTHER; note = 2'-O-methyladenosine-3'- phosphorothioate
  modified_base 2: mod_base = OTHER; note = 2'-O-methyladenosine-3'- phosphorothioate
  modified_base 3: mod_base = OTHER; note = 2'-O-methyladenosine-3'-phosphate
  modified_base 4: mod_base = OTHER; note = 2'-O-methylguanosine-3'-phosphate
  modified_base 5: mod_base = OTHER; note = 2'-O-methyluridine-3'-phosphate
  modified_base 6: mod_base = OTHER; note = 2'-O-methylcytidine-3'-phosphate
  modified_base 7: mod_base = OTHER; note = 2'-fluoroadenosine-3'-phosphate
  modified_base 8: mod_base = OTHER; note = 2'-O-methyluridine-3'-phosphate
  modified_base 9: mod_base = OTHER; note = 2'-fluorocytidine-3'-phosphate
  modified_base 10: mod_base = OTHER; note = 2'-fluoroguanosine-3'-phosphate
  modified_base 11: mod_base = OTHER; note = 2'-fluoroadenosine-3'-phosphate
  modified_base 12: mod_base = OTHER; note = 2'-O-methylcytidine-3'-phosphate
  modified_base 13: mod_base = OTHER; note = 2'-O-methyladenosine-3'-phosphate
  modified_base 14: mod_base = OTHER; note = 2'-O-methyladenosine-3'-phosphate
  modified_base 15: mod_base = OTHER; note = 2'-O-methylguanosine-3'-phosphate
  modified_base 16: mod_base = OTHER; note = 2'-O-methyladenosine-3'-phosphate
  modified_base 17: mod_base = OTHER; note = 2'-O-methylcytidine-3'-phosphate
  modified_base 18: mod_base = OTHER; note = 2'-O-methyladenosine-3'-phosphate
  modified_base 19: mod_base = OTHER; note = 2'-O-methyluridine-3'-phosphate
  modified_base 20: mod_base = OTHER; note = 2'-O-methyluridine-3'-phosphate
  modified_base 21: mod_base = OTHER; note 2'-O-methylguanosine-3'-phosphate-N-[tris(GalNAc-alkyl)-ami dodecanoyl)]-4-hydroxyprolinol (Hyp-(GalNAc-alkyl)3)
aaagtcatcgacaagacattg

SEQ ID NO: 2619 - RNA, 23 nt, synthetic construct
  source 1..23: mol_type = other RNA
  modified_base 1: mod_base = OTHER; note = 2'-O-methylcytidine-3'- phosphorothioate
  modified_base 2: mod_base = OTHER; note = 2'-fluoroadenosine-3'-phosphorothioate
  modified_base 3: mod_base = OTHER; note = 2'-O-methyladenosine-3'-phosphate
  modified_base 4: mod_base = OTHER; note = 2'-O-methyluridine-3'-phosphate
  modified_base 5: mod_base = OTHER; note = 2'-O-methylguanosine-3'-phosphate
  modified_base 6: mod_base = OTHER; note = 2'-fluorouridine-3'-phosphate
  modified_base 7: mod_base = OTHER; note = 2'-O-methylcytidine-3'-phosphate
  modified_base 8: mod_base = OTHER; note = 2'-fluorouridine-3'-phosphate
  modified_base 9: mod_base = OTHER; note = 2'-fluorouridine-3'-phosphate
  modified_base 10: mod_base = OTHER; note = 2'-O-methylguanosine-3'-phosphate
  modified_base 11: mod_base = OTHER; note = 2'-O-methyluridine-3'-phosphate
  modified_base 12: mod_base = OTHER; note = 2'-O-methylcytidine-3'-phosphate
  modified_base 13: mod_base = OTHER; note = 2'-O-methylguanosine-3'-phosphate
  modified_base 14: mod_base = OTHER; note = 2'-fluoroadenosine-3'-phosphate
  modified_base 15: mod_base = OTHER; note = 2'-O-methyluridine-3'-phosphate
  modified_base 16: mod_base = OTHER; note = 2'-fluoroguanosine-3'-phosphate
  modified_base 17: mod_base = OTHER; note = 2'-O-methyladenosine-3'-phosphate
  modified_base 18: mod_base = OTHER; note = 2'-O-methylcytidine-3'-phosphate
  modified_base 19: mod_base = OTHER; note = 2'-O-methyluridine-3'-phosphate
  modified_base 20: mod_base = OTHER; note = 2'-O-methyluridine-3'-phosphate
  modified_base 21: mod_base = OTHER; note = 2'-O-methyluridine-3'-phosphorothioate
  modified_base 22: mod_base = OTHER; note = 2'-O-methylcytidine-3'- phosphorothioate
  modified_base 23: mod_base = OTHER; note = 2'-O-methyladenosine-3'-phosphate
caatgtcttgtcgatgactttca

SEQ ID NO: 2620 - RNA, 21 nt, synthetic construct
  source 1..21: mol_type = other RNA
  modified_base 1: mod_base = OTHER; note = 2'-O-methyladenosine-3'- phosphorothioate
  modified_base 2: mod_base = OTHER; note = 2'-O-methyladenosine-3'- phosphorothioate
  modified_base 3: mod_base = OTHER; note = 2'-O-methylguanosine-3'-phosphate
  modified_base 4: mod_base = OTHER; note = 2'-O-methyluridine-3'-phosphate
  modified_base 5: mod_base = OTHER; note = 2'-O-methylcytidine-3'-phosphate
  modified_base 6: mod_base = OTHER; note = 2'-O-methyladenosine-3'-phosphate
  modified_base 7: mod_base = OTHER; note = 2'-fluorouridine-3'-phosphate
  modified_base 8: mod_base = OTHER; note = 2'-O-methylcytidine-3'-phosphate
  modified_base 9: mod_base = OTHER; note = 2'-fluoroguanosine-3'-phosphate
  modified_base 10: mod_base = OTHER; note = 2'-fluoroadenosine-3'-phosphate
  modified_base 11: mod_base = OTHER; note = 2'-fluorocytidine-3'-phosphate
  modified_base 12: mod_base = OTHER; note = 2'-O-methyladenosine-3'-phosphate
  modified_base 13: mod_base = OTHER; note = 2'-O-methyladenosine-3'-phosphate
  modified_base 14: mod_base = OTHER; note = 2'-O-methylguanosine-3'-phosphate
  modified_base 15: mod_base = OTHER; note = 2'-O-methyladenosine-3'-phosphate
  modified_base 16: mod_base = OTHER; note = 2'-O-methylcytidine-3'-phosphate
  modified_base 17: mod_base = OTHER; note = 2'-O-methyladenosine-3'-phosphate
  modified_base 18: mod_base = OTHER; note = 2'-O-methyluridine-3'-phosphate
  modified_base 19: mod_base = OTHER; note = 2'-O-methyluridine-3'-phosphate
  modified_base 20: mod_base = OTHER; note = 2'-O-methylguanosine-3'-phosphate
  modified_base 21: mod_base = OTHER; note 2'-O-methylguanosine-3'-phosphate-N-[tris(GalNAc-alkyl)-ami dodecanoyl)]-4-hydroxyprolinol (Hyp-(GalNAc-alkyl)3)
aagtcatcgacaagacattgg

SEQ ID NO: 2621 - RNA, 23 nt, synthetic construct
  source 1..23: mol_type = other RNA
  modified_base 1: mod_base = OTHER; note = 2'-O-methylcytidine-3'- phosphorothioate
  modified_base 2: mod_base = OTHER; note = 2'-fluorocytidine-3'-phosphorothioate
  modified_base 3: mod_base = OTHER; note = 2'-O-methyladenosine-3'-phosphate
  modified_base 4: mod_base = OTHER; note = 2'-O-methyladenosine-3'-phosphate
  modified_base 5: mod_base = OTHER; note = 2'-O-methyluridine-3'-phosphate
  modified_base 6: mod_base = OTHER; note = 2'-fluoroguanosine-3'-phosphate
  modified_base 7: mod_base = OTHER; note = 2'-O-methyluridine-3'-phosphate
  modified_base 8: mod_base = OTHER; note = 2'-fluorocytidine-3'-phosphate
  modified_base 9: mod_base = OTHER; note = 2'-fluorouridine-3'-phosphate
  modified_base 10: mod_base = OTHER; note = 2'-O-methyluridine-3'-phosphate
  modified_base 11: mod_base = OTHER; note = 2'-O-methylguanosine-3'-phosphate
  modified_base 12: mod_base = OTHER; note = 2'-O-methyluridine-3'-phosphate
  modified_base 13: mod_base = OTHER; note = 2'-O-methylcytidine-3'-phosphate
  modified_base 14: mod_base = OTHER; note = 2'-fluoroguanosine-3'-phosphate
  modified_base 15: mod_base = OTHER; note = 2'-O-methyladenosine-3'-phosphate
  modified_base 16: mod_base = OTHER; note = 2'-fluorouridine-3'-phosphate
  modified_base 17: mod_base = OTHER; note = 2'-O-methylguanosine-3'-phosphate
  modified_base 18: mod_base = OTHER; note = 2'-O-methyladenosine-3'-phosphate
  modified_base 19: mod_base = OTHER; note = 2'-O-methylcytidine-3'-phosphate
  modified_base 20: mod_base = OTHER; note = 2'-O-methyluridine-3'-phosphate
  modified_base 21: mod_base = OTHER; note = 2'-O-methyluridine-3'-phosphorothioate
  modified_base 22: mod_base = OTHER; note = 2'-O-methyluridine-3'-phosphorothioate
  modified_base 23: mod_base = OTHER; note = 2'-O-methylcytidine-3'-phosphate
ccaatgtcttgtcgatgactttc

SEQ ID NO: 2622 - RNA, 21 nt, synthetic construct
  source 1..21: mol_type = other RNA
  modified_base 1: mod_base = OTHER; note = 2'-O-methyluridine-3'-phosphorothioate
  modified_base 2: mod_base = OTHER; note = 2'-O-methylguanosine-3'- phosphorothioate
  modified_base 3: mod_base = OTHER; note = 2'-O-methyluridine-3'-phosphate
  modified_base 4: mod_base = OTHER; note = 2'-O-methylguanosine-3'-phosphate
  modified_base 5: mod_base = OTHER; note = 2'-O-methyladenosine-3'-phosphate
  modified_base 6: mod_base = OTHER; note = 2'-O-methyladenosine-3'-phosphate
  modified_base 7: mod_base = OTHER; note = 2'-fluoroadenosine-3'-phosphate
  modified_base 8: mod_base = OTHER; note = 2'-O-methylguanosine-3'-phosphate
  modified_base 9: mod_base = OTHER; note = 2'-fluorouridine-3'-phosphate
  modified_base 10: mod_base = OTHER; note = 2'-fluorocytidine-3'-phosphate
  modified_base 11: mod_base = OTHER; note = 2'-fluoroadenosine-3'-phosphate
  modified_base 12: mod_base = OTHER; note = 2'-O-methyluridine-3'-phosphate
  modified_base 13: mod_base = OTHER; note = 2'-O-methylcytidine-3'-phosphate
  modified_base 14: mod_base = OTHER; note = 2'-O-methylguanosine-3'-phosphate
  modified_base 15: mod_base = OTHER; note = 2'-O-methyladenosine-3'-phosphate
  modified_base 16: mod_base = OTHER; note = 2'-O-methylcytidine-3'-phosphate
  modified_base 17: mod_base = OTHER; note = 2'-O-methyladenosine-3'-phosphate
  modified_base 18: mod_base = OTHER; note = 2'-O-methyladenosine-3'-phosphate
  modified_base 19: mod_base = OTHER; note = 2'-O-methylguanosine-3'-phosphate
  modified_base 20: mod_base = OTHER; note = 2'-O-methyladenosine-3'-phosphate
  modified_base 21: mod_base = OTHER; note 2'-O-methylcytidine-3'-phosphate-N-[tris(GalNAc-alkyl)-amid odecanoyl)]-4-hydroxyprolinol (Hyp-(GalNAc-alkyl)3)
tgtgaaagtcatcgacaagac

SEQ ID NO: 2623 - RNA, 23 nt, synthetic construct
  source 1..23: mol_type = other RNA
  modified_base 1: mod_base = OTHER; note = 2'-O-methylguanosine-3'- phosphorothioate
  modified_base 2: mod_base = OTHER; note = 2'-fluorouridine -3'-phosphorothioate
  modified_base 3: mod_base = OTHER; note = 2'-O-methylcytidine-3'-phosphate
  modified_base 4: mod_base = OTHER; note = 2'-O-methyluridine-3'-phosphate
  modified_base 5: mod_base = OTHER; note = 2'-O-methyluridine-3'-phosphate
  modified_base 6: mod_base = OTHER; note = 2'-fluoroguanosine-3'-phosphate
  modified_base 7: mod_base = OTHER; note = 2'-O-methyluridine-3'-phosphate
  modified_base 8: mod_base = OTHER; note = 2'-fluorocytidine-3'-phosphate
  modified_base 9: mod_base = OTHER; note = 2'-fluoroguanosine-3'-phosphate
  modified_base 10: mod_base = OTHER; note = 2'-O-methyladenosine-3'-phosphate
  modified_base 11: mod_base = OTHER; note = 2'-O-methyluridine-3'-phosphate
  modified_base 12: mod_base = OTHER; note = 2'-O-methylguanosine-3'-phosphate
  modified_base 13: mod_base = OTHER; note = 2'-O-methyladenosine-3'-phosphate
  modified_base 14: mod_base = OTHER; note = 2'-fluorocytidine-3'-phosphate
  modified_base 15: mod_base = OTHER; note = 2'-O-methyluridine-3'-phosphate
  modified_base 16: mod_base = OTHER; note = 2'-fluorouridine-3'-phosphate
  modified_base 17: mod_base = OTHER; note = 2'-O-methyluridine-3'-phosphate
  modified_base 18: mod_base = OTHER; note = 2'-O-methylcytidine-3'-phosphate
  modified_base 19: mod_base = OTHER; note = 2'-O-methyladenosine-3'-phosphate
  modified_base 20: mod_base = OTHER; note = 2'-O-methylcytidine-3'-phosphate
  modified_base 21: mod_base = OTHER; note = 2'-O-methyladenosine-3'- phosphorothioate
  modified_base 22: mod_base = OTHER; note = 2'-O-methyluridine-3'-phosphorothioate
  modified_base 23: mod_base = OTHER; note = 2'-O-methyluridine-3'-phosphate
gtcttgtcgatgactttcacatt

SEQ ID NO: 2624 - RNA, 21 nt, synthetic construct
  source 1..21: mol_type = other RNA
  modified_base 1: mod_base = OTHER; note = 2'-O-methyladenosine-3'- phosphorothioate
  modified_base 2: mod_base = OTHER; note = 2'-O-methyluridine-3'-phosphorothioate
  modified_base 3: mod_base = OTHER; note = 2'-O-methylguanosine-3'-phosphate
  modified_base 4: mod_base = OTHER; note = 2'-O-methyluridine-3'-phosphate
  modified_base 5: mod_base = OTHER; note = 2'-O-methylguanosine-3'-phosphate
  modified_base 6: mod_base = OTHER; note = 2'-O-methyladenosine-3'-phosphate
  modified_base 7: mod_base = OTHER; note = 2'-fluoroadenosine-3'-phosphate
  modified_base 8: mod_base = OTHER; note = 2'-O-methyladenosine-3'-phosphate
  modified_base 9: mod_base = OTHER; note = 2'-fluoroguanosine-3'-phosphate
  modified_base 10: mod_base = OTHER; note = 2'-fluorouridine-3'-phosphate
  modified_base 11: mod_base = OTHER; note = 2'-fluorocytidine-3'-phosphate
  modified_base 12: mod_base = OTHER; note = 2'-O-methyladenosine-3'-phosphate
  modified_base 13: mod_base = OTHER; note = 2'-O-methyluridine-3'-phosphate
  modified_base 14: mod_base = OTHER; note = 2'-O-methylcytidine-3'-phosphate
  modified_base 15: mod_base = OTHER; note = 2'-O-methylguanosine-3'-phosphate
  modified_base 16: mod_base = OTHER; note = 2'-O-methyladenosine-3'-phosphate
  modified_base 17: mod_base = OTHER; note = 2'-O-methylcytidine-3'-phosphate
  modified_base 18: mod_base = OTHER; note = 2'-O-methyladenosine-3'-phosphate
  modified_base 19: mod_base = OTHER; note = 2'-O-methyladenosine-3'-phosphate
  modified_base 20: mod_base = OTHER; note = 2'-O-methylguanosine-3'-phosphate
  modified_base 21: mod_base = OTHER; note 2'-O-methyladenosine-3'-phosphate-N-[tris(GalNAc-alkyl)-ami dodecanoyl)]-4-hydroxyprolinol (Hyp-(GalNAc-alkyl)3)
atgtgaaagtcatcgacaaga

SEQ ID NO: 2625 - RNA, 23 nt, synthetic construct
  source 1..23: mol_type = other RNA
  modified_base 1: mod_base = OTHER; note = 2'-O-methyluridine-3'-phosphorothioate
  modified_base 2: mod_base = OTHER; note = 2'-fluorocytidine-3'-phosphorothioate
  modified_base 3: mod_base = OTHER; note = 2'-O-methyluridine-3'-phosphate
  modified_base 4: mod_base = OTHER; note = 2'-O-methyluridine-3'-phosphate
  modified_base 5: mod_base = OTHER; note = 2'-O-methylguanosine-3'-phosphate
  modified_base 6: mod_base = OTHER; note = 2'-fluorouridine-3'-phosphate
  modified_base 7: mod_base = OTHER; note = 2'-O-methylcytidine-3'-phosphate
  modified_base 8: mod_base = OTHER; note = 2'-fluoroguanosine-3'-phosphate
  modified_base 9: mod_base = OTHER; note = 2'-fluoroadenosine-3'-phosphate
  modified_base 10: mod_base = OTHER; note = 2'-O-methyluridine-3'-phosphate
  modified_base 11: mod_base = OTHER; note = 2'-O-methylguanosine-3'-phosphate
  modified_base 12: mod_base = OTHER; note = 2'-O-methyladenosine-3'-phosphate
  modified_base 13: mod_base = OTHER; note = 2'-O-methylcytidine-3'-phosphate
  modified_base 14: mod_base = OTHER; note = 2'-fluorouridine-3'-phosphate
  modified_base 15: mod_base = OTHER; note = 2'-O-methyluridine-3'-phosphate
  modified_base 16: mod_base = OTHER; note = 2'-fluorouridine-3'-phosphate
  modified_base 17: mod_base = OTHER; note = 2'-O-methylcytidine-3'-phosphate
  modified_base 18: mod_base = OTHER; note = 2'-O-methyladenosine-3'-phosphate
  modified_base 19: mod_base = OTHER; note = 2'-O-methylcytidine-3'-phosphate
  modified_base 20: mod_base = OTHER; note = 2'-O-methyladenosine-3'-phosphate
  modified_base 21: mod_base = OTHER; note = 2'-O-methyluridine-3'-phosphorothioate
  modified_base 22: mod_base = OTHER; note = 2'-O-methyluridine-3'-phosphorothioate
  modified_base 23: mod_base = OTHER; note = 2'-O-methylcytidine-3'-phosphate
tcttgtcgatgactttcacattc

SEQ ID NO: 2626 - RNA, 21 nt, synthetic construct
  source 1..21: mol_type = other RNA
  modified_base 1: mod_base = OTHER; note = 2'-O-methyladenosine-3'- phosphorothioate
  modified_base 2: mod_base = OTHER; note = 2'-O-methyluridine-3'-phosphorothioate
  modified_base 3: mod_base = OTHER; note = 2'-O-methyladenosine-3'-phosphate
  modified_base 4: mod_base = OTHER; note = 2'-O-methyluridine-3'-phosphate
  modified_base 5: mod_base = OTHER; note = 2'-O-methylguanosine-3'-phosphate
  modified_base 6: mod_base = OTHER; note = 2'-O-methyluridine-3'-phosphate
  modified_base 7: mod_base = OTHER; note = 2'-fluoroguanosine-3'-phosphate
  modified_base 8: mod_base = OTHER; note = 2'-O-methylguanosine-3'-phosphate
  modified_base 9: mod_base = OTHER; note = 2'-fluorocytidine-3'-phosphate
  modified_base 10: mod_base = OTHER; note = 2'-fluorouridine-3'-phosphate
  modified_base 11: mod_base = OTHER; note = 2'-fluoroadenosine-3'-phosphate
  modified_base 12: mod_base = OTHER; note = 2'-O-methyladenosine-3'-phosphate
  modified_base 13: mod_base = OTHER; note = 2'-O-methyladenosine-3'-phosphate
  modified_base 14: mod_base = OTHER; note = 2'-O-methylguanosine-3'-phosphate
  modified_base 15: mod_base = OTHER; note = 2'-O-methylcytidine-3'-phosphate
  modified_base 16: mod_base = OTHER; note = 2'-O-methyladenosine-3'-phosphate
  modified_base 17: mod_base = OTHER; note = 2'-O-methyladenosine-3'-phosphate
  modified_base 18: mod_base = OTHER; note = 2'-O-methyluridine-3'-phosphate
  modified_base 19: mod_base = OTHER; note = 2'-O-methyladenosine-3'-phosphate
  modified_base 20: mod_base = OTHER; note = 2'-O-methylguanosine-3'-phosphate
  modified_base 21: mod_base = OTHER; note 2'-O-methyladenosine-3'-phosphate-N-[tris(GalNAc-alkyl)-ami dodecanoyl)]-4-hydroxyprolinol (Hyp-(GalNAc-alkyl)3)
atatgtggctaaagcaataga

SEQ ID NO: 2627 - RNA, 23 nt, synthetic construct
  source 1..23: mol_type = other RNA
  modified_base 1: mod_base = OTHER; note = 2'-O-methyluridine-3'-phosphorothioate
  modified_base 2: mod_base = OTHER; note = 2'-fluorocytidine-3'-phosphorothioate
  modified_base 3: mod_base = OTHER; note = 2'-O-methyluridine-3'-phosphate
  modified_base 4: mod_base = OTHER; note = 2'-O-methyladenosine-3'-phosphate
  modified_base 5: mod_base = OTHER; note = 2'-O-methyluridine-3'-phosphate
  modified_base 6: mod_base = OTHER; note = 2'-fluorouridine-3'-phosphate
  modified_base 7: mod_base = OTHER; note = 2'-O-methylguanosine-3'-phosphate
  modified_base 8: mod_base = OTHER; note = 2'-fluorocytidine-3'-phosphate
  modified_base 9: mod_base = OTHER; note = 2'-fluorouridine-3'-phosphate
  modified_base 10: mod_base = OTHER; note = 2'-O-methyluridine-3'-phosphate
  modified_base 11: mod_base = OTHER; note = 2'-O-methyluridine-3'-phosphate
  modified_base 12: mod_base = OTHER; note = 2'-O-methyladenosine-3'-phosphate
  modified_base 13: mod_base = OTHER; note = 2'-O-methylguanosine-3'-phosphate
  modified_base 14: mod_base = OTHER; note = 2'-fluorocytidine-3'-phosphate
  modified_base 15: mod_base = OTHER; note = 2'-O-methylcytidine-3'-phosphate
  modified_base 16: mod_base = OTHER; note = 2'-fluoroadenosine-3'-phosphate
  modified_base 17: mod_base = OTHER; note = 2'-O-methylcytidine-3'-phosphate
  modified_base 18: mod_base = OTHER; note = 2'-O-methyladenosine-3'-phosphate
  modified_base 19: mod_base = OTHER; note = 2'-O-methyluridine-3'-phosphate
  modified_base 20: mod_base = OTHER; note = 2'-O-methyladenosine-3'-phosphate
  modified_base 21: mod_base = OTHER; note = 2'-O-methyluridine-3'-phosphorothioate
  modified_base 22: mod_base = OTHER; note = 2'-O-methylguanosine-3'- phosphorothioate
  modified_base 23: mod_base = OTHER; note = 2'-O-methylcytidine-3'-phosphate
tctattgctttagccacatatgc

SEQ ID NO: 2628 - RNA, 21 nt, synthetic construct
  source 1..21: mol_type = other RNA
  modified_base 1: mod_base = OTHER; note = 2'-O-methyluridine-3'-phosphorothioate
  modified_base 2: mod_base = OTHER; note = 2'-O-methyladenosine-3'- phosphorothioate
  modified_base 3: mod_base = OTHER; note = 2'-O-methyluridine-3'-phosphate
  modified_base 4: mod_base = OTHER; note = 2'-O-methylguanosine-3'-phosphate
  modified_base 5: mod_base = OTHER; note = 2'-O-methyluridine-3'-phosphate
  modified_base 6: mod_base = OTHER; note = 2'-O-methylguanosine-3'-phosphate
  modified_base 7: mod_base = OTHER; note = 2'-fluoroguanosine-3'-phosphate
  modified_base 8: mod_base = OTHER; note = 2'-O-methylcytidine-3'-phosphate
  modified_base 9: mod_base = OTHER; note = 2'-fluorouridine-3'-phosphate
  modified_base 10: mod_base = OTHER; note = 2'-fluoroadenosine-3'-phosphate
  modified_base 11: mod_base = OTHER; note = 2'-fluoroadenosine-3'-phosphate
  modified_base 12: mod_base = OTHER; note = 2'-O-methyladenosine-3'-phosphate
  modified_base 13: mod_base = OTHER; note = 2'-O-methylguanosine-3'-phosphate
  modified_base 14: mod_base = OTHER; note = 2'-O-methylcytidine-3'-phosphate
  modified_base 15: mod_base = OTHER; note = 2'-O-methyladenosine-3'-phosphate
  modified_base 16: mod_base = OTHER; note = 2'-O-methyladenosine-3'-phosphate
  modified_base 17: mod_base = OTHER; note = 2'-O-methyluridine-3'-phosphate
  modified_base 18: mod_base = OTHER; note = 2'-O-methyladenosine-3'-phosphate
  modified_base 19: mod_base = OTHER; note = 2'-O-methylguanosine-3'-phosphate
  modified_base 20: mod_base = OTHER; note = 2'-O-methyladenosine-3'-phosphate
  modified_base 21: mod_base = OTHER; note 2'-O-methylcytidine-3'-phosphate-N-[tris(GalNAc-alkyl)-amid odecanoyl)]-4-hydroxyprolinol (Hyp-(GalNAc-alkyl)3)
tatgtggctaaagcaatagac

SEQ ID NO: 2629 - RNA, 23 nt, synthetic construct
  source 1..23: mol_type = other RNA
  modified_base 1: mod_base = OTHER; note = 2'-O-methylguanosine-3'- phosphorothioate
  modified_base 2: mod_base = OTHER; note = 2'-fluorouridine -3'-phosphorothioate
  modified_base 3: mod_base = OTHER; note = 2'-O-methylcytidine-3'-phosphate
  modified_base 4: mod_base = OTHER; note = 2'-O-methyluridine-3'-phosphate
  modified_base 5: mod_base = OTHER; note = 2'-O-methyladenosine-3'-phosphate
  modified_base 6: mod_base = OTHER; note = 2'-fluorouridine-3'-phosphate
  modified_base 7: mod_base = OTHER; note = 2'-O-methyluridine-3'-phosphate
  modified_base 8: mod_base = OTHER; note = 2'-fluoroguanosine-3'-phosphate
  modified_base 9: mod_base = OTHER; note = 2'-fluorocytidine-3'-phosphate
  modified_base 10: mod_base = OTHER; note = 2'-O-methyluridine-3'-phosphate
  modified_base 11: mod_base = OTHER; note = 2'-O-methyluridine-3'-phosphate
  modified_base 12: mod_base = OTHER; note = 2'-O-methyluridine-3'-phosphate
  modified_base 13: mod_base = OTHER; note = 2'-O-methyladenosine-3'-phosphate
  modified_base 14: mod_base = OTHER; note = 2'-fluoroguanosine-3'-phosphate
  modified_base 15: mod_base = OTHER; note = 2'-O-methylcytidine-3'-phosphate
  modified_base 16: mod_base = OTHER; note = 2'-fluorocytidine-3'-phosphate
  modified_base 17: mod_base = OTHER; note = 2'-O-methyladenosine-3'-phosphate
  modified_base 18: mod_base = OTHER; note = 2'-O-methylcytidine-3'-phosphate
  modified_base 19: mod_base = OTHER; note = 2'-O-methyladenosine-3'-phosphate
  modified_base 20: mod_base = OTHER; note = 2'-O-methyluridine-3'-phosphate
  modified_base 21: mod_base = OTHER; note = 2'-O-methyladenosine-3'- phosphorothioate
  modified_base 22: mod_base = OTHER; note = 2'-O-methyluridine-3'-phosphorothioate
  modified_base 23: mod_base = OTHER; note = 2'-O-methylguanosine-3'-phosphate
gtctattgctttagccacatatg

SEQ ID NO: 2630 - RNA, 21 nt, synthetic construct
  source 1..21: mol_type = other RNA
  modified_base 1: mod_base = OTHER; note = 2'-O-methylcytidine-3'- phosphorothioate
  modified_base 2: mod_base = OTHER; note = 2'-O-methyluridine-3'-phosphorothioate
  modified_base 3: mod_base = OTHER; note = 2'-O-methylguanosine-3'-phosphate
  modified_base 4: mod_base = OTHER; note = 2'-O-methylcytidine-3'-phosphate
  modified_base 5: mod_base = OTHER; note = 2'-O-methyladenosine-3'-phosphate
  modified_base 6: mod_base = OTHER; note = 2'-O-methyluridine-3'-phosphate
  modified_base 7: mod_base = OTHER; note = 2'-fluoroadenosine-3'-phosphate
  modified_base 8: mod_base = OTHER; note = 2'-O-methyluridine-3'-phosphate
  modified_base 9: mod_base = OTHER; note = 2'-fluoroguanosine-3'-phosphate
  modified_base 10: mod_base = OTHER; note = 2'-fluorouridine-3'-phosphate
  modified_base 11: mod_base = OTHER; note = 2'-fluoroguanosine-3'-phosphate
  modified_base 12: mod_base = OTHER; note = 2'-O-methylguanosine-3'-phosphate
  modified_base 13: mod_base = OTHER; note = 2'-O-methylcytidine-3'-phosphate
  modified_base 14: mod_base = OTHER; note = 2'-O-methyluridine-3'-phosphate
  modified_base 15: mod_base = OTHER; note = 2'-O-methyladenosine-3'-phosphate
  modified_base 16: mod_base = OTHER; note = 2'-O-methyladenosine-3'-phosphate
  modified_base 17: mod_base = OTHER; note = 2'-O-methyladenosine-3'-phosphate
  modified_base 18: mod_base = OTHER; note = 2'-O-methylguanosine-3'-phosphate
  modified_base 19: mod_base = OTHER; note = 2'-O-methylcytidine-3'-phosphate
  modified_base 20: mod_base = OTHER; note = 2'-O-methyladenosine-3'-phosphate
  modified_base 21: mod_base = OTHER; note 2'-O-methyladenosine-3'-phosphate-N-[tris(GalNAc-alkyl)-ami dodecanoyl)]-4-hydroxyprolinol (Hyp-(GalNAc-alkyl)3)
ctgcatatgtggctaaagcaa

SEQ ID NO: 2631 - RNA, 23 nt, synthetic construct
  source 1..23: mol_type = other RNA
  modified_base 1: mod_base = OTHER; note = 2'-O-methyluridine-3'-phosphorothioate
  modified_base 2: mod_base = OTHER; note = 2'-fluorouridine -3'-phosphorothioate
  modified_base 3: mod_base = OTHER; note = 2'-O-methylguanosine-3'-phosphate
  modified_base 4: mod_base = OTHER; note = 2'-O-methylcytidine-3'-phosphate
  modified_base 5: mod_base = OTHER; note = 2'-O-methyluridine-3'-phosphate
  modified_base 6: mod_base = OTHER; note = 2'-fluorouridine-3'-phosphate
  modified_base 7: mod_base = OTHER; note = 2'-O-methyluridine-3'-phosphate
  modified_base 8: mod_base = OTHER; note = 2'-fluoroadenosine-3'-phosphate
  modified_base 9: mod_base = OTHER; note = 2'-fluoroguanosine-3'-phosphate
  modified_base 10: mod_base = OTHER; note = 2'-O-methylcytidine-3'-phosphate
  modified_base 11: mod_base = OTHER; note = 2'-O-methylcytidine-3'-phosphate
  modified_base 12: mod_base = OTHER; note = 2'-O-methyladenosine-3'-phosphate
  modified_base 13: mod_base = OTHER; note = 2'-O-methylcytidine-3'-phosphate
  modified_base 14: mod_base = OTHER; note = 2'-fluoroadenosine-3'-phosphate
  modified_base 15: mod_base = OTHER; note = 2'-O-methyluridine-3'-phosphate
  modified_base 16: mod_base = OTHER; note = 2'-fluoroadenosine-3'-phosphate
  modified_base 17: mod_base = OTHER; note = 2'-O-methyluridine-3'-phosphate
  modified_base 18: mod_base = OTHER; note = 2'-O-methylguanosine-3'-phosphate
  modified_base 19: mod_base = OTHER; note = 2'-O-methylcytidine-3'-phosphate
  modified_base 20: mod_base = OTHER; note = 2'-O-methyladenosine-3'-phosphate
  modified_base 21: mod_base = OTHER; note = 2'-O-methylguanosine-3'- phosphorothioate
  modified_base 22: mod_base = OTHER; note = 2'-O-methylcytidine-3'- phosphorothioate
  modified_base 23: mod_base = OTHER; note = 2'-O-methyladenosine-3'-phosphate
ttgctttagccacatatgcagca

SEQ ID NO: 2632 - RNA, 21 nt, synthetic construct
  source 1..21: mol_type = other RNA
  modified_base 1: mod_base = OTHER; note = 2'-O-methylguanosine-3'- phosphorothioate
  modified_base 2: mod_base = OTHER; note = 2'-O-methylcytidine-3'- phosphorothioate
  modified_base 3: mod_base = OTHER; note = 2'-O-methyluridine-3'-phosphate
  modified_base 4: mod_base = OTHER; note = 2'-O-methylguanosine-3'-phosphate
  modified_base 5: mod_base = OTHER; note = 2'-O-methylcytidine-3'-phosphate
  modified_base 6: mod_base = OTHER; note = 2'-O-methyladenosine-3'-phosphate
  modified_base 7: mod_base = OTHER; note = 2'-fluorouridine-3'-phosphate
  modified_base 8: mod_base = OTHER; note = 2'-O-methyladenosine-3'-phosphate
  modified_base 9: mod_base = OTHER; note = 2'-fluorouridine-3'-phosphate
  modified_base 10: mod_base = OTHER; note = 2'-fluoroguanosine-3'-phosphate
  modified_base 11: mod_base = OTHER; note = 2'-fluorouridine-3'-phosphate
  modified_base 12: mod_base = OTHER; note = 2'-O-methylguanosine-3'-phosphate
  modified_base 13: mod_base = OTHER; note = 2'-O-methylguanosine-3'-phosphate
  modified_base 14: mod_base = OTHER; note = 2'-O-methylcytidine-3'-phosphate
  modified_base 15: mod_base = OTHER; note = 2'-O-methyluridine-3'-phosphate
  modified_base 16: mod_base = OTHER; note = 2'-O-methyladenosine-3'-phosphate
  modified_base 17: mod_base = OTHER; note = 2'-O-methyladenosine-3'-phosphate
  modified_base 18: mod_base = OTHER; note = 2'-O-methyladenosine-3'-phosphate
  modified_base 19: mod_base = OTHER; note = 2'-O-methylguanosine-3'-phosphate
  modified_base 20: mod_base = OTHER; note = 2'-O-methylcytidine-3'-phosphate
  modified_base 21: mod_base = OTHER; note 2'-O-methyladenosine-3'-phosphate-N-[tris(GalNAc-alkyl)-ami dodecanoyl)]-4-hydroxyprolinol (Hyp-(GalNAc-alkyl)3)
gctgcatatgtggctaaagca

SEQ ID NO: 2633 - RNA, 23 nt, synthetic construct
  source 1..23: mol_type = other RNA
  modified_base 1: mod_base = OTHER; note = 2'-O-methyluridine-3'-phosphorothioate
  modified_base 2: mod_base = OTHER; note = 2'-fluoroguanosine-3'-phosphorothioate
  modified_base 3: mod_base = OTHER; note = 2'-O-methylcytidine-3'-phosphate
  modified_base 4: mod_base = OTHER; note = 2'-O-methyluridine-3'-phosphate
  modified_base 5: mod_base = OTHER; note = 2'-O-methyluridine-3'-phosphate
  modified_base 6: mod_base = OTHER; note = 2'-fluorouridine-3'-phosphate
  modified_base 7: mod_base = OTHER; note = 2'-O-methyladenosine-3'-phosphate
  modified_base 8: mod_base = OTHER; note = 2'-fluoroguanosine-3'-phosphate
  modified_base 9: mod_base = OTHER; note = 2'-fluorocytidine-3'-phosphate
  modified_base 10: mod_base = OTHER; note = 2'-O-methylcytidine-3'-phosphate
  modified_base 11: mod_base = OTHER; note = 2'-O-methyladenosine-3'-phosphate
  modified_base 12: mod_base = OTHER; note = 2'-O-methylcytidine-3'-phosphate
  modified_base 13: mod_base = OTHER; note = 2'-O-methyladenosine-3'-phosphate
  modified_base 14: mod_base = OTHER; note = 2'-fluorouridine-3'-phosphate
  modified_base 15: mod_base = OTHER; note = 2'-O-methyladenosine-3'-phosphate
  modified_base 16: mod_base = OTHER; note = 2'-fluorouridine-3'-phosphate
  modified_base 17: mod_base = OTHER; note = 2'-O-methylguanosine-3'-phosphate
  modified_base 18: mod_base = OTHER; note = 2'-O-methylcytidine-3'-phosphate
  modified_base 19: mod_base = OTHER; note = 2'-O-methyladenosine-3'-phosphate
  modified_base 20: mod_base = OTHER; note = 2'-O-methylguanosine-3'-phosphate
  modified_base 21: mod_base = OTHER; note = 2'-O-methylcytidine-3'- phosphorothioate
  modified_base 22: mod_base = OTHER; note = 2'-O-methyladenosine-3'- phosphorothioate
  modified_base 23: mod_base = OTHER; note = 2'-O-methyladenosine-3'-phosphate
tgctttagccacatatgcagcaa

SEQ ID NO: 2634 - RNA, 21 nt, synthetic construct
  source 1..21: mol_type = other RNA
  modified_base 1: mod_base = OTHER; note = 2'-O-methyladenosine-3'- phosphorothioate
  modified_base 2: mod_base = OTHER; note = 2'-O-methylguanosine-3'- phosphorothioate
  modified_base 3: mod_base = OTHER; note = 2'-O-methyladenosine-3'-phosphate
  modified_base 4: mod_base = OTHER; note = 2'-O-methylcytidine-3'-phosphate
  modified_base 5: mod_base = OTHER; note = 2'-O-methylguanosine-3'-phosphate
  modified_base 6: mod_base = OTHER; note = 2'-O-methyladenosine-3'-phosphate
  modified_base 7: mod_base = OTHER; note = 2'-fluorocytidine-3'-phosphate
  modified_base 8: mod_base = OTHER; note = 2'-O-methyladenosine-3'-phosphate
  modified_base 9: mod_base = OTHER; note = 2'-fluoroguanosine-3'-phosphate
  modified_base 10: mod_base = OTHER; note = 2'-fluorouridine-3'-phosphate
  modified_base 11: mod_base = OTHER; note = 2'-fluoroguanosine-3'-phosphate
  modified_base 12: mod_base = OTHER; note = 2'-O-methylguanosine-3'-phosphate
  modified_base 13: mod_base = OTHER; note = 2'-O-methyladenosine-3'-phosphate
  modified_base 14: mod_base = OTHER; note = 2'-O-methylcytidine-3'-phosphate
  modified_base 15: mod_base = OTHER; note = 2'-O-methyluridine-3'-phosphate
  modified_base 16: mod_base = OTHER; note = 2'-O-methyluridine-3'-phosphate
  modified_base 17: mod_base = OTHER; note = 2'-O-methylguanosine-3'-phosphate
  modified_base 18: mod_base = OTHER; note = 2'-O-methylcytidine-3'-phosphate
  modified_base 19: mod_base = OTHER; note = 2'-O-methyluridine-3'-phosphate
  modified_base 20: mod_base = OTHER; note = 2'-O-methylguanosine-3'-phosphate
  modified_base 21: mod_base = OTHER; note 2'-O-methylcytidine-3'-phosphate-N-[tris(GalNAc-alkyl)-amid odecanoyl)]-4-hydroxyprolinol (Hyp-(GalNAc-alkyl)3)
agacgacagtggacttgctgc

SEQ ID NO: 2635 - RNA, 23 nt, synthetic construct
  source 1..23: mol_type = other RNA
  modified_base 1: mod_base = OTHER; note = 2'-O-methylguanosine-3'- phosphorothioate
  modified_base 2: mod_base = OTHER; note = 2'-fluorocytidine-3'-phosphorothioate
  modified_base 3: mod_base = OTHER; note = 2'-O-methyladenosine-3'-phosphate
  modified_base 4: mod_base = OTHER; note = 2'-O-methylguanosine-3'-phosphate
  modified_base 5: mod_base = OTHER; note = 2'-O-methylcytidine-3'-phosphate
  modified_base 6: mod_base = OTHER; note = 2'-fluoroadenosine-3'-phosphate
  modified_base 7: mod_base = OTHER; note = 2'-O-methyladenosine-3'-phosphate
  modified_base 8: mod_base = OTHER; note = 2'-fluoroguanosine-3'-phosphate
  modified_base 9: mod_base = OTHER; note = 2'-fluorouridine-3'-phosphate
  modified_base 10: mod_base = OTHER; note = 2'-O-methylcytidine-3'-phosphate
  modified_base 11: mod_base = OTHER; note = 2'-O-methylcytidine-3'-phosphate
  modified_base 12: mod_base = OTHER; note = 2'-O-methyladenosine-3'-phosphate
  modified_base 13: mod_base = OTHER; note = 2'-O-methylcytidine-3'-phosphate
  modified_base 14: mod_base = OTHER; note = 2'-fluorouridine-3'-phosphate
  modified_base 15: mod_base = OTHER; note = 2'-O-methylguanosine-3'-phosphate
  modified_base 16: mod_base = OTHER; note = 2'-fluorouridine-3'-phosphate
  modified_base 17: mod_base = OTHER; note = 2'-O-methylcytidine-3'-phosphate
  modified_base 18: mod_base = OTHER; note = 2'-O-methylguanosine-3'-phosphate
  modified_base 19: mod_base = OTHER; note = 2'-O-methyluridine-3'-phosphate
  modified_base 20: mod_base = OTHER; note = 2'-O-methylcytidine-3'-phosphate
  modified_base 21: mod_base = OTHER; note = 2'-O-methyluridine-3'-phosphorothioate
  modified_base 22: mod_base = OTHER; note = 2'-O-methylcytidine-3'- phosphorothioate
  modified_base 23: mod_base = OTHER; note = 2'-O-methylcytidine-3'-phosphate
gcagcaagtccactgtcgtctcc

SEQ ID NO: 2636 - RNA, 21 nt, synthetic construct
  source 1..21: mol_type = other RNA
  modified_base 1: mod_base = OTHER; note = 2'-O-methylguanosine-3'- phosphorothioate
  modified_base 2: mod_base = OTHER; note = 2'-O-methyladenosine-3'- phosphorothioate
  modified_base 3: mod_base = OTHER; note = 2'-O-methylcytidine-3'-phosphate
  modified_base 4: mod_base = OTHER; note = 2'-O-methylguanosine-3'-phosphate
  modified_base 5: mod_base = OTHER; note = 2'-O-methyladenosine-3'-phosphate
  modified_base 6: mod_base = OTHER; note = 2'-O-methylcytidine-3'-phosphate
  modified_base 7: mod_base = OTHER; note = 2'-fluoroadenosine-3'-phosphate
  modified_base 8: mod_base = OTHER; note = 2'-O-methylguanosine-3'-phosphate
  modified_base 9: mod_base = OTHER; note = 2'-fluorouridine-3'-phosphate
  modified_base 10: mod_base = OTHER; note = 2'-fluoroguanosine-3'-phosphate
  modified_base 11: mod_base = OTHER; note = 2'-fluoroguanosine-3'-phosphate
  modified_base 12: mod_base = OTHER; note = 2'-O-methyladenosine-3'-phosphate
  modified_base 13: mod_base = OTHER; note = 2'-O-methylcytidine-3'-phosphate
  modified_base 14: mod_base = OTHER; note = 2'-O-methyluridine-3'-phosphate
  modified_base 15: mod_base = OTHER; note = 2'-O-methyluridine-3'-phosphate
  modified_base 16: mod_base = OTHER; note = 2'-O-methylguanosine-3'-phosphate
  modified_base 17: mod_base = OTHER; note = 2'-O-methylcytidine-3'-phosphate
  modified_base 18: mod_base = OTHER; note = 2'-O-methyluridine-3'-phosphate
  modified_base 19: mod_base = OTHER; note = 2'-O-methylguanosine-3'-phosphate
  modified_base 20: mod_base = OTHER; note = 2'-O-methylcytidine-3'-phosphate
  modified_base 21: mod_base = OTHER; note 2'-O-methyladenosine-3'-phosphate-N-[tris(GalNAc-alkyl)-ami dodecanoyl)]-4-hydroxyprolinol (Hyp-(GalNAc-alkyl)3)
gacgacagtggacttgctgca

SEQ ID NO: 2637 - RNA, 23 nt, synthetic construct
  source 1..23: mol_type = other RNA
  modified_base 1: mod_base = OTHER; note = 2'-O-methyluridine-3'-phosphorothioate
  modified_base 2: mod_base = OTHER; note = 2'-fluoroguanosine-3'-phosphorothioate
  modified_base 3: mod_base = OTHER; note = 2'-O-methylcytidine-3'-phosphate
  modified_base 4: mod_base = OTHER; note = 2'-O-methyladenosine-3'-phosphate
  modified_base 5: mod_base = OTHER; note = 2'-O-methylguanosine-3'-phosphate
  modified_base 6: mod_base = OTHER; note = 2'-fluorocytidine-3'-phosphate
  modified_base 7: mod_base = OTHER; note = 2'-O-methyladenosine-3'-phosphate
  modified_base 8: mod_base = OTHER; note = 2'-fluoroadenosine-3'-phosphate
  modified_base 9: mod_base = OTHER; note = 2'-fluoroguanosine-3'-phosphate
  modified_base 10: mod_base = OTHER; note = 2'-O-methyluridine-3'-phosphate
  modified_base 11: mod_base = OTHER; note = 2'-O-methylcytidine-3'-phosphate
  modified_base 12: mod_base = OTHER; note = 2'-O-methylcytidine-3'-phosphate
  modified_base 13: mod_base = OTHER; note = 2'-O-methyladenosine-3'-phosphate
  modified_base 14: mod_base = OTHER; note = 2'-fluorocytidine-3'-phosphate
  modified_base 15: mod_base = OTHER; note = 2'-O-methyluridine-3'-phosphate
  modified_base 16: mod_base = OTHER; note = 2'-fluoroguanosine-3'-phosphate
  modified_base 17: mod_base = OTHER; note = 2'-O-methyluridine-3'-phosphate
  modified_base 18: mod_base = OTHER; note = 2'-O-methylcytidine-3'-phosphate
  modified_base 19: mod_base = OTHER; note = 2'-O-methylguanosine-3'-phosphate
  modified_base 20: mod_base = OTHER; note = 2'-O-methyluridine-3'-phosphate
  modified_base 21: mod_base = OTHER; note = 2'-O-methylcytidine-3'- phosphorothioate
  modified_base 22: mod_base = OTHER; note = 2'-O-methyluridine-3'-phosphorothioate
  modified_base 23: mod_base = OTHER; note = 2'-O-methylcytidine-3'-phosphate
tgcagcaagtccactgtcgtctc

SEQ ID NO: 2638 - RNA, 21 nt, synthetic construct
  source 1..21: mol_type = other RNA
  modified_base 1: mod_base = OTHER; note = 2'-O-methyluridine-3'-phosphorothioate
  modified_base 2: mod_base = OTHER; note = 2'-O-methyluridine-3'-phosphorothioate
  modified_base 3: mod_base = OTHER; note = 2'-O-methylguanosine-3'-phosphate
  modified_base 4: mod_base = OTHER; note = 2'-O-methylguanosine-3'-phosphate
  modified_base 5: mod_base = OTHER; note = 2'-O-methyladenosine-3'-phosphate
  modified_base 6: mod_base = OTHER; note = 2'-O-methylguanosine-3'-phosphate
  modified_base 7: mod_base = OTHER; note = 2'-fluoroadenosine-3'-phosphate
  modified_base 8: mod_base = OTHER; note = 2'-O-methylcytidine-3'-phosphate
  modified_base 9: mod_base = OTHER; note = 2'-fluoroguanosine-3'-phosphate
  modified_base 10: mod_base = OTHER; note = 2'-fluoroadenosine-3'-phosphate
  modified_base 11: mod_base = OTHER; note = 2'-fluorocytidine-3'-phosphate
  modified_base 12: mod_base = OTHER; note = 2'-O-methyladenosine-3'-phosphate
  modified_base 13: mod_base = OTHER; note = 2'-O-methylguanosine-3'-phosphate
  modified_base 14: mod_base = OTHER; note = 2'-O-methyluridine-3'-phosphate
  modified_base 15: mod_base = OTHER; note = 2'-O-methylguanosine-3'-phosphate
  modified_base 16: mod_base = OTHER; note = 2'-O-methylguanosine-3'-phosphate
  modified_base 17: mod_base = OTHER; note = 2'-O-methyladenosine-3'-phosphate
  modified_base 18: mod_base = OTHER; note = 2'-O-methylcytidine-3'-phosphate
  modified_base 19: mod_base = OTHER; note = 2'-O-methyluridine-3'-phosphate
  modified_base 20: mod_base = OTHER; note = 2'-O-methyluridine-3'-phosphate
  modified_base 21: mod_base = OTHER; note 2'-O-methylguanosine-3'-phosphate-N-[tris(GalNAc-alkyl)-ami dodecanoyl)]-4-hydroxyprolinol (Hyp-(GalNAc-alkyl)3)
ttggagacgacagtggacttg

SEQ ID NO: 2639 - RNA, 23 nt, synthetic construct
  source 1..23: mol_type = other RNA
  modified_base 1: mod_base = OTHER; note = 2'-O-methylcytidine-3'- phosphorothioate
  modified_base 2: mod_base = OTHER; note = 2'-fluoroadenosine-3'-phosphorothioate
  modified_base 3: mod_base = OTHER; note = 2'-O-methyladenosine-3'-phosphate
  modified_base 4: mod_base = OTHER; note = 2'-O-methylguanosine-3'-phosphate
  modified_base 5: mod_base = OTHER; note = 2'-O-methyluridine-3'-phosphate
  modified_base 6: mod_base = OTHER; note = 2'-fluorocytidine-3'-phosphate
  modified_base 7: mod_base = OTHER; note = 2'-O-methylcytidine-3'-phosphate
  modified_base 8: mod_base = OTHER; note = 2'-fluoroadenosine-3'-phosphate
  modified_base 9: mod_base = OTHER; note = 2'-fluorocytidine-3'-phosphate
  modified_base 10: mod_base = OTHER; note = 2'-O-methyluridine-3'-phosphate
  modified_base 11: mod_base = OTHER; note = 2'-O-methylguanosine-3'-phosphate
  modified_base 12: mod_base = OTHER; note = 2'-O-methyluridine-3'-phosphate
  modified_base 13: mod_base = OTHER; note = 2'-O-methylcytidine-3'-phosphate
  modified_base 14: mod_base = OTHER; note = 2'-fluoroguanosine-3'-phosphate
  modified_base 15: mod_base = OTHER; note = 2'-O-methyluridine-3'-phosphate
  modified_base 16: mod_base = OTHER; note = 2'-fluorocytidine-3'-phosphate
  modified_base 17: mod_base = OTHER; note = 2'-O-methyluridine-3'-phosphate
  modified_base 18: mod_base = OTHER; note = 2'-O-methylcytidine-3'-phosphate
  modified_base 19: mod_base = OTHER; note = 2'-O-methylcytidine-3'-phosphate
  modified_base 20: mod_base = OTHER; note = 2'-O-methyladenosine-3'-phosphate
  modified_base 21: mod_base = OTHER; note = 2'-O-methyladenosine-3'- phosphorothioate
  modified_base 22: mod_base = OTHER; note = 2'-O-methyladenosine-3'- phosphorothioate
  modified_base 23: mod_base = OTHER; note = 2'-O-methyladenosine-3'-phosphate
caagtccactgtcgtctccaaaa

SEQ ID NO: 2640 - RNA, 21 nt, synthetic construct
  source 1..21: mol_type = other RNA
  modified_base 1: mod_base = OTHER; note = 2'-O-methyluridine-3'-phosphorothioate
  modified_base 2: mod_base = OTHER; note = 2'-O-methyluridine-3'-phosphorothioate
  modified_base 3: mod_base = OTHER; note = 2'-O-methyluridine-3'-phosphate
  modified_base 4: mod_base = OTHER; note = 2'-O-methylguanosine-3'-phosphate
  modified_base 5: mod_base = OTHER; note = 2'-O-methylguanosine-3'-phosphate
  modified_base 6: mod_base = OTHER; note = 2'-O-methyladenosine-3'-phosphate
  modified_base 7: mod_base = OTHER; note = 2'-fluoroguanosine-3'-phosphate
  modified_base 8: mod_base = OTHER; note = 2'-O-methyladenosine-3'-phosphate
  modified_base 9: mod_base = OTHER; note = 2'-fluorocytidine-3'-phosphate
  modified_base 10: mod_base = OTHER; note = 2'-fluoroguanosine-3'-phosphate
  modified_base 11: mod_base = OTHER; note = 2'-fluoroadenosine-3'-phosphate
  modified_base 12: mod_base = OTHER; note = 2'-O-methylcytidine-3'-phosphate
  modified_base 13: mod_base = OTHER; note = 2'-O-methyladenosine-3'-phosphate
  modified_base 14: mod_base = OTHER; note = 2'-O-methylguanosine-3'-phosphate
  modified_base 15: mod_base = OTHER; note = 2'-O-methyluridine-3'-phosphate
  modified_base 16: mod_base = OTHER; note = 2'-O-methylguanosine-3'-phosphate
  modified_base 17: mod_base = OTHER; note = 2'-O-methylguanosine-3'-phosphate
  modified_base 18: mod_base = OTHER; note = 2'-O-methyladenosine-3'-phosphate
  modified_base 19: mod_base = OTHER; note = 2'-O-methylcytidine-3'-phosphate
  modified_base 20: mod_base = OTHER; note = 2'-O-methyluridine-3'-phosphate
  modified_base 21: mod_base = OTHER; note 2'-O-methyluridine-3'-phosphate-N-[tris(GalNAc-alkyl)-amido decanoyl)]-4-hydroxyprolinol (Hyp-(GalNAc-alkyl)3)
tttggagacgacagtggactt

SEQ ID NO: 2641 - RNA, 23 nt, synthetic construct
  source 1..23: mol_type = other RNA
  modified_base 1: mod_base = OTHER; note = 2'-O-methyladenosine-3'- phosphorothioate
  modified_base 2: mod_base = OTHER; note = 2'-fluoroadenosine-3'-phosphorothioate
  modified_base 3: mod_base = OTHER; note = 2'-O-methylguanosine-3'-phosphate
  modified_base 4: mod_base = OTHER; note = 2'-O-methyluridine-3'-phosphate
  modified_base 5: mod_base = OTHER; note = 2'-O-methylcytidine-3'-phosphate
  modified_base 6: mod_base = OTHER; note = 2'-fluorocytidine-3'-phosphate
  modified_base 7: mod_base = OTHER; note = 2'-O-methyladenosine-3'-phosphate
  modified_base 8: mod_base = OTHER; note = 2'-fluorocytidine-3'-phosphate
  modified_base 9: mod_base = OTHER; note = 2'-fluorouridine-3'-phosphate
  modified_base 10: mod_base = OTHER; note = 2'-O-methylguanosine-3'-phosphate
  modified_base 11: mod_base = OTHER; note = 2'-O-methyluridine-3'-phosphate
  modified_base 12: mod_base = OTHER; note = 2'-O-methylcytidine-3'-phosphate
  modified_base 13: mod_base = OTHER; note = 2'-O-methylguanosine-3'-phosphate
  modified_base 14: mod_base = OTHER; note = 2'-fluorouridine-3'-phosphate
  modified_base 15: mod_base = OTHER; note = 2'-O-methylcytidine-3'-phosphate
  modified_base 16: mod_base = OTHER; note = 2'-fluorouridine-3'-phosphate
  modified_base 17: mod_base = OTHER; note = 2'-O-methylcytidine-3'-phosphate
  modified_base 18: mod_base = OTHER; note = 2'-O-methylcytidine-3'-phosphate
  modified_base 19: mod_base = OTHER; note = 2'-O-methyladenosine-3'-phosphate
  modified_base 20: mod_base = OTHER; note = 2'-O-methyladenosine-3'-phosphate
  modified_base 21: mod_base = OTHER; note = 2'-O-methyladenosine-3'- phosphorothioate
  modified_base 22: mod_base = OTHER; note = 2'-O-methyladenosine-3'- phosphorothioate
  modified_base 23: mod_base = OTHER; note = 2'-O-methyluridine-3'-phosphate
aagtccactgtcgtctccaaaat

SEQ ID NO: 2642 - RNA, 21 nt, synthetic construct
  source 1..21: mol_type = other RNA
  modified_base 1: mod_base = OTHER; note = 2'-O-methylguanosine-3'- phosphorothioate
  modified_base 2: mod_base = OTHER; note = 2'-O-methylguanosine-3'- phosphorothioate
  modified_base 3: mod_base = OTHER; note = 2'-O-methylcytidine-3'-phosphate
  modified_base 4: mod_base = OTHER; note = 2'-O-methylcytidine-3'-phosphate
  modified_base 5: mod_base = OTHER; note = 2'-O-methyladenosine-3'-phosphate
  modified_base 6: mod_base = OTHER; note = 2'-O-methylcytidine-3'-phosphate
  modified_base 7: mod_base = OTHER; note = 2'-fluorocytidine-3'-phosphate
  modified_base 8: mod_base = OTHER; note = 2'-O-methyluridine-3'-phosphate
  modified_base 9: mod_base = OTHER; note = 2'-fluorocytidine-3'-phosphate
  modified_base 10: mod_base = OTHER; note = 2'-fluorocytidine-3'-phosphate
  modified_base 11: mod_base = OTHER; note = 2'-fluorouridine-3'-phosphate
  modified_base 12: mod_base = OTHER; note = 2'-O-methylcytidine-3'-phosphate
  modified_base 13: mod_base = OTHER; note = 2'-O-methyladenosine-3'-phosphate
  modified_base 14: mod_base = OTHER; note = 2'-O-methyladenosine-3'-phosphate
  modified_base 15: mod_base = OTHER; note = 2'-O-methyluridine-3'-phosphate
  modified_base 16: mod_base = OTHER; note = 2'-O-methyluridine-3'-phosphate
  modified_base 17: mod_base = OTHER; note = 2'-O-methylguanosine-3'-phosphate
  modified_base 18: mod_base = OTHER; note = 2'-O-methyladenosine-3'-phosphate
  modified_base 19: mod_base = OTHER; note = 2'-O-methyladenosine-3'-phosphate
  modified_base 20: mod_base = OTHER; note = 2'-O-methylguanosine-3'-phosphate
  modified_base 21: mod_base = OTHER; note 2'-O-methyladenosine-3'-phosphate-N-[tris(GalNAc-alkyl)-ami dodecanoyl)]-4-hydroxyprolinol (Hyp-(GalNAc-alkyl)3)
ggccacctcctcaattgaaga

SEQ ID NO: 2643 - RNA, 23 nt, synthetic construct
  source 1..23: mol_type = other RNA
  modified_base 1: mod_base = OTHER; note = 2'-O-methyluridine-3'-phosphorothioate
  modified_base 2: mod_base = OTHER; note = 2'-fluorocytidine-3'-phosphorothioate
  modified_base 3: mod_base = OTHER; note = 2'-O-methyluridine-3'-phosphate
  modified_base 4: mod_base = OTHER; note = 2'-O-methyluridine-3'-phosphate
  modified_base 5: mod_base = OTHER; note = 2'-O-methylcytidine-3'-phosphate
  modified_base 6: mod_base = OTHER; note = 2'-fluoroadenosine-3'-phosphate
  modified_base 7: mod_base = OTHER; note = 2'-O-methyladenosine-3'-phosphate
  modified_base 8: mod_base = OTHER; note = 2'-fluorouridine-3'-phosphate
  modified_base 9: mod_base = OTHER; note = 2'-fluorouridine-3'-phosphate
  modified_base 10: mod_base = OTHER; note = 2'-O-methylguanosine-3'-phosphate
  modified_base 11: mod_base = OTHER; note = 2'-O-methyladenosine-3'-phosphate
  modified_base 12: mod_base = OTHER; note = 2'-O-methylguanosine-3'-phosphate
  modified_base 13: mod_base = OTHER; note = 2'-O-methylguanosine-3'-phosphate
  modified_base 14: mod_base = OTHER; note = 2'-fluoroadenosine-3'-phosphate
  modified_base 15: mod_base = OTHER; note = 2'-O-methylguanosine-3'-phosphate
  modified_base 16: mod_base = OTHER; note = 2'-fluoroguanosine-3'-phosphate
  modified_base 17: mod_base = OTHER; note = 2'-O-methyluridine-3'-phosphate
  modified_base 18: mod_base = OTHER; note = 2'-O-methylguanosine-3'-phosphate
  modified_base 19: mod_base = OTHER; note = 2'-O-methylguanosine-3'-phosphate
  modified_base 20: mod_base = OTHER; note = 2'-O-methylcytidine-3'-phosphate
  modified_base 21: mod_base = OTHER; note = 2'-O-methylcytidine-3'- phosphorothioate
  modified_base 22: mod_base = OTHER; note = 2'-O-methylcytidine-3'- phosphorothioate
  modified_base 23: mod_base = OTHER; note = 2'-O-methyladenosine-3'-phosphate
tcttcaattgaggaggtggccca

SEQ ID NO: 2644 - RNA, 21 nt, synthetic construct
  source 1..21: mol_type = other RNA
  modified_base 1: mod_base = OTHER; note = 2'-O-methylguanosine-3'- phosphorothioate
  modified_base 2: mod_base = OTHER; note = 2'-O-methylcytidine-3'- phosphorothioate
  modified_base 3: mod_base = OTHER; note = 2'-O-methylcytidine-3'-phosphate
  modified_base 4: mod_base = OTHER; note = 2'-O-methyladenosine-3'-phosphate
  modified_base 5: mod_base = OTHER; note = 2'-O-methylcytidine-3'-phosphate
  modified_base 6: mod_base = OTHER; note = 2'-O-methylcytidine-3'-phosphate
  modified_base 7: mod_base = OTHER; note = 2'-fluorouridine-3'-phosphate
  modified_base 8: mod_base = OTHER; note = 2'-O-methylcytidine-3'-phosphate
  modified_base 9: mod_base = OTHER; note = 2'-fluorocytidine-3'-phosphate
  modified_base 10: mod_base = OTHER; note = 2'-fluorouridine-3'-phosphate
  modified_base 11: mod_base = OTHER; note = 2'-fluorocytidine-3'-phosphate
  modified_base 12: mod_base = OTHER; note = 2'-O-methyladenosine-3'-phosphate
  modified_base 13: mod_base = OTHER; note = 2'-O-methyladenosine-3'-phosphate
  modified_base 14: mod_base = OTHER; note = 2'-O-methyluridine-3'-phosphate
  modified_base 15: mod_base = OTHER; note = 2'-O-methyluridine-3'-phosphate
  modified_base 16: mod_base = OTHER; note = 2'-O-methylguanosine-3'-phosphate
  modified_base 17: mod_base = OTHER; note = 2'-O-methyladenosine-3'-phosphate
  modified_base 18: mod_base = OTHER; note = 2'-O-methyladenosine-3'-phosphate
  modified_base 19: mod_base = OTHER; note = 2'-O-methylguanosine-3'-phosphate
  modified_base 20: mod_base = OTHER; note = 2'-O-methyladenosine-3'-phosphate
  modified_base 21: mod_base = OTHER; note 2'-O-methyladenosine-3'-phosphate-N-[tris(GalNAc-alkyl)-ami dodecanoyl)]-4-hydroxyprolinol (Hyp-(GalNAc-alkyl)3)
gccacctcctcaattgaagaa

SEQ ID NO: 2645 - RNA, 23 nt, synthetic construct
  source 1..23: mol_type = other RNA
  modified_base 1: mod_base = OTHER; note = 2'-O-methyluridine-3'-phosphorothioate
  modified_base 2: mod_base = OTHER; note = 2'-fluorouridine -3'-phosphorothioate
  modified_base 3: mod_base = OTHER; note = 2'-O-methylcytidine-3'-phosphate
  modified_base 4: mod_base = OTHER; note = 2'-O-methyluridine-3'-phosphate
  modified_base 5: mod_base = OTHER; note = 2'-O-methyluridine-3'-phosphate
  modified_base 6: mod_base = OTHER; note = 2'-fluorocytidine-3'-phosphate
  modified_base 7: mod_base = OTHER; note = 2'-O-methyladenosine-3'-phosphate
  modified_base 8: mod_base = OTHER; note = 2'-fluoroadenosine-3'-phosphate
  modified_base 9: mod_base = OTHER; note = 2'-fluorouridine-3'-phosphate
  modified_base 10: mod_base = OTHER; note = 2'-O-methyluridine-3'-phosphate
  modified_base 11: mod_base = OTHER; note = 2'-O-methylguanosine-3'-phosphate
  modified_base 12: mod_base = OTHER; note = 2'-O-methyladenosine-3'-phosphate
  modified_base 13: mod_base = OTHER; note = 2'-O-methylguanosine-3'-phosphate
  modified_base 14: mod_base = OTHER; note = 2'-fluoroguanosine-3'-phosphate
  modified_base 15: mod_base = OTHER; note = 2'-O-methyladenosine-3'-phosphate
  modified_base 16: mod_base = OTHER; note = 2'-fluoroguanosine-3'-phosphate
  modified_base 17: mod_base = OTHER; note = 2'-O-methylguanosine-3'-phosphate
  modified_base 18: mod_base = OTHER; note = 2'-O-methyluridine-3'-phosphate
  modified_base 19: mod_base = OTHER; note = 2'-O-methylguanosine-3'-phosphate
  modified_base 20: mod_base = OTHER; note = 2'-O-methylguanosine-3'-phosphate
  modified_base 21: mod_base = OTHER; note = 2'-O-methylcytidine-3'- phosphorothioate
  modified_base 22: mod_base = OTHER; note = 2'-O-methylcytidine-3'- phosphorothioate
  modified_base 23: mod_base = OTHER; note = 2'-O-methylcytidine-3'-phosphate
ttcttcaattgaggaggtggccc

SEQ ID NO: 2646 - RNA, 21 nt, synthetic construct
  source 1..21: mol_type = other RNA
  modified_base 1: mod_base = OTHER; note = 2'-O-methylcytidine-3'- phosphorothioate
  modified_base 2: mod_base = OTHER; note = 2'-O-methylcytidine-3'- phosphorothioate
  modified_base 3: mod_base = OTHER; note = 2'-O-methyluridine-3'-phosphate
  modified_base 4: mod_base = OTHER; note = 2'-O-methylguanosine-3'-phosphate
  modified_base 5: mod_base = OTHER; note = 2'-O-methylguanosine-3'-phosphate
  modified_base 6: mod_base = OTHER; note = 2'-O-methylguanosine-3'-phosphate
  modified_base 7: mod_base = OTHER; note = 2'-fluorocytidine-3'-phosphate
  modified_base 8: mod_base = OTHER; note = 2'-O-methylcytidine-3'-phosphate
  modified_base 9: mod_base = OTHER; note = 2'-fluoroadenosine-3'-phosphate
  modified_base 10: mod_base = OTHER; note = 2'-fluorocytidine-3'-phosphate
  modified_base 11: mod_base = OTHER; note = 2'-fluorocytidine-3'-phosphate
  modified_base 12: mod_base = OTHER; note = 2'-O-methyluridine-3'-phosphate
  modified_base 13: mod_base = OTHER; note = 2'-O-methylcytidine-3'-phosphate
  modified_base 14: mod_base = OTHER; note = 2'-O-methylcytidine-3'-phosphate
  modified_base 15: mod_base = OTHER; note = 2'-O-methyluridine-3'-phosphate
  modified_base 16: mod_base = OTHER; note = 2'-O-methylcytidine-3'-phosphate
  modified_base 17: mod_base = OTHER; note = 2'-O-methyladenosine-3'-phosphate
  modified_base 18: mod_base = OTHER; note = 2'-O-methyladenosine-3'-phosphate
  modified_base 19: mod_base = OTHER; note = 2'-O-methyluridine-3'-phosphate
  modified_base 20: mod_base = OTHER; note = 2'-O-methyluridine-3'-phosphate
  modified_base 21: mod_base = OTHER; note 2'-O-methylguanosine-3'-phosphate-N-[tris(GalNAc-alkyl)-ami dodecanoyl)]-4-hydroxyprolinol (Hyp-(GalNAc-alkyl)3)
cctgggccacctcctcaattg

SEQ ID NO: 2647 - RNA, 23 nt, synthetic construct
  source 1..23: mol_type = other RNA
  modified_base 1: mod_base = OTHER; note = 2'-O-methylcytidine-3'- phosphorothioate
  modified_base 2: mod_base = OTHER; note = 2'-fluoroadenosine-3'-phosphorothioate
  modified_base 3: mod_base = OTHER; note = 2'-O-methyladenosine-3'-phosphate
  modified_base 4: mod_base = OTHER; note = 2'-O-methyluridine-3'-phosphate
  modified_base 5: mod_base = OTHER; note = 2'-O-methyluridine-3'-phosphate
  modified_base 6: mod_base = OTHER; note = 2'-fluoroguanosine-3'-phosphate
  modified_base 7: mod_base = OTHER; note = 2'-O-methyladenosine-3'-phosphate
  modified_base 8: mod_base = OTHER; note = 2'-fluoroguanosine-3'-phosphate
  modified_base 9: mod_base = OTHER; note = 2'-fluoroguanosine-3'-phosphate
  modified_base 10: mod_base = OTHER; note = 2'-O-methyladenosine-3'-phosphate
  modified_base 11: mod_base = OTHER; note = 2'-O-methylguanosine-3'-phosphate
  modified_base 12: mod_base = OTHER; note = 2'-O-methylguanosine-3'-phosphate
  modified_base 13: mod_base = OTHER; note = 2'-O-methyluridine-3'-phosphate
  modified_base 14: mod_base = OTHER; note = 2'-fluoroguanosine-3'-phosphate
  modified_base 15: mod_base = OTHER; note = 2'-O-methylguanosine-3'-phosphate
  modified_base 16: mod_base = OTHER; note = 2'-fluorocytidine-3'-phosphate
  modified_base 17: mod_base = OTHER; note = 2'-O-methylcytidine-3'-phosphate
  modified_base 18: mod_base = OTHER; note = 2'-O-methylcytidine-3'-phosphate
  modified_base 19: mod_base = OTHER; note = 2'-O-methyladenosine-3'-phosphate
  modified_base 20: mod_base = OTHER; note = 2'-O-methylguanosine-3'-phosphate
  modified_base 21: mod_base = OTHER; note = 2'-O-methylguanosine-3'- phosphorothioate
  modified_base 22: mod_base = OTHER; note = 2'-O-methyladenosine-3'- phosphorothioate
  modified_base 23: mod_base = OTHER; note = 2'-O-methyladenosine-3'-phosphate
caattgaggaggtggcccaggaa

SEQ ID NO: 2648 - RNA, 21 nt, synthetic construct
  source 1..21: mol_type = other RNA
  modified_base 1: mod_base = OTHER; note = 2'-O-methyluridine-3'-phosphorothioate
  modified_base 2: mod_base = OTHER; note = 2'-O-methylcytidine-3'- phosphorothioate
  modified_base 3: mod_base = OTHER; note = 2'-O-methylcytidine-3'-phosphate
  modified_base 4: mod_base = OTHER; note = 2'-O-methyluridine-3'-phosphate
  modified_base 5: mod_base = OTHER; note = 2'-O-methylguanosine-3'-phosphate
  modified_base 6: mod_base = OTHER; note = 2'-O-methylguanosine-3'-phosphate
  modified_base 7: mod_base = OTHER; note = 2'-fluoroguanosine-3'-phosphate
  modified_base 8: mod_base = OTHER; note = 2'-O-methylcytidine-3'-phosphate
  modified_base 9: mod_base = OTHER; note = 2'-fluorocytidine-3'-phosphate
  modified_base 10: mod_base = OTHER; note = 2'-fluoroadenosine-3'-phosphate
  modified_base 11: mod_base = OTHER; note = 2'-fluorocytidine-3'-phosphate
  modified_base 12: mod_base = OTHER; note = 2'-O-methylcytidine-3'-phosphate
  modified_base 13: mod_base = OTHER; note = 2'-O-methyluridine-3'-phosphate
  modified_base 14: mod_base = OTHER; note = 2'-O-methylcytidine-3'-phosphate
  modified_base 15: mod_base = OTHER; note = 2'-O-methylcytidine-3'-phosphate
  modified_base 16: mod_base = OTHER; note = 2'-O-methyluridine-3'-phosphate
  modified_base 17: mod_base = OTHER; note = 2'-O-methylcytidine-3'-phosphate
  modified_base 18: mod_base = OTHER; note = 2'-O-methyladenosine-3'-phosphate
  modified_base 19: mod_base = OTHER; note = 2'-O-methyladenosine-3'-phosphate
  modified_base 20: mod_base = OTHER; note = 2'-O-methyluridine-3'-phosphate
  modified_base 21: mod_base = OTHER; note 2'-O-methyluridine-3'-phosphate-N-[tris(GalNAc-alkyl)-amido decanoyl)]-4-hydroxyprolinol (Hyp-(GalNAc-alkyl)3)
tcctgggccacctcctcaatt

SEQ ID NO: 2649 - RNA, 23 nt, synthetic construct
  source 1..23: mol_type = other RNA
  modified_base 1: mod_base = OTHER; note = 2'-O-methyladenosine-3'- phosphorothioate
  modified_base 2: mod_base = OTHER; note = 2'-fluoroadenosine-3'-phosphorothioate
  modified_base 3: mod_base = OTHER; note = 2'-O-methyluridine-3'-phosphate
  modified_base 4: mod_base = OTHER; note = 2'-O-methyluridine-3'-phosphate
  modified_base 5: mod_base = OTHER; note = 2'-O-methylguanosine-3'-phosphate
  modified_base 6: mod_base = OTHER; note = 2'-fluoroadenosine-3'-phosphate
  modified_base 7: mod_base = OTHER; note = 2'-O-methylguanosine-3'-phosphate
  modified_base 8: mod_base = OTHER; note = 2'-fluoroguanosine-3'-phosphate
  modified_base 9: mod_base = OTHER; note = 2'-fluoroadenosine-3'-phosphate
  modified_base 10: mod_base = OTHER; note = 2'-O-methylguanosine-3'-phosphate
  modified_base 11: mod_base = OTHER; note = 2'-O-methylguanosine-3'-phosphate
  modified_base 12: mod_base = OTHER; note = 2'-O-methyluridine-3'-phosphate
  modified_base 13: mod_base = OTHER; note = 2'-O-methylguanosine-3'-phosphate
  modified_base 14: mod_base = OTHER; note = 2'-fluoroguanosine-3'-phosphate
  modified_base 15: mod_base = OTHER; note = 2'-O-methylcytidine-3'-phosphate
  modified_base 16: mod_base = OTHER; note = 2'-fluorocytidine-3'-phosphate
  modified_base 17: mod_base = OTHER; note = 2'-O-methylcytidine-3'-phosphate
  modified_base 18: mod_base = OTHER; note = 2'-O-methyladenosine-3'-phosphate
  modified_base 19: mod_base = OTHER; note = 2'-O-methylguanosine-3'-phosphate
  modified_base 20: mod_base = OTHER; note = 2'-O-methylguanosine-3'-phosphate
  modified_base 21: mod_base = OTHER; note = 2'-O-methyladenosine-3'- phosphorothioate
  modified_base 22: mod_base = OTHER; note = 2'-O-methyladenosine-3'- phosphorothioate
  modified_base 23: mod_base = OTHER; note = 2'-O-methylcytidine-3'-phosphate
aattgaggaggtggcccaggaac

SEQ ID NO: 2650 - RNA, 21 nt, synthetic construct
  source 1..21: mol_type = other RNA
  modified_base 1: mod_base = OTHER; note = 2'-O-methyluridine-3'-phosphorothioate
  modified_base 2: mod_base = OTHER; note = 2'-O-methylguanosine-3'- phosphorothioate
  modified_base 3: mod_base = OTHER; note = 2'-O-methyluridine-3'-phosphate
  modified_base 4: mod_base = OTHER; note = 2'-O-methyladenosine-3'-phosphate
  modified_base 5: mod_base = OTHER; note = 2'-O-methyluridine-3'-phosphate
  modified_base 6: mod_base = OTHER; note = 2'-O-methylguanosine-3'-phosphate
  modified_base 7: mod_base = OTHER; note = 2'-fluorouridine-3'-phosphate
  modified_base 8: mod_base = OTHER; note = 2'-O-methyluridine-3'-phosphate
  modified_base 9: mod_base = OTHER; note = 2'-fluoroadenosine-3'-phosphate
  modified_base 10: mod_base = OTHER; note = 2'-fluorocytidine-3'-phosphate
  modified_base 11: mod_base = OTHER; note = 2'-fluorouridine-3'-phosphate
  modified_base 12: mod_base = OTHER; note = 2'-O-methyluridine-3'-phosphate
  modified_base 13: mod_base = OTHER; note = 2'-O-methylcytidine-3'-phosphate
  modified_base 14: mod_base = OTHER; note = 2'-O-methyluridine-3'-phosphate
  modified_base 15: mod_base = OTHER; note = 2'-O-methyluridine-3'-phosphate
  modified_base 16: mod_base = OTHER; note = 2'-O-methyladenosine-3'-phosphate
  modified_base 17: mod_base = OTHER; note = 2'-O-methylguanosine-3'-phosphate
  modified_base 18: mod_base = OTHER; note = 2'-O-methyladenosine-3'-phosphate
  modified_base 19: mod_base = OTHER; note = 2'-O-methylguanosine-3'-phosphate
  modified_base 20: mod_base = OTHER; note = 2'-O-methyladenosine-3'-phosphate
  modified_base 21: mod_base = OTHER; note 2'-O-methylguanosine-3'-phosphate-N-[tris(GalNAc-alkyl)-ami dodecanoyl)]-4-hydroxyprolinol (Hyp-(GalNAc-alkyl)3)
tgtatgttacttcttagagag

SEQ ID NO: 2651 - RNA, 23 nt, synthetic construct
  source 1..23: mol_type = other RNA
  modified_base 1: mod_base = OTHER; note = 2'-O-methylcytidine-3'- phosphorothioate
  modified_base 2: mod_base = OTHER; note = 2'-fluorouridine -3'-phosphorothioate
  modified_base 3: mod_base = OTHER; note = 2'-O-methylcytidine-3'-phosphate
  modified_base 4: mod_base = OTHER; note = 2'-O-methyluridine-3'-phosphate
  modified_base 5: mod_base = OTHER; note = 2'-O-methylcytidine-3'-phosphate
  modified_base 6: mod_base = OTHER; note = 2'-fluorouridine-3'-phosphate
  modified_base 7: mod_base = OTHER; note = 2'-O-methyladenosine-3'-phosphate
  modified_base 8: mod_base = OTHER; note = 2'-fluoroadenosine-3'-phosphate
  modified_base 9: mod_base = OTHER; note = 2'-fluoroguanosine-3'-phosphate
  modified_base 10: mod_base = OTHER; note = 2'-O-methyladenosine-3'-phosphate
  modified_base 11: mod_base = OTHER; note = 2'-O-methyladenosine-3'-phosphate
  modified_base 12: mod_base = OTHER; note = 2'-O-methylguanosine-3'-phosphate
  modified_base 13: mod_base = OTHER; note = 2'-O-methyluridine-3'-phosphate
  modified_base 14: mod_base = OTHER; note = 2'-fluoroadenosine-3'-phosphate
  modified_base 15: mod_base = OTHER; note = 2'-O-methyladenosine-3'-phosphate
  modified_base 16: mod_base = OTHER; note = 2'-fluorocytidine-3'-phosphate
  modified_base 17: mod_base = OTHER; note = 2'-O-methyladenosine-3'-phosphate
  modified_base 18: mod_base = OTHER; note = 2'-O-methyluridine-3'-phosphate
  modified_base 19: mod_base = OTHER; note = 2'-O-methyladenosine-3'-phosphate
  modified_base 20: mod_base = OTHER; note = 2'-O-methylcytidine-3'-phosphate
  modified_base 21: mod_base = OTHER; note = 2'-O-methyladenosine-3'- phosphorothioate
  modified_base 22: mod_base = OTHER; note = 2'-O-methyluridine-3'-phosphorothioate
  modified_base 23: mod_base = OTHER; note = 2'-O-methylcytidine-3'-phosphate
ctctctaagaagtaacatacatc

SEQ ID NO: 2652 - RNA, 21 nt, synthetic construct
  source 1..21: mol_type = other RNA
  modified_base 1: mod_base = OTHER; note = 2'-O-methylguanosine-3'- phosphorothioate
  modified_base 2: mod_base = OTHER; note = 2'-O-methyluridine-3'-phosphorothioate
  modified_base 3: mod_base = OTHER; note = 2'-O-methyladenosine-3'-phosphate
  modified_base 4: mod_base = OTHER; note = 2'-O-methyluridine-3'-phosphate
  modified_base 5: mod_base = OTHER; note = 2'-O-methylguanosine-3'-phosphate
  modified_base 6: mod_base = OTHER; note = 2'-O-methyluridine-3'-phosphate
  modified_base 7: mod_base = OTHER; note = 2'-fluorouridine-3'-phosphate
  modified_base 8: mod_base = OTHER; note = 2'-O-methyladenosine-3'-phosphate
  modified_base 9: mod_base = OTHER; note = 2'-fluorocytidine-3'-phosphate
  modified_base 10: mod_base = OTHER; note = 2'-fluorouridine-3'-phosphate
  modified_base 11: mod_base = OTHER; note = 2'-fluorouridine-3'-phosphate
  modified_base 12: mod_base = OTHER; note = 2'-O-methylcytidine-3'-phosphate
  modified_base 13: mod_base = OTHER; note = 2'-O-methyluridine-3'-phosphate
  modified_base 14: mod_base = OTHER; note = 2'-O-methyluridine-3'-phosphate
  modified_base 15: mod_base = OTHER; note = 2'-O-methyladenosine-3'-phosphate
  modified_base 16: mod_base = OTHER; note = 2'-O-methylguanosine-3'-phosphate
  modified_base 17: mod_base = OTHER; note = 2'-O-methyladenosine-3'-phosphate
  modified_base 18: mod_base = OTHER; note = 2'-O-methylguanosine-3'-phosphate
  modified_base 19: mod_base = OTHER; note = 2'-O-methyladenosine-3'-phosphate
  modified_base 20: mod_base = OTHER; note = 2'-O-methylguanosine-3'-phosphate
  modified_base 21: mod_base = OTHER; note 2'-O-methyladenosine-3'-phosphate-N-[tris(GalNAc-alkyl)-ami dodecanoyl)]-4-hydroxyprolinol (Hyp-(GalNAc-alkyl)3)
gtatgttacttcttagagaga

SEQ ID NO: 2653 - RNA, 23 nt, synthetic construct
  source 1..23: mol_type = other RNA
  modified_base 1: mod_base = OTHER; note = 2'-O-methyluridine-3'-phosphorothioate
  modified_base 2: mod_base = OTHER; note = 2'-fluorocytidine-3'-phosphorothioate
  modified_base 3: mod_base = OTHER; note = 2'-O-methyluridine-3'-phosphate
  modified_base 4: mod_base = OTHER; note = 2'-O-methylcytidine-3'-phosphate
  modified_base 5: mod_base = OTHER; note = 2'-O-methyluridine-3'-phosphate
  modified_base 6: mod_base = OTHER; note = 2'-fluorocytidine-3'-phosphate
  modified_base 7: mod_base = OTHER; note = 2'-O-methyluridine-3'-phosphate
  modified_base 8: mod_base = OTHER; note = 2'-fluoroadenosine-3'-phosphate
  modified_base 9: mod_base = OTHER; note = 2'-fluoroadenosine-3'-phosphate
  modified_base 10: mod_base = OTHER; note = 2'-O-methylguanosine-3'-phosphate
  modified_base 11: mod_base = OTHER; note = 2'-O-methyladenosine-3'-phosphate
  modified_base 12: mod_base = OTHER; note = 2'-O-methyladenosine-3'-phosphate
  modified_base 13: mod_base = OTHER; note = 2'-O-methylguanosine-3'-phosphate
  modified_base 14: mod_base = OTHER; note = 2'-fluorouridine-3'-phosphate
  modified_base 15: mod_base = OTHER; note = 2'-O-methyladenosine-3'-phosphate
  modified_base 16: mod_base = OTHER; note = 2'-fluoroadenosine-3'-phosphate
  modified_base 17: mod_base = OTHER; note = 2'-O-methylcytidine-3'-phosphate
  modified_base 18: mod_base = OTHER; note = 2'-O-methyladenosine-3'-phosphate
  modified_base 19: mod_base = OTHER; note = 2'-O-methyluridine-3'-phosphate
  modified_base 20: mod_base = OTHER; note = 2'-O-methyladenosine-3'-phosphate
  modified_base 21: mod_base = OTHER; note = 2'-O-methylcytidine-3'- phosphorothioate
  modified_base 22: mod_base = OTHER; note = 2'-O-methyladenosine-3'- phosphorothioate
  modified_base 23: mod_base = OTHER; note = 2'-O-methyluridine-3'-phosphate
tctctctaagaagtaacatacat

SEQ ID NO: 2654 - RNA, 21 nt, synthetic construct
  source 1..21: mol_type = other RNA
  modified_base 1: mod_base = OTHER; note = 2'-O-methyladenosine-3'- phosphorothioate
  modified_base 2: mod_base = OTHER; note = 2'-O-methylguanosine-3'- phosphorothioate
  modified_base 3: mod_base = OTHER; note = 2'-O-methylguanosine-3'-phosphate
  modified_base 4: mod_base = OTHER; note = 2'-O-methyladenosine-3'-phosphate
  modified_base 5: mod_base = OTHER; note = 2'-O-methyluridine-3'-phosphate
  modified_base 6: mod_base = OTHER; note = 2'-O-methylguanosine-3'-phosphate
  modified_base 7: mod_base = OTHER; note = 2'-fluorouridine-3'-phosphate
  modified_base 8: mod_base = OTHER; note = 2'-O-methyladenosine-3'-phosphate
  modified_base 9: mod_base = OTHER; note = 2'-fluorouridine-3'-phosphate
  modified_base 10: mod_base = OTHER; note = 2'-fluoroguanosine-3'-phosphate
  modified_base 11: mod_base = OTHER; note = 2'-fluorouridine-3'-phosphate
  modified_base 12: mod_base = OTHER; note = 2'-O-methyluridine-3'-phosphate
  modified_base 13: mod_base = OTHER; note = 2'-O-methyladenosine-3'-phosphate
  modified_base 14: mod_base = OTHER; note = 2'-O-methylcytidine-3'-phosphate
  modified_base 15: mod_base = OTHER; note = 2'-O-methyluridine-3'-phosphate
  modified_base 16: mod_base = OTHER; note = 2'-O-methyluridine-3'-phosphate
  modified_base 17: mod_base = OTHER; note = 2'-O-methylcytidine-3'-phosphate
  modified_base 18: mod_base = OTHER; note = 2'-O-methyluridine-3'-phosphate
  modified_base 19: mod_base = OTHER; note = 2'-O-methyluridine-3'-phosphate
  modified_base 20: mod_base = OTHER; note = 2'-O-methyladenosine-3'-phosphate
  modified_base 21: mod_base = OTHER; note 2'-O-methylguanosine-3'-phosphate-N-[tris(GalNAc-alkyl)-ami dodecanoyl)]-4-hydroxyprolinol (Hyp-(GalNAc-alkyl)3)
aggatgtatgttacttcttag

SEQ ID NO: 2655 - RNA, 23 nt, synthetic construct
  source 1..23: mol_type = other RNA
  modified_base 1: mod_base = OTHER; note = 2'-O-methylcytidine-3'- phosphorothioate
  modified_base 2: mod_base = OTHER; note = 2'-fluorouridine -3'-phosphorothioate
  modified_base 3: mod_base = OTHER; note = 2'-O-methyladenosine-3'-phosphate
  modified_base 4: mod_base = OTHER; note = 2'-O-methyladenosine-3'-phosphate
  modified_base 5: mod_base = OTHER; note = 2'-O-methylguanosine-3'-phosphate
  modified_base 6: mod_base = OTHER; note = 2'-fluoroadenosine-3'-phosphate
  modified_base 7: mod_base = OTHER; note = 2'-O-methyladenosine-3'-phosphate
  modified_base 8: mod_base = OTHER; note = 2'-fluoroguanosine-3'-phosphate
  modified_base 9: mod_base = OTHER; note = 2'-fluorouridine-3'-phosphate
  modified_base 10: mod_base = OTHER; note = 2'-O-methyladenosine-3'-phosphate
  modified_base 11: mod_base = OTHER; note = 2'-O-methyladenosine-3'-phosphate
  modified_base 12: mod_base = OTHER; note = 2'-O-methylcytidine-3'-phosphate
  modified_base 13: mod_base = OTHER; note = 2'-O-methyladenosine-3'-phosphate
  modified_base 14: mod_base = OTHER; note = 2'-fluorouridine-3'-phosphate
  modified_base 15: mod_base = OTHER; note = 2'-O-methyladenosine-3'-phosphate
  modified_base 16: mod_base = OTHER; note = 2'-fluorocytidine-3'-phosphate
  modified_base 17: mod_base = OTHER; note = 2'-O-methyladenosine-3'-phosphate
  modified_base 18: mod_base = OTHER; note = 2'-O-methyluridine-3'-phosphate
  modified_base 19: mod_base = OTHER; note = 2'-O-methylcytidine-3'-phosphate
  modified_base 20: mod_base = OTHER; note = 2'-O-methylcytidine-3'-phosphate
  modified_base 21: mod_base = OTHER; note = 2'-O-methyluridine-3'-phosphorothioate
  modified_base 22: mod_base = OTHER; note = 2'-O-methyladenosine-3'- phosphorothioate
  modified_base 23: mod_base = OTHER; note = 2'-O-methyladenosine-3'-phosphate
ctaagaagtaacatacatcctaa

SEQ ID NO: 2656 - RNA, 21 nt, synthetic construct
  source 1..21: mol_type = other RNA
  modified_base 1: mod_base = OTHER; note = 2'-O-methyluridine-3'-phosphorothioate
  modified_base 2: mod_base = OTHER; note = 2'-O-methyladenosine-3'- phosphorothioate
  modified_base 3: mod_base = OTHER; note = 2'-O-methylguanosine-3'-phosphate
  modified_base 4: mod_base = OTHER; note = 2'-O-methylguanosine-3'-phosphate
  modified_base 5: mod_base = OTHER; note = 2'-O-methyladenosine-3'-phosphate
  modified_base 6: mod_base = OTHER; note = 2'-O-methyluridine-3'-phosphate
  modified_base 7: mod_base = OTHER; note = 2'-fluoroguanosine-3'-phosphate
  modified_base 8: mod_base = OTHER; note = 2'-O-methyluridine-3'-phosphate
  modified_base 9: mod_base = OTHER; note = 2'-fluoroadenosine-3'-phosphate
  modified_base 10: mod_base = OTHER; note = 2'-fluorouridine-3'-phosphate
  modified_base 11: mod_base = OTHER; note = 2'-fluoroguanosine-3'-phosphate
  modified_base 12: mod_base = OTHER; note = 2'-O-methyluridine-3'-phosphate
  modified_base 13: mod_base = OTHER; note = 2'-O-methyluridine-3'-phosphate
  modified_base 14: mod_base = OTHER; note = 2'-O-methyladenosine-3'-phosphate
  modified_base 15: mod_base = OTHER; note = 2'-O-methylcytidine-3'-phosphate
  modified_base 16: mod_base = OTHER; note = 2'-O-methyluridine-3'-phosphate
  modified_base 17: mod_base = OTHER; note = 2'-O-methyluridine-3'-phosphate
  modified_base 18: mod_base = OTHER; note = 2'-O-methylcytidine-3'-phosphate
  modified_base 19: mod_base = OTHER; note = 2'-O-methyluridine-3'-phosphate
  modified_base 20: mod_base = OTHER; note = 2'-O-methyluridine-3'-phosphate
  modified_base 21: mod_base = OTHER; note 2'-O-methyladenosine-3'-phosphate-N-[tris(GalNAc-alkyl)-ami dodecanoyl)]-4-hydroxyprolinol (Hyp-(GalNAc-alkyl)3)
taggatgtatgttacttctta

SEQ ID NO: 2657 - RNA, 23 nt, synthetic construct
  source 1..23: mol_type = other RNA
  modified_base 1: mod_base = OTHER; note = 2'-O-methyluridine-3'-phosphorothioate
  modified_base 2: mod_base = OTHER; note = 2'-fluoroadenosine-3'-phosphorothioate
  modified_base 3: mod_base = OTHER; note = 2'-O-methyladenosine-3'-phosphate
  modified_base 4: mod_base = OTHER; note = 2'-O-methylguanosine-3'-phosphate
  modified_base 5: mod_base = OTHER; note = 2'-O-methyladenosine-3'-phosphate
  modified_base 6: mod_base = OTHER; note = 2'-fluoroadenosine-3'-phosphate
  modified_base 7: mod_base = OTHER; note = 2'-O-methylguanosine-3'-phosphate
  modified_base 8: mod_base = OTHER; note = 2'-fluorouridine-3'-phosphate
  modified_base 9: mod_base = OTHER; note = 2'-fluoroadenosine-3'-phosphate
  modified_base 10: mod_base = OTHER; note = 2'-O-methyladenosine-3'-phosphate
  modified_base 11: mod_base = OTHER; note = 2'-O-methylcytidine-3'-phosphate
  modified_base 12: mod_base = OTHER; note = 2'-O-methyladenosine-3'-phosphate
  modified_base 13: mod_base = OTHER; note = 2'-O-methyluridine-3'-phosphate
  modified_base 14: mod_base = OTHER; note = 2'-fluoroadenosine-3'-phosphate
  modified_base 15: mod_base = OTHER; note = 2'-O-methylcytidine-3'-phosphate
  modified_base 16: mod_base = OTHER; note = 2'-fluoroadenosine-3'-phosphate
  modified_base 17: mod_base = OTHER; note = 2'-O-methyluridine-3'-phosphate
  modified_base 18: mod_base = OTHER; note = 2'-O-methylcytidine-3'-phosphate
  modified_base 19: mod_base = OTHER; note = 2'-O-methylcytidine-3'-phosphate
  modified_base 20: mod_base = OTHER; note = 2'-O-methyluridine-3'-phosphate
  modified_base 21: mod_base = OTHER; note = 2'-O-methyladenosine-3'- phosphorothioate
  modified_base 22: mod_base = OTHER; note = 2'-O-methyladenosine-3'- phosphorothioate
  modified_base 23: mod_base = OTHER; note = 2'-O-methyladenosine-3'-phosphate
taagaagtaacatacatcctaaa

SEQ ID NO: 2658 - RNA, 21 nt, synthetic construct
  source 1..21: mol_type = other RNA
  modified_base 1: mod_base = OTHER; note = 2'-O-methyladenosine-3'- phosphorothioate
  modified_base 2: mod_base = OTHER; note = 2'-O-methyladenosine-3'- phosphorothioate
  modified_base 3: mod_base = OTHER; note = 2'-O-methyladenosine-3'-phosphate
  modified_base 4: mod_base = OTHER; note = 2'-O-methyluridine-3'-phosphate
  modified_base 5: mod_base = OTHER; note = 2'-O-methylguanosine-3'-phosphate
  modified_base 6: mod_base = OTHER; note = 2'-O-methyluridine-3'-phosphate
  modified_base 7: mod_base = OTHER; note = 2'-fluorouridine-3'-phosphate
  modified_base 8: mod_base = OTHER; note = 2'-O-methyluridine-3'-phosphate
  modified_base 9: mod_base = OTHER; note = 2'-fluorouridine-3'-phosphate
  modified_base 10: mod_base = OTHER; note = 2'-fluoroadenosine-3'-phosphate
  modified_base 11: mod_base = OTHER; note = 2'-fluoroguanosine-3'-phosphate
  modified_base 12: mod_base = OTHER; note = 2'-O-methylguanosine-3'-phosphate
  modified_base 13: mod_base = OTHER; note = 2'-O-methyladenosine-3'-phosphate
  modified_base 14: mod_base = OTHER; note = 2'-O-methyluridine-3'-phosphate
  modified_base 15: mod_base = OTHER; note = 2'-O-methylguanosine-3'-phosphate
  modified_base 16: mod_base = OTHER; note = 2'-O-methyluridine-3'-phosphate
  modified_base 17: mod_base = OTHER; note = 2'-O-methyladenosine-3'-phosphate
  modified_base 18: mod_base = OTHER; note = 2'-O-methyluridine-3'-phosphate
  modified_base 19: mod_base = OTHER; note = 2'-O-methylguanosine-3'-phosphate
  modified_base 20: mod_base = OTHER; note = 2'-O-methyluridine-3'-phosphate
  modified_base 21: mod_base = OTHER; note 2'-O-methyluridine-3'-phosphate-N-[tris(GalNAc-alkyl)-amido decanoyl)]-4-hydroxyprolinol (Hyp-(GalNAc-alkyl)3)
aaatgttttaggatgtatgtt

SEQ ID NO: 2659 - RNA, 23 nt, synthetic construct
  source 1..23: mol_type = other RNA
  modified_base 1: mod_base = OTHER; note = 2'-O-methyladenosine-3'- phosphorothioate
  modified_base 2: mod_base = OTHER; note = 2'-fluoroadenosine-3'-phosphorothioate
  modified_base 3: mod_base = OTHER; note = 2'-O-methylcytidine-3'-phosphate
  modified_base 4: mod_base = OTHER; note = 2'-O-methyladenosine-3'-phosphate
  modified_base 5: mod_base = OTHER; note = 2'-O-methyluridine-3'-phosphate
  modified_base 6: mod_base = OTHER; note = 2'-fluoroadenosine-3'-phosphate
  modified_base 7: mod_base = OTHER; note = 2'-O-methylcytidine-3'-phosphate
  modified_base 8: mod_base = OTHER; note = 2'-fluoroadenosine-3'-phosphate
  modified_base 9: mod_base = OTHER; note = 2'-fluorouridine-3'-phosphate
  modified_base 10: mod_base = OTHER; note = 2'-O-methylcytidine-3'-phosphate
  modified_base 11: mod_base = OTHER; note = 2'-O-methylcytidine-3'-phosphate
  modified_base 12: mod_base = OTHER; note = 2'-O-methyluridine-3'-phosphate
  modified_base 13: mod_base = OTHER; note = 2'-O-methyladenosine-3'-phosphate
  modified_base 14: mod_base = OTHER; note = 2'-fluoroadenosine-3'-phosphate
  modified_base 15: mod_base = OTHER; note = 2'-O-methyladenosine-3'-phosphate
  modified_base 16: mod_base = OTHER; note = 2'-fluoroadenosine-3'-phosphate
  modified_base 17: mod_base = OTHER; note = 2'-O-methylcytidine-3'-phosphate
  modified_base 18: mod_base = OTHER; note = 2'-O-methyladenosine-3'-phosphate
  modified_base 19: mod_base = OTHER; note = 2'-O-methyluridine-3'-phosphate
  modified_base 20: mod_base = OTHER; note = 2'-O-methyluridine-3'-phosphate
  modified_base 21: mod_base = OTHER; note = 2'-O-methyluridine-3'-phosphorothioate
  modified_base 22: mod_base = OTHER; note = 2'-O-methylguanosine-3'- phosphorothioate
  modified_base 23: mod_base = OTHER; note = 2'-O-methylguanosine-3'-phosphate
aacatacatcctaaaacatttgg

SEQ ID NO: 2660 - RNA, 21 nt, synthetic construct
  source 1..21: mol_type = other RNA
  modified_base 1: mod_base = OTHER; note = 2'-O-methyladenosine-3'- phosphorothioate
  modified_base 2: mod_base = OTHER; note = 2'-O-methyladenosine-3'- phosphorothioate
  modified_base 3: mod_base = OTHER; note = 2'-O-methyluridine-3'-phosphate
  modified_base 4: mod_base = OTHER; note = 2'-O-methylguanosine-3'-phosphate
  modified_base 5: mod_base = OTHER; note = 2'-O-methyluridine-3'-phosphate
  modified_base 6: mod_base = OTHER; note = 2'-O-methyluridine-3'-phosphate
  modified_base 7: mod_base = OTHER; note = 2'-fluorouridine-3'-phosphate
  modified_base 8: mod_base = OTHER; note = 2'-O-methyluridine-3'-phosphate
  modified_base 9: mod_base = OTHER; note = 2'-fluoroadenosine-3'-phosphate
  modified_base 10: mod_base = OTHER; note = 2'-fluoroguanosine-3'-phosphate
  modified_base 11: mod_base = OTHER; note = 2'-fluoroguanosine-3'-phosphate
  modified_base 12: mod_base = OTHER; note = 2'-O-methyladenosine-3'-phosphate
  modified_base 13: mod_base = OTHER; note = 2'-O-methyluridine-3'-phosphate
  modified_base 14: mod_base = OTHER; note = 2'-O-methylguanosine-3'-phosphate
  modified_base 15: mod_base = OTHER; note = 2'-O-methyluridine-3'-phosphate
  modified_base 16: mod_base = OTHER; note = 2'-O-methyladenosine-3'-phosphate
  modified_base 17: mod_base = OTHER; note = 2'-O-methyluridine-3'-phosphate
  modified_base 18: mod_base = OTHER; note = 2'-O-methylguanosine-3'-phosphate
  modified_base 19: mod_base = OTHER; note = 2'-O-methyluridine-3'-phosphate
  modified_base 20: mod_base = OTHER; note = 2'-O-methyluridine-3'-phosphate
  modified_base 21: mod_base = OTHER; note 2'-O-methyladenosine-3'-phosphate-N-[tris(GalNAc-alkyl)-ami dodecanoyl)]-4-hydroxyprolinol (Hyp-(GalNAc-alkyl)3)
aatgttttaggatgtatgtta

SEQ ID NO: 2661 - RNA, 23 nt, synthetic construct
  source 1..23: mol_type = other RNA
  modified_base 1: mod_base = OTHER; note = 2'-O-methyluridine-3'-phosphorothioate
  modified_base 2: mod_base = OTHER; note = 2'-fluoroadenosine-3'-phosphorothioate
  modified_base 3: mod_base = OTHER; note = 2'-O-methyladenosine-3'-phosphate
  modified_base 4: mod_base = OTHER; note = 2'-O-methylcytidine-3'-phosphate
  modified_base 5: mod_base = OTHER; note = 2'-O-methyladenosine-3'-phosphate
  modified_base 6: mod_base = OTHER; note = 2'-fluorouridine-3'-phosphate
  modified_base 7: mod_base = OTHER; note = 2'-O-methyladenosine-3'-phosphate
  modified_base 8: mod_base = OTHER; note = 2'-fluorocytidine-3'-phosphate
  modified_base 9: mod_base = OTHER; note = 2'-fluoroadenosine-3'-phosphate
  modified_base 10: mod_base = OTHER; note = 2'-O-methyluridine-3'-phosphate
  modified_base 11: mod_base = OTHER; note = 2'-O-methylcytidine-3'-phosphate
  modified_base 12: mod_base = OTHER; note = 2'-O-methylcytidine-3'-phosphate
  modified_base 13: mod_base = OTHER; note = 2'-O-methyluridine-3'-phosphate
  modified_base 14: mod_base = OTHER; note = 2'-fluoroadenosine-3'-phosphate
  modified_base 15: mod_base = OTHER; note = 2'-O-methyladenosine-3'-phosphate
  modified_base 16: mod_base = OTHER; note = 2'-fluoroadenosine-3'-phosphate
  modified_base 17: mod_base = OTHER; note = 2'-O-methyladenosine-3'-phosphate
  modified_base 18: mod_base = OTHER; note = 2'-O-methylcytidine-3'-phosphate
  modified_base 19: mod_base = OTHER; note = 2'-O-methyladenosine-3'-phosphate
  modified_base 20: mod_base = OTHER; note = 2'-O-methyluridine-3'-phosphate
  modified_base 21: mod_base = OTHER; note = 2'-O-methyluridine-3'-phosphorothioate
  modified_base 22: mod_base = OTHER; note = 2'-O-methyluridine-3'-phosphorothioate
  modified_base 23: mod_base = OTHER; note = 2'-O-methylguanosine-3'-phosphate
taacatacatcctaaaacatttg

SEQ ID NO: 2662 - RNA, 21 nt, synthetic construct
  source 1..21: mol_type = other RNA
  modified_base 1: mod_base = OTHER; note = 2'-O-methyladenosine-3'- phosphorothioate
  modified_base 2: mod_base = OTHER; note = 2'-O-methyluridine-3'-phosphorothioate
  modified_base 3: mod_base = OTHER; note = 2'-O-methylcytidine-3'-phosphate
  modified_base 4: mod_base = OTHER; note = 2'-O-methylcytidine-3'-phosphate
  modified_base 5: mod_base = OTHER; note = 2'-O-methyladenosine-3'-phosphate
  modified_base 6: mod_base = OTHER; note = 2'-O-methyladenosine-3'-phosphate
  modified_base 7: mod_base = OTHER; note = 2'-fluoroadenosine-3'-phosphate
  modified_base 8: mod_base = OTHER; note = 2'-O-methyluridine-3'-phosphate
  modified_base 9: mod_base = OTHER; note = 2'-fluoroguanosine-3'-phosphate
  modified_base 10: mod_base = OTHER; note = 2'-fluorouridine-3'-phosphate
  modified_base 11: mod_base = OTHER; note = 2'-fluorouridine-3'-phosphate
  modified_base 12: mod_base = OTHER; note = 2'-O-methyluridine-3'-phosphate
  modified_base 13: mod_base = OTHER; note = 2'-O-methyluridine-3'-phosphate
  modified_base 14: mod_base = OTHER; note = 2'-O-methyladenosine-3'-phosphate
  modified_base 15: mod_base = OTHER; note = 2'-O-methylguanosine-3'-phosphate
  modified_base 16: mod_base = OTHER; note = 2'-O-methylguanosine-3'-phosphate
  modified_base 17: mod_base = OTHER; note = 2'-O-methyladenosine-3'-phosphate
  modified_base 18: mod_base = OTHER; note = 2'-O-methyluridine-3'-phosphate
  modified_base 19: mod_base = OTHER; note = 2'-O-methylguanosine-3'-phosphate
  modified_base 20: mod_base = OTHER; note = 2'-O-methyluridine-3'-phosphate
  modified_base 21: mod_base = OTHER; note 2'-O-methyladenosine-3'-phosphate-N-[tris(GalNAc-alkyl)-ami dodecanoyl)]-4-hydroxyprolinol (Hyp-(GalNAc-alkyl)3)
atccaaatgttttaggatgta

SEQ ID NO: 2663 - RNA, 23 nt, synthetic construct
  source 1..23: mol_type = other RNA
  modified_base 1: mod_base = OTHER; note = 2'-O-methyluridine-3'-phosphorothioate
  modified_base 2: mod_base = OTHER; note = 2'-fluoroadenosine-3'-phosphorothioate
  modified_base 3: mod_base = OTHER; note = 2'-O-methylcytidine-3'-phosphate
  modified_base 4: mod_base = OTHER; note = 2'-O-methyladenosine-3'-phosphate
  modified_base 5: mod_base = OTHER; note = 2'-O-methyluridine-3'-phosphate
  modified_base 6: mod_base = OTHER; note = 2'-fluorocytidine-3'-phosphate
  modified_base 7: mod_base = OTHER; note = 2'-O-methylcytidine-3'-phosphate
  modified_base 8: mod_base = OTHER; note = 2'-fluorouridine-3'-phosphate
  modified_base 9: mod_base = OTHER; note = 2'-fluoroadenosine-3'-phosphate
  modified_base 10: mod_base = OTHER; note = 2'-O-methyladenosine-3'-phosphate
  modified_base 11: mod_base = OTHER; note = 2'-O-methyladenosine-3'-phosphate
  modified_base 12: mod_base = OTHER; note = 2'-O-methyladenosine-3'-phosphate
  modified_base 13: mod_base = OTHER; note = 2'-O-methylcytidine-3'-phosphate
  modified_base 14: mod_base = OTHER; note = 2'-fluoroadenosine-3'-phosphate
  modified_base 15: mod_base = OTHER; note = 2'-O-methyluridine-3'-phosphate
  modified_base 16: mod_base = OTHER; note = 2'-fluorouridine-3'-phosphate
  modified_base 17: mod_base = OTHER; note = 2'-O-methyluridine-3'-phosphate
  modified_base 18: mod_base = OTHER; note = 2'-O-methylguanosine-3'-phosphate
  modified_base 19: mod_base = OTHER; note = 2'-O-methylguanosine-3'-phosphate
  modified_base 20: mod_base = OTHER; note = 2'-O-methyladenosine-3'-phosphate
  modified_base 21: mod_base = OTHER; note = 2'-O-methyluridine-3'-phosphorothioate
  modified_base 22: mod_base = OTHER; note = 2'-O-methyladenosine-3'- phosphorothioate
  modified_base 23: mod_base = OTHER; note = 2'-O-methyluridine-3'-phosphate
tacatcctaaaacatttggatat

SEQ ID NO: 2664 - RNA, 21 nt, synthetic construct
  source 1..21: mol_type = other RNA
  modified_base 1: mod_base = OTHER; note = 2'-O-methyluridine-3'-phosphorothioate
  modified_base 2: mod_base = OTHER; note = 2'-O-methyladenosine-3'- phosphorothioate
  modified_base 3: mod_base = OTHER; note = 2'-O-methyluridine-3'-phosphate
  modified_base 4: mod_base = OTHER; note = 2'-O-methylcytidine-3'-phosphate
  modified_base 5: mod_base = OTHER; note = 2'-O-methylcytidine-3'-phosphate
  modified_base 6: mod_base = OTHER; note = 2'-O-methyladenosine-3'-phosphate
  modified_base 7: mod_base = OTHER; note = 2'-fluoroadenosine-3'-phosphate
  modified_base 8: mod_base = OTHER; note = 2'-O-methyladenosine-3'-phosphate
  modified_base 9: mod_base = OTHER; note = 2'-fluorouridine-3'-phosphate
  modified_base 10: mod_base = OTHER; note = 2'-fluoroguanosine-3'-phosphate
  modified_base 11: mod_base = OTHER; note = 2'-fluorouridine-3'-phosphate
  modified_base 12: mod_base = OTHER; note = 2'-O-methyluridine-3'-phosphate
  modified_base 13: mod_base = OTHER; note = 2'-O-methyluridine-3'-phosphate
  modified_base 14: mod_base = OTHER; note = 2'-O-methyluridine-3'-phosphate
  modified_base 15: mod_base = OTHER; note = 2'-O-methyladenosine-3'-phosphate
  modified_base 16: mod_base = OTHER; note = 2'-O-methylguanosine-3'-phosphate
  modified_base 17: mod_base = OTHER; note = 2'-O-methylguanosine-3'-phosphate
  modified_base 18: mod_base = OTHER; note = 2'-O-methyladenosine-3'-phosphate
  modified_base 19: mod_base = OTHER; note = 2'-O-methyluridine-3'-phosphate
  modified_base 20: mod_base = OTHER; note = 2'-O-methylguanosine-3'-phosphate
  modified_base 21: mod_base = OTHER; note 2'-O-methyluridine-3'-phosphate-N-[tris(GalNAc-alkyl)-amido decanoyl)]-4-hydroxyprolinol (Hyp-(GalNAc-alkyl)3)
tatccaaatgttttaggatgt

SEQ ID NO: 2665 - RNA, 23 nt, synthetic construct
  source 1..23: mol_type = other RNA
  modified_base 1: mod_base = OTHER; note = 2'-O-methyladenosine-3'- phosphorothioate
  modified_base 2: mod_base = OTHER; note = 2'-fluorocytidine-3'-phosphorothioate
  modified_base 3: mod_base = OTHER; note = 2'-O-methyladenosine-3'-phosphate
  modified_base 4: mod_base = OTHER; note = 2'-O-methyluridine-3'-phosphate
  modified_base 5: mod_base = OTHER; note = 2'-O-methylcytidine-3'-phosphate
  modified_base 6: mod_base = OTHER; note = 2'-fluorocytidine-3'-phosphate
  modified_base 7: mod_base = OTHER; note = 2'-O-methyluridine-3'-phosphate
  modified_base 8: mod_base = OTHER; note = 2'-fluoroadenosine-3'-phosphate
  modified_base 9: mod_base = OTHER; note = 2'-fluoroadenosine-3'-phosphate
  modified_base 10: mod_base = OTHER; note = 2'-O-methyladenosine-3'-phosphate
  modified_base 11: mod_base = OTHER; note = 2'-O-methyladenosine-3'-phosphate
  modified_base 12: mod_base = OTHER; note = 2'-O-methylcytidine-3'-phosphate
  modified_base 13: mod_base = OTHER; note = 2'-O-methyladenosine-3'-phosphate
  modified_base 14: mod_base = OTHER; note = 2'-fluorouridine-3'-phosphate
  modified_base 15: mod_base = OTHER; note = 2'-O-methyluridine-3'-phosphate
  modified_base 16: mod_base = OTHER; note = 2'-fluorouridine-3'-phosphate
  modified_base 17: mod_base = OTHER; note = 2'-O-methylguanosine-3'-phosphate
  modified_base 18: mod_base = OTHER; note = 2'-O-methylguanosine-3'-phosphate
  modified_base 19: mod_base = OTHER; note = 2'-O-methyladenosine-3'-phosphate
  modified_base 20: mod_base = OTHER; note = 2'-O-methyluridine-3'-phosphate
  modified_base 21: mod_base = OTHER; note = 2'-O-methyladenosine-3'- phosphorothioate
  modified_base 22: mod_base = OTHER; note = 2'-O-methyluridine-3'-phosphorothioate
  modified_base 23: mod_base = OTHER; note = 2'-O-methyladenosine-3'-phosphate
acatcctaaaacatttggatata

SEQ ID NO: 2666 - RNA, 21 nt, synthetic construct
  source 1..21: mol_type = other RNA
  modified_base 1: mod_base = OTHER; note = 2'-O-methyladenosine-3'- phosphorothioate
  modified_base 2: mod_base = OTHER; note = 2'-O-methyluridine-3'-phosphorothioate
  modified_base 3: mod_base = OTHER; note = 2'-O-methylguanosine-3'-phosphate
  modified_base 4: mod_base = OTHER; note = 2'-O-methylguanosine-3'-phosphate
  modified_base 5: mod_base = OTHER; note = 2'-O-methylguanosine-3'-phosphate
  modified_base 6: mod_base = OTHER; note = 2'-O-methyluridine-3'-phosphate
  modified_base 7: mod_base = OTHER; note = 2'-fluoroguanosine-3'-phosphate
  modified_base 8: mod_base = OTHER; note = 2'-O-methylguanosine-3'-phosphate
  modified_base 9: mod_base = OTHER; note = 2'-fluorocytidine-3'-phosphate
  modified_base 10: mod_base = OTHER; note = 2'-fluoroguanosine-3'-phosphate
  modified_base 11: mod_base = OTHER; note = 2'-fluoroguanosine-3'-phosphate
  modified_base 12: mod_base = OTHER; note = 2'-O-methyluridine-3'-phosphate
  modified_base 13: mod_base = OTHER; note = 2'-O-methyladenosine-3'-phosphate
  modified_base 14: mod_base = OTHER; note = 2'-O-methyladenosine-3'-phosphate
  modified_base 15: mod_base = OTHER; note = 2'-O-methyluridine-3'-phosphate
  modified_base 16: mod_base = OTHER; note = 2'-O-methyluridine-3'-phosphate
  modified_base 17: mod_base = OTHER; note = 2'-O-methylguanosine-3'-phosphate
  modified_base 18: mod_base = OTHER; note = 2'-O-methylguanosine-3'-phosphate
  modified_base 19: mod_base = OTHER; note = 2'-O-methyluridine-3'-phosphate
  modified_base 20: mod_base = OTHER; note = 2'-O-methylguanosine-3'-phosphate
  modified_base 21: mod_base = OTHER; note 2'-O-methyladenosine-3'-phosphate-N-[tris(GalNAc-alkyl)-ami dodecanoyl)]-4-hydroxyprolinol (Hyp-(GalNAc-alkyl)3)
atgggtggcggtaattggtga

SEQ ID NO: 2667 - RNA, 23 nt, synthetic construct
  source 1..23: mol_type = other RNA
  modified_base 1: mod_base = OTHER; note = 2'-O-methyluridine-3'-phosphorothioate
  modified_base 2: mod_base = OTHER; note = 2'-fluorocytidine-3'-phosphorothioate
  modified_base 3: mod_base = OTHER; note = 2'-O-methyladenosine-3'-phosphate
  modified_base 4: mod_base = OTHER; note = 2'-O-methylcytidine-3'-phosphate
  modified_base 5: mod_base = OTHER; note = 2'-O-methylcytidine-3'-phosphate
  modified_base 6: mod_base = OTHER; note = 2'-fluoroadenosine-3'-phosphate
  modified_base 7: mod_base = OTHER; note = 2'-O-methyladenosine-3'-phosphate
  modified_base 8: mod_base = OTHER; note = 2'-fluorouridine-3'-phosphate
  modified_base 9: mod_base = OTHER; note = 2'-fluorouridine-3'-phosphate
  modified_base 10: mod_base = OTHER; note = 2'-O-methyladenosine-3'-phosphate
  modified_base 11: mod_base = OTHER; note = 2'-O-methylcytidine-3'-phosphate
  modified_base 12: mod_base = OTHER; note = 2'-O-methylcytidine-3'-phosphate
  modified_base 13: mod_base = OTHER; note = 2'-O-methylguanosine-3'-phosphate
  modified_base 14: mod_base = OTHER; note = 2'-fluorocytidine-3'-phosphate
  modified_base 15: mod_base = OTHER; note = 2'-O-methylcytidine-3'-phosphate
  modified_base 16: mod_base = OTHER; note = 2'-fluoroadenosine-3'-phosphate
  modified_base 17: mod_base = OTHER; note = 2'-O-methylcytidine-3'-phosphate
  modified_base 18: mod_base = OTHER; note = 2'-O-methylcytidine-3'-phosphate
  modified_base 19: mod_base = OTHER; note = 2'-O-methylcytidine-3'-phosphate
  modified_base 20: mod_base = OTHER; note = 2'-O-methyladenosine-3'-phosphate
  modified_base 21: mod_base = OTHER; note = 2'-O-methyluridine-3'-phosphorothioate
  modified_base 22: mod_base = OTHER; note = 2'-O-methyluridine-3'-phosphorothioate
  modified_base 23: mod_base = OTHER; note = 2'-O-methylcytidine-3'-phosphate
tcaccaattaccgccacccattc

SEQ ID NO: 2668 - RNA, 21 nt, synthetic construct
  source 1..21: mol_type = other RNA
  modified_base 1: mod_base = OTHER; note = 2'-O-methyluridine-3'-phosphorothioate
  modified_base 2: mod_base = OTHER; note = 2'-O-methylguanosine-3'- phosphorothioate
  modified_base 3: mod_base = OTHER; note = 2'-O-methylguanosine-3'-phosphate
  modified_base 4: mod_base = OTHER; note = 2'-O-methylguanosine-3'-phosphate
  modified_base 5: mod_base = OTHER; note = 2'-O-methyluridine-3'-phosphate
  modified_base 6: mod_base = OTHER; note = 2'-O-methylguanosine-3'-phosphate
  modified_base 7: mod_base = OTHER; note = 2'-fluoroguanosine-3'-phosphate
  modified_base 8: mod_base = OTHER; note = 2'-O-methylcytidine-3'-phosphate
  modified_base 9: mod_base = OTHER; note = 2'-fluoroguanosine-3'-phosphate
  modified_base 10: mod_base = OTHER; note = 2'-fluoroguanosine-3'-phosphate
  modified_base 11: mod_base = OTHER; note = 2'-fluorouridine-3'-phosphate
  modified_base 12: mod_base = OTHER; note = 2'-O-methyladenosine-3'-phosphate
  modified_base 13: mod_base = OTHER; note = 2'-O-methyladenosine-3'-phosphate
  modified_base 14: mod_base = OTHER; note = 2'-O-methyluridine-3'-phosphate
  modified_base 15: mod_base = OTHER; note = 2'-O-methyluridine-3'-phosphate
  modified_base 16: mod_base = OTHER; note = 2'-O-methylguanosine-3'-phosphate
  modified_base 17: mod_base = OTHER; note = 2'-O-methylguanosine-3'-phosphate
  modified_base 18: mod_base = OTHER; note = 2'-O-methyluridine-3'-phosphate
  modified_base 19: mod_base = OTHER; note = 2'-O-methylguanosine-3'-phosphate
  modified_base 20: mod_base = OTHER; note = 2'-O-methyladenosine-3'-phosphate
  modified_base 21: mod_base = OTHER; note 2'-O-methyluridine-3'-phosphate-N-[tris(GalNAc-alkyl)-amido decanoyl)]-4-hydroxyprolinol (Hyp-(GalNAc-alkyl)3)
tgggtggcggtaattggtgat

SEQ ID NO: 2669 - RNA, 23 nt, synthetic construct
  source 1..23: mol_type = other RNA
  modified_base 1: mod_base = OTHER; note = 2'-O-methyladenosine-3'- phosphorothioate
  modified_base 2: mod_base = OTHER; note = 2'-fluorouridine -3'-phosphorothioate
  modified_base 3: mod_base = OTHER; note = 2'-O-methylcytidine-3'-phosphate
  modified_base 4: mod_base = OTHER; note = 2'-O-methyladenosine-3'-phosphate
  modified_base 5: mod_base = OTHER; note = 2'-O-methylcytidine-3'-phosphate
  modified_base 6: mod_base = OTHER; note = 2'-fluorocytidine-3'-phosphate
  modified_base 7: mod_base = OTHER; note = 2'-O-methyladenosine-3'-phosphate
  modified_base 8: mod_base = OTHER; note = 2'-fluoroadenosine-3'-phosphate
  modified_base 9: mod_base = OTHER; note = 2'-fluorouridine-3'-phosphate
  modified_base 10: mod_base = OTHER; note = 2'-O-methyluridine-3'-phosphate
  modified_base 11: mod_base = OTHER; note = 2'-O-methyladenosine-3'-phosphate
  modified_base 12: mod_base = OTHER; note = 2'-O-methylcytidine-3'-phosphate
  modified_base 13: mod_base = OTHER; note = 2'-O-methylcytidine-3'-phosphate
  modified_base 14: mod_base = OTHER; note = 2'-fluoroguanosine-3'-phosphate
  modified_base 15: mod_base = OTHER; note = 2'-O-methylcytidine-3'-phosphate
  modified_base 16: mod_base = OTHER; note = 2'-fluorocytidine-3'-phosphate
  modified_base 17: mod_base = OTHER; note = 2'-O-methyladenosine-3'-phosphate
  modified_base 18: mod_base = OTHER; note = 2'-O-methylcytidine-3'-phosphate
  modified_base 19: mod_base = OTHER; note = 2'-O-methylcytidine-3'-phosphate
  modified_base 20: mod_base = OTHER; note = 2'-O-methylcytidine-3'-phosphate
  modified_base 21: mod_base = OTHER; note = 2'-O-methyladenosine-3'- phosphorothioate
  modified_base 22: mod_base = OTHER; note = 2'-O-methyluridine-3'-phosphorothioate
  modified_base 23: mod_base = OTHER; note = 2'-O-methyluridine-3'-phosphate
atcaccaattaccgccacccatt

SEQ ID NO: 2670 - RNA, 21 nt, synthetic construct
  source 1..21: mol_type = other RNA
  modified_base 1: mod_base = OTHER; note = 2'-O-methyluridine-3'-phosphorothioate
  modified_base 2: mod_base = OTHER; note = 2'-O-methylguanosine-3'- phosphorothioate
  modified_base 3: mod_base = OTHER; note = 2'-O-methylguanosine-3'-phosphate
  modified_base 4: mod_base = OTHER; note = 2'-O-methyladenosine-3'-phosphate
  modified_base 5: mod_base = OTHER; note = 2'-O-methyladenosine-3'-phosphate
  modified_base 6: mod_base = OTHER; note = 2'-O-methyluridine-3'-phosphate
  modified_base 7: mod_base = OTHER; note = 2'-fluoroguanosine-3'-phosphate
  modified_base 8: mod_base = OTHER; note = 2'-O-methylguanosine-3'-phosphate
  modified_base 9: mod_base = OTHER; note = 2'-fluoroguanosine-3'-phosphate
  modified_base 10: mod_base = OTHER; note = 2'-fluorouridine-3'-phosphate
  modified_base 11: mod_base = OTHER; note = 2'-fluoroguanosine-3'-phosphate
  modified_base 12: mod_base = OTHER; note = 2'-O-methylguanosine-3'-phosphate
  modified_base 13: mod_base = OTHER; note = 2'-O-methylcytidine-3'-phosphate
  modified_base 14: mod_base = OTHER; note = 2'-O-methylguanosine-3'-phosphate
  modified_base 15: mod_base = OTHER; note = 2'-O-methylguanosine-3'-phosphate
  modified_base 16: mod_base = OTHER; note = 2'-O-methyluridine-3'-phosphate
  modified_base 17: mod_base = OTHER; note = 2'-O-methyladenosine-3'-phosphate
  modified_base 18: mod_base = OTHER; note = 2'-O-methyladenosine-3'-phosphate
  modified_base 19: mod_base = OTHER; note = 2'-O-methyluridine-3'-phosphate
  modified_base 20: mod_base = OTHER; note = 2'-O-methyluridine-3'-phosphate
  modified_base 21: mod_base = OTHER; note 2'-O-methylguanosine-3'-phosphate-N-[tris(GalNAc-alkyl)-ami dodecanoyl)]-4-hydroxyprolinol (Hyp-(GalNAc-alkyl)3)
tggaatgggtggcggtaattg

SEQ ID NO: 2671 - RNA, 23 nt, synthetic construct
  source 1..23: mol_type = other RNA
  modified_base 1: mod_base = OTHER; note = 2'-O-methylcytidine-3'- phosphorothioate
  modified_base 2: mod_base = OTHER; note = 2'-fluoroadenosine-3'-phosphorothioate
  modified_base 3: mod_base = OTHER; note = 2'-O-methyladenosine-3'-phosphate
  modified_base 4: mod_base = OTHER; note = 2'-O-methyluridine-3'-phosphate
  modified_base 5: mod_base = OTHER; note = 2'-O-methyluridine-3'-phosphate
  modified_base 6: mod_base = OTHER; note = 2'-fluoroadenosine-3'-phosphate
  modified_base 7: mod_base = OTHER; note = 2'-O-methylcytidine-3'-phosphate
  modified_base 8: mod_base = OTHER; note = 2'-fluorocytidine-3'-phosphate
  modified_base 9: mod_base = OTHER; note = 2'-fluoroguanosine-3'-phosphate
  modified_base 10: mod_base = OTHER; note = 2'-O-methylcytidine-3'-phosphate
  modified_base 11: mod_base = OTHER; note = 2'-O-methylcytidine-3'-phosphate
  modified_base 12: mod_base = OTHER; note = 2'-O-methyladenosine-3'-phosphate
  modified_base 13: mod_base = OTHER; note = 2'-O-methylcytidine-3'-phosphate
  modified_base 14: mod_base = OTHER; note = 2'-fluorocytidine-3'-phosphate
  modified_base 15: mod_base = OTHER; note = 2'-O-methylcytidine-3'-phosphate
  modified_base 16: mod_base = OTHER; note = 2'-fluoroadenosine-3'-phosphate
  modified_base 17: mod_base = OTHER; note = 2'-O-methyluridine-3'-phosphate
  modified_base 18: mod_base = OTHER; note = 2'-O-methyluridine-3'-phosphate
  modified_base 19: mod_base = OTHER; note = 2'-O-methylcytidine-3'-phosphate
  modified_base 20: mod_base = OTHER; note = 2'-O-methylcytidine-3'-phosphate
  modified_base 21: mod_base = OTHER; note = 2'-O-methyladenosine-3'- phosphorothioate
  modified_base 22: mod_base = OTHER; note = 2'-O-methyladenosine-3'- phosphorothioate
  modified_base 23: mod_base = OTHER; note = 2'-O-methyluridine-3'-phosphate
caattaccgccacccattccaat

SEQ ID NO: 2672 - RNA, 21 nt, synthetic construct
  source 1..21: mol_type = other RNA
  modified_base 1: mod_base = OTHER; note = 2'-O-methyluridine-3'-phosphorothioate
  modified_base 2: mod_base = OTHER; note = 2'-O-methyluridine-3'-phosphorothioate
  modified_base 3: mod_base = OTHER; note = 2'-O-methylguanosine-3'-phosphate
  modified_base 4: mod_base = OTHER; note = 2'-O-methylguanosine-3'-phosphate
  modified_base 5: mod_base = OTHER; note = 2'-O-methyladenosine-3'-phosphate
  modified_base 6: mod_base = OTHER; note = 2'-O-methyladenosine-3'-phosphate
  modified_base 7: mod_base = OTHER; note = 2'-fluorouridine-3'-phosphate
  modified_base 8: mod_base = OTHER; note = 2'-O-methylguanosine-3'-phosphate
  modified_base 9: mod_base = OTHER; note = 2'-fluoroguanosine-3'-phosphate
  modified_base 10: mod_base = OTHER; note = 2'-fluoroguanosine-3'-phosphate
  modified_base 11: mod_base = OTHER; note = 2'-fluorouridine-3'-phosphate
  modified_base 12: mod_base = OTHER; note = 2'-O-methylguanosine-3'-phosphate
  modified_base 13: mod_base = OTHER; note = 2'-O-methylguanosine-3'-phosphate
  modified_base 14: mod_base = OTHER; note = 2'-O-methylcytidine-3'-phosphate
  modified_base 15: mod_base = OTHER; note = 2'-O-methylguanosine-3'-phosphate
  modified_base 16: mod_base = OTHER; note = 2'-O-methylguanosine-3'-phosphate
  modified_base 17: mod_base = OTHER; note = 2'-O-methyluridine-3'-phosphate
  modified_base 18: mod_base = OTHER; note = 2'-O-methyladenosine-3'-phosphate
  modified_base 19: mod_base = OTHER; note = 2'-O-methyladenosine-3'-phosphate
  modified_base 20: mod_base = OTHER; note = 2'-O-methyluridine-3'-phosphate
  modified_base 21: mod_base = OTHER; note 2'-O-methyluridine-3'-phosphate-N-[tris(GalNAc-alkyl)-amido decanoyl)]-4-hydroxyprolinol (Hyp-(GalNAc-alkyl)3)
ttggaatgggtggcggtaatt

SEQ ID NO: 2673 - RNA, 23 nt, synthetic construct
  source 1..23: mol_type = other RNA
  modified_base 1: mod_base = OTHER; note = 2'-O-methyladenosine-3'- phosphorothioate
  modified_base 2: mod_base = OTHER; note = 2'-fluoroadenosine-3'-phosphorothioate
  modified_base 3: mod_base = OTHER; note = 2'-O-methyluridine-3'-phosphate
  modified_base 4: mod_base = OTHER; note = 2'-O-methyluridine-3'-phosphate
  modified_base 5: mod_base = OTHER; note = 2'-O-methyladenosine-3'-phosphate
  modified_base 6: mod_base = OTHER; note = 2'-fluorocytidine-3'-phosphate
  modified_base 7: mod_base = OTHER; note = 2'-O-methylcytidine-3'-phosphate
  modified_base 8: mod_base = OTHER; note = 2'-fluoroguanosine-3'-phosphate
  modified_base 9: mod_base = OTHER; note = 2'-fluorocytidine-3'-phosphate
  modified_base 10: mod_base = OTHER; note = 2'-O-methylcytidine-3'-phosphate
  modified_base 11: mod_base = OTHER; note = 2'-O-methyladenosine-3'-phosphate
  modified_base 12: mod_base = OTHER; note = 2'-O-methylcytidine-3'-phosphate
  modified_base 13: mod_base = OTHER; note = 2'-O-methylcytidine-3'-phosphate
  modified_base 14: mod_base = OTHER; note = 2'-fluorocytidine-3'-phosphate
  modified_base 15: mod_base = OTHER; note = 2'-O-methyladenosine-3'-phosphate
  modified_base 16: mod_base = OTHER; note = 2'-fluorouridine-3'-phosphate
  modified_base 17: mod_base = OTHER; note = 2'-O-methyluridine-3'-phosphate
  modified_base 18: mod_base = OTHER; note = 2'-O-methylcytidine-3'-phosphate
  modified_base 19: mod_base = OTHER; note = 2'-O-methylcytidine-3'-phosphate
  modified_base 20: mod_base = OTHER; note = 2'-O-methyladenosine-3'-phosphate
  modified_base 21: mod_base = OTHER; note = 2'-O-methyladenosine-3'- phosphorothioate
  modified_base 22: mod_base = OTHER; note = 2'-O-methyluridine-3'-phosphorothioate
  modified_base 23: mod_base = OTHER; note = 2'-O-methyluridine-3'-phosphate
aattaccgccacccattccaatt

SEQ ID NO: 2674 - RNA, 21 nt, synthetic construct
  source 1..21: mol_type = other RNA
  modified_base 1: mod_base = OTHER; note = 2'-O-methyluridine-3'-phosphorothioate
  modified_base 2: mod_base = OTHER; note = 2'-O-methyluridine-3'-phosphorothioate
  modified_base 3: mod_base = OTHER; note = 2'-O-methylcytidine-3'-phosphate
  modified_base 4: mod_base = OTHER; note = 2'-O-methyladenosine-3'-phosphate
  modified_base 5: mod_base = OTHER; note = 2'-O-methyladenosine-3'-phosphate
  modified_base 6: mod_base = OTHER; note = 2'-O-methyladenosine-3'-phosphate
  modified_base 7: mod_base = OTHER; note = 2'-fluoroguanosine-3'-phosphate
  modified_base 8: mod_base = OTHER; note = 2'-O-methyluridine-3'-phosphate
  modified_base 9: mod_base = OTHER; note = 2'-fluoroguanosine-3'-phosphate
  modified_base 10: mod_base = OTHER; note = 2'-fluorouridine-3'-phosphate
  modified_base 11: mod_base = OTHER; note = 2'-fluorouridine-3'-phosphate
  modified_base 12: mod_base = OTHER; note = 2'-O-methylguanosine-3'-phosphate
  modified_base 13: mod_base = OTHER; note = 2'-O-methylguanosine-3'-phosphate
  modified_base 14: mod_base = OTHER; note = 2'-O-methyluridine-3'-phosphate
  modified_base 15: mod_base = OTHER; note = 2'-O-methyladenosine-3'-phosphate
  modified_base 16: mod_base = OTHER; note = 2'-O-methyladenosine-3'-phosphate
  modified_base 17: mod_base = OTHER; note = 2'-O-methyluridine-3'-phosphate
  modified_base 18: mod_base = OTHER; note = 2'-O-methylguanosine-3'-phosphate
  modified_base 19: mod_base = OTHER; note = 2'-O-methylcytidine-3'-phosphate
  modified_base 20: mod_base = OTHER; note = 2'-O-methylcytidine-3'-phosphate
  modified_base 21: mod_base = OTHER; note 2'-O-methyluridine-3'-phosphate-N-[tris(GalNAc-alkyl)-amido decanoyl)]-4-hydroxyprolinol (Hyp-(GalNAc-alkyl)3)
ttcaaagtgttggtaatgcct

SEQ ID NO: 2675 - RNA, 23 nt, synthetic construct
  source 1..23: mol_type = other RNA
  modified_base 1: mod_base = OTHER; note = 2'-O-methyladenosine-3'- phosphorothioate
  modified_base 2: mod_base = OTHER; note = 2'-fluoroguanosine-3'-phosphorothioate
  modified_base 3: mod_base = OTHER; note = 2'-O-methylguanosine-3'-phosphate
  modified_base 4: mod_base = OTHER; note = 2'-O-methylcytidine-3'-phosphate
  modified_base 5: mod_base = OTHER; note = 2'-O-methyladenosine-3'-phosphate
  modified_base 6: mod_base = OTHER; note = 2'-fluorouridine-3'-phosphate
  modified_base 7: mod_base = OTHER; note = 2'-O-methyluridine-3'-phosphate
  modified_base 8: mod_base = OTHER; note = 2'-fluoroadenosine-3'-phosphate
  modified_base 9: mod_base = OTHER; note = 2'-fluorocytidine-3'-phosphate
  modified_base 10: mod_base = OTHER; note = 2'-O-methylcytidine-3'-phosphate
  modified_base 11: mod_base = OTHER; note = 2'-O-methyladenosine-3'-phosphate
  modified_base 12: mod_base = OTHER; note = 2'-O-methyladenosine-3'-phosphate
  modified_base 13: mod_base = OTHER; note = 2'-O-methylcytidine-3'-phosphate
  modified_base 14: mod_base = OTHER; note = 2'-fluoroadenosine-3'-phosphate
  modified_base 15: mod_base = OTHER; note = 2'-O-methylcytidine-3'-phosphate
  modified_base 16: mod_base = OTHER; note = 2'-fluorouridine-3'-phosphate
  modified_base 17: mod_base = OTHER; note = 2'-O-methyluridine-3'-phosphate
  modified_base 18: mod_base = OTHER; note = 2'-O-methyluridine-3'-phosphate
  modified_base 19: mod_base = OTHER; note = 2'-O-methylguanosine-3'-phosphate
  modified_base 20: mod_base = OTHER; note = 2'-O-methyladenosine-3'-phosphate
  modified_base 21: mod_base = OTHER; note = 2'-O-methyladenosine-3'- phosphorothioate
  modified_base 22: mod_base = OTHER; note = 2'-O-methylcytidine-3'- phosphorothioate
  modified_base 23: mod_base = OTHER; note = 2'-O-methylcytidine-3'-phosphate
aggcattaccaacactttgaacc

SEQ ID NO: 2676 - RNA, 21 nt, synthetic construct
  source 1..21: mol_type = other RNA
  modified_base 1: mod_base = OTHER; note = 2'-O-methyluridine-3'-phosphorothioate
  modified_base 2: mod_base = OTHER; note = 2'-O-methylcytidine-3'- phosphorothioate
  modified_base 3: mod_base = OTHER; note = 2'-O-methyladenosine-3'-phosphate
  modified_base 4: mod_base = OTHER; note = 2'-O-methyladenosine-3'-phosphate
  modified_base 5: mod_base = OTHER; note = 2'-O-methyladenosine-3'-phosphate
  modified_base 6: mod_base = OTHER; note = 2'-O-methylguanosine-3'-phosphate
  modified_base 7: mod_base = OTHER; note = 2'-fluorouridine-3'-phosphate
  modified_base 8: mod_base = OTHER; note = 2'-O-methylguanosine-3'-phosphate
  modified_base 9: mod_base = OTHER; note = 2'-fluorouridine-3'-phosphate
  modified_base 10: mod_base = OTHER; note = 2'-fluorouridine-3'-phosphate
  modified_base 11: mod_base = OTHER; note = 2'-fluoroguanosine-3'-phosphate
  modified_base 12: mod_base = OTHER; note = 2'-O-methylguanosine-3'-phosphate
  modified_base 13: mod_base = OTHER; note = 2'-O-methyluridine-3'-phosphate
  modified_base 14: mod_base = OTHER; note = 2'-O-methyladenosine-3'-phosphate
  modified_base 15: mod_base = OTHER; note = 2'-O-methyladenosine-3'-phosphate
  modified_base 16: mod_base = OTHER; note = 2'-O-methyluridine-3'-phosphate
  modified_base 17: mod_base = OTHER; note = 2'-O-methylguanosine-3'-phosphate
  modified_base 18: mod_base = OTHER; note = 2'-O-methylcytidine-3'-phosphate
  modified_base 19: mod_base = OTHER; note = 2'-O-methylcytidine-3'-phosphate
  modified_base 20: mod_base = OTHER; note = 2'-O-methyluridine-3'-phosphate
  modified_base 21: mod_base = OTHER; note 2'-O-methylguanosine-3'-phosphate-N-[tris(GalNAc-alkyl)-ami dodecanoyl)]-4-hydroxyprolinol (Hyp-(GalNAc-alkyl)3)
tcaaagtgttggtaatgcctg

SEQ ID NO: 2677 - RNA, 23 nt, synthetic construct
  source 1..23: mol_type = other RNA
  modified_base 1: mod_base = OTHER; note = 2'-O-methylcytidine-3'- phosphorothioate
  modified_base 2: mod_base = OTHER; note = 2'-fluoroadenosine-3'-phosphorothioate
  modified_base 3: mod_base = OTHER; note = 2'-O-methylguanosine-3'-phosphate
  modified_base 4: mod_base = OTHER; note = 2'-O-methylguanosine-3'-phosphate
  modified_base 5: mod_base = OTHER; note = 2'-O-methylcytidine-3'-phosphate
  modified_base 6: mod_base = OTHER; note = 2'-fluoroadenosine-3'-phosphate
  modified_base 7: mod_base = OTHER; note = 2'-O-methyluridine-3'-phosphate
  modified_base 8: mod_base = OTHER; note = 2'-fluorouridine-3'-phosphate
  modified_base 9: mod_base = OTHER; note = 2'-fluoroadenosine-3'-phosphate
  modified_base 10: mod_base = OTHER; note = 2'-O-methylcytidine-3'-phosphate
  modified_base 11: mod_base = OTHER; note = 2'-O-methylcytidine-3'-phosphate
  modified_base 12: mod_base = OTHER; note = 2'-O-methyladenosine-3'-phosphate
  modified_base 13: mod_base = OTHER; note = 2'-O-methyladenosine-3'-phosphate
  modified_base 14: mod_base = OTHER; note = 2'-fluorocytidine-3'-phosphate
  modified_base 15: mod_base = OTHER; note = 2'-O-methyladenosine-3'-phosphate
  modified_base 16: mod_base = OTHER; note = 2'-fluorocytidine-3'-phosphate
  modified_base 17: mod_base = OTHER; note = 2'-O-methyluridine-3'-phosphate
  modified_base 18: mod_base = OTHER; note = 2'-O-methyluridine-3'-phosphate
  modified_base 19: mod_base = OTHER; note = 2'-O-methyluridine-3'-phosphate
  modified_base 20: mod_base = OTHER; note = 2'-O-methylguanosine-3'-phosphate
  modified_base 21: mod_base = OTHER; note = 2'-O-methyladenosine-3'- phosphorothioate
  modified_base 22: mod_base = OTHER; note = 2'-O-methyladenosine-3'- phosphorothioate
  modified_base 23: mod_base = OTHER; note = 2'-O-methylcytidine-3'-phosphate
caggcattaccaacactttgaac

SEQ ID NO: 2678 - RNA, 21 nt, synthetic construct
  source 1..21: mol_type = other RNA
  modified_base 1: mod_base = OTHER; note = 2'-O-methylcytidine-3'- phosphorothioate
  modified_base 2: mod_base = OTHER; note = 2'-O-methyladenosine-3'- phosphorothioate
  modified_base 3: mod_base = OTHER; note = 2'-O-methylguanosine-3'-phosphate
  modified_base 4: mod_base = OTHER; note = 2'-O-methylguanosine-3'-phosphate
  modified_base 5: mod_base = OTHER; note = 2'-O-methyluridine-3'-phosphate
  modified_base 6: mod_base = OTHER; note = 2'-O-methyluridine-3'-phosphate
  modified_base 7: mod_base = OTHER; note = 2'-fluorocytidine-3'-phosphate
  modified_base 8: mod_base = OTHER; note = 2'-O-methyladenosine-3'-phosphate
  modified_base 9: mod_base = OTHER; note = 2'-fluoroadenosine-3'-phosphate
  modified_base 10: mod_base = OTHER; note = 2'-fluoroadenosine-3'-phosphate
  modified_base 11: mod_base = OTHER; note = 2'-fluoroguanosine-3'-phosphate
  modified_base 12: mod_base = OTHER; note = 2'-O-methyluridine-3'-phosphate
  modified_base 13: mod_base = OTHER; note = 2'-O-methylguanosine-3'-phosphate
  modified_base 14: mod_base = OTHER; note = 2'-O-methyluridine-3'-phosphate
  modified_base 15: mod_base = OTHER; note = 2'-O-methyluridine-3'-phosphate
  modified_base 16: mod_base = OTHER; note = 2'-O-methylguanosine-3'-phosphate
  modified_base 17: mod_base = OTHER; note = 2'-O-methylguanosine-3'-phosphate
  modified_base 18: mod_base = OTHER; note = 2'-O-methyluridine-3'-phosphate
  modified_base 19: mod_base = OTHER; note = 2'-O-methyladenosine-3'-phosphate
  modified_base 20: mod_base = OTHER; note = 2'-O-methyladenosine-3'-phosphate
  modified_base 21: mod_base = OTHER; note 2'-O-methyluridine-3'-phosphate-N-[tris(GalNAc-alkyl)-amido decanoyl)]-4-hydroxyprolinol (Hyp-(GalNAc-alkyl)3)
caggttcaaagtgttggtaat

SEQ ID NO: 2679 - RNA, 23 nt, synthetic construct
  source 1..23: mol_type = other RNA
  modified_base 1: mod_base = OTHER; note = 2'-O-methyladenosine-3'- phosphorothioate
  modified_base 2: mod_base = OTHER; note = 2'-fluorouridine -3'-phosphorothioate
  modified_base 3: mod_base = OTHER; note = 2'-O-methyluridine-3'-phosphate
  modified_base 4: mod_base = OTHER; note = 2'-O-methyladenosine-3'-phosphate
  modified_base 5: mod_base = OTHER; note = 2'-O-methylcytidine-3'-phosphate
  modified_base 6: mod_base = OTHER; note = 2'-fluorocytidine-3'-phosphate
  modified_base 7: mod_base = OTHER; note = 2'-O-methyladenosine-3'-phosphate
  modified_base 8: mod_base = OTHER; note = 2'-fluoroadenosine-3'-phosphate
  modified_base 9: mod_base = OTHER; note = 2'-fluorocytidine-3'-phosphate
  modified_base 10: mod_base = OTHER; note = 2'-O-methyladenosine-3'-phosphate
  modified_base 11: mod_base = OTHER; note = 2'-O-methylcytidine-3'-phosphate
  modified_base 12: mod_base = OTHER; note = 2'-O-methyluridine-3'-phosphate
  modified_base 13: mod_base = OTHER; note = 2'-O-methyluridine-3'-phosphate
  modified_base 14: mod_base = OTHER; note = 2'-fluorouridine-3'-phosphate
  modified_base 15: mod_base = OTHER; note = 2'-O-methylguanosine-3'-phosphate
  modified_base 16: mod_base = OTHER; note = 2'-fluoroadenosine-3'-phosphate
  modified_base 17: mod_base = OTHER; note = 2'-O-methyladenosine-3'-phosphate
  modified_base 18: mod_base = OTHER; note = 2'-O-methylcytidine-3'-phosphate
  modified_base 19: mod_base = OTHER; note = 2'-O-methylcytidine-3'-phosphate
  modified_base 20: mod_base = OTHER; note = 2'-O-methyluridine-3'-phosphate
  modified_base 21: mod_base = OTHER; note = 2'-O-methylguanosine-3'- phosphorothioate
  modified_base 22: mod_base = OTHER; note = 2'-O-methyladenosine-3'- phosphorothioate
  modified_base 23: mod_base = OTHER; note = 2'-O-methylguanosine-3'-phosphate
attaccaacactttgaacctgag

SEQ ID NO: 2680 - RNA, 21 nt, synthetic construct
  source 1..21: mol_type = other RNA
  modified_base 1: mod_base = OTHER; note = 2'-O-methyluridine-3'-phosphorothioate
  modified_base 2: mod_base = OTHER; note = 2'-O-methylcytidine-3'- phosphorothioate
  modified_base 3: mod_base = OTHER; note = 2'-O-methyladenosine-3'-phosphate
  modified_base 4: mod_base = OTHER; note = 2'-O-methylguanosine-3'-phosphate
  modified_base 5: mod_base = OTHER; note = 2'-O-methylguanosine-3'-phosphate
  modified_base 6: mod_base = OTHER; note = 2'-O-methyluridine-3'-phosphate
  modified_base 7: mod_base = OTHER; note = 2'-fluorouridine-3'-phosphate
  modified_base 8: mod_base = OTHER; note = 2'-O-methylcytidine-3'-phosphate
  modified_base 9: mod_base = OTHER; note = 2'-fluoroadenosine-3'-phosphate
  modified_base 10: mod_base = OTHER; note = 2'-fluoroadenosine-3'-phosphate
  modified_base 11: mod_base = OTHER; note = 2'-fluoroadenosine-3'-phosphate
  modified_base 12: mod_base = OTHER; note = 2'-O-methylguanosine-3'-phosphate
  modified_base 13: mod_base = OTHER; note = 2'-O-methyluridine-3'-phosphate
  modified_base 14: mod_base = OTHER; note = 2'-O-methylguanosine-3'-phosphate
  modified_base 15: mod_base = OTHER; note = 2'-O-methyluridine-3'-phosphate
  modified_base 16: mod_base = OTHER; note = 2'-O-methyluridine-3'-phosphate
  modified_base 17: mod_base = OTHER; note = 2'-O-methylguanosine-3'-phosphate
  modified_base 18: mod_base = OTHER; note = 2'-O-methylguanosine-3'-phosphate
  modified_base 19: mod_base = OTHER; note = 2'-O-methyluridine-3'-phosphate
  modified_base 20: mod_base = OTHER; note = 2'-O-methyladenosine-3'-phosphate
  modified_base 21: mod_base = OTHER; note 2'-O-methyladenosine-3'-phosphate-N-[tris(GalNAc-alkyl)-ami dodecanoyl)]-4-hydroxyprolinol (Hyp-(GalNAc-alkyl)3)
tcaggttcaaagtgttggtaa

SEQ ID NO: 2681 - RNA, 23 nt, synthetic construct
  source 1..23: mol_type = other RNA
  modified_base 1: mod_base = OTHER; note = 2'-O-methyluridine-3'-phosphorothioate
  modified_base 2: mod_base = OTHER; note = 2'-fluorouridine -3'-phosphorothioate
  modified_base 3: mod_base = OTHER; note = 2'-O-methyladenosine-3'-phosphate
  modified_base 4: mod_base = OTHER; note = 2'-O-methylcytidine-3'-phosphate
  modified_base 5: mod_base = OTHER; note = 2'-O-methylcytidine-3'-phosphate
  modified_base 6: mod_base = OTHER; note = 2'-fluoroadenosine-3'-phosphate
  modified_base 7: mod_base = OTHER; note = 2'-O-methyladenosine-3'-phosphate
  modified_base 8: mod_base = OTHER; note = 2'-fluorocytidine-3'-phosphate
  modified_base 9: mod_base = OTHER; note = 2'-fluoroadenosine-3'-phosphate
  modified_base 10: mod_base = OTHER; note = 2'-O-methylcytidine-3'-phosphate
  modified_base 11: mod_base = OTHER; note = 2'-O-methyluridine-3'-phosphate
  modified_base 12: mod_base = OTHER; note = 2'-O-methyluridine-3'-phosphate
  modified_base 13: mod_base = OTHER; note = 2'-O-methyluridine-3'-phosphate
  modified_base 14: mod_base = OTHER; note = 2'-fluoroguanosine-3'-phosphate
  modified_base 15: mod_base = OTHER; note = 2'-O-methyladenosine-3'-phosphate
  modified_base 16: mod_base = OTHER; note = 2'-fluoroadenosine-3'-phosphate
  modified_base 17: mod_base = OTHER; note = 2'-O-methylcytidine-3'-phosphate
  modified_base 18: mod_base = OTHER; note = 2'-O-methylcytidine-3'-phosphate
  modified_base 19: mod_base = OTHER; note = 2'-O-methyluridine-3'-phosphate
  modified_base 20: mod_base = OTHER; note = 2'-O-methylguanosine-3'-phosphate
  modified_base 21: mod_base = OTHER; note = 2'-O-methyladenosine-3'- phosphorothioate
  modified_base 22: mod_base = OTHER; note = 2'-O-methylguanosine-3'- phosphorothioate
  modified_base 23: mod_base = OTHER; note = 2'-O-methylcytidine-3'-phosphate
ttaccaacactttgaacctgagc

SEQ ID NO: 2682 - RNA, 21 nt, synthetic construct
  source 1..21: mol_type = other RNA
  modified_base 1: mod_base = OTHER; note = 2'-O-methylcytidine-3'- phosphorothioate
  modified_base 2: mod_base = OTHER; note = 2'-O-methylcytidine-3'- phosphorothioate
  modified_base 3: mod_base = OTHER; note = 2'-O-methyladenosine-3'-phosphate
  modified_base 4: mod_base = OTHER; note = 2'-O-methylcytidine-3'-phosphate
  modified_base 5: mod_base = OTHER; note = 2'-O-methylcytidine-3'-phosphate
  modified_base 6: mod_base = OTHER; note = 2'-O-methyluridine-3'-phosphate
  modified_base 7: mod_base = OTHER; note = 2'-fluorocytidine-3'-phosphate
  modified_base 8: mod_base = OTHER; note = 2'-O-methylcytidine-3'-phosphate
  modified_base 9: mod_base = OTHER; note = 2'-fluorouridine-3'-phosphate
  modified_base 10: mod_base = OTHER; note = 2'-fluorocytidine-3'-phosphate
  modified_base 11: mod_base = OTHER; note = 2'-fluoroadenosine-3'-phosphate
  modified_base 12: mod_base = OTHER; note = 2'-O-methyladenosine-3'-phosphate
  modified_base 13: mod_base = OTHER; note = 2'-O-methyluridine-3'-phosphate
  modified_base 14: mod_base = OTHER; note = 2'-O-methyluridine-3'-phosphate
  modified_base 15: mod_base = OTHER; note = 2'-O-methylguanosine-3'-phosphate
  modified_base 16: mod_base = OTHER; note = 2'-O-methyladenosine-3'-phosphate
  modified_base 17: mod_base = OTHER; note = 2'-O-methyladenosine-3'-phosphate
  modified_base 18: mod_base = OTHER; note = 2'-O-methylguanosine-3'-phosphate
  modified_base 19: mod_base = OTHER; note = 2'-O-methyladenosine-3'-phosphate
  modified_base 20: mod_base = OTHER; note = 2'-O-methyladenosine-3'-phosphate
  modified_base 21: mod_base = OTHER; note 2'-O-methylguanosine-3'-phosphate-N-[tris(GalNAc-alkyl)-ami dodecanoyl)]-4-hydroxyprolinol (Hyp-(GalNAc-alkyl)3)
ccacctcctcaattgaagaag

SEQ ID NO: 2683 - RNA, 23 nt, synthetic construct
  source 1..23: mol_type = other RNA
  modified_base 1: mod_base = OTHER; note = 2'-O-methylcytidine-3'- phosphorothioate
  modified_base 2: mod_base = OTHER; note = 2'-fluorouridine -3'-phosphorothioate
  modified_base 3: mod_base = OTHER; note = 2'-O-methyluridine-3'-phosphate
  modified_base 4: mod_base = OTHER; note = 2'-O-methylcytidine-3'-phosphate
  modified_base 5: mod_base = OTHER; note = 2'-O-methyluridine-3'-phosphate
  modified_base 6: mod_base = OTHER; note = 2'-fluorouridine-3'-phosphate
  modified_base 7: mod_base = OTHER; note = 2'-O-methylcytidine-3'-phosphate
  modified_base 8: mod_base = OTHER; note = 2'-fluoroadenosine-3'-phosphate
  modified_base 9: mod_base = OTHER; note = 2'-fluoroadenosine-3'-phosphate
  modified_base 10: mod_base = OTHER; note = 2'-O-methyluridine-3'-phosphate
  modified_base 11: mod_base = OTHER; note = 2'-O-methyluridine-3'-phosphate
  modified_base 12: mod_base = OTHER; note = 2'-O-methylguanosine-3'-phosphate
  modified_base 13: mod_base = OTHER; note = 2'-O-methyladenosine-3'-phosphate
  modified_base 14: mod_base = OTHER; note = 2'-fluoroguanosine-3'-phosphate
  modified_base 15: mod_base = OTHER; note = 2'-O-methylguanosine-3'-phosphate
  modified_base 16: mod_base = OTHER; note = 2'-fluoroadenosine-3'-phosphate
  modified_base 17: mod_base = OTHER; note = 2'-O-methylguanosine-3'-phosphate
  modified_base 18: mod_base = OTHER; note = 2'-O-methylguanosine-3'-phosphate
  modified_base 19: mod_base = OTHER; note = 2'-O-methyluridine-3'-phosphate
  modified_base 20: mod_base = OTHER; note = 2'-O-methylguanosine-3'-phosphate
  modified_base 21: mod_base = OTHER; note = 2'-O-methylguanosine-3'- phosphorothioate
  modified_base 22: mod_base = OTHER; note = 2'-O-methylcytidine-3'- phosphorothioate
  modified_base 23: mod_base = OTHER; note = 2'-O-methylcytidine-3'-phosphate
cttcttcaattgaggaggtggcc

SEQ ID NO: 2684 - RNA, 21 nt, synthetic construct
  source 1..21: mol_type = other RNA
  modified_base 1: mod_base = OTHER; note = 2'-O-methylcytidine-3'- phosphorothioate
  modified_base 2: mod_base = OTHER; note = 2'-O-methyladenosine-3'- phosphorothioate
  modified_base 3: mod_base = OTHER; note = 2'-O-methylcytidine-3'-phosphate
  modified_base 4: mod_base = OTHER; note = 2'-O-methylcytidine-3'-phosphate
  modified_base 5: mod_base = OTHER; note = 2'-O-methyluridine-3'-phosphate
  modified_base 6: mod_base = OTHER; note = 2'-O-methylcytidine-3'-phosphate
  modified_base 7: mod_base = OTHER; note = 2'-fluorocytidine-3'-phosphate
  modified_base 8: mod_base = OTHER; note = 2'-O-methyluridine-3'-phosphate
  modified_base 9: mod_base = OTHER; note = 2'-fluorocytidine-3'-phosphate
  modified_base 10: mod_base = OTHER; note = 2'-fluoroadenosine-3'-phosphate
  modified_base 11: mod_base = OTHER; note = 2'-fluoroadenosine-3'-phosphate
  modified_base 12: mod_base = OTHER; note = 2'-O-methyluridine-3'-phosphate
  modified_base 13: mod_base = OTHER; note = 2'-O-methyluridine-3'-phosphate
  modified_base 14: mod_base = OTHER; note = 2'-O-methylguanosine-3'-phosphate
  modified_base 15: mod_base = OTHER; note = 2'-O-methyladenosine-3'-phosphate
  modified_base 16: mod_base = OTHER; note = 2'-O-methyladenosine-3'-phosphate
  modified_base 17: mod_base = OTHER; note = 2'-O-methylguanosine-3'-phosphate
  modified_base 18: mod_base = OTHER; note = 2'-O-methyladenosine-3'-phosphate
  modified_base 19: mod_base = OTHER; note = 2'-O-methyladenosine-3'-phosphate
  modified_base 20: mod_base = OTHER; note = 2'-O-methylguanosine-3'-phosphate
  modified_base 21: mod_base = OTHER; note 2'-O-methyluridine-3'-phosphate-N-[tris(GalNAc-alkyl)-amido decanoyl)]-4-hydroxyprolinol (Hyp-(GalNAc-alkyl)3)
cacctcctcaattgaagaagt

SEQ ID NO: 2685 - RNA, 23 nt, synthetic construct
  source 1..23: mol_type = other RNA
  modified_base 1: mod_base = OTHER; note = 2'-O-methyladenosine-3'- phosphorothioate
  modified_base 2: mod_base = OTHER; note = 2'-fluorocytidine-3'-phosphorothioate
  modified_base 3: mod_base = OTHER; note = 2'-O-methyluridine-3'-phosphate
  modified_base 4: mod_base = OTHER; note = 2'-O-methyluridine-3'-phosphate
  modified_base 5: mod_base = OTHER; note = 2'-O-methylcytidine-3'-phosphate
  modified_base 6: mod_base = OTHER; note = 2'-fluorouridine-3'-phosphate
  modified_base 7: mod_base = OTHER; note = 2'-O-methyluridine-3'-phosphate
  modified_base 8: mod_base = OTHER; note = 2'-fluorocytidine-3'-phosphate
  modified_base 9: mod_base = OTHER; note = 2'-fluoroadenosine-3'-phosphate
  modified_base 10: mod_base = OTHER; note = 2'-O-methyladenosine-3'-phosphate
  modified_base 11: mod_base = OTHER; note = 2'-O-methyluridine-3'-phosphate
  modified_base 12: mod_base = OTHER; note = 2'-O-methyluridine-3'-phosphate
  modified_base 13: mod_base = OTHER; note = 2'-O-methylguanosine-3'-phosphate
  modified_base 14: mod_base = OTHER; note = 2'-fluoroadenosine-3'-phosphate
  modified_base 15: mod_base = OTHER; note = 2'-O-methylguanosine-3'-phosphate
  modified_base 16: mod_base = OTHER; note = 2'-fluoroguanosine-3'-phosphate
  modified_base 17: mod_base = OTHER; note = 2'-O-methyladenosine-3'-phosphate
  modified_base 18: mod_base = OTHER; note = 2'-O-methylguanosine-3'-phosphate
  modified_base 19: mod_base = OTHER; note = 2'-O-methylguanosine-3'-phosphate
  modified_base 20: mod_base = OTHER; note = 2'-O-methyluridine-3'-phosphate
  modified_base 21: mod_base = OTHER; note = 2'-O-methylguanosine-3'- phosphorothioate
  modified_base 22: mod_base = OTHER; note = 2'-O-methylguanosine-3'- phosphorothioate
  modified_base 23: mod_base = OTHER; note = 2'-O-methylcytidine-3'-phosphate
acttcttcaattgaggaggtggc

SEQ ID NO: 2686 - RNA, 21 nt, synthetic construct
  source 1..21: mol_type = other RNA
  modified_base 1: mod_base = OTHER; note = 2'-O-methyluridine-3'-phosphorothioate
  modified_base 2: mod_base = OTHER; note = 2'-O-methylguanosine-3'- phosphorothioate
  modified_base 3: mod_base = OTHER; note = 2'-O-methylguanosine-3'-phosphate
  modified_base 4: mod_base = OTHER; note = 2'-O-methylguanosine-3'-phosphate
  modified_base 5: mod_base = OTHER; note = 2'-O-methylcytidine-3'-phosphate
  modified_base 6: mod_base = OTHER; note = 2'-O-methylcytidine-3'-phosphate
  modified_base 7: mod_base = OTHER; note = 2'-fluoroadenosine-3'-phosphate
  modified_base 8: mod_base = OTHER; note = 2'-O-methylcytidine-3'-phosphate
  modified_base 9: mod_base = OTHER; note = 2'-fluorocytidine-3'-phosphate
  modified_base 10: mod_base = OTHER; note = 2'-fluorouridine-3'-phosphate
  modified_base 11: mod_base = OTHER; note = 2'-fluorocytidine-3'-phosphate
  modified_base 12: mod_base = OTHER; note = 2'-O-methylcytidine-3'-phosphate
  modified_base 13: mod_base = OTHER; note = 2'-O-methyluridine-3'-phosphate
  modified_base 14: mod_base = OTHER; note = 2'-O-methylcytidine-3'-phosphate
  modified_base 15: mod_base = OTHER; note = 2'-O-methyladenosine-3'-phosphate
  modified_base 16: mod_base = OTHER; note = 2'-O-methyladenosine-3'-phosphate
  modified_base 17: mod_base = OTHER; note = 2'-O-methyluridine-3'-phosphate
  modified_base 18: mod_base = OTHER; note = 2'-O-methyluridine-3'-phosphate
  modified_base 19: mod_base = OTHER; note = 2'-O-methylguanosine-3'-phosphate
  modified_base 20: mod_base = OTHER; note = 2'-O-methyladenosine-3'-phosphate
  modified_base 21: mod_base = OTHER; note 2'-O-methyladenosine-3'-phosphate-N-[tris(GalNAc-alkyl)-ami dodecanoyl)]-4-hydroxyprolinol (Hyp-(GalNAc-alkyl)3)
tgggccacctcctcaattgaa

SEQ ID NO: 2687 - RNA, 23 nt, synthetic construct
  source 1..23: mol_type = other RNA
  modified_base 1: mod_base = OTHER; note = 2'-O-methyluridine-3'-phosphorothioate
  modified_base 2: mod_base = OTHER; note = 2'-fluorouridine -3'-phosphorothioate
  modified_base 3: mod_base = OTHER; note = 2'-O-methylcytidine-3'-phosphate
  modified_base 4: mod_base = OTHER; note = 2'-O-methyladenosine-3'-phosphate
  modified_base 5: mod_base = OTHER; note = 2'-O-methyladenosine-3'-phosphate
  modified_base 6: mod_base = OTHER; note = 2'-fluorouridine-3'-phosphate
  modified_base 7: mod_base = OTHER; note = 2'-O-methyluridine-3'-phosphate
  modified_base 8: mod_base = OTHER; note = 2'-fluoroguanosine-3'-phosphate
  modified_base 9: mod_base = OTHER; note = 2'-fluoroadenosine-3'-phosphate
  modified_base 10: mod_base = OTHER; note = 2'-O-methylguanosine-3'-phosphate
  modified_base 11: mod_base = OTHER; note = 2'-O-methylguanosine-3'-phosphate
  modified_base 12: mod_base = OTHER; note = 2'-O-methyladenosine-3'-phosphate
  modified_base 13: mod_base = OTHER; note = 2'-O-methylguanosine-3'-phosphate
  modified_base 14: mod_base = OTHER; note = 2'-fluoroguanosine-3'-phosphate
  modified_base 15: mod_base = OTHER; note = 2'-O-methyluridine-3'-phosphate
  modified_base 16: mod_base = OTHER; note = 2'-fluoroguanosine-3'-phosphate
  modified_base 17: mod_base = OTHER; note = 2'-O-methylguanosine-3'-phosphate
  modified_base 18: mod_base = OTHER; note = 2'-O-methylcytidine-3'-phosphate
  modified_base 19: mod_base = OTHER; note = 2'-O-methylcytidine-3'-phosphate
  modified_base 20: mod_base = OTHER; note = 2'-O-methylcytidine-3'-phosphate
  modified_base 21: mod_base = OTHER; note = 2'-O-methyladenosine-3'- phosphorothioate
  modified_base 22: mod_base = OTHER; note = 2'-O-methylguanosine-3'- phosphorothioate
  modified_base 23: mod_base = OTHER; note = 2'-O-methylguanosine-3'-phosphate
ttcaattgaggaggtggcccagg

SEQ ID NO: 2688 - RNA, 21 nt, synthetic construct
  source 1..21: mol_type = other RNA
  modified_base 1: mod_base = OTHER; note = 2'-O-methylcytidine-3'- phosphorothioate
  modified_base 2: mod_base = OTHER; note = 2'-O-methyluridine-3'-phosphorothioate
  modified_base 3: mod_base = OTHER; note = 2'-O-methylguanosine-3'-phosphate
  modified_base 4: mod_base = OTHER; note = 2'-O-methylguanosine-3'-phosphate
  modified_base 5: mod_base = OTHER; note = 2'-O-methylguanosine-3'-phosphate
  modified_base 6: mod_base = OTHER; note = 2'-O-methylcytidine-3'-phosphate
  modified_base 7: mod_base = OTHER; note = 2'-fluorocytidine-3'-phosphate
  modified_base 8: mod_base = OTHER; note = 2'-O-methyladenosine-3'-phosphate
  modified_base 9: mod_base = OTHER; note = 2'-fluorocytidine-3'-phosphate
  modified_base 10: mod_base = OTHER; note = 2'-fluorocytidine-3'-phosphate
  modified_base 11: mod_base = OTHER; note = 2'-fluorouridine-3'-phosphate
  modified_base 12: mod_base = OTHER; note = 2'-O-methylcytidine-3'-phosphate
  modified_base 13: mod_base = OTHER; note = 2'-O-methylcytidine-3'-phosphate
  modified_base 14: mod_base = OTHER; note = 2'-O-methyluridine-3'-phosphate
  modified_base 15: mod_base = OTHER; note = 2'-O-methylcytidine-3'-phosphate
  modified_base 16: mod_base = OTHER; note = 2'-O-methyladenosine-3'-phosphate
  modified_base 17: mod_base = OTHER; note = 2'-O-methyladenosine-3'-phosphate
  modified_base 18: mod_base = OTHER; note = 2'-O-methyluridine-3'-phosphate
  modified_base 19: mod_base = OTHER; note = 2'-O-methyluridine-3'-phosphate
  modified_base 20: mod_base = OTHER; note = 2'-O-methylguanosine-3'-phosphate
  modified_base 21: mod_base = OTHER; note 2'-O-methyladenosine-3'-phosphate-N-[tris(GalNAc-alkyl)-ami dodecanoyl)]-4-hydroxyprolinol (Hyp-(GalNAc-alkyl)3)
ctgggccacctcctcaattga

SEQ ID NO: 2689 - RNA, 23 nt, synthetic construct
  source 1..23: mol_type = other RNA
  modified_base 1: mod_base = OTHER; note = 2'-O-methyluridine-3'-phosphorothioate
  modified_base 2: mod_base = OTHER; note = 2'-fluorocytidine-3'-phosphorothioate
  modified_base 3: mod_base = OTHER; note = 2'-O-methyladenosine-3'-phosphate
  modified_base 4: mod_base = OTHER; note = 2'-O-methyladenosine-3'-phosphate
  modified_base 5: mod_base = OTHER; note = 2'-O-methyluridine-3'-phosphate
  modified_base 6: mod_base = OTHER; note = 2'-fluorouridine-3'-phosphate
  modified_base 7: mod_base = OTHER; note = 2'-O-methylguanosine-3'-phosphate
  modified_base 8: mod_base = OTHER; note = 2'-fluoroadenosine-3'-phosphate
  modified_base 9: mod_base = OTHER; note = 2'-fluoroguanosine-3'-phosphate
  modified_base 10: mod_base = OTHER; note = 2'-O-methylguanosine-3'-phosphate
  modified_base 11: mod_base = OTHER; note = 2'-O-methyladenosine-3'-phosphate
  modified_base 12: mod_base = OTHER; note = 2'-O-methylguanosine-3'-phosphate
  modified_base 13: mod_base = OTHER; note = 2'-O-methylguanosine-3'-phosphate
  modified_base 14: mod_base = OTHER; note = 2'-fluorouridine-3'-phosphate
  modified_base 15: mod_base = OTHER; note = 2'-O-methylguanosine-3'-phosphate
  modified_base 16: mod_base = OTHER; note = 2'-fluoroguanosine-3'-phosphate
  modified_base 17: mod_base = OTHER; note = 2'-O-methylcytidine-3'-phosphate
  modified_base 18: mod_base = OTHER; note = 2'-O-methylcytidine-3'-phosphate
  modified_base 19: mod_base = OTHER; note = 2'-O-methylcytidine-3'-phosphate
  modified_base 20: mod_base = OTHER; note = 2'-O-methyladenosine-3'-phosphate
  modified_base 21: mod_base = OTHER; note = 2'-O-methylguanosine-3'- phosphorothioate
  modified_base 22: mod_base = OTHER; note = 2'-O-methylguanosine-3'- phosphorothioate
  modified_base 23: mod_base = OTHER; note = 2'-O-methyladenosine-3'-phosphate
tcaattgaggaggtggcccagga

SEQ ID NO: 2690 - RNA, 21 nt, synthetic construct
  source 1..21: mol_type = other RNA
  modified_base 1: mod_base = OTHER; note = 2'-O-methylguanosine-3'- phosphorothioate
  modified_base 2: mod_base = OTHER; note = 2'-O-methyladenosine-3'- phosphorothioate
  modified_base 3: mod_base = OTHER; note = 2'-O-methylguanosine-3'-phosphate
  modified_base 4: mod_base = OTHER; note = 2'-O-methyluridine-3'-phosphate
  modified_base 5: mod_base = OTHER; note = 2'-O-methylguanosine-3'-phosphate
  modified_base 6: mod_base = OTHER; note = 2'-O-methylguanosine-3'-phosphate
  modified_base 7: mod_base = OTHER; note = 2'-fluoroguanosine-3'-phosphate
  modified_base 8: mod_base = OTHER; note = 2'-O-methyluridine-3'-phosphate
  modified_base 9: mod_base = OTHER; note = 2'-fluoroguanosine-3'-phosphate
  modified_base 10: mod_base = OTHER; note = 2'-fluorocytidine-3'-phosphate
  modified_base 11: mod_base = OTHER; note = 2'-fluorocytidine-3'-phosphate
  modified_base 12: mod_base = OTHER; note = 2'-O-methyladenosine-3'-phosphate
  modified_base 13: mod_base = OTHER; note = 2'-O-methylguanosine-3'-phosphate
  modified_base 14: mod_base = OTHER; note = 2'-O-methyladenosine-3'-phosphate
  modified_base 15: mod_base = OTHER; note = 2'-O-methyladenosine-3'-phosphate
  modified_base 16: mod_base = OTHER; note = 2'-O-methyluridine-3'-phosphate
  modified_base 17: mod_base = OTHER; note = 2'-O-methylguanosine-3'-phosphate
  modified_base 18: mod_base = OTHER; note = 2'-O-methyluridine-3'-phosphate
  modified_base 19: mod_base = OTHER; note = 2'-O-methylguanosine-3'-phosphate
  modified_base 20: mod_base = OTHER; note = 2'-O-methyladenosine-3'-phosphate
  modified_base 21: mod_base = OTHER; note 2'-O-methyladenosine-3'-phosphate-N-[tris(GalNAc-alkyl)-ami dodecanoyl)]-4-hydroxyprolinol (Hyp-(GalNAc-alkyl)3)
gagtgggtgccagaatgtgaa

SEQ ID NO: 2691 - RNA, 23 nt, synthetic construct
  source 1..23: mol_type = other RNA
  modified_base 1: mod_base = OTHER; note = 2'-O-methyluridine-3'-phosphorothioate
  modified_base 2: mod_base = OTHER; note = 2'-fluorouridine -3'-phosphorothioate
  modified_base 3: mod_base = OTHER; note = 2'-O-methylcytidine-3'-phosphate
  modified_base 4: mod_base = OTHER; note = 2'-O-methyladenosine-3'-phosphate
  modified_base 5: mod_base = OTHER; note = 2'-O-methylcytidine-3'-phosphate
  modified_base 6: mod_base = OTHER; note = 2'-fluoroadenosine-3'-phosphate
  modified_base 7: mod_base = OTHER; note = 2'-O-methyluridine-3'-phosphate
  modified_base 8: mod_base = OTHER; note = 2'-fluorouridine-3'-phosphate
  modified_base 9: mod_base = OTHER; note = 2'-fluorocytidine-3'-phosphate
  modified_base 10: mod_base = OTHER; note = 2'-O-methyluridine-3'-phosphate
  modified_base 11: mod_base = OTHER; note = 2'-O-methylguanosine-3'-phosphate
  modified_base 12: mod_base = OTHER; note = 2'-O-methylguanosine-3'-phosphate
  modified_base 13: mod_base = OTHER; note = 2'-O-methylcytidine-3'-phosphate
  modified_base 14: mod_base = OTHER; note = 2'-fluoroadenosine-3'-phosphate
  modified_base 15: mod_base = OTHER; note = 2'-O-methylcytidine-3'-phosphate
  modified_base 16: mod_base = OTHER; note = 2'-fluorocytidine-3'-phosphate
  modified_base 17: mod_base = OTHER; note = 2'-O-methylcytidine-3'-phosphate
  modified_base 18: mod_base = OTHER; note = 2'-O-methyladenosine-3'-phosphate
  modified_base 19: mod_base = OTHER; note = 2'-O-methylcytidine-3'-phosphate
  modified_base 20: mod_base = OTHER; note = 2'-O-methyluridine-3'-phosphate
  modified_base 21: mod_base = OTHER; note = 2'-O-methylcytidine-3'- phosphorothioate
  modified_base 22: mod_base = OTHER; note = 2'-O-methyladenosine-3'- phosphorothioate
  modified_base 23: mod_base = OTHER; note = 2'-O-methylguanosine-3'-phosphate
ttcacattctggcacccactcag

SEQ ID NO: 2692 - RNA, 21 nt, synthetic construct
  source 1..21: mol_type = other RNA
  modified_base 1: mod_base = OTHER; note = 2'-O-methyladenosine-3'- phosphorothioate
  modified_base 2: mod_base = OTHER; note = 2'-O-methylguanosine-3'- phosphorothioate
  modified_base 3: mod_base = OTHER; note = 2'-O-methyluridine-3'-phosphate
  modified_base 4: mod_base = OTHER; note = 2'-O-methylguanosine-3'-phosphate
  modified_base 5: mod_base = OTHER; note = 2'-O-methylguanosine-3'-phosphate
  modified_base 6: mod_base = OTHER; note = 2'-O-methylguanosine-3'-phosphate
  modified_base 7: mod_base = OTHER; note = 2'-fluorouridine-3'-phosphate
  modified_base 8: mod_base = OTHER; note = 2'-O-methylguanosine-3'-phosphate
  modified_base 9: mod_base = OTHER; note = 2'-fluorocytidine-3'-phosphate
  modified_base 10: mod_base = OTHER; note = 2'-fluorocytidine-3'-phosphate
  modified_base 11: mod_base = OTHER; note = 2'-fluoroadenosine-3'-phosphate
  modified_base 12: mod_base = OTHER; note = 2'-O-methylguanosine-3'-phosphate
  modified_base 13: mod_base = OTHER; note = 2'-O-methyladenosine-3'-phosphate
  modified_base 14: mod_base = OTHER; note = 2'-O-methyladenosine-3'-phosphate
  modified_base 15: mod_base = OTHER; note = 2'-O-methyluridine-3'-phosphate
  modified_base 16: mod_base = OTHER; note = 2'-O-methylguanosine-3'-phosphate
  modified_base 17: mod_base = OTHER; note = 2'-O-methyluridine-3'-phosphate
  modified_base 18: mod_base = OTHER; note = 2'-O-methylguanosine-3'-phosphate
  modified_base 19: mod_base = OTHER; note = 2'-O-methyladenosine-3'-phosphate
  modified_base 20: mod_base = OTHER; note = 2'-O-methyladenosine-3'-phosphate
  modified_base 21: mod_base = OTHER; note 2'-O-methyladenosine-3'-phosphate-N-[tris(GalNAc-alkyl)-ami dodecanoyl)]-4-hydroxyprolinol (Hyp-(GalNAc-alkyl)3)
agtgggtgccagaatgtgaaa

SEQ ID NO: 2693 - RNA, 23 nt, synthetic construct
  source 1..23: mol_type = other RNA
  modified_base 1: mod_base = OTHER; note = 2'-O-methyluridine-3'-phosphorothioate
  modified_base 2: mod_base = OTHER; note = 2'-fluorouridine -3'-phosphorothioate
  modified_base 3: mod_base = OTHER; note = 2'-O-methyluridine-3'-phosphate
  modified_base 4: mod_base = OTHER; note = 2'-O-methylcytidine-3'-phosphate
  modified_base 5: mod_base = OTHER; note = 2'-O-methyladenosine-3'-phosphate
  modified_base 6: mod_base = OTHER; note = 2'-fluorocytidine-3'-phosphate
  modified_base 7: mod_base = OTHER; note = 2'-O-methyladenosine-3'-phosphate
  modified_base 8: mod_base = OTHER; note = 2'-fluorouridine-3'-phosphate
  modified_base 9: mod_base = OTHER; note = 2'-fluorouridine-3'-phosphate
  modified_base 10: mod_base = OTHER; note = 2'-O-methylcytidine-3'-phosphate
  modified_base 11: mod_base = OTHER; note = 2'-O-methyluridine-3'-phosphate
  modified_base 12: mod_base = OTHER; note = 2'-O-methylguanosine-3'-phosphate
  modified_base 13: mod_base = OTHER; note = 2'-O-methylguanosine-3'-phosphate
  modified_base 14: mod_base = OTHER; note = 2'-fluorocytidine-3'-phosphate
  modified_base 15: mod_base = OTHER; note = 2'-O-methyladenosine-3'-phosphate
  modified_base 16: mod_base = OTHER; note = 2'-fluorocytidine-3'-phosphate
  modified_base 17: mod_base = OTHER; note = 2'-O-methylcytidine-3'-phosphate
  modified_base 18: mod_base = OTHER; note = 2'-O-methylcytidine-3'-phosphate
  modified_base 19: mod_base = OTHER; note = 2'-O-methyladenosine-3'-phosphate
  modified_base 20: mod_base = OTHER; note = 2'-O-methylcytidine-3'-phosphate
  modified_base 21: mod_base = OTHER; note = 2'-O-methyluridine-3'-phosphorothioate
  modified_base 22: mod_base = OTHER; note = 2'-O-methylcytidine-3'- phosphorothioate
  modified_base 23: mod_base = OTHER; note = 2'-O-methyladenosine-3'-phosphate
tttcacattctggcacccactca

SEQ ID NO: 2694 - RNA, 21 nt, synthetic construct
  source 1..21: mol_type = other RNA
  modified_base 1: mod_base = OTHER; note = 2'-O-methylcytidine-3'- phosphorothioate
  modified_base 2: mod_base = OTHER; note = 2'-O-methyluridine-3'-phosphorothioate
  modified_base 3: mod_base = OTHER; note = 2'-O-methylcytidine-3'-phosphate
  modified_base 4: mod_base = OTHER; note = 2'-O-methyluridine-3'-phosphate
  modified_base 5: mod_base = OTHER; note = 2'-O-methylguanosine-3'-phosphate
  modified_base 6: mod_base = OTHER; note = 2'-O-methyladenosine-3'-phosphate
  modified_base 7: mod_base = OTHER; note = 2'-fluoroguanosine-3'-phosphate
  modified_base 8: mod_base = OTHER; note = 2'-O-methyluridine-3'-phosphate
  modified_base 9: mod_base = OTHER; note = 2'-fluoroguanosine-3'-phosphate
  modified_base 10: mod_base = OTHER; note = 2'-fluoroguanosine-3'-phosphate
  modified_base 11: mod_base = OTHER; note = 2'-fluoroguanosine-3'-phosphate
  modified_base 12: mod_base = OTHER; note = 2'-O-methyluridine-3'-phosphate
  modified_base 13: mod_base = OTHER; note = 2'-O-methylguanosine-3'-phosphate
  modified_base 14: mod_base = OTHER; note = 2'-O-methylcytidine-3'-phosphate
  modified_base 15: mod_base = OTHER; note = 2'-O-methylcytidine-3'-phosphate
  modified_base 16: mod_base = OTHER; note = 2'-O-methyladenosine-3'-phosphate
  modified_base 17: mod_base = OTHER; note = 2'-O-methylguanosine-3'-phosphate
  modified_base 18: mod_base = OTHER; note = 2'-O-methyladenosine-3'-phosphate
  modified_base 19: mod_base = OTHER; note = 2'-O-methyladenosine-3'-phosphate
  modified_base 20: mod_base = OTHER; note = 2'-O-methyluridine-3'-phosphate
  modified_base 21: mod_base = OTHER; note 2'-O-methylguanosine-3'-phosphate-N-[tris(GalNAc-alkyl)-ami dodecanoyl)]-4-hydroxyprolinol (Hyp-(GalNAc-alkyl)3)
ctctgagtgggtgccagaatg

SEQ ID NO: 2695 - RNA, 23 nt, synthetic construct
  source 1..23: mol_type = other RNA
  modified_base 1: mod_base = OTHER; note = 2'-O-methylcytidine-3'- phosphorothioate
  modified_base 2: mod_base = OTHER; note = 2'-fluoroadenosine-3'-phosphorothioate
  modified_base 3: mod_base = OTHER; note = 2'-O-methyluridine-3'-phosphate
  modified_base 4: mod_base = OTHER; note = 2'-O-methyluridine-3'-phosphate
  modified_base 5: mod_base = OTHER; note = 2'-O-methylcytidine-3'-phosphate
  modified_base 6: mod_base = OTHER; note = 2'-fluorouridine-3'-phosphate
  modified_base 7: mod_base = OTHER; note = 2'-O-methylguanosine-3'-phosphate
  modified_base 8: mod_base = OTHER; note = 2'-fluoroguanosine-3'-phosphate
  modified_base 9: mod_base = OTHER; note = 2'-fluorocytidine-3'-phosphate
  modified_base 10: mod_base = OTHER; note = 2'-O-methyladenosine-3'-phosphate
  modified_base 11: mod_base = OTHER; note = 2'-O-methylcytidine-3'-phosphate
  modified_base 12: mod_base = OTHER; note = 2'-O-methylcytidine-3'-phosphate
  modified_base 13: mod_base = OTHER; note = 2'-O-methylcytidine-3'-phosphate
  modified_base 14: mod_base = OTHER; note = 2'-fluoroadenosine-3'-phosphate
  modified_base 15: mod_base = OTHER; note = 2'-O-methylcytidine-3'-phosphate
  modified_base 16: mod_base = OTHER; note = 2'-fluorouridine-3'-phosphate
  modified_base 17: mod_base = OTHER; note = 2'-O-methylcytidine-3'-phosphate
  modified_base 18: mod_base = OTHER; note = 2'-O-methyladenosine-3'-phosphate
  modified_base 19: mod_base = OTHER; note = 2'-O-methylguanosine-3'-phosphate
  modified_base 20: mod_base = OTHER; note = 2'-O-methyladenosine-3'-phosphate
  modified_base 21: mod_base = OTHER; note = 2'-O-methylguanosine-3'- phosphorothioate
  modified_base 22: mod_base = OTHER; note = 2'-O-methylcytidine-3'- phosphorothioate
  modified_base 23: mod_base = OTHER; note = 2'-O-methylcytidine-3'-phosphate
cattctggcacccactcagagcc

SEQ ID NO: 2696 - RNA, 21 nt, synthetic construct
  source 1..21: mol_type = other RNA
  modified_base 1: mod_base = OTHER; note = 2'-O-methylguanosine-3'- phosphorothioate
  modified_base 2: mod_base = OTHER; note = 2'-O-methylcytidine-3'- phosphorothioate
  modified_base 3: mod_base = OTHER; note = 2'-O-methyluridine-3'-phosphate
  modified_base 4: mod_base = OTHER; note = 2'-O-methylcytidine-3'-phosphate
  modified_base 5: mod_base = OTHER; note = 2'-O-methyluridine-3'-phosphate
  modified_base 6: mod_base = OTHER; note = 2'-O-methylguanosine-3'-phosphate
  modified_base 7: mod_base = OTHER; note = 2'-fluoroadenosine-3'-phosphate
  modified_base 8: mod_base = OTHER; note = 2'-O-methylguanosine-3'-phosphate
  modified_base 9: mod_base = OTHER; note = 2'-fluorouridine-3'-phosphate
  modified_base 10: mod_base = OTHER; note = 2'-fluoroguanosine-3'-phosphate
  modified_base 11: mod_base = OTHER; note = 2'-fluoroguanosine-3'-phosphate
  modified_base 12: mod_base = OTHER; note = 2'-O-methylguanosine-3'-phosphate
  modified_base 13: mod_base = OTHER; note = 2'-O-methyluridine-3'-phosphate
  modified_base 14: mod_base = OTHER; note = 2'-O-methylguanosine-3'-phosphate
  modified_base 15: mod_base = OTHER; note = 2'-O-methylcytidine-3'-phosphate
  modified_base 16: mod_base = OTHER; note = 2'-O-methylcytidine-3'-phosphate
  modified_base 17: mod_base = OTHER; note = 2'-O-methyladenosine-3'-phosphate
  modified_base 18: mod_base = OTHER; note = 2'-O-methylguanosine-3'-phosphate
  modified_base 19: mod_base = OTHER; note = 2'-O-methyladenosine-3'-phosphate
  modified_base 20: mod_base = OTHER; note = 2'-O-methyladenosine-3'-phosphate
  modified_base 21: mod_base = OTHER; note 2'-O-methyluridine-3'-phosphate-N-[tris(GalNAc-alkyl)-amido decanoyl)]-4-hydroxyprolinol (Hyp-(GalNAc-alkyl)3)
gctctgagtgggtgccagaat

SEQ ID NO: 2697 - RNA, 23 nt, synthetic construct
  source 1..23: mol_type = other RNA
  modified_base 1: mod_base = OTHER; note = 2'-O-methyladenosine-3'- phosphorothioate
  modified_base 2: mod_base = OTHER; note = 2'-fluorouridine -3'-phosphorothioate
  modified_base 3: mod_base = OTHER; note = 2'-O-methyluridine-3'-phosphate
  modified_base 4: mod_base = OTHER; note = 2'-O-methylcytidine-3'-phosphate
  modified_base 5: mod_base = OTHER; note = 2'-O-methyluridine-3'-phosphate
  modified_base 6: mod_base = OTHER; note = 2'-fluoroguanosine-3'-phosphate
  modified_base 7: mod_base = OTHER; note = 2'-O-methylguanosine-3'-phosphate
  modified_base 8: mod_base = OTHER; note = 2'-fluorocytidine-3'-phosphate
  modified_base 9: mod_base = OTHER; note = 2'-fluoroadenosine-3'-phosphate
  modified_base 10: mod_base = OTHER; note = 2'-O-methylcytidine-3'-phosphate
  modified_base 11: mod_base = OTHER; note = 2'-O-methylcytidine-3'-phosphate
  modified_base 12: mod_base = OTHER; note = 2'-O-methylcytidine-3'-phosphate
  modified_base 13: mod_base = OTHER; note = 2'-O-methyladenosine-3'-phosphate
  modified_base 14: mod_base = OTHER; note = 2'-fluorocytidine-3'-phosphate
  modified_base 15: mod_base = OTHER; note = 2'-O-methyluridine-3'-phosphate
  modified_base 16: mod_base = OTHER; note = 2'-fluorocytidine-3'-phosphate
  modified_base 17: mod_base = OTHER; note = 2'-O-methyladenosine-3'-phosphate
  modified_base 18: mod_base = OTHER; note = 2'-O-methylguanosine-3'-phosphate
  modified_base 19: mod_base = OTHER; note = 2'-O-methyladenosine-3'-phosphate
  modified_base 20: mod_base = OTHER; note = 2'-O-methylguanosine-3'-phosphate
  modified_base 21: mod_base = OTHER; note = 2'-O-methylcytidine-3'- phosphorothioate
  modified_base 22: mod_base = OTHER; note = 2'-O-methylcytidine-3'- phosphorothioate
  modified_base 23: mod_base = OTHER; note = 2'-O-methyladenosine-3'-phosphate
attctggcacccactcagagcca

SEQ ID NO: 2698 - RNA, 21 nt, synthetic construct
  source 1..21: mol_type = other RNA
  modified_base 1: mod_base = OTHER; note = 2'-O-methylguanosine-3'- phosphorothioate
  modified_base 2: mod_base = OTHER; note = 2'-O-methylcytidine-3'- phosphorothioate
  modified_base 3: mod_base = OTHER; note = 2'-O-methyladenosine-3'-phosphate
  modified_base 4: mod_base = OTHER; note = 2'-O-methylcytidine-3'-phosphate
  modified_base 5: mod_base = OTHER; note = 2'-O-methyluridine-3'-phosphate
  modified_base 6: mod_base = OTHER; note = 2'-O-methylguanosine-3'-phosphate
  modified_base 7: mod_base = OTHER; note = 2'-fluoroadenosine-3'-phosphate
  modified_base 8: mod_base = OTHER; note = 2'-O-methyluridine-3'-phosphate
  modified_base 9: mod_base = OTHER; note = 2'-fluoroguanosine-3'-phosphate
  modified_base 10: mod_base = OTHER; note = 2'-fluorouridine-3'-phosphate
  modified_base 11: mod_base = OTHER; note = 2'-fluorouridine-3'-phosphate
  modified_base 12: mod_base = OTHER; note = 2'-O-methylcytidine-3'-phosphate
  modified_base 13: mod_base = OTHER; note = 2'-O-methyluridine-3'-phosphate
  modified_base 14: mod_base = OTHER; note = 2'-O-methylguanosine-3'-phosphate
  modified_base 15: mod_base = OTHER; note = 2'-O-methyladenosine-3'-phosphate
  modified_base 16: mod_base = OTHER; note = 2'-O-methyladenosine-3'-phosphate
  modified_base 17: mod_base = OTHER; note = 2'-O-methyladenosine-3'-phosphate
  modified_base 18: mod_base = OTHER; note = 2'-O-methylguanosine-3'-phosphate
  modified_base 19: mod_base = OTHER; note = 2'-O-methylcytidine-3'-phosphate
  modified_base 20: mod_base = OTHER; note = 2'-O-methyluridine-3'-phosphate
  modified_base 21: mod_base = OTHER; note 2'-O-methylcytidine-3'-phosphate-N-[tris(GalNAc-alkyl)-amid odecanoyl)]-4-hydroxyprolinol (Hyp-(GalNAc-alkyl)3)
gcactgatgttctgaaagctc

SEQ ID NO: 2699 - RNA, 23 nt, synthetic construct
  source 1..23: mol_type = other RNA
  modified_base 1: mod_base = OTHER; note = 2'-O-methylguanosine-3'- phosphorothioate
  modified_base 2: mod_base = OTHER; note = 2'-fluoroadenosine-3'-phosphorothioate
  modified_base 3: mod_base = OTHER; note = 2'-O-methylguanosine-3'-phosphate
  modified_base 4: mod_base = OTHER; note = 2'-O-methylcytidine-3'-phosphate
  modified_base 5: mod_base = OTHER; note = 2'-O-methyluridine-3'-phosphate
  modified_base 6: mod_base = OTHER; note = 2'-fluorouridine-3'-phosphate
  modified_base 7: mod_base = OTHER; note = 2'-O-methyluridine-3'-phosphate
  modified_base 8: mod_base = OTHER; note = 2'-fluorocytidine-3'-phosphate
  modified_base 9: mod_base = OTHER; note = 2'-fluoroadenosine-3'-phosphate
  modified_base 10: mod_base = OTHER; note = 2'-O-methylguanosine-3'-phosphate
  modified_base 11: mod_base = OTHER; note = 2'-O-methyladenosine-3'-phosphate
  modified_base 12: mod_base = OTHER; note = 2'-O-methyladenosine-3'-phosphate
  modified_base 13: mod_base = OTHER; note = 2'-O-methylcytidine-3'-phosphate
  modified_base 14: mod_base = OTHER; note = 2'-fluoroadenosine-3'-phosphate
  modified_base 15: mod_base = OTHER; note = 2'-O-methyluridine-3'-phosphate
  modified_base 16: mod_base = OTHER; note = 2'-fluorocytidine-3'-phosphate
  modified_base 17: mod_base = OTHER; note = 2'-O-methyladenosine-3'-phosphate
  modified_base 18: mod_base = OTHER; note = 2'-O-methylguanosine-3'-phosphate
  modified_base 19: mod_base = OTHER; note = 2'-O-methyluridine-3'-phosphate
  modified_base 20: mod_base = OTHER; note = 2'-O-methylguanosine-3'-phosphate
  modified_base 21: mod_base = OTHER; note = 2'-O-methylcytidine-3'- phosphorothioate
  modified_base 22: mod_base = OTHER; note = 2'-O-methylcytidine-3'- phosphorothioate
  modified_base 23: mod_base = OTHER; note = 2'-O-methyluridine-3'-phosphate
gagctttcagaacatcagtgcct

SEQ ID NO: 2700 - RNA, 21 nt, synthetic construct
  source 1..21: mol_type = other RNA
  modified_base 1: mod_base = OTHER; note = 2'-O-methylcytidine-3'- phosphorothioate
  modified_base 2: mod_base = OTHER; note = 2'-O-methyladenosine-3'- phosphorothioate
  modified_base 3: mod_base = OTHER; note = 2'-O-methylcytidine-3'-phosphate
  modified_base 4: mod_base = OTHER; note = 2'-O-methyluridine-3'-phosphate
  modified_base 5: mod_base = OTHER; note = 2'-O-methylguanosine-3'-phosphate
  modified_base 6: mod_base = OTHER; note = 2'-O-methyladenosine-3'-phosphate
  modified_base 7: mod_base = OTHER; note = 2'-fluorouridine-3'-phosphate
  modified_base 8: mod_base = OTHER; note = 2'-O-methylguanosine-3'-phosphate
  modified_base 9: mod_base = OTHER; note = 2'-fluorouridine-3'-phosphate
  modified_base 10: mod_base = OTHER; note = 2'-fluorouridine-3'-phosphate
  modified_base 11: mod_base = OTHER; note = 2'-fluorocytidine-3'-phosphate
  modified_base 12: mod_base = OTHER; note = 2'-O-methyluridine-3'-phosphate
  modified_base 13: mod_base = OTHER; note = 2'-O-methylguanosine-3'-phosphate
  modified_base 14: mod_base = OTHER; note = 2'-O-methyladenosine-3'-phosphate
  modified_base 15: mod_base = OTHER; note = 2'-O-methyladenosine-3'-phosphate
  modified_base 16: mod_base = OTHER; note = 2'-O-methyladenosine-3'-phosphate
  modified_base 17: mod_base = OTHER; note = 2'-O-methylguanosine-3'-phosphate
  modified_base 18: mod_base = OTHER; note = 2'-O-methylcytidine-3'-phosphate
  modified_base 19: mod_base = OTHER; note = 2'-O-methyluridine-3'-phosphate
  modified_base 20: mod_base = OTHER; note = 2'-O-methylcytidine-3'-phosphate
  modified_base 21: mod_base = OTHER; note 2'-O-methyluridine-3'-phosphate-N-[tris(GalNAc-alkyl)-amido decanoyl)]-4-hydroxyprolinol (Hyp-(GalNAc-alkyl)3)
cactgatgttctgaaagctct

SEQ ID NO: 2701 - RNA, 23 nt, synthetic construct
  source 1..23: mol_type = other RNA
  modified_base 1: mod_base = OTHER; note = 2'-O-methyladenosine-3'- phosphorothioate
  modified_base 2: mod_base = OTHER; note = 2'-fluoroguanosine-3'-phosphorothioate
  modified_base 3: mod_base = OTHER; note = 2'-O-methyladenosine-3'-phosphate
  modified_base 4: mod_base = OTHER; note = 2'-O-methylguanosine-3'-phosphate
  modified_base 5: mod_base = OTHER; note = 2'-O-methylcytidine-3'-phosphate
  modified_base 6: mod_base = OTHER; note = 2'-fluorouridine-3'-phosphate
  modified_base 7: mod_base = OTHER; note = 2'-O-methyluridine-3'-phosphate
  modified_base 8: mod_base = OTHER; note = 2'-fluorouridine-3'-phosphate
  modified_base 9: mod_base = OTHER; note = 2'-fluorocytidine-3'-phosphate
  modified_base 10: mod_base = OTHER; note = 2'-O-methyladenosine-3'-phosphate
  modified_base 11: mod_base = OTHER; note = 2'-O-methylguanosine-3'-phosphate
  modified_base 12: mod_base = OTHER; note = 2'-O-methyladenosine-3'-phosphate
  modified_base 13: mod_base = OTHER; note = 2'-O-methyladenosine-3'-phosphate
  modified_base 14: mod_base = OTHER; note = 2'-fluorocytidine-3'-phosphate
  modified_base 15: mod_base = OTHER; note = 2'-O-methyladenosine-3'-phosphate
  modified_base 16: mod_base = OTHER; note = 2'-fluorouridine-3'-phosphate
  modified_base 17: mod_base = OTHER; note = 2'-O-methylcytidine-3'-phosphate
  modified_base 18: mod_base = OTHER; note = 2'-O-methyladenosine-3'-phosphate
  modified_base 19: mod_base = OTHER; note = 2'-O-methylguanosine-3'-phosphate
  modified_base 20: mod_base = OTHER; note = 2'-O-methyluridine-3'-phosphate
  modified_base 21: mod_base = OTHER; note = 2'-O-methylguanosine-3'- phosphorothioate
  modified_base 22: mod_base = OTHER; note = 2'-O-methylcytidine-3'- phosphorothioate
  modified_base 23: mod_base = OTHER; note = 2'-O-methylcytidine-3'-phosphate
agagctttcagaacatcagtgcc

SEQ ID NO: 2702 - RNA, 21 nt, synthetic construct
  source 1..21: mol_type = other RNA
  modified_base 1: mod_base = OTHER; note = 2'-O-methyladenosine-3'- phosphorothioate
  modified_base 2: mod_base = OTHER; note = 2'-O-methyladenosine-3'- phosphorothioate
  modified_base 3: mod_base = OTHER; note = 2'-O-methyladenosine-3'-phosphate
  modified_base 4: mod_base = OTHER; note = 2'-O-methylguanosine-3'-phosphate
  modified_base 5: mod_base = OTHER; note = 2'-O-methylguanosine-3'-phosphate
  modified_base 6: mod_base = OTHER; note = 2'-O-methylcytidine-3'-phosphate
  modified_base 7: mod_base = OTHER; note = 2'-fluoroadenosine-3'-phosphate
  modified_base 8: mod_base = OTHER; note = 2'-O-methylcytidine-3'-phosphate
  modified_base 9: mod_base = OTHER; note = 2'-fluorouridine-3'-phosphate
  modified_base 10: mod_base = OTHER; note = 2'-fluoroguanosine-3'-phosphate
  modified_base 11: mod_base = OTHER; note = 2'-fluoroadenosine-3'-phosphate
  modified_base 12: mod_base = OTHER; note = 2'-O-methyluridine-3'-phosphate
  modified_base 13: mod_base = OTHER; note = 2'-O-methylguanosine-3'-phosphate
  modified_base 14: mod_base = OTHER; note = 2'-O-methyluridine-3'-phosphate
  modified_base 15: mod_base = OTHER; note = 2'-O-methyluridine-3'-phosphate
  modified_base 16: mod_base = OTHER; note = 2'-O-methylcytidine-3'-phosphate
  modified_base 17: mod_base = OTHER; note = 2'-O-methyluridine-3'-phosphate
  modified_base 18: mod_base = OTHER; note = 2'-O-methylguanosine-3'-phosphate
  modified_base 19: mod_base = OTHER; note = 2'-O-methyladenosine-3'-phosphate
  modified_base 20: mod_base = OTHER; note = 2'-O-methyladenosine-3'-phosphate
  modified_base 21: mod_base = OTHER; note 2'-O-methyladenosine-3'-phosphate-N-[tris(GalNAc-alkyl)-ami dodecanoyl)]-4-hydroxyprolinol (Hyp-(GalNAc-alkyl)3)
aaaggcactgatgttctgaaa

SEQ ID NO: 2703 - RNA, 23 nt, synthetic construct
  source 1..23: mol_type = other RNA
  modified_base 1: mod_base = OTHER; note = 2'-O-methyluridine-3'-phosphorothioate
  modified_base 2: mod_base = OTHER; note = 2'-fluorouridine -3'-phosphorothioate
  modified_base 3: mod_base = OTHER; note = 2'-O-methyluridine-3'-phosphate
  modified_base 4: mod_base = OTHER; note = 2'-O-methylcytidine-3'-phosphate
  modified_base 5: mod_base = OTHER; note = 2'-O-methyladenosine-3'-phosphate
  modified_base 6: mod_base = OTHER; note = 2'-fluoroguanosine-3'-phosphate
  modified_base 7: mod_base = OTHER; note = 2'-O-methyladenosine-3'-phosphate
  modified_base 8: mod_base = OTHER; note = 2'-fluoroadenosine-3'-phosphate
  modified_base 9: mod_base = OTHER; note = 2'-fluorocytidine-3'-phosphate
  modified_base 10: mod_base = OTHER; note = 2'-O-methyladenosine-3'-phosphate
  modified_base 11: mod_base = OTHER; note = 2'-O-methyluridine-3'-phosphate
  modified_base 12: mod_base = OTHER; note = 2'-O-methylcytidine-3'-phosphate
  modified_base 13: mod_base = OTHER; note = 2'-O-methyladenosine-3'-phosphate
  modified_base 14: mod_base = OTHER; note = 2'-fluoroguanosine-3'-phosphate
  modified_base 15: mod_base = OTHER; note = 2'-O-methyluridine-3'-phosphate
  modified_base 16: mod_base = OTHER; note = 2'-fluoroguanosine-3'-phosphate
  modified_base 17: mod_base = OTHER; note = 2'-O-methylcytidine-3'-phosphate
  modified_base 18: mod_base = OTHER; note = 2'-O-methylcytidine-3'-phosphate
  modified_base 19: mod_base = OTHER; note = 2'-O-methyluridine-3'-phosphate
  modified_base 20: mod_base = OTHER; note = 2'-O-methyluridine-3'-phosphate
  modified_base 21: mod_base = OTHER; note = 2'-O-methyluridine-3'-phosphorothioate
  modified_base 22: mod_base = OTHER; note = 2'-O-methylcytidine-3'- phosphorothioate
  modified_base 23: mod_base = OTHER; note = 2'-O-methylcytidine-3'-phosphate
tttcagaacatcagtgcctttcc

SEQ ID NO: 2704 - RNA, 21 nt, synthetic construct
  source 1..21: mol_type = other RNA
  modified_base 1: mod_base = OTHER; note = 2'-O-methylguanosine-3'- phosphorothioate
  modified_base 2: mod_base = OTHER; note = 2'-O-methyladenosine-3'- phosphorothioate
  modified_base 3: mod_base = OTHER; note = 2'-O-methyladenosine-3'-phosphate
  modified_base 4: mod_base = OTHER; note = 2'-O-methyladenosine-3'-phosphate
  modified_base 5: mod_base = OTHER; note = 2'-O-methylguanosine-3'-phosphate
  modified_base 6: mod_base = OTHER; note = 2'-O-methylguanosine-3'-phosphate
  modified_base 7: mod_base = OTHER; note = 2'-fluorocytidine-3'-phosphate
  modified_base 8: mod_base = OTHER; note = 2'-O-methyladenosine-3'-phosphate
  modified_base 9: mod_base = OTHER; note = 2'-fluorocytidine-3'-phosphate
  modified_base 10: mod_base = OTHER; note = 2'-fluorouridine-3'-phosphate
  modified_base 11: mod_base = OTHER; note = 2'-fluoroguanosine-3'-phosphate
  modified_base 12: mod_base = OTHER; note = 2'-O-methyladenosine-3'-phosphate
  modified_base 13: mod_base = OTHER; note = 2'-O-methyluridine-3'-phosphate
  modified_base 14: mod_base = OTHER; note = 2'-O-methylguanosine-3'-phosphate
  modified_base 15: mod_base = OTHER; note = 2'-O-methyluridine-3'-phosphate
  modified_base 16: mod_base = OTHER; note = 2'-O-methyluridine-3'-phosphate
  modified_base 17: mod_base = OTHER; note = 2'-O-methylcytidine-3'-phosphate
  modified_base 18: mod_base = OTHER; note = 2'-O-methyluridine-3'-phosphate
  modified_base 19: mod_base = OTHER; note = 2'-O-methylguanosine-3'-phosphate
  modified_base 20: mod_base = OTHER; note = 2'-O-methyladenosine-3'-phosphate
  modified_base 21: mod_base = OTHER; note 2'-O-methyladenosine-3'-phosphate-N-[tris(GalNAc-alkyl)-ami dodecanoyl)]-4-hydroxyprolinol (Hyp-(GalNAc-alkyl)3)
gaaaggcactgatgttctgaa

SEQ ID NO: 2705 - RNA, 23 nt, synthetic construct
  source 1..23: mol_type = other RNA
  modified_base 1: mod_base = OTHER; note = 2'-O-methyluridine-3'-phosphorothioate
  modified_base 2: mod_base = OTHER; note = 2'-fluorouridine -3'-phosphorothioate
  modified_base 3: mod_base = OTHER; note = 2'-O-methylcytidine-3'-phosphate
  modified_base 4: mod_base = OTHER; note = 2'-O-methyladenosine-3'-phosphate
  modified_base 5: mod_base = OTHER; note = 2'-O-methylguanosine-3'-phosphate
  modified_base 6: mod_base = OTHER; note = 2'-fluoroadenosine-3'-phosphate
  modified_base 7: mod_base = OTHER; note = 2'-O-methyladenosine-3'-phosphate
  modified_base 8: mod_base = OTHER; note = 2'-fluorocytidine-3'-phosphate
  modified_base 9: mod_base = OTHER; note = 2'-fluoroadenosine-3'-phosphate
  modified_base 10: mod_base = OTHER; note = 2'-O-methyluridine-3'-phosphate
  modified_base 11: mod_base = OTHER; note = 2'-O-methylcytidine-3'-phosphate
  modified_base 12: mod_base = OTHER; note = 2'-O-methyladenosine-3'-phosphate
  modified_base 13: mod_base = OTHER; note = 2'-O-methylguanosine-3'-phosphate
  modified_base 14: mod_base = OTHER; note = 2'-fluorouridine-3'-phosphate
  modified_base 15: mod_base = OTHER; note = 2'-O-methylguanosine-3'-phosphate
  modified_base 16: mod_base = OTHER; note = 2'-fluorocytidine-3'-phosphate
  modified_base 17: mod_base = OTHER; note = 2'-O-methylcytidine-3'-phosphate
  modified_base 18: mod_base = OTHER; note = 2'-O-methyluridine-3'-phosphate
  modified_base 19: mod_base = OTHER; note = 2'-O-methyluridine-3'-phosphate
  modified_base 20: mod_base = OTHER; note = 2'-O-methyluridine-3'-phosphate
  modified_base 21: mod_base = OTHER; note = 2'-O-methylcytidine-3'- phosphorothioate
  modified_base 22: mod_base = OTHER; note = 2'-O-methylcytidine-3'- phosphorothioate
  modified_base 23: mod_base = OTHER; note = 2'-O-methylguanosine-3'-phosphate
ttcagaacatcagtgcctttccg

SEQ ID NO: 2706 - RNA, 21 nt, synthetic construct
  source 1..21: mol_type = other RNA
  modified_base 1: mod_base = OTHER; note = 2'-O-methylguanosine-3'- phosphorothioate
  modified_base 2: mod_base = OTHER; note = 2'-O-methylguanosine-3'- phosphorothioate
  modified_base 3: mod_base = OTHER; note = 2'-O-methylguanosine-3'-phosphate
  modified_base 4: mod_base = OTHER; note = 2'-O-methyladenosine-3'-phosphate
  modified_base 5: mod_base = OTHER; note = 2'-O-methyladenosine-3'-phosphate
  modified_base 6: mod_base = OTHER; note = 2'-O-methylguanosine-3'-phosphate
  modified_base 7: mod_base = OTHER; note = 2'-fluoroguanosine-3'-phosphate
  modified_base 8: mod_base = OTHER; note = 2'-O-methyluridine-3'-phosphate
  modified_base 9: mod_base = OTHER; note = 2'-fluoroguanosine-3'-phosphate
  modified_base 10: mod_base = OTHER; note = 2'-fluoroguanosine-3'-phosphate
  modified_base 11: mod_base = OTHER; note = 2'-fluoroadenosine-3'-phosphate
  modified_base 12: mod_base = OTHER; note = 2'-O-methyladenosine-3'-phosphate
  modified_base 13: mod_base = OTHER; note = 2'-O-methylguanosine-3'-phosphate
  modified_base 14: mod_base = OTHER; note = 2'-O-methyluridine-3'-phosphate
  modified_base 15: mod_base = OTHER; note = 2'-O-methylcytidine-3'-phosphate
  modified_base 16: mod_base = OTHER; note = 2'-O-methyluridine-3'-phosphate
  modified_base 17: mod_base = OTHER; note = 2'-O-methyluridine-3'-phosphate
  modified_base 18: mod_base = OTHER; note = 2'-O-methylcytidine-3'-phosphate
  modified_base 19: mod_base = OTHER; note = 2'-O-methylcytidine-3'-phosphate
  modified_base 20: mod_base = OTHER; note = 2'-O-methyluridine-3'-phosphate
  modified_base 21: mod_base = OTHER; note 2'-O-methylguanosine-3'-phosphate-N-[tris(GalNAc-alkyl)-ami dodecanoyl)]-4-hydroxyprolinol (Hyp-(GalNAc-alkyl)3)
gggaaggtggaagtcttcctg

SEQ ID NO: 2707 - RNA, 23 nt, synthetic construct
  source 1..23: mol_type = other RNA
  modified_base 1: mod_base = OTHER; note = 2'-O-methylcytidine-3'- phosphorothioate
  modified_base 2: mod_base = OTHER; note = 2'-fluoroadenosine-3'-phosphorothioate
  modified_base 3: mod_base = OTHER; note = 2'-O-methylguanosine-3'-phosphate
  modified_base 4: mod_base = OTHER; note = 2'-O-methylguanosine-3'-phosphate
  modified_base 5: mod_base = OTHER; note = 2'-O-methyladenosine-3'-phosphate
  modified_base 6: mod_base = OTHER; note = 2'-fluoroadenosine-3'-phosphate
  modified_base 7: mod_base = OTHER; note = 2'-O-methylguanosine-3'-phosphate
  modified_base 8: mod_base = OTHER; note = 2'-fluoroadenosine-3'-phosphate
  modified_base 9: mod_base = OTHER; note = 2'-fluorocytidine-3'-phosphate
  modified_base 10: mod_base = OTHER; note = 2'-O-methyluridine-3'-phosphate
  modified_base 11: mod_base = OTHER; note = 2'-O-methyluridine-3'-phosphate
  modified_base 12: mod_base = OTHER; note = 2'-O-methylcytidine-3'-phosphate
  modified_base 13: mod_base = OTHER; note = 2'-O-methylcytidine-3'-phosphate
  modified_base 14: mod_base = OTHER; note = 2'-fluoroadenosine-3'-phosphate
  modified_base 15: mod_base = OTHER; note = 2'-O-methylcytidine-3'-phosphate
  modified_base 16: mod_base = OTHER; note = 2'-fluorocytidine-3'-phosphate
  modified_base 17: mod_base = OTHER; note = 2'-O-methyluridine-3'-phosphate
  modified_base 18: mod_base = OTHER; note = 2'-O-methyluridine-3'-phosphate
  modified_base 19: mod_base = OTHER; note = 2'-O-methylcytidine-3'-phosphate
  modified_base 20: mod_base = OTHER; note = 2'-O-methylcytidine-3'-phosphate
  modified_base 21: mod_base = OTHER; note = 2'-O-methylcytidine-3'- phosphorothioate
  modified_base 22: mod_base = OTHER; note = 2'-O-methyluridine-3'-phosphorothioate
  modified_base 23: mod_base = OTHER; note = 2'-O-methyluridine-3'-phosphate
caggaagacttccaccttccctt

SEQ ID NO: 2708 - RNA, 21 nt, synthetic construct
  source 1..21: mol_type = other RNA
  modified_base 1: mod_base = OTHER; note = 2'-O-methylguanosine-3'- phosphorothioate
  modified_base 2: mod_base = OTHER; note = 2'-O-methylguanosine-3'- phosphorothioate
  modified_base 3: mod_base = OTHER; note = 2'-O-methyladenosine-3'-phosphate
  modified_base 4: mod_base = OTHER; note = 2'-O-methyladenosine-3'-phosphate
  modified_base 5: mod_base = OTHER; note = 2'-O-methylguanosine-3'-phosphate
  modified_base 6: mod_base = OTHER; note = 2'-O-methylguanosine-3'-phosphate
  modified_base 7: mod_base = OTHER; note = 2'-fluorouridine-3'-phosphate
  modified_base 8: mod_base = OTHER; note = 2'-O-methylguanosine-3'-phosphate
  modified_base 9: mod_base = OTHER; note = 2'-fluoroguanosine-3'-phosphate
  modified_base 10: mod_base = OTHER; note = 2'-fluoroadenosine-3'-phosphate
  modified_base 11: mod_base = OTHER; note = 2'-fluoroadenosine-3'-phosphate
  modified_base 12: mod_base = OTHER; note = 2'-O-methylguanosine-3'-phosphate
  modified_base 13: mod_base = OTHER; note = 2'-O-methyluridine-3'-phosphate
  modified_base 14: mod_base = OTHER; note = 2'-O-methylcytidine-3'-phosphate
  modified_base 15: mod_base = OTHER; note = 2'-O-methyluridine-3'-phosphate
  modified_base 16: mod_base = OTHER; note = 2'-O-methyluridine-3'-phosphate
  modified_base 17: mod_base = OTHER; note = 2'-O-methylcytidine-3'-phosphate
  modified_base 18: mod_base = OTHER; note = 2'-O-methylcytidine-3'-phosphate
  modified_base 19: mod_base = OTHER; note = 2'-O-methyluridine-3'-phosphate
  modified_base 20: mod_base = OTHER; note = 2'-O-methylguanosine-3'-phosphate
  modified_base 21: mod_base = OTHER; note 2'-O-methylguanosine-3'-phosphate-N-[tris(GalNAc-alkyl)-ami dodecanoyl)]-4-hydroxyprolinol (Hyp-(GalNAc-alkyl)3)
ggaaggtggaagtcttcctgg

SEQ ID NO: 2709 - RNA, 23 nt, synthetic construct
  source 1..23: mol_type = other RNA
  modified_base 1: mod_base = OTHER; note = 2'-O-methylcytidine-3'- phosphorothioate
  modified_base 2: mod_base = OTHER; note = 2'-fluorocytidine-3'-phosphorothioate
  modified_base 3: mod_base = OTHER; note = 2'-O-methyladenosine-3'-phosphate
  modified_base 4: mod_base = OTHER; note = 2'-O-methylguanosine-3'-phosphate
  modified_base 5: mod_base = OTHER; note = 2'-O-methylguanosine-3'-phosphate
  modified_base 6: mod_base = OTHER; note = 2'-fluoroadenosine-3'-phosphate
  modified_base 7: mod_base = OTHER; note = 2'-O-methyladenosine-3'-phosphate
  modified_base 8: mod_base = OTHER; note = 2'-fluoroguanosine-3'-phosphate
  modified_base 9: mod_base = OTHER; note = 2'-fluoroadenosine-3'-phosphate
  modified_base 10: mod_base = OTHER; note = 2'-O-methylcytidine-3'-phosphate
  modified_base 11: mod_base = OTHER; note = 2'-O-methyluridine-3'-phosphate
  modified_base 12: mod_base = OTHER; note = 2'-O-methyluridine-3'-phosphate
  modified_base 13: mod_base = OTHER; note = 2'-O-methylcytidine-3'-phosphate
  modified_base 14: mod_base = OTHER; note = 2'-fluorocytidine-3'-phosphate
  modified_base 15: mod_base = OTHER; note = 2'-O-methyladenosine-3'-phosphate
  modified_base 16: mod_base = OTHER; note = 2'-fluorocytidine-3'-phosphate
  modified_base 17: mod_base = OTHER; note = 2'-O-methylcytidine-3'-phosphate
  modified_base 18: mod_base = OTHER; note = 2'-O-methyluridine-3'-phosphate
  modified_base 19: mod_base = OTHER; note = 2'-O-methyluridine-3'-phosphate
  modified_base 20: mod_base = OTHER; note = 2'-O-methylcytidine-3'-phosphate
  modified_base 21: mod_base = OTHER; note = 2'-O-methylcytidine-3'- phosphorothioate
  modified_base 22: mod_base = OTHER; note = 2'-O-methylcytidine-3'- phosphorothioate
  modified_base 23: mod_base = OTHER; note = 2'-O-methyluridine-3'-phosphate
ccaggaagacttccaccttccct

SEQ ID NO: 2710 - RNA, 21 nt, synthetic construct
  source 1..21: mol_type = other RNA
  modified_base 1: mod_base = OTHER; note = 2'-O-methylguanosine-3'- phosphorothioate
  modified_base 2: mod_base = OTHER; note = 2'-O-methylguanosine-3'- phosphorothioate
  modified_base 3: mod_base = OTHER; note = 2'-O-methyladenosine-3'-phosphate
  modified_base 4: mod_base = OTHER; note = 2'-O-methyladenosine-3'-phosphate
  modified_base 5: mod_base = OTHER; note = 2'-O-methylguanosine-3'-phosphate
  modified_base 6: mod_base = OTHER; note = 2'-O-methylguanosine-3'-phosphate
  modified_base 7: mod_base = OTHER; note = 2'-fluoroguanosine-3'-phosphate
  modified_base 8: mod_base = OTHER; note = 2'-O-methyladenosine-3'-phosphate
  modified_base 9: mod_base = OTHER; note = 2'-fluoroadenosine-3'-phosphate
  modified_base 10: mod_base = OTHER; note = 2'-fluoroguanosine-3'-phosphate
  modified_base 11: mod_base = OTHER; note = 2'-fluoroguanosine-3'-phosphate
  modified_base 12: mod_base = OTHER; note = 2'-O-methyluridine-3'-phosphate
  modified_base 13: mod_base = OTHER; note = 2'-O-methylguanosine-3'-phosphate
  modified_base 14: mod_base = OTHER; note = 2'-O-methylguanosine-3'-phosphate
  modified_base 15: mod_base = OTHER; note = 2'-O-methyladenosine-3'-phosphate
  modified_base 16: mod_base = OTHER; note = 2'-O-methyladenosine-3'-phosphate
  modified_base 17: mod_base = OTHER; note = 2'-O-methylguanosine-3'-phosphate
  modified_base 18: mod_base = OTHER; note = 2'-O-methyluridine-3'-phosphate
  modified_base 19: mod_base = OTHER; note = 2'-O-methylcytidine-3'-phosphate
  modified_base 20: mod_base = OTHER; note = 2'-O-methyluridine-3'-phosphate
  modified_base 21: mod_base = OTHER; note 2'-O-methyluridine-3'-phosphate-N-[tris(GalNAc-alkyl)-amido decanoyl)]-4-hydroxyprolinol (Hyp-(GalNAc-alkyl)3)
ggaagggaaggtggaagtctt

SEQ ID NO: 2711 - RNA, 23 nt, synthetic construct
  source 1..23: mol_type = other RNA
  modified_base 1: mod_base = OTHER; note = 2'-O-methyladenosine-3'- phosphorothioate
  modified_base 2: mod_base = OTHER; note = 2'-fluoroadenosine-3'-phosphorothioate
  modified_base 3: mod_base = OTHER; note = 2'-O-methylguanosine-3'-phosphate
  modified_base 4: mod_base = OTHER; note = 2'-O-methyladenosine-3'-phosphate
  modified_base 5: mod_base = OTHER; note = 2'-O-methylcytidine-3'-phosphate
  modified_base 6: mod_base = OTHER; note = 2'-fluorouridine-3'-phosphate
  modified_base 7: mod_base = OTHER; note = 2'-O-methyluridine-3'-phosphate
  modified_base 8: mod_base = OTHER; note = 2'-fluorocytidine-3'-phosphate
  modified_base 9: mod_base = OTHER; note = 2'-fluorocytidine-3'-phosphate
  modified_base 10: mod_base = OTHER; note = 2'-O-methyladenosine-3'-phosphate
  modified_base 11: mod_base = OTHER; note = 2'-O-methylcytidine-3'-phosphate
  modified_base 12: mod_base = OTHER; note = 2'-O-methylcytidine-3'-phosphate
  modified_base 13: mod_base = OTHER; note = 2'-O-methyluridine-3'-phosphate
  modified_base 14: mod_base = OTHER; note = 2'-fluorouridine-3'-phosphate
  modified_base 15: mod_base = OTHER; note = 2'-O-methylcytidine-3'-phosphate
  modified_base 16: mod_base = OTHER; note = 2'-fluorocytidine-3'-phosphate
  modified_base 17: mod_base = OTHER; note = 2'-O-methylcytidine-3'-phosphate
  modified_base 18: mod_base = OTHER; note = 2'-O-methyluridine-3'-phosphate
  modified_base 19: mod_base = OTHER; note = 2'-O-methyluridine-3'-phosphate
  modified_base 20: mod_base = OTHER; note = 2'-O-methylcytidine-3'-phosphate
  modified_base 21: mod_base = OTHER; note = 2'-O-methylcytidine-3'- phosphorothioate
  modified_base 22: mod_base = OTHER; note = 2'-O-methyladenosine-3'- phosphorothioate
  modified_base 23: mod_base = OTHER; note = 2'-O-methylcytidine-3'-phosphate
aagacttccaccttcccttccac

SEQ ID NO: 2712 - RNA, 21 nt, synthetic construct
  source 1..21: mol_type = other RNA
  modified_base 1: mod_base = OTHER; note = 2'-O-methyluridine-3'-phosphorothioate
  modified_base 2: mod_base = OTHER; note = 2'-O-methylguanosine-3'- phosphorothioate
  modified_base 3: mod_base = OTHER; note = 2'-O-methylguanosine-3'-phosphate
  modified_base 4: mod_base = OTHER; note = 2'-O-methyladenosine-3'-phosphate
  modified_base 5: mod_base = OTHER; note = 2'-O-methyladenosine-3'-phosphate
  modified_base 6: mod_base = OTHER; note = 2'-O-methylguanosine-3'-phosphate
  modified_base 7: mod_base = OTHER; note = 2'-fluoroguanosine-3'-phosphate
  modified_base 8: mod_base = OTHER; note = 2'-O-methylguanosine-3'-phosphate
  modified_base 9: mod_base = OTHER; note = 2'-fluoroadenosine-3'-phosphate
  modified_base 10: mod_base = OTHER; note = 2'-fluoroadenosine-3'-phosphate
  modified_base 11: mod_base = OTHER; note = 2'-fluoroguanosine-3'-phosphate
  modified_base 12: mod_base = OTHER; note = 2'-O-methylguanosine-3'-phosphate
  modified_base 13: mod_base = OTHER; note = 2'-O-methyluridine-3'-phosphate
  modified_base 14: mod_base = OTHER; note = 2'-O-methylguanosine-3'-phosphate
  modified_base 15: mod_base = OTHER; note = 2'-O-methylguanosine-3'-phosphate
  modified_base 16: mod_base = OTHER; note = 2'-O-methyladenosine-3'-phosphate
  modified_base 17: mod_base = OTHER; note = 2'-O-methyladenosine-3'-phosphate
  modified_base 18: mod_base = OTHER; note = 2'-O-methylguanosine-3'-phosphate
  modified_base 19: mod_base = OTHER; note = 2'-O-methyluridine-3'-phosphate
  modified_base 20: mod_base = OTHER; note = 2'-O-methylcytidine-3'-phosphate
  modified_base 21: mod_base = OTHER; note 2'-O-methyluridine-3'-phosphate-N-[tris(GalNAc-alkyl)-amido decanoyl)]-4-hydroxyprolinol (Hyp-(GalNAc-alkyl)3)
tggaagggaaggtggaagtct

SEQ ID NO: 2713 - RNA, 23 nt, synthetic construct
  source 1..23: mol_type = other RNA
  modified_base 1: mod_base = OTHER; note = 2'-O-methyladenosine-3'- phosphorothioate
  modified_base 2: mod_base = OTHER; note = 2'-fluoroguanosine-3'-phosphorothioate
  modified_base 3: mod_base = OTHER; note = 2'-O-methyladenosine-3'-phosphate
  modified_base 4: mod_base = OTHER; note = 2'-O-methylcytidine-3'-phosphate
  modified_base 5: mod_base = OTHER; note = 2'-O-methyluridine-3'-phosphate
  modified_base 6: mod_base = OTHER; note = 2'-fluorouridine-3'-phosphate
  modified_base 7: mod_base = OTHER; note = 2'-O-methylcytidine-3'-phosphate
  modified_base 8: mod_base = OTHER; note = 2'-fluorocytidine-3'-phosphate
  modified_base 9: mod_base = OTHER; note = 2'-fluoroadenosine-3'-phosphate
  modified_base 10: mod_base = OTHER; note = 2'-O-methylcytidine-3'-phosphate
  modified_base 11: mod_base = OTHER; note = 2'-O-methylcytidine-3'-phosphate
  modified_base 12: mod_base = OTHER; note = 2'-O-methyluridine-3'-phosphate
  modified_base 13: mod_base = OTHER; note = 2'-O-methyluridine-3'-phosphate
  modified_base 14: mod_base = OTHER; note = 2'-fluorocytidine-3'-phosphate
  modified_base 15: mod_base = OTHER; note = 2'-O-methylcytidine-3'-phosphate
  modified_base 16: mod_base = OTHER; note = 2'-fluorocytidine-3'-phosphate
  modified_base 17: mod_base = OTHER; note = 2'-O-methyluridine-3'-phosphate
  modified_base 18: mod_base = OTHER; note = 2'-O-methyluridine-3'-phosphate
  modified_base 19: mod_base = OTHER; note = 2'-O-methylcytidine-3'-phosphate
  modified_base 20: mod_base = OTHER; note = 2'-O-methylcytidine-3'-phosphate
  modified_base 21: mod_base = OTHER; note = 2'-O-methyladenosine-3'- phosphorothioate
  modified_base 22: mod_base = OTHER; note = 2'-O-methylcytidine-3'- phosphorothioate
  modified_base 23: mod_base = OTHER; note = 2'-O-methyladenosine-3'-phosphate
agacttccaccttcccttccaca

SEQ ID NO: 2714 - RNA, 21 nt, synthetic construct
  source 1..21: mol_type = other RNA
  modified_base 1: mod_base = OTHER; note = 2'-O-methyluridine-3'-phosphorothioate
  modified_base 2: mod_base = OTHER; note = 2'-O-methylguanosine-3'- phosphorothioate
  modified_base 3: mod_base = OTHER; note = 2'-O-methylcytidine-3'-phosphate
  modified_base 4: mod_base = OTHER; note = 2'-O-methyluridine-3'-phosphate
  modified_base 5: mod_base = OTHER; note = 2'-O-methyladenosine-3'-phosphate
  modified_base 6: mod_base = OTHER; note = 2'-O-methyladenosine-3'-phosphate
  modified_base 7: mod_base = OTHER; note = 2'-fluoroadenosine-3'-phosphate
  modified_base 8: mod_base = OTHER; note = 2'-O-methyluridine-3'-phosphate
  modified_base 9: mod_base = OTHER; note = 2'-fluorocytidine-3'-phosphate
  modified_base 10: mod_base = OTHER; note = 2'-fluoroadenosine-3'-phosphate
  modified_base 11: mod_base = OTHER; note = 2'-fluoroguanosine-3'-phosphate
  modified_base 12: mod_base = OTHER; note = 2'-O-methyluridine-3'-phosphate
  modified_base 13: mod_base = OTHER; note = 2'-O-methyladenosine-3'-phosphate
  modified_base 14: mod_base = OTHER; note = 2'-O-methylcytidine-3'-phosphate
  modified_base 15: mod_base = OTHER; note = 2'-O-methyluridine-3'-phosphate
  modified_base 16: mod_base = OTHER; note = 2'-O-methyluridine-3'-phosphate
  modified_base 17: mod_base = OTHER; note = 2'-O-methylcytidine-3'-phosphate
  modified_base 18: mod_base = OTHER; note = 2'-O-methylcytidine-3'-phosphate
  modified_base 19: mod_base = OTHER; note = 2'-O-methyladenosine-3'-phosphate
  modified_base 20: mod_base = OTHER; note = 2'-O-methyladenosine-3'-phosphate
  modified_base 21: mod_base = OTHER; note 2'-O-methyladenosine-3'-phosphate-N-[tris(GalNAc-alkyl)-ami dodecanoyl)]-4-hydroxyprolinol (Hyp-(GalNAc-alkyl)3)
tgctaaatcagtacttccaaa

SEQ ID NO: 2715 - RNA, 23 nt, synthetic construct
  source 1..23: mol_type = other RNA
  modified_base 1: mod_base = OTHER; note = 2'-O-methyluridine-3'-phosphorothioate
  modified_base 2: mod_base = OTHER; note = 2'-fluorouridine -3'-phosphorothioate
  modified_base 3: mod_base = OTHER; note = 2'-O-methyluridine-3'-phosphate
  modified_base 4: mod_base = OTHER; note = 2'-O-methylguanosine-3'-phosphate
  modified_base 5: mod_base = OTHER; note = 2'-O-methylguanosine-3'-phosphate
  modified_base 6: mod_base = OTHER; note = 2'-fluoroadenosine-3'-phosphate
  modified_base 7: mod_base = OTHER; note = 2'-O-methyladenosine-3'-phosphate
  modified_base 8: mod_base = OTHER; note = 2'-fluoroguanosine-3'-phosphate
  modified_base 9: mod_base = OTHER; note = 2'-fluorouridine-3'-phosphate
  modified_base 10: mod_base = OTHER; note = 2'-O-methyladenosine-3'-phosphate
  modified_base 11: mod_base = OTHER; note = 2'-O-methylcytidine-3'-phosphate
  modified_base 12: mod_base = OTHER; note = 2'-O-methyluridine-3'-phosphate
  modified_base 13: mod_base = OTHER; note = 2'-O-methylguanosine-3'-phosphate
  modified_base 14: mod_base = OTHER; note = 2'-fluoroadenosine-3'-phosphate
  modified_base 15: mod_base = OTHER; note = 2'-O-methyluridine-3'-phosphate
  modified_base 16: mod_base = OTHER; note = 2'-fluorouridine-3'-phosphate
  modified_base 17: mod_base = OTHER; note = 2'-O-methyluridine-3'-phosphate
  modified_base 18: mod_base = OTHER; note = 2'-O-methyladenosine-3'-phosphate
  modified_base 19: mod_base = OTHER; note = 2'-O-methylguanosine-3'-phosphate
  modified_base 20: mod_base = OTHER; note = 2'-O-methylcytidine-3'-phosphate
  modified_base 21: mod_base = OTHER; note = 2'-O-methyladenosine-3'- phosphorothioate
  modified_base 22: mod_base = OTHER; note = 2'-O-methyluridine-3'-phosphorothioate
  modified_base 23: mod_base = OTHER; note = 2'-O-methylguanosine-3'-phosphate
tttggaagtactgatttagcatg

SEQ ID NO: 2716 - RNA, 21 nt, synthetic construct
  source 1..21: mol_type = other RNA
  modified_base 1: mod_base = OTHER; note = 2'-O-methylguanosine-3'- phosphorothioate
  modified_base 2: mod_base = OTHER; note = 2'-O-methylcytidine-3'- phosphorothioate
  modified_base 3: mod_base = OTHER; note = 2'-O-methyluridine-3'-phosphate
  modified_base 4: mod_base = OTHER; note = 2'-O-methyladenosine-3'-phosphate
  modified_base 5: mod_base = OTHER; note = 2'-O-methyladenosine-3'-phosphate
  modified_base 6: mod_base = OTHER; note = 2'-O-methyladenosine-3'-phosphate
  modified_base 7: mod_base = OTHER; note = 2'-fluorouridine-3'-phosphate
  modified_base 8: mod_base = OTHER; note = 2'-O-methylcytidine-3'-phosphate
  modified_base 9: mod_base = OTHER; note = 2'-fluoroadenosine-3'-phosphate
  modified_base 10: mod_base = OTHER; note = 2'-fluoroguanosine-3'-phosphate
  modified_base 11: mod_base = OTHER; note = 2'-fluorouridine-3'-phosphate
  modified_base 12: mod_base = OTHER; note = 2'-O-methyladenosine-3'-phosphate
  modified_base 13: mod_base = OTHER; note = 2'-O-methylcytidine-3'-phosphate
  modified_base 14: mod_base = OTHER; note = 2'-O-methyluridine-3'-phosphate
  modified_base 15: mod_base = OTHER; note = 2'-O-methyluridine-3'-phosphate
  modified_base 16: mod_base = OTHER; note = 2'-O-methylcytidine-3'-phosphate
  modified_base 17: mod_base = OTHER; note = 2'-O-methylcytidine-3'-phosphate
  modified_base 18: mod_base = OTHER; note = 2'-O-methyladenosine-3'-phosphate
  modified_base 19: mod_base = OTHER; note = 2'-O-methyladenosine-3'-phosphate
  modified_base 20: mod_base = OTHER; note = 2'-O-methyladenosine-3'-phosphate
  modified_base 21: mod_base = OTHER; note 2'-O-methylguanosine-3'-phosphate-N-[tris(GalNAc-alkyl)-ami dodecanoyl)]-4-hydroxyprolinol (Hyp-(GalNAc-alkyl)3)
gctaaatcagtacttccaaag

SEQ ID NO: 2717 - RNA, 23 nt, synthetic construct
  source 1..23: mol_type = other RNA
  modified_base 1: mod_base = OTHER; note = 2'-O-methylcytidine-3'- phosphorothioate
  modified_base 2: mod_base = OTHER; note = 2'-fluorouridine -3'-phosphorothioate
  modified_base 3: mod_base = OTHER; note = 2'-O-methyluridine-3'-phosphate
  modified_base 4: mod_base = OTHER; note = 2'-O-methyluridine-3'-phosphate
  modified_base 5: mod_base = OTHER; note = 2'-O-methylguanosine-3'-phosphate
  modified_base 6: mod_base = OTHER; note = 2'-fluoroguanosine-3'-phosphate
  modified_base 7: mod_base = OTHER; note = 2'-O-methyladenosine-3'-phosphate
  modified_base 8: mod_base = OTHER; note = 2'-fluoroadenosine-3'-phosphate
  modified_base 9: mod_base = OTHER; note = 2'-fluoroguanosine-3'-phosphate
  modified_base 10: mod_base = OTHER; note = 2'-O-methyluridine-3'-phosphate
  modified_base 11: mod_base = OTHER; note = 2'-O-methyladenosine-3'-phosphate
  modified_base 12: mod_base = OTHER; note = 2'-O-methylcytidine-3'-phosphate
  modified_base 13: mod_base = OTHER; note = 2'-O-methyluridine-3'-phosphate
  modified_base 14: mod_base = OTHER; note = 2'-fluoroguanosine-3'-phosphate
  modified_base 15: mod_base = OTHER; note = 2'-O-methyladenosine-3'-phosphate
  modified_base 16: mod_base = OTHER; note = 2'-fluorouridine-3'-phosphate
  modified_base 17: mod_base = OTHER; note = 2'-O-methyluridine-3'-phosphate
  modified_base 18: mod_base = OTHER; note = 2'-O-methyluridine-3'-phosphate
  modified_base 19: mod_base = OTHER; note = 2'-O-methyladenosine-3'-phosphate
  modified_base 20: mod_base = OTHER; note = 2'-O-methylguanosine-3'-phosphate
  modified_base 21: mod_base = OTHER; note = 2'-O-methylcytidine-3'- phosphorothioate
  modified_base 22: mod_base = OTHER; note = 2'-O-methyladenosine-3'- phosphorothioate
  modified_base 23: mod_base = OTHER; note = 2'-O-methyluridine-3'-phosphate
ctttggaagtactgatttagcat

SEQ ID NO: 2718 - RNA, 21 nt, synthetic construct
  source 1..21: mol_type = other RNA
  modified_base 1: mod_base = OTHER; note = 2'-O-methyladenosine-3'- phosphorothioate
  modified_base 2: mod_base = OTHER; note = 2'-O-methyladenosine-3'- phosphorothioate
  modified_base 3: mod_base = OTHER; note = 2'-O-methylcytidine-3'-phosphate
  modified_base 4: mod_base = OTHER; note = 2'-O-methyladenosine-3'-phosphate
  modified_base 5: mod_base = OTHER; note = 2'-O-methyluridine-3'-phosphate
  modified_base 6: mod_base = OTHER; note = 2'-O-methylguanosine-3'-phosphate
  modified_base 7: mod_base = OTHER; note = 2'-fluorocytidine-3'-phosphate
  modified_base 8: mod_base = OTHER; note = 2'-O-methyluridine-3'-phosphate
  modified_base 9: mod_base = OTHER; note = 2'-fluoroadenosine-3'-phosphate
  modified_base 10: mod_base = OTHER; note = 2'-fluoroadenosine-3'-phosphate
  modified_base 11: mod_base = OTHER; note = 2'-fluoroadenosine-3'-phosphate
  modified_base 12: mod_base = OTHER; note = 2'-O-methyluridine-3'-phosphate
  modified_base 13: mod_base = OTHER; note = 2'-O-methylcytidine-3'-phosphate
  modified_base 14: mod_base = OTHER; note = 2'-O-methyladenosine-3'-phosphate
  modified_base 15: mod_base = OTHER; note = 2'-O-methylguanosine-3'-phosphate
  modified_base 16: mod_base = OTHER; note = 2'-O-methyluridine-3'-phosphate
  modified_base 17: mod_base = OTHER; note = 2'-O-methyladenosine-3'-phosphate
  modified_base 18: mod_base = OTHER; note = 2'-O-methylcytidine-3'-phosphate
  modified_base 19: mod_base = OTHER; note = 2'-O-methyluridine-3'-phosphate
  modified_base 20: mod_base = OTHER; note = 2'-O-methyluridine-3'-phosphate
  modified_base 21: mod_base = OTHER; note 2'-O-methylcytidine-3'-phosphate-N-[tris(GalNAc-alkyl)-amid odecanoyl)]-4-hydroxyprolinol (Hyp-(GalNAc-alkyl)3)
aacatgctaaatcagtacttc

SEQ ID NO: 2719 - RNA, 23 nt, synthetic construct
  source 1..23: mol_type = other RNA
  modified_base 1: mod_base = OTHER; note = 2'-O-methylguanosine-3'- phosphorothioate
  modified_base 2: mod_base = OTHER; note = 2'-fluoroadenosine-3'-phosphorothioate
  modified_base 3: mod_base = OTHER; note = 2'-O-methyladenosine-3'-phosphate
  modified_base 4: mod_base = OTHER; note = 2'-O-methylguanosine-3'-phosphate
  modified_base 5: mod_base = OTHER; note = 2'-O-methyluridine-3'-phosphate
  modified_base 6: mod_base = OTHER; note = 2'-fluoroadenosine-3'-phosphate
  modified_base 7: mod_base = OTHER; note = 2'-O-methylcytidine-3'-phosphate
  modified_base 8: mod_base = OTHER; note = 2'-fluorouridine-3'-phosphate
  modified_base 9: mod_base = OTHER; note = 2'-fluoroguanosine-3'-phosphate
  modified_base 10: mod_base = OTHER; note = 2'-O-methyladenosine-3'-phosphate
  modified_base 11: mod_base = OTHER; note = 2'-O-methyluridine-3'-phosphate
  modified_base 12: mod_base = OTHER; note = 2'-O-methyluridine-3'-phosphate
  modified_base 13: mod_base = OTHER; note = 2'-O-methyluridine-3'-phosphate
  modified_base 14: mod_base = OTHER; note = 2'-fluoroadenosine-3'-phosphate
  modified_base 15: mod_base = OTHER; note = 2'-O-methylguanosine-3'-phosphate
  modified_base 16: mod_base = OTHER; note = 2'-fluorocytidine-3'-phosphate
  modified_base 17: mod_base = OTHER; note = 2'-O-methyladenosine-3'-phosphate
  modified_base 18: mod_base = OTHER; note = 2'-O-methyluridine-3'-phosphate
  modified_base 19: mod_base = OTHER; note = 2'-O-methylguanosine-3'-phosphate
  modified_base 20: mod_base = OTHER; note = 2'-O-methyluridine-3'-phosphate
  modified_base 21: mod_base = OTHER; note = 2'-O-methyluridine-3'-phosphorothioate
  modified_base 22: mod_base = OTHER; note = 2'-O-methylguanosine-3'- phosphorothioate
  modified_base 23: mod_base = OTHER; note = 2'-O-methyluridine-3'-phosphate
gaagtactgatttagcatgttgt

SEQ ID NO: 2720 - RNA, 21 nt, synthetic construct
  source 1..21: mol_type = other RNA
  modified_base 1: mod_base = OTHER; note = 2'-O-methylcytidine-3'- phosphorothioate
  modified_base 2: mod_base = OTHER; note = 2'-O-methyladenosine-3'- phosphorothioate
  modified_base 3: mod_base = OTHER; note = 2'-O-methyladenosine-3'-phosphate
  modified_base 4: mod_base = OTHER; note = 2'-O-methylcytidine-3'-phosphate
  modified_base 5: mod_base = OTHER; note = 2'-O-methyladenosine-3'-phosphate
  modified_base 6: mod_base = OTHER; note = 2'-O-methyluridine-3'-phosphate
  modified_base 7: mod_base = OTHER; note = 2'-fluoroguanosine-3'-phosphate
  modified_base 8: mod_base = OTHER; note = 2'-O-methylcytidine-3'-phosphate
  modified_base 9: mod_base = OTHER; note = 2'-fluorouridine-3'-phosphate
  modified_base 10: mod_base = OTHER; note = 2'-fluoroadenosine-3'-phosphate
  modified_base 11: mod_base = OTHER; note = 2'-fluoroadenosine-3'-phosphate
  modified_base 12: mod_base = OTHER; note = 2'-O-methyladenosine-3'-phosphate
  modified_base 13: mod_base = OTHER; note = 2'-O-methyluridine-3'-phosphate
  modified_base 14: mod_base = OTHER; note = 2'-O-methylcytidine-3'-phosphate
  modified_base 15: mod_base = OTHER; note = 2'-O-methyladenosine-3'-phosphate
  modified_base 16: mod_base = OTHER; note = 2'-O-methylguanosine-3'-phosphate
  modified_base 17: mod_base = OTHER; note = 2'-O-methyluridine-3'-phosphate
  modified_base 18: mod_base = OTHER; note = 2'-O-methyladenosine-3'-phosphate
  modified_base 19: mod_base = OTHER; note = 2'-O-methylcytidine-3'-phosphate
  modified_base 20: mod_base = OTHER; note = 2'-O-methyluridine-3'-phosphate
  modified_base 21: mod_base = OTHER; note 2'-O-methyluridine-3'-phosphate-N-[tris(GalNAc-alkyl)-amido decanoyl)]-4-hydroxyprolinol (Hyp-(GalNAc-alkyl)3)
caacatgctaaatcagtactt

SEQ ID NO: 2721 - RNA, 23 nt, synthetic construct
  source 1..23: mol_type = other RNA
  modified_base 1: mod_base = OTHER; note = 2'-O-methyladenosine-3'- phosphorothioate
  modified_base 2: mod_base = OTHER; note = 2'-fluoroadenosine-3'-phosphorothioate
  modified_base 3: mod_base = OTHER; note = 2'-O-methylguanosine-3'-phosphate
  modified_base 4: mod_base = OTHER; note = 2'-O-methyluridine-3'-phosphate
  modified_base 5: mod_base = OTHER; note = 2'-O-methyladenosine-3'-phosphate
  modified_base 6: mod_base = OTHER; note = 2'-fluorocytidine-3'-phosphate
  modified_base 7: mod_base = OTHER; note = 2'-O-methyluridine-3'-phosphate
  modified_base 8: mod_base = OTHER; note = 2'-fluoroguanosine-3'-phosphate
  modified_base 9: mod_base = OTHER; note = 2'-fluoroadenosine-3'-phosphate
  modified_base 10: mod_base = OTHER; note = 2'-O-methyluridine-3'-phosphate
  modified_base 11: mod_base = OTHER; note = 2'-O-methyluridine-3'-phosphate
  modified_base 12: mod_base = OTHER; note = 2'-O-methyluridine-3'-phosphate
  modified_base 13: mod_base = OTHER; note = 2'-O-methyladenosine-3'-phosphate
  modified_base 14: mod_base = OTHER; note = 2'-fluoroguanosine-3'-phosphate
  modified_base 15: mod_base = OTHER; note = 2'-O-methylcytidine-3'-phosphate
  modified_base 16: mod_base = OTHER; note = 2'-fluoroadenosine-3'-phosphate
  modified_base 17: mod_base = OTHER; note = 2'-O-methyluridine-3'-phosphate
  modified_base 18: mod_base = OTHER; note = 2'-O-methylguanosine-3'-phosphate
  modified_base 19: mod_base = OTHER; note = 2'-O-methyluridine-3'-phosphate
  modified_base 20: mod_base = OTHER; note = 2'-O-methyluridine-3'-phosphate
  modified_base 21: mod_base = OTHER; note = 2'-O-methylguanosine-3'- phosphorothioate
  modified_base 22: mod_base = OTHER; note = 2'-O-methyluridine-3'-phosphorothioate
  modified_base 23: mod_base = OTHER; note = 2'-O-methyluridine-3'-phosphate
aagtactgatttagcatgttgtt

SEQ ID NO: 2722 - RNA, 21 nt, synthetic construct
  source 1..21: mol_type = other RNA
  modified_base 1: mod_base = OTHER; note = 2'-O-methylcytidine-3'- phosphorothioate
  modified_base 2: mod_base = OTHER; note = 2'-O-methylcytidine-3'- phosphorothioate
  modified_base 3: mod_base = OTHER; note = 2'-O-methyladenosine-3'-phosphate
  modified_base 4: mod_base = OTHER; note = 2'-O-methylcytidine-3'-phosphate
  modified_base 5: mod_base = OTHER; note = 2'-O-methyladenosine-3'-phosphate
  modified_base 6: mod_base = OTHER; note = 2'-O-methyladenosine-3'-phosphate
  modified_base 7: mod_base = OTHER; note = 2'-fluorocytidine-3'-phosphate
  modified_base 8: mod_base = OTHER; note = 2'-O-methyluridine-3'-phosphate
  modified_base 9: mod_base = OTHER; note = 2'-fluorocytidine-3'-phosphate
  modified_base 10: mod_base = OTHER; note = 2'-fluoroadenosine-3'-phosphate
  modified_base 11: mod_base = OTHER; note = 2'-fluoroguanosine-3'-phosphate
  modified_base 12: mod_base = OTHER; note = 2'-O-methylguanosine-3'-phosphate
  modified_base 13: mod_base = OTHER; note = 2'-O-methyladenosine-3'-phosphate
  modified_base 14: mod_base = OTHER; note = 2'-O-methyluridine-3'-phosphate
  modified_base 15: mod_base = OTHER; note = 2'-O-methylguanosine-3'-phosphate
  modified_base 16: mod_base = OTHER; note = 2'-O-methyladenosine-3'-phosphate
  modified_base 17: mod_base = OTHER; note = 2'-O-methyladenosine-3'-phosphate
  modified_base 18: mod_base = OTHER; note = 2'-O-methyladenosine-3'-phosphate
  modified_base 19: mod_base = OTHER; note = 2'-O-methyladenosine-3'-phosphate
  modified_base 20: mod_base = OTHER; note = 2'-O-methyladenosine-3'-phosphate
  modified_base 21: mod_base = OTHER; note 2'-O-methyluridine-3'-phosphate-N-[tris(GalNAc-alkyl)-amido decanoyl)]-4-hydroxyprolinol (Hyp-(GalNAc-alkyl)3)
ccacaactcaggatgaaaaat

SEQ ID NO: 2723 - RNA, 23 nt, synthetic construct
  source 1..23: mol_type = other RNA
  modified_base 1: mod_base = OTHER; note = 2'-O-methyladenosine-3'- phosphorothioate
  modified_base 2: mod_base = OTHER; note = 2'-fluorouridine -3'-phosphorothioate
  modified_base 3: mod_base = OTHER; note = 2'-O-methyluridine-3'-phosphate
  modified_base 4: mod_base = OTHER; note = 2'-O-methyluridine-3'-phosphate
  modified_base 5: mod_base = OTHER; note = 2'-O-methyluridine-3'-phosphate
  modified_base 6: mod_base = OTHER; note = 2'-fluorouridine-3'-phosphate
  modified_base 7: mod_base = OTHER; note = 2'-O-methylcytidine-3'-phosphate
  modified_base 8: mod_base = OTHER; note = 2'-fluoroadenosine-3'-phosphate
  modified_base 9: mod_base = OTHER; note = 2'-fluorouridine-3'-phosphate
  modified_base 10: mod_base = OTHER; note = 2'-O-methylcytidine-3'-phosphate
  modified_base 11: mod_base = OTHER; note = 2'-O-methylcytidine-3'-phosphate
  modified_base 12: mod_base = OTHER; note = 2'-O-methyluridine-3'-phosphate
  modified_base 13: mod_base = OTHER; note = 2'-O-methylguanosine-3'-phosphate
  modified_base 14: mod_base = OTHER; note = 2'-fluoroadenosine-3'-phosphate
  modified_base 15: mod_base = OTHER; note = 2'-O-methylguanosine-3'-phosphate
  modified_base 16: mod_base = OTHER; note = 2'-fluorouridine-3'-phosphate
  modified_base 17: mod_base = OTHER; note = 2'-O-methyluridine-3'-phosphate
  modified_base 18: mod_base = OTHER; note = 2'-O-methylguanosine-3'-phosphate
  modified_base 19: mod_base = OTHER; note = 2'-O-methyluridine-3'-phosphate
  modified_base 20: mod_base = OTHER; note = 2'-O-methylguanosine-3'-phosphate
  modified_base 21: mod_base = OTHER; note = 2'-O-methylguanosine-3'- phosphorothioate
  modified_base 22: mod_base = OTHER; note = 2'-O-methylcytidine-3'- phosphorothioate
  modified_base 23: mod_base = OTHER; note = 2'-O-methylguanosine-3'-phosphate
atttttcatcctgagttgtggcg

SEQ ID NO: 2724 - RNA, 21 nt, synthetic construct
  source 1..21: mol_type = other RNA
  modified_base 1: mod_base = OTHER; note = 2'-O-methylcytidine-3'- phosphorothioate
  modified_base 2: mod_base = OTHER; note = 2'-O-methyladenosine-3'- phosphorothioate
  modified_base 3: mod_base = OTHER; note = 2'-O-methylcytidine-3'-phosphate
  modified_base 4: mod_base = OTHER; note = 2'-O-methyladenosine-3'-phosphate
  modified_base 5: mod_base = OTHER; note = 2'-O-methyladenosine-3'-phosphate
  modified_base 6: mod_base = OTHER; note = 2'-O-methylcytidine-3'-phosphate
  modified_base 7: mod_base = OTHER; note = 2'-fluorouridine-3'-phosphate
  modified_base 8: mod_base = OTHER; note = 2'-O-methylcytidine-3'-phosphate
  modified_base 9: mod_base = OTHER; note = 2'-fluoroadenosine-3'-phosphate
  modified_base 10: mod_base = OTHER; note = 2'-fluoroguanosine-3'-phosphate
  modified_base 11: mod_base = OTHER; note = 2'-fluoroguanosine-3'-phosphate
  modified_base 12: mod_base = OTHER; note = 2'-O-methyladenosine-3'-phosphate
  modified_base 13: mod_base = OTHER; note = 2'-O-methyluridine-3'-phosphate
  modified_base 14: mod_base = OTHER; note = 2'-O-methylguanosine-3'-phosphate
  modified_base 15: mod_base = OTHER; note = 2'-O-methyladenosine-3'-phosphate
  modified_base 16: mod_base = OTHER; note = 2'-O-methyladenosine-3'-phosphate
  modified_base 17: mod_base = OTHER; note = 2'-O-methyladenosine-3'-phosphate
  modified_base 18: mod_base = OTHER; note = 2'-O-methyladenosine-3'-phosphate
  modified_base 19: mod_base = OTHER; note = 2'-O-methyladenosine-3'-phosphate
  modified_base 20: mod_base = OTHER; note = 2'-O-methyluridine-3'-phosphate
  modified_base 21: mod_base = OTHER; note 2'-O-methyluridine-3'-phosphate-N-[tris(GalNAc-alkyl)-amido decanoyl)]-4-hydroxyprolinol (Hyp-(GalNAc-alkyl)3)
cacaactcaggatgaaaaatt

SEQ ID NO: 2725 - RNA, 23 nt, synthetic construct
  source 1..23: mol_type = other RNA
  modified_base 1: mod_base = OTHER; note = 2'-O-methyladenosine-3'- phosphorothioate
  modified_base 2: mod_base = OTHER; note = 2'-fluoroadenosine-3'-phosphorothioate
  modified_base 3: mod_base = OTHER; note = 2'-O-methyluridine-3'-phosphate
  modified_base 4: mod_base = OTHER; note = 2'-O-methyluridine-3'-phosphate
  modified_base 5: mod_base = OTHER; note = 2'-O-methyluridine-3'-phosphate
  modified_base 6: mod_base = OTHER; note = 2'-fluorouridine-3'-phosphate
  modified_base 7: mod_base = OTHER; note = 2'-O-methyluridine-3'-phosphate
  modified_base 8: mod_base = OTHER; note = 2'-fluorocytidine-3'-phosphate
  modified_base 9: mod_base = OTHER; note = 2'-fluoroadenosine-3'-phosphate
  modified_base 10: mod_base = OTHER; note = 2'-O-methyluridine-3'-phosphate
  modified_base 11: mod_base = OTHER; note = 2'-O-methylcytidine-3'-phosphate
  modified_base 12: mod_base = OTHER; note = 2'-O-methylcytidine-3'-phosphate
  modified_base 13: mod_base = OTHER; note = 2'-O-methyluridine-3'-phosphate
  modified_base 14: mod_base = OTHER; note = 2'-fluoroguanosine-3'-phosphate
  modified_base 15: mod_base = OTHER; note = 2'-O-methyladenosine-3'-phosphate
  modified_base 16: mod_base = OTHER; note = 2'-fluoroguanosine-3'-phosphate
  modified_base 17: mod_base = OTHER; note = 2'-O-methyluridine-3'-phosphate
  modified_base 18: mod_base = OTHER; note = 2'-O-methyluridine-3'-phosphate
  modified_base 19: mod_base = OTHER; note = 2'-O-methylguanosine-3'-phosphate
  modified_base 20: mod_base = OTHER; note = 2'-O-methyluridine-3'-phosphate
  modified_base 21: mod_base = OTHER; note = 2'-O-methylguanosine-3'- phosphorothioate
  modified_base 22: mod_base = OTHER; note = 2'-O-methylguanosine-3'- phosphorothioate
  modified_base 23: mod_base = OTHER; note = 2'-O-methylcytidine-3'-phosphate
aatttttcatcctgagttgtggc

SEQ ID NO: 2726 - RNA, 21 nt, synthetic construct
  source 1..21: mol_type = other RNA
  modified_base 1: mod_base = OTHER; note = 2'-O-methylguanosine-3'- phosphorothioate
  modified_base 2: mod_base = OTHER; note = 2'-O-methylcytidine-3'- phosphorothioate
  modified_base 3: mod_base = OTHER; note = 2'-O-methylcytidine-3'-phosphate
  modified_base 4: mod_base = OTHER; note = 2'-O-methylguanosine-3'-phosphate
  modified_base 5: mod_base = OTHER; note = 2'-O-methylcytidine-3'-phosphate
  modified_base 6: mod_base = OTHER; note = 2'-O-methylcytidine-3'-phosphate
  modified_base 7: mod_base = OTHER; note = 2'-fluoroadenosine-3'-phosphate
  modified_base 8: mod_base = OTHER; note = 2'-O-methylcytidine-3'-phosphate
  modified_base 9: mod_base = OTHER; note = 2'-fluoroadenosine-3'-phosphate
  modified_base 10: mod_base = OTHER; note = 2'-fluoroadenosine-3'-phosphate
  modified_base 11: mod_base = OTHER; note = 2'-fluorocytidine-3'-phosphate
  modified_base 12: mod_base = OTHER; note = 2'-O-methyluridine-3'-phosphate
  modified_base 13: mod_base = OTHER; note = 2'-O-methylcytidine-3'-phosphate
  modified_base 14: mod_base = OTHER; note = 2'-O-methyladenosine-3'-phosphate
  modified_base 15: mod_base = OTHER; note = 2'-O-methylguanosine-3'-phosphate
  modified_base 16: mod_base = OTHER; note = 2'-O-methylguanosine-3'-phosphate
  modified_base 17: mod_base = OTHER; note = 2'-O-methyladenosine-3'-phosphate
  modified_base 18: mod_base = OTHER; note = 2'-O-methyluridine-3'-phosphate
  modified_base 19: mod_base = OTHER; note = 2'-O-methylguanosine-3'-phosphate
  modified_base 20: mod_base = OTHER; note = 2'-O-methyladenosine-3'-phosphate
  modified_base 21: mod_base = OTHER; note 2'-O-methyladenosine-3'-phosphate-N-[tris(GalNAc-alkyl)-ami dodecanoyl)]-4-hydroxyprolinol (Hyp-(GalNAc-alkyl)3)
gccgccacaactcaggatgaa

SEQ ID NO: 2727 - RNA, 23 nt, synthetic construct
  source 1..23: mol_type = other RNA
  modified_base 1: mod_base = OTHER; note = 2'-O-methyluridine-3'-phosphorothioate
  modified_base 2: mod_base = OTHER; note = 2'-fluorouridine -3'-phosphorothioate
  modified_base 3: mod_base = OTHER; note = 2'-O-methylcytidine-3'-phosphate
  modified_base 4: mod_base = OTHER; note = 2'-O-methyladenosine-3'-phosphate
  modified_base 5: mod_base = OTHER; note = 2'-O-methyluridine-3'-phosphate
  modified_base 6: mod_base = OTHER; note = 2'-fluorocytidine-3'-phosphate
  modified_base 7: mod_base = OTHER; note = 2'-O-methylcytidine-3'-phosphate
  modified_base 8: mod_base = OTHER; note = 2'-fluorouridine-3'-phosphate
  modified_base 9: mod_base = OTHER; note = 2'-fluoroguanosine-3'-phosphate
  modified_base 10: mod_base = OTHER; note = 2'-O-methyladenosine-3'-phosphate
  modified_base 11: mod_base = OTHER; note = 2'-O-methylguanosine-3'-phosphate
  modified_base 12: mod_base = OTHER; note = 2'-O-methyluridine-3'-phosphate
  modified_base 13: mod_base = OTHER; note = 2'-O-methyluridine-3'-phosphate
  modified_base 14: mod_base = OTHER; note = 2'-fluoroguanosine-3'-phosphate
  modified_base 15: mod_base = OTHER; note = 2'-O-methyluridine-3'-phosphate
  modified_base 16: mod_base = OTHER; note = 2'-fluoroguanosine-3'-phosphate
  modified_base 17: mod_base = OTHER; note = 2'-O-methylguanosine-3'-phosphate
  modified_base 18: mod_base = OTHER; note = 2'-O-methylcytidine-3'-phosphate
  modified_base 19: mod_base = OTHER; note = 2'-O-methylguanosine-3'-phosphate
  modified_base 20: mod_base = OTHER; note = 2'-O-methylguanosine-3'-phosphate
  modified_base 21: mod_base = OTHER; note = 2'-O-methylcytidine-3'- phosphorothioate
  modified_base 22: mod_base = OTHER; note = 2'-O-methyladenosine-3'- phosphorothioate
  modified_base 23: mod_base = OTHER; note = 2'-O-methylguanosine-3'-phosphate
ttcatcctgagttgtggcggcag

SEQ ID NO: 2728 - RNA, 21 nt, synthetic construct
  source 1..21: mol_type = other RNA
  modified_base 1: mod_base = OTHER; note = 2'-O-methyluridine-3'-phosphorothioate
  modified_base 2: mod_base = OTHER; note = 2'-O-methylguanosine-3'- phosphorothioate
  modified_base 3: mod_base = OTHER; note = 2'-O-methylcytidine-3'-phosphate
  modified_base 4: mod_base = OTHER; note = 2'-O-methylcytidine-3'-phosphate
  modified_base 5: mod_base = OTHER; note = 2'-O-methylguanosine-3'-phosphate
  modified_base 6: mod_base = OTHER; note = 2'-O-methylcytidine-3'-phosphate
  modified_base 7: mod_base = OTHER; note = 2'-fluorocytidine-3'-phosphate
  modified_base 8: mod_base = OTHER; note = 2'-O-methyladenosine-3'-phosphate
  modified_base 9: mod_base = OTHER; note = 2'-fluorocytidine-3'-phosphate
  modified_base 10: mod_base = OTHER; note = 2'-fluoroadenosine-3'-phosphate
  modified_base 11: mod_base = OTHER; note = 2'-fluoroadenosine-3'-phosphate
  modified_base 12: mod_base = OTHER; note = 2'-O-methylcytidine-3'-phosphate
  modified_base 13: mod_base = OTHER; note = 2'-O-methyluridine-3'-phosphate
  modified_base 14: mod_base = OTHER; note = 2'-O-methylcytidine-3'-phosphate
  modified_base 15: mod_base = OTHER; note = 2'-O-methyladenosine-3'-phosphate
  modified_base 16: mod_base = OTHER; note = 2'-O-methylguanosine-3'-phosphate
  modified_base 17: mod_base = OTHER; note = 2'-O-methylguanosine-3'-phosphate
  modified_base 18: mod_base = OTHER; note = 2'-O-methyladenosine-3'-phosphate
  modified_base 19: mod_base = OTHER; note = 2'-O-methyluridine-3'-phosphate
  modified_base 20: mod_base = OTHER; note = 2'-O-methylguanosine-3'-phosphate
  modified_base 21: mod_base = OTHER; note 2'-O-methyladenosine-3'-phosphate-N-[tris(GalNAc-alkyl)-ami dodecanoyl)]-4-hydroxyprolinol (Hyp-(GalNAc-alkyl)3)
tgccgccacaactcaggatga

SEQ ID NO: 2729 - RNA, 23 nt, synthetic construct
  source 1..23: mol_type = other RNA
  modified_base 1: mod_base = OTHER; note = 2'-O-methyluridine-3'-phosphorothioate
  modified_base 2: mod_base = OTHER; note = 2'-fluorocytidine-3'-phosphorothioate
  modified_base 3: mod_base = OTHER; note = 2'-O-methyladenosine-3'-phosphate
  modified_base 4: mod_base = OTHER; note = 2'-O-methyluridine-3'-phosphate
  modified_base 5: mod_base = OTHER; note = 2'-O-methylcytidine-3'-phosphate
  modified_base 6: mod_base = OTHER; note = 2'-fluorocytidine-3'-phosphate
  modified_base 7: mod_base = OTHER; note = 2'-O-methyluridine-3'-phosphate
  modified_base 8: mod_base = OTHER; note = 2'-fluoroguanosine-3'-phosphate
  modified_base 9: mod_base = OTHER; note = 2'-fluoroadenosine-3'-phosphate
  modified_base 10: mod_base = OTHER; note = 2'-O-methylguanosine-3'-phosphate
  modified_base 11: mod_base = OTHER; note = 2'-O-methyluridine-3'-phosphate
  modified_base 12: mod_base = OTHER; note = 2'-O-methyluridine-3'-phosphate
  modified_base 13: mod_base = OTHER; note = 2'-O-methylguanosine-3'-phosphate
  modified_base 14: mod_base = OTHER; note = 2'-fluorouridine-3'-phosphate
  modified_base 15: mod_base = OTHER; note = 2'-O-methylguanosine-3'-phosphate
  modified_base 16: mod_base = OTHER; note = 2'-fluoroguanosine-3'-phosphate
  modified_base 17: mod_base = OTHER; note = 2'-O-methylcytidine-3'-phosphate
  modified_base 18: mod_base = OTHER; note = 2'-O-methylguanosine-3'-phosphate
  modified_base 19: mod_base = OTHER; note = 2'-O-methylguanosine-3'-phosphate
  modified_base 20: mod_base = OTHER; note = 2'-O-methylcytidine-3'-phosphate
  modified_base 21: mod_base = OTHER; note = 2'-O-methyladenosine-3'- phosphorothioate
  modified_base 22: mod_base = OTHER; note = 2'-O-methylguanosine-3'- phosphorothioate
  modified_base 23: mod_base = OTHER; note = 2'-O-methyluridine-3'-phosphate
tcatcctgagttgtggcggcagt

SEQ ID NO: 2730 - RNA, 21 nt, synthetic construct
  source 1..21: mol_type = other RNA
  modified_base 1: mod_base = OTHER; note = 2'-O-methylguanosine-3'- phosphorothioate
  modified_base 2: mod_base = OTHER; note = 2'-O-methylcytidine-3'- phosphorothioate
  modified_base 3: mod_base = OTHER; note = 2'-O-methyladenosine-3'-phosphate
  modified_base 4: mod_base = OTHER; note = 2'-O-methyladenosine-3'-phosphate
  modified_base 5: mod_base = OTHER; note = 2'-O-methylcytidine-3'-phosphate
  modified_base 6: mod_base = OTHER; note = 2'-O-methylcytidine-3'-phosphate
  modified_base 7: mod_base = OTHER; note = 2'-fluoroguanosine-3'-phosphate
  modified_base 8: mod_base = OTHER; note = 2'-O-methyluridine-3'-phosphate
  modified_base 9: mod_base = OTHER; note = 2'-fluorocytidine-3'-phosphate
  modified_base 10: mod_base = OTHER; note = 2'-fluorouridine-3'-phosphate
  modified_base 11: mod_base = OTHER; note = 2'-fluoroguanosine-3'-phosphate
  modified_base 12: mod_base = OTHER; note = 2'-O-methylguanosine-3'-phosphate
  modified_base 13: mod_base = OTHER; note = 2'-O-methyladenosine-3'-phosphate
  modified_base 14: mod_base = OTHER; note = 2'-O-methyluridine-3'-phosphate
  modified_base 15: mod_base = OTHER; note = 2'-O-methylguanosine-3'-phosphate
  modified_base 16: mod_base = OTHER; note = 2'-O-methyladenosine-3'-phosphate
  modified_base 17: mod_base = OTHER; note = 2'-O-methyluridine-3'-phosphate
  modified_base 18: mod_base = OTHER; note = 2'-O-methylguanosine-3'-phosphate
  modified_base 19: mod_base = OTHER; note = 2'-O-methyluridine-3'-phosphate
  modified_base 20: mod_base = OTHER; note = 2'-O-methylguanosine-3'-phosphate
  modified_base 21: mod_base = OTHER; note 2'-O-methylcytidine-3'-phosphate-N-[tris(GalNAc-alkyl)-amid odecanoyl)]-4-hydroxyprolinol (Hyp-(GalNAc-alkyl)3)
gcaaccgtctggatgatgtgc

SEQ ID NO: 2731 - RNA, 23 nt, synthetic construct
  source 1..23: mol_type = other RNA
  modified_base 1: mod_base = OTHER; note = 2'-O-methylguanosine-3'- phosphorothioate
  modified_base 2: mod_base = OTHER; note = 2'-fluorocytidine-3'-phosphorothioate
  modified_base 3: mod_base = OTHER; note = 2'-O-methyladenosine-3'-phosphate
  modified_base 4: mod_base = OTHER; note = 2'-O-methylcytidine-3'-phosphate
  modified_base 5: mod_base = OTHER; note = 2'-O-methyladenosine-3'-phosphate
  modified_base 6: mod_base = OTHER; note = 2'-fluorouridine-3'-phosphate
  modified_base 7: mod_base = OTHER; note = 2'-O-methylcytidine-3'-phosphate
  modified_base 8: mod_base = OTHER; note = 2'-fluoroadenosine-3'-phosphate
  modified_base 9: mod_base = OTHER; note = 2'-fluorouridine-3'-phosphate
  modified_base 10: mod_base = OTHER; note = 2'-O-methylcytidine-3'-phosphate
  modified_base 11: mod_base = OTHER; note = 2'-O-methylcytidine-3'-phosphate
  modified_base 12: mod_base = OTHER; note = 2'-O-methyladenosine-3'-phosphate
  modified_base 13: mod_base = OTHER; note = 2'-O-methylguanosine-3'-phosphate
  modified_base 14: mod_base = OTHER; note = 2'-fluoroadenosine-3'-phosphate
  modified_base 15: mod_base = OTHER; note = 2'-O-methylcytidine-3'-phosphate
  modified_base 16: mod_base = OTHER; note = 2'-fluoroguanosine-3'-phosphate
  modified_base 17: mod_base = OTHER; note = 2'-O-methylguanosine-3'-phosphate
  modified_base 18: mod_base = OTHER; note = 2'-O-methyluridine-3'-phosphate
  modified_base 19: mod_base = OTHER; note = 2'-O-methyluridine-3'-phosphate
  modified_base 20: mod_base = OTHER; note = 2'-O-methylguanosine-3'-phosphate
  modified_base 21: mod_base = OTHER; note = 2'-O-methylcytidine-3'- phosphorothioate
  modified_base 22: mod_base = OTHER; note = 2'-O-methylcytidine-3'- phosphorothioate
  modified_base 23: mod_base = OTHER; note = 2'-O-methylcytidine-3'-phosphate
gcacatcatccagacggttgccc

SEQ ID NO: 2732 - RNA, 21 nt, synthetic construct
  source 1..21: mol_type = other RNA
  modified_base 1: mod_base = OTHER; note = 2'-O-methylcytidine-3'- phosphorothioate
  modified_base 2: mod_base = OTHER; note = 2'-O-methyladenosine-3'- phosphorothioate
  modified_base 3: mod_base = OTHER; note = 2'-O-methyladenosine-3'-phosphate
  modified_base 4: mod_base = OTHER; note = 2'-O-methylcytidine-3'-phosphate
  modified_base 5: mod_base = OTHER; note = 2'-O-methylcytidine-3'-phosphate
  modified_base 6: mod_base = OTHER; note = 2'-O-methylguanosine-3'-phosphate
  modified_base 7: mod_base = OTHER; note = 2'-fluorouridine-3'-phosphate
  modified_base 8: mod_base = OTHER; note = 2'-O-methylcytidine-3'-phosphate
  modified_base 9: mod_base = OTHER; note = 2'-fluorouridine-3'-phosphate
  modified_base 10: mod_base = OTHER; note = 2'-fluoroguanosine-3'-phosphate
  modified_base 11: mod_base = OTHER; note = 2'-fluoroguanosine-3'-phosphate
  modified_base 12: mod_base = OTHER; note = 2'-O-methyladenosine-3'-phosphate
  modified_base 13: mod_base = OTHER; note = 2'-O-methyluridine-3'-phosphate
  modified_base 14: mod_base = OTHER; note = 2'-O-methylguanosine-3'-phosphate
  modified_base 15: mod_base = OTHER; note = 2'-O-methyladenosine-3'-phosphate
  modified_base 16: mod_base = OTHER; note = 2'-O-methyluridine-3'-phosphate
  modified_base 17: mod_base = OTHER; note = 2'-O-methylguanosine-3'-phosphate
  modified_base 18: mod_base = OTHER; note = 2'-O-methyluridine-3'-phosphate
  modified_base 19: mod_base = OTHER; note = 2'-O-methylguanosine-3'-phosphate
  modified_base 20: mod_base = OTHER; note = 2'-O-methylcytidine-3'-phosphate
  modified_base 21: mod_base = OTHER; note 2'-O-methylguanosine-3'-phosphate-N-[tris(GalNAc-alkyl)-ami dodecanoyl)]-4-hydroxyprolinol (Hyp-(GalNAc-alkyl)3)
caaccgtctggatgatgtgcg

SEQ ID NO: 2733 - RNA, 23 nt, synthetic construct
  source 1..23: mol_type = other RNA
  modified_base 1: mod_base = OTHER; note = 2'-O-methylcytidine-3'- phosphorothioate
  modified_base 2: mod_base = OTHER; note = 2'-fluoroguanosine-3'-phosphorothioate
  modified_base 3: mod_base = OTHER; note = 2'-O-methylcytidine-3'-phosphate
  modified_base 4: mod_base = OTHER; note = 2'-O-methyladenosine-3'-phosphate
  modified_base 5: mod_base = OTHER; note = 2'-O-methylcytidine-3'-phosphate
  modified_base 6: mod_base = OTHER; note = 2'-fluoroadenosine-3'-phosphate
  modified_base 7: mod_base = OTHER; note = 2'-O-methyluridine-3'-phosphate
  modified_base 8: mod_base = OTHER; note = 2'-fluorocytidine-3'-phosphate
  modified_base 9: mod_base = OTHER; note = 2'-fluoroadenosine-3'-phosphate
  modified_base 10: mod_base = OTHER; note = 2'-O-methyluridine-3'-phosphate
  modified_base 11: mod_base = OTHER; note = 2'-O-methylcytidine-3'-phosphate
  modified_base 12: mod_base = OTHER; note = 2'-O-methylcytidine-3'-phosphate
  modified_base 13: mod_base = OTHER; note = 2'-O-methyladenosine-3'-phosphate
  modified_base 14: mod_base = OTHER; note = 2'-fluoroguanosine-3'-phosphate
  modified_base 15: mod_base = OTHER; note = 2'-O-methyladenosine-3'-phosphate
  modified_base 16: mod_base = OTHER; note = 2'-fluorocytidine-3'-phosphate
  modified_base 17: mod_base = OTHER; note = 2'-O-methylguanosine-3'-phosphate
  modified_base 18: mod_base = OTHER; note = 2'-O-methylguanosine-3'-phosphate
  modified_base 19: mod_base = OTHER; note = 2'-O-methyluridine-3'-phosphate
  modified_base 20: mod_base = OTHER; note = 2'-O-methyluridine-3'-phosphate
  modified_base 21: mod_base = OTHER; note = 2'-O-methylguanosine-3'- phosphorothioate
  modified_base 22: mod_base = OTHER; note = 2'-O-methylcytidine-3'- phosphorothioate
  modified_base 23: mod_base = OTHER; note = 2'-O-methylcytidine-3'-phosphate
cgcacatcatccagacggttgcc

SEQ ID NO: 2734 - RNA, 21 nt, synthetic construct
  source 1..21: mol_type = other RNA
  modified_base 1: mod_base = OTHER; note = 2'-O-methylcytidine-3'- phosphorothioate
  modified_base 2: mod_base = OTHER; note = 2'-O-methyluridine-3'-phosphorothioate
  modified_base 3: mod_base = OTHER; note = 2'-O-methylguanosine-3'-phosphate
  modified_base 4: mod_base = OTHER; note = 2'-O-methylguanosine-3'-phosphate
  modified_base 5: mod_base = OTHER; note = 2'-O-methylguanosine-3'-phosphate
  modified_base 6: mod_base = OTHER; note = 2'-O-methylcytidine-3'-phosphate
  modified_base 7: mod_base = OTHER; note = 2'-fluoroadenosine-3'-phosphate
  modified_base 8: mod_base = OTHER; note = 2'-O-methyladenosine-3'-phosphate
  modified_base 9: mod_base = OTHER; note = 2'-fluorocytidine-3'-phosphate
  modified_base 10: mod_base = OTHER; note = 2'-fluorocytidine-3'-phosphate
  modified_base 11: mod_base = OTHER; note = 2'-fluoroguanosine-3'-phosphate
  modified_base 12: mod_base = OTHER; note = 2'-O-methyluridine-3'-phosphate
  modified_base 13: mod_base = OTHER; note = 2'-O-methylcytidine-3'-phosphate
  modified_base 14: mod_base = OTHER; note = 2'-O-methyluridine-3'-phosphate
  modified_base 15: mod_base = OTHER; note = 2'-O-methylguanosine-3'-phosphate
  modified_base 16: mod_base = OTHER; note = 2'-O-methylguanosine-3'-phosphate
  modified_base 17: mod_base = OTHER; note = 2'-O-methyladenosine-3'-phosphate
  modified_base 18: mod_base = OTHER; note = 2'-O-methyluridine-3'-phosphate
  modified_base 19: mod_base = OTHER; note = 2'-O-methylguanosine-3'-phosphate
  modified_base 20: mod_base = OTHER; note = 2'-O-methyladenosine-3'-phosphate
  modified_base 21: mod_base = OTHER; note 2'-O-methyluridine-3'-phosphate-N-[tris(GalNAc-alkyl)-amido decanoyl)]-4-hydroxyprolinol (Hyp-(GalNAc-alkyl)3)
ctgggcaaccgtctggatgat

SEQ ID NO: 2735 - RNA, 23 nt, synthetic construct
  source 1..23: mol_type = other RNA
  modified_base 1: mod_base = OTHER; note = 2'-O-methyladenosine-3'- phosphorothioate
  modified_base 2: mod_base = OTHER; note = 2'-fluorouridine -3'-phosphorothioate
  modified_base 3: mod_base = OTHER; note = 2'-O-methylcytidine-3'-phosphate
  modified_base 4: mod_base = OTHER; note = 2'-O-methyladenosine-3'-phosphate
  modified_base 5: mod_base = OTHER; note = 2'-O-methyluridine-3'-phosphate
  modified_base 6: mod_base = OTHER; note = 2'-fluorocytidine-3'-phosphate
  modified_base 7: mod_base = OTHER; note = 2'-O-methylcytidine-3'-phosphate
  modified_base 8: mod_base = OTHER; note = 2'-fluoroadenosine-3'-phosphate
  modified_base 9: mod_base = OTHER; note = 2'-fluoroguanosine-3'-phosphate
  modified_base 10: mod_base = OTHER; note = 2'-O-methyladenosine-3'-phosphate
  modified_base 11: mod_base = OTHER; note = 2'-O-methylcytidine-3'-phosphate
  modified_base 12: mod_base = OTHER; note = 2'-O-methylguanosine-3'-phosphate
  modified_base 13: mod_base = OTHER; note = 2'-O-methylguanosine-3'-phosphate
  modified_base 14: mod_base = OTHER; note = 2'-fluorouridine-3'-phosphate
  modified_base 15: mod_base = OTHER; note = 2'-O-methyluridine-3'-phosphate
  modified_base 16: mod_base = OTHER; note = 2'-fluoroguanosine-3'-phosphate
  modified_base 17: mod_base = OTHER; note = 2'-O-methylcytidine-3'-phosphate
  modified_base 18: mod_base = OTHER; note = 2'-O-methylcytidine-3'-phosphate
  modified_base 19: mod_base = OTHER; note = 2'-O-methylcytidine-3'-phosphate
  modified_base 20: mod_base = OTHER; note = 2'-O-methyladenosine-3'-phosphate
  modified_base 21: mod_base = OTHER; note = 2'-O-methylguanosine-3'- phosphorothioate
  modified_base 22: mod_base = OTHER; note = 2'-O-methylguanosine-3'- phosphorothioate
  modified_base 23: mod_base = OTHER; note = 2'-O-methyluridine-3'-phosphate
atcatccagacggttgcccaggt

SEQ ID NO: 2736 - RNA, 21 nt, synthetic construct
  source 1..21: mol_type = other RNA
  modified_base 1: mod_base = OTHER; note = 2'-O-methylcytidine-3'- phosphorothioate
  modified_base 2: mod_base = OTHER; note = 2'-O-methylcytidine-3'- phosphorothioate
  modified_base 3: mod_base = OTHER; note = 2'-O-methyluridine-3'-phosphate
  modified_base 4: mod_base = OTHER; note = 2'-O-methylguanosine-3'-phosphate
  modified_base 5: mod_base = OTHER; note = 2'-O-methylguanosine-3'-phosphate
  modified_base 6: mod_base = OTHER; note = 2'-O-methylguanosine-3'-phosphate
  modified_base 7: mod_base = OTHER; note = 2'-fluorocytidine-3'-phosphate
  modified_base 8: mod_base = OTHER; note = 2'-O-methyladenosine-3'-phosphate
  modified_base 9: mod_base = OTHER; note = 2'-fluoroadenosine-3'-phosphate
  modified_base 10: mod_base = OTHER; note = 2'-fluorocytidine-3'-phosphate
  modified_base 11: mod_base = OTHER; note = 2'-fluorocytidine-3'-phosphate
  modified_base 12: mod_base = OTHER; note = 2'-O-methylguanosine-3'-phosphate
  modified_base 13: mod_base = OTHER; note = 2'-O-methyluridine-3'-phosphate
  modified_base 14: mod_base = OTHER; note = 2'-O-methylcytidine-3'-phosphate
  modified_base 15: mod_base = OTHER; note = 2'-O-methyluridine-3'-phosphate
  modified_base 16: mod_base = OTHER; note = 2'-O-methylguanosine-3'-phosphate
  modified_base 17: mod_base = OTHER; note = 2'-O-methylguanosine-3'-phosphate
  modified_base 18: mod_base = OTHER; note = 2'-O-methyladenosine-3'-phosphate
  modified_base 19: mod_base = OTHER; note = 2'-O-methyluridine-3'-phosphate
  modified_base 20: mod_base = OTHER; note = 2'-O-methylguanosine-3'-phosphate
  modified_base 21: mod_base = OTHER; note 2'-O-methyladenosine-3'-phosphate-N-[tris(GalNAc-alkyl)-ami dodecanoyl)]-4-hydroxyprolinol (Hyp-(GalNAc-alkyl)3)
cctgggcaaccgtctggatga

SEQ ID NO: 2737 - RNA, 23 nt, synthetic construct
  source 1..23: mol_type = other RNA
  modified_base 1: mod_base = OTHER; note = 2'-O-methyluridine-3'-phosphorothioate
  modified_base 2: mod_base = OTHER; note = 2'-fluorocytidine-3'-phosphorothioate
  modified_base 3: mod_base = OTHER; note = 2'-O-methyladenosine-3'-phosphate
  modified_base 4: mod_base = OTHER; note = 2'-O-methyluridine-3'-phosphate
  modified_base 5: mod_base = OTHER; note = 2'-O-methylcytidine-3'-phosphate
  modified_base 6: mod_base = OTHER; note = 2'-fluorocytidine-3'-phosphate
  modified_base 7: mod_base = OTHER; note = 2'-O-methyladenosine-3'-phosphate
  modified_base 8: mod_base = OTHER; note = 2'-fluoroguanosine-3'-phosphate
  modified_base 9: mod_base = OTHER; note = 2'-fluoroadenosine-3'-phosphate
  modified_base 10: mod_base = OTHER; note = 2'-O-methylcytidine-3'-phosphate
  modified_base 11: mod_base = OTHER; note = 2'-O-methylguanosine-3'-phosphate
  modified_base 12: mod_base = OTHER; note = 2'-O-methylguanosine-3'-phosphate
  modified_base 13: mod_base = OTHER; note = 2'-O-methyluridine-3'-phosphate
  modified_base 14: mod_base = OTHER; note = 2'-fluorouridine-3'-phosphate
  modified_base 15: mod_base = OTHER; note = 2'-O-methylguanosine-3'-phosphate
  modified_base 16: mod_base = OTHER; note = 2'-fluorocytidine-3'-phosphate
  modified_base 17: mod_base = OTHER; note = 2'-O-methylcytidine-3'-phosphate
  modified_base 18: mod_base = OTHER; note = 2'-O-methylcytidine-3'-phosphate
  modified_base 19: mod_base = OTHER; note = 2'-O-methyladenosine-3'-phosphate
  modified_base 20: mod_base = OTHER; note = 2'-O-methylguanosine-3'-phosphate
  modified_base 21: mod_base = OTHER; note = 2'-O-methylguanosine-3'- phosphorothioate
  modified_base 22: mod_base = OTHER; note = 2'-O-methyluridine-3'-phosphorothioate
  modified_base 23: mod_base = OTHER; note = 2'-O-methyladenosine-3'-phosphate
tcatccagacggttgcccaggta

SEQ ID NO: 2738 - RNA, 21 nt, synthetic construct
  source 1..21: mol_type = other RNA
  modified_base 1: mod_base = OTHER; note = 2'-O-methylguanosine-3'- phosphorothioate
  modified_base 2: mod_base = OTHER; note = 2'-O-methylcytidine-3'- phosphorothioate
  modified_base 3: mod_base = OTHER; note = 2'-O-methyladenosine-3'-phosphate
  modified_base 4: mod_base = OTHER; note = 2'-O-methyladenosine-3'-phosphate
  modified_base 5: mod_base = OTHER; note = 2'-O-methyladenosine-3'-phosphate
  modified_base 6: mod_base = OTHER; note = 2'-O-methyluridine-3'-phosphate
  modified_base 7: mod_base = OTHER; note = 2'-fluoroguanosine-3'-phosphate
  modified_base 8: mod_base = OTHER; note = 2'-O-methyladenosine-3'-phosphate
  modified_base 9: mod_base = OTHER; note = 2'-fluorouridine-3'-phosphate
  modified_base 10: mod_base = OTHER; note = 2'-fluoroguanosine-3'-phosphate
  modified_base 11: mod_base = OTHER; note = 2'-fluoroadenosine-3'-phosphate
  modified_base 12: mod_base = OTHER; note = 2'-O-methyladenosine-3'-phosphate
  modified_base 13: mod_base = OTHER; note = 2'-O-methylguanosine-3'-phosphate
  modified_base 14: mod_base = OTHER; note = 2'-O-methyladenosine-3'-phosphate
  modified_base 15: mod_base = OTHER; note = 2'-O-methyladenosine-3'-phosphate
  modified_base 16: mod_base = OTHER; note = 2'-O-methyladenosine-3'-phosphate
  modified_base 17: mod_base = OTHER; note = 2'-O-methylcytidine-3'-phosphate
  modified_base 18: mod_base = OTHER; note = 2'-O-methyluridine-3'-phosphate
  modified_base 19: mod_base = OTHER; note = 2'-O-methyluridine-3'-phosphate
  modified_base 20: mod_base = OTHER; note = 2'-O-methyluridine-3'-phosphate
  modified_base 21: mod_base = OTHER; note 2'-O-methylguanosine-3'-phosphate-N-[tris(GalNAc-alkyl)-ami dodecanoyl)]-4-hydroxyprolinol (Hyp-(GalNAc-alkyl)3)
gcaaatgatgaagaaactttg

SEQ ID NO: 2739 - RNA, 23 nt, synthetic construct
  source 1..23: mol_type = other RNA
  modified_base 1: mod_base = OTHER; note = 2'-O-methylcytidine-3'- phosphorothioate
  modified_base 2: mod_base = OTHER; note = 2'-fluoroadenosine-3'-phosphorothioate
  modified_base 3: mod_base = OTHER; note = 2'-O-methyladenosine-3'-phosphate
  modified_base 4: mod_base = OTHER; note = 2'-O-methyladenosine-3'-phosphate
  modified_base 5: mod_base = OTHER; note = 2'-O-methylguanosine-3'-phosphate
  modified_base 6: mod_base = OTHER; note = 2'-fluorouridine-3'-phosphate
  modified_base 7: mod_base = OTHER; note = 2'-O-methyluridine-3'-phosphate
  modified_base 8: mod_base = OTHER; note = 2'-fluorouridine-3'-phosphate
  modified_base 9: mod_base = OTHER; note = 2'-fluorocytidine-3'-phosphate
  modified_base 10: mod_base = OTHER; note = 2'-O-methyluridine-3'-phosphate
  modified_base 11: mod_base = OTHER; note = 2'-O-methyluridine-3'-phosphate
  modified_base 12: mod_base = OTHER; note = 2'-O-methylcytidine-3'-phosphate
  modified_base 13: mod_base = OTHER; note = 2'-O-methyladenosine-3'-phosphate
  modified_base 14: mod_base = OTHER; note = 2'-fluorouridine-3'-phosphate
  modified_base 15: mod_base = OTHER; note = 2'-O-methylcytidine-3'-phosphate
  modified_base 16: mod_base = OTHER; note = 2'-fluoroadenosine-3'-phosphate
  modified_base 17: mod_base = OTHER; note = 2'-O-methyluridine-3'-phosphate
  modified_base 18: mod_base = OTHER; note = 2'-O-methyluridine-3'-phosphate
  modified_base 19: mod_base = OTHER; note = 2'-O-methyluridine-3'-phosphate
  modified_base 20: mod_base = OTHER; note = 2'-O-methylguanosine-3'-phosphate
  modified_base 21: mod_base = OTHER; note = 2'-O-methylcytidine-3'- phosphorothioate
  modified_base 22: mod_base = OTHER; note = 2'-O-methylcytidine-3'- phosphorothioate
  modified_base 23: mod_base = OTHER; note = 2'-O-methylcytidine-3'-phosphate
caaagtttcttcatcatttgccc

SEQ ID NO: 2740 - RNA, 21 nt, synthetic construct
  source 1..21: mol_type = other RNA
  modified_base 1: mod_base = OTHER; note = 2'-O-methylcytidine-3'- phosphorothioate
  modified_base 2: mod_base = OTHER; note = 2'-O-methyladenosine-3'- phosphorothioate
  modified_base 3: mod_base = OTHER; note = 2'-O-methyladenosine-3'-phosphate
  modified_base 4: mod_base = OTHER; note = 2'-O-methyladenosine-3'-phosphate
  modified_base 5: mod_base = OTHER; note = 2'-O-methyluridine-3'-phosphate
  modified_base 6: mod_base = OTHER; note = 2'-O-methylguanosine-3'-phosphate
  modified_base 7: mod_base = OTHER; note = 2'-fluoroadenosine-3'-phosphate
  modified_base 8: mod_base = OTHER; note = 2'-O-methyluridine-3'-phosphate
  modified_base 9: mod_base = OTHER; note = 2'-fluoroguanosine-3'-phosphate
  modified_base 10: mod_base = OTHER; note = 2'-fluoroadenosine-3'-phosphate
  modified_base 11: mod_base = OTHER; note = 2'-fluoroadenosine-3'-phosphate
  modified_base 12: mod_base = OTHER; note = 2'-O-methylguanosine-3'-phosphate
  modified_base 13: mod_base = OTHER; note = 2'-O-methyladenosine-3'-phosphate
  modified_base 14: mod_base = OTHER; note = 2'-O-methyladenosine-3'-phosphate
  modified_base 15: mod_base = OTHER; note = 2'-O-methyladenosine-3'-phosphate
  modified_base 16: mod_base = OTHER; note = 2'-O-methylcytidine-3'-phosphate
  modified_base 17: mod_base = OTHER; note = 2'-O-methyluridine-3'-phosphate
  modified_base 18: mod_base = OTHER; note = 2'-O-methyluridine-3'-phosphate
  modified_base 19: mod_base = OTHER; note = 2'-O-methyluridine-3'-phosphate
  modified_base 20: mod_base = OTHER; note = 2'-O-methylguanosine-3'-phosphate
  modified_base 21: mod_base = OTHER; note 2'-O-methylguanosine-3'-phosphate-N-[tris(GalNAc-alkyl)-ami dodecanoyl)]-4-hydroxyprolinol (Hyp-(GalNAc-alkyl)3)
caaatgatgaagaaactttgg

SEQ ID NO: 2741 - RNA, 23 nt, synthetic construct
  source 1..23: mol_type = other RNA
  modified_base 1: mod_base = OTHER; note = 2'-O-methylcytidine-3'- phosphorothioate
  modified_base 2: mod_base = OTHER; note = 2'-fluorocytidine-3'-phosphorothioate
  modified_base 3: mod_base = OTHER; note = 2'-O-methyladenosine-3'-phosphate
  modified_base 4: mod_base = OTHER; note = 2'-O-methyladenosine-3'-phosphate
  modified_base 5: mod_base = OTHER; note = 2'-O-methyladenosine-3'-phosphate
  modified_base 6: mod_base = OTHER; note = 2'-fluoroguanosine-3'-phosphate
  modified_base 7: mod_base = OTHER; note = 2'-O-methyluridine-3'-phosphate
  modified_base 8: mod_base = OTHER; note = 2'-fluorouridine-3'-phosphate
  modified_base 9: mod_base = OTHER; note = 2'-fluorouridine-3'-phosphate
  modified_base 10: mod_base = OTHER; note = 2'-O-methylcytidine-3'-phosphate
  modified_base 11: mod_base = OTHER; note = 2'-O-methyluridine-3'-phosphate
  modified_base 12: mod_base = OTHER; note = 2'-O-methyluridine-3'-phosphate
  modified_base 13: mod_base = OTHER; note = 2'-O-methylcytidine-3'-phosphate
  modified_base 14: mod_base = OTHER; note = 2'-fluoroadenosine-3'-phosphate
  modified_base 15: mod_base = OTHER; note = 2'-O-methyluridine-3'-phosphate
  modified_base 16: mod_base = OTHER; note = 2'-fluorocytidine-3'-phosphate
  modified_base 17: mod_base = OTHER; note = 2'-O-methyladenosine-3'-phosphate
  modified_base 18: mod_base = OTHER; note = 2'-O-methyluridine-3'-phosphate
  modified_base 19: mod_base = OTHER; note = 2'-O-methyluridine-3'-phosphate
  modified_base 20: mod_base = OTHER; note = 2'-O-methyluridine-3'-phosphate
  modified_base 21: mod_base = OTHER; note = 2'-O-methylguanosine-3'- phosphorothioate
  modified_base 22: mod_base = OTHER; note = 2'-O-methylcytidine-3'- phosphorothioate
  modified_base 23: mod_base = OTHER; note = 2'-O-methylcytidine-3'-phosphate
ccaaagtttcttcatcatttgcc

SEQ ID NO: 2742 - RNA, 21 nt, synthetic construct
  source 1..21: mol_type = other RNA
  modified_base 1: mod_base = OTHER; note = 2'-O-methyluridine-3'-phosphorothioate
  modified_base 2: mod_base = OTHER; note = 2'-O-methylguanosine-3'- phosphorothioate
  modified_base 3: mod_base = OTHER; note = 2'-O-methylguanosine-3'-phosphate
  modified_base 4: mod_base = OTHER; note = 2'-O-methylguanosine-3'-phosphate
  modified_base 5: mod_base = OTHER; note = 2'-O-methylguanosine-3'-phosphate
  modified_base 6: mod_base = OTHER; note = 2'-O-methylcytidine-3'-phosphate
  modified_base 7: mod_base = OTHER; note = 2'-fluoroadenosine-3'-phosphate
  modified_base 8: mod_base = OTHER; note = 2'-O-methyladenosine-3'-phosphate
  modified_base 9: mod_base = OTHER; note = 2'-fluoroadenosine-3'-phosphate
  modified_base 10: mod_base = OTHER; note = 2'-fluorouridine-3'-phosphate
  modified_base 11: mod_base = OTHER; note = 2'-fluoroguanosine-3'-phosphate
  modified_base 12: mod_base = OTHER; note = 2'-O-methyladenosine-3'-phosphate
  modified_base 13: mod_base = OTHER; note = 2'-O-methyluridine-3'-phosphate
  modified_base 14: mod_base = OTHER; note = 2'-O-methylguanosine-3'-phosphate
  modified_base 15: mod_base = OTHER; note = 2'-O-methyladenosine-3'-phosphate
  modified_base 16: mod_base = OTHER; note = 2'-O-methyladenosine-3'-phosphate
  modified_base 17: mod_base = OTHER; note = 2'-O-methylguanosine-3'-phosphate
  modified_base 18: mod_base = OTHER; note = 2'-O-methyladenosine-3'-phosphate
  modified_base 19: mod_base = OTHER; note = 2'-O-methyladenosine-3'-phosphate
  modified_base 20: mod_base = OTHER; note = 2'-O-methyladenosine-3'-phosphate
  modified_base 21: mod_base = OTHER; note 2'-O-methylcytidine-3'-phosphate-N-[tris(GalNAc-alkyl)-amid odecanoyl)]-4-hydroxyprolinol (Hyp-(GalNAc-alkyl)3)
tggggcaaatgatgaagaaac

SEQ ID NO: 2743 - RNA, 23 nt, synthetic construct
  source 1..23: mol_type = other RNA
  modified_base 1: mod_base = OTHER; note = 2'-O-methylguanosine-3'- phosphorothioate
  modified_base 2: mod_base = OTHER; note = 2'-fluorouridine -3'-phosphorothioate
  modified_base 3: mod_base = OTHER; note = 2'-O-methyluridine-3'-phosphate
  modified_base 4: mod_base = OTHER; note = 2'-O-methyluridine-3'-phosphate
  modified_base 5: mod_base = OTHER; note = 2'-O-methylcytidine-3'-phosphate
  modified_base 6: mod_base = OTHER; note = 2'-fluorouridine-3'-phosphate
  modified_base 7: mod_base = OTHER; note = 2'-O-methyluridine-3'-phosphate
  modified_base 8: mod_base = OTHER; note = 2'-fluorocytidine-3'-phosphate
  modified_base 9: mod_base = OTHER; note = 2'-fluoroadenosine-3'-phosphate
  modified_base 10: mod_base = OTHER; note = 2'-O-methyluridine-3'-phosphate
  modified_base 11: mod_base = OTHER; note = 2'-O-methylcytidine-3'-phosphate
  modified_base 12: mod_base = OTHER; note = 2'-O-methyladenosine-3'-phosphate
  modified_base 13: mod_base = OTHER; note = 2'-O-methyluridine-3'-phosphate
  modified_base 14: mod_base = OTHER; note = 2'-fluorouridine-3'-phosphate
  modified_base 15: mod_base = OTHER; note = 2'-O-methyluridine-3'-phosphate
  modified_base 16: mod_base = OTHER; note = 2'-fluoroguanosine-3'-phosphate
  modified_base 17: mod_base = OTHER; note = 2'-O-methylcytidine-3'-phosphate
  modified_base 18: mod_base = OTHER; note = 2'-O-methylcytidine-3'-phosphate
  modified_base 19: mod_base = OTHER; note = 2'-O-methylcytidine-3'-phosphate
  modified_base 20: mod_base = OTHER; note = 2'-O-methylcytidine-3'-phosphate
  modified_base 21: mod_base = OTHER; note = 2'-O-methyladenosine-3'- phosphorothioate
  modified_base 22: mod_base = OTHER; note = 2'-O-methylguanosine-3'- phosphorothioate
  modified_base 23: mod_base = OTHER; note = 2'-O-methyladenosine-3'-phosphate
gtttcttcatcatttgccccaga

SEQ ID NO: 2744 - RNA, 21 nt, synthetic construct
  source 1..21: mol_type = other RNA
  modified_base 1: mod_base = OTHER; note = 2'-O-methylcytidine-3'- phosphorothioate
  modified_base 2: mod_base = OTHER; note = 2'-O-methyluridine-3'-phosphorothioate
  modified_base 3: mod_base = OTHER; note = 2'-O-methylguanosine-3'-phosphate
  modified_base 4: mod_base = OTHER; note = 2'-O-methylguanosine-3'-phosphate
  modified_base 5: mod_base = OTHER; note = 2'-O-methylguanosine-3'-phosphate
  modified_base 6: mod_base = OTHER; note = 2'-O-methylguanosine-3'-phosphate
  modified_base 7: mod_base = OTHER; note = 2'-fluorocytidine-3'-phosphate
  modified_base 8: mod_base = OTHER; note = 2'-O-methyladenosine-3'-phosphate
  modified_base 9: mod_base = OTHER; note = 2'-fluoroadenosine-3'-phosphate
  modified_base 10: mod_base = OTHER; note = 2'-fluoroadenosine-3'-phosphate
  modified_base 11: mod_base = OTHER; note = 2'-fluorouridine-3'-phosphate
  modified_base 12: mod_base = OTHER; note = 2'-O-methylguanosine-3'-phosphate
  modified_base 13: mod_base = OTHER; note = 2'-O-methyladenosine-3'-phosphate
  modified_base 14: mod_base = OTHER; note = 2'-O-methyluridine-3'-phosphate
  modified_base 15: mod_base = OTHER; note = 2'-O-methylguanosine-3'-phosphate
  modified_base 16: mod_base = OTHER; note = 2'-O-methyladenosine-3'-phosphate
  modified_base 17: mod_base = OTHER; note = 2'-O-methyladenosine-3'-phosphate
  modified_base 18: mod_base = OTHER; note = 2'-O-methylguanosine-3'-phosphate
  modified_base 19: mod_base = OTHER; note = 2'-O-methyladenosine-3'-phosphate
  modified_base 20: mod_base = OTHER; note = 2'-O-methyladenosine-3'-phosphate
  modified_base 21: mod_base = OTHER; note 2'-O-methyladenosine-3'-phosphate-N-[tris(GalNAc-alkyl)-ami dodecanoyl)]-4-hydroxyprolinol (Hyp-(GalNAc-alkyl)3)
ctggggcaaatgatgaagaaa

SEQ ID NO: 2745 - RNA, 23 nt, synthetic construct
  source 1..23: mol_type = other RNA
  modified_base 1: mod_base = OTHER; note = 2'-O-methyluridine-3'-phosphorothioate
  modified_base 2: mod_base = OTHER; note = 2'-fluorouridine -3'-phosphorothioate
  modified_base 3: mod_base = OTHER; note = 2'-O-methyluridine-3'-phosphate
  modified_base 4: mod_base = OTHER; note = 2'-O-methylcytidine-3'-phosphate
  modified_base 5: mod_base = OTHER; note = 2'-O-methyluridine-3'-phosphate
  modified_base 6: mod_base = OTHER; note = 2'-fluorouridine-3'-phosphate
  modified_base 7: mod_base = OTHER; note = 2'-O-methylcytidine-3'-phosphate
  modified_base 8: mod_base = OTHER; note = 2'-fluoroadenosine-3'-phosphate
  modified_base 9: mod_base = OTHER; note = 2'-fluorouridine-3'-phosphate
  modified_base 10: mod_base = OTHER; note = 2'-O-methylcytidine-3'-phosphate
  modified_base 11: mod_base = OTHER; note = 2'-O-methyladenosine-3'-phosphate
  modified_base 12: mod_base = OTHER; note = 2'-O-methyluridine-3'-phosphate
  modified_base 13: mod_base = OTHER; note = 2'-O-methyluridine-3'-phosphate
  modified_base 14: mod_base = OTHER; note = 2'-fluorouridine-3'-phosphate
  modified_base 15: mod_base = OTHER; note = 2'-O-methylguanosine-3'-phosphate
  modified_base 16: mod_base = OTHER; note = 2'-fluorocytidine-3'-phosphate
  modified_base 17: mod_base = OTHER; note = 2'-O-methylcytidine-3'-phosphate
  modified_base 18: mod_base = OTHER; note = 2'-O-methylcytidine-3'-phosphate
  modified_base 19: mod_base = OTHER; note = 2'-O-methylcytidine-3'-phosphate
  modified_base 20: mod_base = OTHER; note = 2'-O-methyladenosine-3'-phosphate
  modified_base 21: mod_base = OTHER; note = 2'-O-methylguanosine-3'- phosphorothioate
  modified_base 22: mod_base = OTHER; note = 2'-O-methyladenosine-3'- phosphorothioate
  modified_base 23: mod_base = OTHER; note = 2'-O-methylcytidine-3'-phosphate
tttcttcatcatttgccccagac

SEQ ID NO: 2746 - RNA, 21 nt, synthetic construct
  source 1..21: mol_type = other RNA
  modified_base 1: mod_base = OTHER; note = 2'-O-methylcytidine-3'- phosphorothioate
  modified_base 2: mod_base = OTHER; note = 2'-O-methylcytidine-3'- phosphorothioate
  modified_base 3: mod_base = OTHER; note = 2'-O-methyladenosine-3'-phosphate
  modified_base 4: mod_base = OTHER; note = 2'-O-methyladenosine-3'-phosphate
  modified_base 5: mod_base = OTHER; note = 2'-O-methylguanosine-3'-phosphate
  modified_base 6: mod_base = OTHER; note = 2'-O-methylguanosine-3'-phosphate
  modified_base 7: mod_base = OTHER; note = 2'-fluorocytidine-3'-phosphate
  modified_base 8: mod_base = OTHER; note = 2'-O-methyluridine-3'-phosphate
  modified_base 9: mod_base = OTHER; note = 2'-fluoroguanosine-3'-phosphate
  modified_base 10: mod_base = OTHER; note = 2'-fluorouridine-3'-phosphate
  modified_base 11: mod_base = OTHER; note = 2'-fluoroguanosine-3'-phosphate
  modified_base 12: mod_base = OTHER; note = 2'-O-methyluridine-3'-phosphate
  modified_base 13: mod_base = OTHER; note = 2'-O-methyluridine-3'-phosphate
  modified_base 14: mod_base = OTHER; note = 2'-O-methyluridine-3'-phosphate
  modified_base 15: mod_base = OTHER; note = 2'-O-methylguanosine-3'-phosphate
  modified_base 16: mod_base = OTHER; note = 2'-O-methyluridine-3'-phosphate
  modified_base 17: mod_base = OTHER; note = 2'-O-methylguanosine-3'-phosphate
  modified_base 18: mod_base = OTHER; note = 2'-O-methylguanosine-3'-phosphate
  modified_base 19: mod_base = OTHER; note = 2'-O-methylguanosine-3'-phosphate
  modified_base 20: mod_base = OTHER; note = 2'-O-methylguanosine-3'-phosphate
  modified_base 21: mod_base = OTHER; note 2'-O-methyladenosine-3'-phosphate-N-[tris(GalNAc-alkyl)-ami dodecanoyl)]-4-hydroxyprolinol (Hyp-(GalNAc-alkyl)3)
ccaaggctgtgtttgtgggga

SEQ ID NO: 2747 - RNA, 23 nt, synthetic construct
  source 1..23: mol_type = other RNA
  modified_base 1: mod_base = OTHER; note = 2'-O-methyluridine-3'-phosphorothioate
  modified_base 2: mod_base = OTHER; note = 2'-fluorocytidine-3'-phosphorothioate
  modified_base 3: mod_base = OTHER; note = 2'-O-methylcytidine-3'-phosphate
  modified_base 4: mod_base = OTHER; note = 2'-O-methylcytidine-3'-phosphate
  modified_base 5: mod_base = OTHER; note = 2'-O-methylcytidine-3'-phosphate
  modified_base 6: mod_base = OTHER; note = 2'-fluoroadenosine-3'-phosphate
  modified_base 7: mod_base = OTHER; note = 2'-O-methylcytidine-3'-phosphate
  modified_base 8: mod_base = OTHER; note = 2'-fluoroadenosine-3'-phosphate
  modified_base 9: mod_base = OTHER; note = 2'-fluoroadenosine-3'-phosphate
  modified_base 10: mod_base = OTHER; note = 2'-O-methyladenosine-3'-phosphate
  modified_base 11: mod_base = OTHER; note = 2'-O-methylcytidine-3'-phosphate
  modified_base 12: mod_base = OTHER; note = 2'-O-methyladenosine-3'-phosphate
  modified_base 13: mod_base = OTHER; note = 2'-O-methylcytidine-3'-phosphate
  modified_base 14: mod_base = OTHER; note = 2'-fluoroadenosine-3'-phosphate
  modified_base 15: mod_base = OTHER; note = 2'-O-methylguanosine-3'-phosphate
  modified_base 16: mod_base = OTHER; note = 2'-fluorocytidine-3'-phosphate
  modified_base 17: mod_base = OTHER; note = 2'-O-methylcytidine-3'-phosphate
  modified_base 18: mod_base = OTHER; note = 2'-O-methyluridine-3'-phosphate
  modified_base 19: mod_base = OTHER; note = 2'-O-methyluridine-3'-phosphate
  modified_base 20: mod_base = OTHER; note = 2'-O-methylguanosine-3'-phosphate
  modified_base 21: mod_base = OTHER; note = 2'-O-methylguanosine-3'- phosphorothioate
  modified_base 22: mod_base = OTHER; note = 2'-O-methylcytidine-3'- phosphorothioate
  modified_base 23: mod_base = OTHER; note = 2'-O-methylguanosine-3'-phosphate
tccccacaaacacagccttggcg

SEQ ID NO: 2748 - RNA, 21 nt, synthetic construct
  source 1..21: mol_type = other RNA
  modified_base 1: mod_base = OTHER; note = 2'-O-methylcytidine-3'- phosphorothioate
  modified_base 2: mod_base = OTHER; note = 2'-O-methyladenosine-3'- phosphorothioate
  modified_base 3: mod_base = OTHER; note = 2'-O-methyladenosine-3'-phosphate
  modified_base 4: mod_base = OTHER; note = 2'-O-methylguanosine-3'-phosphate
  modified_base 5: mod_base = OTHER; note = 2'-O-methylguanosine-3'-phosphate
  modified_base 6: mod_base = OTHER; note = 2'-O-methylcytidine-3'-phosphate
  modified_base 7: mod_base = OTHER; note = 2'-fluorouridine-3'-phosphate
  modified_base 8: mod_base = OTHER; note = 2'-O-methylguanosine-3'-phosphate
  modified_base 9: mod_base = OTHER; note = 2'-fluorouridine-3'-phosphate
  modified_base 10: mod_base = OTHER; note = 2'-fluoroguanosine-3'-phosphate
  modified_base 11: mod_base = OTHER; note = 2'-fluorouridine-3'-phosphate
  modified_base 12: mod_base = OTHER; note = 2'-O-methyluridine-3'-phosphate
  modified_base 13: mod_base = OTHER; note = 2'-O-methyluridine-3'-phosphate
  modified_base 14: mod_base = OTHER; note = 2'-O-methylguanosine-3'-phosphate
  modified_base 15: mod_base = OTHER; note = 2'-O-methyluridine-3'-phosphate
  modified_base 16: mod_base = OTHER; note = 2'-O-methylguanosine-3'-phosphate
  modified_base 17: mod_base = OTHER; note = 2'-O-methylguanosine-3'-phosphate
  modified_base 18: mod_base = OTHER; note = 2'-O-methylguanosine-3'-phosphate
  modified_base 19: mod_base = OTHER; note = 2'-O-methylguanosine-3'-phosphate
  modified_base 20: mod_base = OTHER; note = 2'-O-methyladenosine-3'-phosphate
  modified_base 21: mod_base = OTHER; note 2'-O-methylguanosine-3'-phosphate-N-[tris(GalNAc-alkyl)-ami dodecanoyl)]-4-hydroxyprolinol (Hyp-(GalNAc-alkyl)3)
caaggctgtgtttgtggggag

SEQ ID NO: 2749 - RNA, 23 nt, synthetic construct
  source 1..23: mol_type = other RNA
  modified_base 1: mod_base = OTHER; note = 2'-O-methylcytidine-3'- phosphorothioate
  modified_base 2: mod_base = OTHER; note = 2'-fluorouridine -3'-phosphorothioate
  modified_base 3: mod_base = OTHER; note = 2'-O-methylcytidine-3'-phosphate
  modified_base 4: mod_base = OTHER; note = 2'-O-methylcytidine-3'-phosphate
  modified_base 5: mod_base = OTHER; note = 2'-O-methylcytidine-3'-phosphate
  modified_base 6: mod_base = OTHER; note = 2'-fluorocytidine-3'-phosphate
  modified_base 7: mod_base = OTHER; note = 2'-O-methyladenosine-3'-phosphate
  modified_base 8: mod_base = OTHER; note = 2'-fluorocytidine-3'-phosphate
  modified_base 9: mod_base = OTHER; note = 2'-fluoroadenosine-3'-phosphate
  modified_base 10: mod_base = OTHER; note = 2'-O-methyladenosine-3'-phosphate
  modified_base 11: mod_base = OTHER; note = 2'-O-methyladenosine-3'-phosphate
  modified_base 12: mod_base = OTHER; note = 2'-O-methylcytidine-3'-phosphate
  modified_base 13: mod_base = OTHER; note = 2'-O-methyladenosine-3'-phosphate
  modified_base 14: mod_base = OTHER; note = 2'-fluorocytidine-3'-phosphate
  modified_base 15: mod_base = OTHER; note = 2'-O-methyladenosine-3'-phosphate
  modified_base 16: mod_base = OTHER; note = 2'-fluoroguanosine-3'-phosphate
  modified_base 17: mod_base = OTHER; note = 2'-O-methylcytidine-3'-phosphate
  modified_base 18: mod_base = OTHER; note = 2'-O-methylcytidine-3'-phosphate
  modified_base 19: mod_base = OTHER; note = 2'-O-methyluridine-3'-phosphate
  modified_base 20: mod_base = OTHER; note = 2'-O-methyluridine-3'-phosphate
  modified_base 21: mod_base = OTHER; note = 2'-O-methylguanosine-3'- phosphorothioate
  modified_base 22: mod_base = OTHER; note = 2'-O-methylguanosine-3'- phosphorothioate
  modified_base 23: mod_base = OTHER; note = 2'-O-methylcytidine-3'-phosphate
ctccccacaaacacagccttggc

SEQ ID NO: 2750 - RNA, 21 nt, synthetic construct
  source 1..21: mol_type = other RNA
  modified_base 1: mod_base = OTHER; note = 2'-O-methylguanosine-3'- phosphorothioate
  modified_base 2: mod_base = OTHER; note = 2'-O-methylguanosine-3'- phosphorothioate
  modified_base 3: mod_base = OTHER; note = 2'-O-methylcytidine-3'-phosphate
  modified_base 4: mod_base = OTHER; note = 2'-O-methylguanosine-3'-phosphate
  modified_base 5: mod_base = OTHER; note = 2'-O-methylcytidine-3'-phosphate
  modified_base 6: mod_base = OTHER; note = 2'-O-methylcytidine-3'-phosphate
  modified_base 7: mod_base = OTHER; note = 2'-fluoroadenosine-3'-phosphate
  modified_base 8: mod_base = OTHER; note = 2'-O-methyladenosine-3'-phosphate
  modified_base 9: mod_base = OTHER; note = 2'-fluoroguanosine-3'-phosphate
  modified_base 10: mod_base = OTHER; note = 2'-fluoroguanosine-3'-phosphate
  modified_base 11: mod_base = OTHER; note = 2'-fluorocytidine-3'-phosphate
  modified_base 12: mod_base = OTHER; note = 2'-O-methyluridine-3'-phosphate
  modified_base 13: mod_base = OTHER; note = 2'-O-methylguanosine-3'-phosphate
  modified_base 14: mod_base = OTHER; note = 2'-O-methyluridine-3'-phosphate
  modified_base 15: mod_base = OTHER; note = 2'-O-methylguanosine-3'-phosphate
  modified_base 16: mod_base = OTHER; note = 2'-O-methyluridine-3'-phosphate
  modified_base 17: mod_base = OTHER; note = 2'-O-methyluridine-3'-phosphate
  modified_base 18: mod_base = OTHER; note = 2'-O-methyluridine-3'-phosphate
  modified_base 19: mod_base = OTHER; note = 2'-O-methylguanosine-3'-phosphate
  modified_base 20: mod_base = OTHER; note = 2'-O-methyluridine-3'-phosphate
  modified_base 21: mod_base = OTHER; note 2'-O-methylguanosine-3'-phosphate-N-[tris(GalNAc-alkyl)-ami dodecanoyl)]-4-hydroxyprolinol (Hyp-(GalNAc-alkyl)3)
ggcgccaaggctgtgtttgtg

SEQ ID NO: 2751 - RNA, 23 nt, synthetic construct
  source 1..23: mol_type = other RNA
  modified_base 1: mod_base = OTHER; note = 2'-O-methylcytidine-3'- phosphorothioate
  modified_base 2: mod_base = OTHER; note = 2'-fluoroadenosine-3'-phosphorothioate
  modified_base 3: mod_base = OTHER; note = 2'-O-methylcytidine-3'-phosphate
  modified_base 4: mod_base = OTHER; note = 2'-O-methyladenosine-3'-phosphate
  modified_base 5: mod_base = OTHER; note = 2'-O-methyladenosine-3'-phosphate
  modified_base 6: mod_base = OTHER; note = 2'-fluoroadenosine-3'-phosphate
  modified_base 7: mod_base = OTHER; note = 2'-O-methylcytidine-3'-phosphate
  modified_base 8: mod_base = OTHER; note = 2'-fluoroadenosine-3'-phosphate
  modified_base 9: mod_base = OTHER; note = 2'-fluorocytidine-3'-phosphate
  modified_base 10: mod_base = OTHER; note = 2'-O-methyladenosine-3'-phosphate
  modified_base 11: mod_base = OTHER; note = 2'-O-methylguanosine-3'-phosphate
  modified_base 12: mod_base = OTHER; note = 2'-O-methylcytidine-3'-phosphate
  modified_base 13: mod_base = OTHER; note = 2'-O-methylcytidine-3'-phosphate
  modified_base 14: mod_base = OTHER; note = 2'-fluorouridine-3'-phosphate
  modified_base 15: mod_base = OTHER; note = 2'-O-methyluridine-3'-phosphate
  modified_base 16: mod_base = OTHER; note = 2'-fluoroguanosine-3'-phosphate
  modified_base 17: mod_base = OTHER; note = 2'-O-methylguanosine-3'-phosphate
  modified_base 18: mod_base = OTHER; note = 2'-O-methylcytidine-3'-phosphate
  modified_base 19: mod_base = OTHER; note = 2'-O-methylguanosine-3'-phosphate
  modified_base 20: mod_base = OTHER; note = 2'-O-methylcytidine-3'-phosphate
  modified_base 21: mod_base = OTHER; note = 2'-O-methylcytidine-3'- phosphorothioate
  modified_base 22: mod_base = OTHER; note = 2'-O-methyladenosine-3'- phosphorothioate
  modified_base 23: mod_base = OTHER; note = 2'-O-methyladenosine-3'-phosphate
cacaaacacagccttggcgccaa

SEQ ID NO: 2752 - RNA, 21 nt, synthetic construct
  source 1..21: mol_type = other RNA
  modified_base 1: mod_base = OTHER; note = 2'-O-methyluridine-3'-phosphorothioate
  modified_base 2: mod_base = OTHER; note = 2'-O-methylguanosine-3'- phosphorothioate
  modified_base 3: mod_base = OTHER; note = 2'-O-methylguanosine-3'-phosphate
  modified_base 4: mod_base = OTHER; note = 2'-O-methylcytidine-3'-phosphate
  modified_base 5: mod_base = OTHER; note = 2'-O-methylguanosine-3'-phosphate
  modified_base 6: mod_base = OTHER; note = 2'-O-methylcytidine-3'-phosphate
  modified_base 7: mod_base = OTHER; note = 2'-fluorocytidine-3'-phosphate
  modified_base 8: mod_base = OTHER; note = 2'-O-methyladenosine-3'-phosphate
  modified_base 9: mod_base = OTHER; note = 2'-fluoroadenosine-3'-phosphate
  modified_base 10: mod_base = OTHER; note = 2'-fluoroguanosine-3'-phosphate
  modified_base 11: mod_base = OTHER; note = 2'-fluoroguanosine-3'-phosphate
  modified_base 12: mod_base = OTHER; note = 2'-O-methylcytidine-3'-phosphate
  modified_base 13: mod_base = OTHER; note = 2'-O-methyluridine-3'-phosphate
  modified_base 14: mod_base = OTHER; note = 2'-O-methylguanosine-3'-phosphate
  modified_base 15: mod_base = OTHER; note = 2'-O-methyluridine-3'-phosphate
  modified_base 16: mod_base = OTHER; note = 2'-O-methylguanosine-3'-phosphate
  modified_base 17: mod_base = OTHER; note = 2'-O-methyluridine-3'-phosphate
  modified_base 18: mod_base = OTHER; note = 2'-O-methyluridine-3'-phosphate
  modified_base 19: mod_base = OTHER; note = 2'-O-methyluridine-3'-phosphate
  modified_base 20: mod_base = OTHER; note = 2'-O-methylguanosine-3'-phosphate
  modified_base 21: mod_base = OTHER; note 2'-O-methyluridine-3'-phosphate-N-[tris(GalNAc-alkyl)-amido decanoyl)]-4-hydroxyprolinol (Hyp-(GalNAc-alkyl)3)
tggcgccaaggctgtgtttgt

SEQ ID NO: 2753 - RNA, 23 nt, synthetic construct
  source 1..23: mol_type = other RNA
  modified_base 1: mod_base = OTHER; note = 2'-O-methyladenosine-3'- phosphorothioate
  modified_base 2: mod_base = OTHER; note = 2'-fluorocytidine-3'-phosphorothioate
  modified_base 3: mod_base = OTHER; note = 2'-O-methyladenosine-3'-phosphate
  modified_base 4: mod_base = OTHER; note = 2'-O-methyladenosine-3'-phosphate
  modified_base 5: mod_base = OTHER; note = 2'-O-methyladenosine-3'-phosphate
  modified_base 6: mod_base = OTHER; note = 2'-fluorocytidine-3'-phosphate
  modified_base 7: mod_base = OTHER; note = 2'-O-methyladenosine-3'-phosphate
  modified_base 8: mod_base = OTHER; note = 2'-fluorocytidine-3'-phosphate
  modified_base 9: mod_base = OTHER; note = 2'-fluoroadenosine-3'-phosphate
  modified_base 10: mod_base = OTHER; note = 2'-O-methylguanosine-3'-phosphate
  modified_base 11: mod_base = OTHER; note = 2'-O-methylcytidine-3'-phosphate
  modified_base 12: mod_base = OTHER; note = 2'-O-methylcytidine-3'-phosphate
  modified_base 13: mod_base = OTHER; note = 2'-O-methyluridine-3'-phosphate
  modified_base 14: mod_base = OTHER; note = 2'-fluorouridine-3'-phosphate
  modified_base 15: mod_base = OTHER; note = 2'-O-methylguanosine-3'-phosphate
  modified_base 16: mod_base = OTHER; note = 2'-fluoroguanosine-3'-phosphate
  modified_base 17: mod_base = OTHER; note = 2'-O-methylcytidine-3'-phosphate
  modified_base 18: mod_base = OTHER; note = 2'-O-methylguanosine-3'-phosphate
  modified_base 19: mod_base = OTHER; note = 2'-O-methylcytidine-3'-phosphate
  modified_base 20: mod_base = OTHER; note = 2'-O-methylcytidine-3'-phosphate
  modified_base 21: mod_base = OTHER; note = 2'-O-methyladenosine-3'- phosphorothioate
  modified_base 22: mod_base = OTHER; note = 2'-O-methyladenosine-3'- phosphorothioate
  modified_base 23: mod_base = OTHER; note = 2'-O-methylguanosine-3'-phosphate
acaaacacagccttggcgccaag

SEQ ID NO: 2754 - RNA, 21 nt, synthetic construct
  source 1..21: mol_type = other RNA
  modified_base 1: mod_base = OTHER; note = 2'-O-methyladenosine-3'- phosphorothioate
  modified_base 2: mod_base = OTHER; note = 2'-O-methylcytidine-3'- phosphorothioate
  modified_base 3: mod_base = OTHER; note = 2'-O-methyluridine-3'-phosphate
  modified_base 4: mod_base = OTHER; note = 2'-O-methylguanosine-3'-phosphate
  modified_base 5: mod_base = OTHER; note = 2'-O-methylcytidine-3'-phosphate
  modified_base 6: mod_base = OTHER; note = 2'-O-methylcytidine-3'-phosphate
  modified_base 7: mod_base = OTHER; note = 2'-fluoroguanosine-3'-phosphate
  modified_base 8: mod_base = OTHER; note = 2'-O-methylcytidine-3'-phosphate
  modified_base 9: mod_base = OTHER; note = 2'-fluorocytidine-3'-phosphate
  modified_base 10: mod_base = OTHER; note = 2'-fluoroadenosine-3'-phosphate
  modified_base 11: mod_base = OTHER; note = 2'-fluorocytidine-3'-phosphate
  modified_base 12: mod_base = OTHER; note = 2'-O-methyladenosine-3'-phosphate
  modified_base 13: mod_base = OTHER; note = 2'-O-methyladenosine-3'-phosphate
  modified_base 14: mod_base = OTHER; note = 2'-O-methylcytidine-3'-phosphate
  modified_base 15: mod_base = OTHER; note = 2'-O-methyluridine-3'-phosphate
  modified_base 16: mod_base = OTHER; note = 2'-O-methylcytidine-3'-phosphate
  modified_base 17: mod_base = OTHER; note = 2'-O-methyladenosine-3'-phosphate
  modified_base 18: mod_base = OTHER; note = 2'-O-methylguanosine-3'-phosphate
  modified_base 19: mod_base = OTHER; note = 2'-O-methylguanosine-3'-phosphate
  modified_base 20: mod_base = OTHER; note = 2'-O-methyladenosine-3'-phosphate
  modified_base 21: mod_base = OTHER; note 2'-O-methyluridine-3'-phosphate-N-[tris(GalNAc-alkyl)-amido decanoyl)]-4-hydroxyprolinol (Hyp-(GalNAc-alkyl)3)
actgccgccacaactcaggat

SEQ ID NO: 2755 - RNA, 23 nt, synthetic construct
  source 1..23: mol_type = other RNA
  modified_base 1: mod_base = OTHER; note = 2'-O-methyladenosine-3'- phosphorothioate
  modified_base 2: mod_base = OTHER; note = 2'-fluorouridine -3'-phosphorothioate
  modified_base 3: mod_base = OTHER; note = 2'-O-methylcytidine-3'-phosphate
  modified_base 4: mod_base = OTHER; note = 2'-O-methylcytidine-3'-phosphate
  modified_base 5: mod_base = OTHER; note = 2'-O-methyluridine-3'-phosphate
  modified_base 6: mod_base = OTHER; note = 2'-fluoroguanosine-3'-phosphate
  modified_base 7: mod_base = OTHER; note = 2'-O-methyladenosine-3'-phosphate
  modified_base 8: mod_base = OTHER; note = 2'-fluoroguanosine-3'-phosphate
  modified_base 9: mod_base = OTHER; note = 2'-fluorouridine-3'-phosphate
  modified_base 10: mod_base = OTHER; note = 2'-O-methyluridine-3'-phosphate
  modified_base 11: mod_base = OTHER; note = 2'-O-methylguanosine-3'-phosphate
  modified_base 12: mod_base = OTHER; note = 2'-O-methyluridine-3'-phosphate
  modified_base 13: mod_base = OTHER; note = 2'-O-methylguanosine-3'-phosphate
  modified_base 14: mod_base = OTHER; note = 2'-fluoroguanosine-3'-phosphate
  modified_base 15: mod_base = OTHER; note = 2'-O-methylcytidine-3'-phosphate
  modified_base 16: mod_base = OTHER; note = 2'-fluoroguanosine-3'-phosphate
  modified_base 17: mod_base = OTHER; note = 2'-O-methylguanosine-3'-phosphate
  modified_base 18: mod_base = OTHER; note = 2'-O-methylcytidine-3'-phosphate
  modified_base 19: mod_base = OTHER; note = 2'-O-methyladenosine-3'-phosphate
  modified_base 20: mod_base = OTHER; note = 2'-O-methylguanosine-3'-phosphate
  modified_base 21: mod_base = OTHER; note = 2'-O-methyluridine-3'-phosphorothioate
  modified_base 22: mod_base = OTHER; note = 2'-O-methyluridine-3'-phosphorothioate
  modified_base 23: mod_base = OTHER; note = 2'-O-methyluridine-3'-phosphate
atcctgagttgtggcggcagttt

SEQ ID NO: 2756 - RNA, 21 nt, synthetic construct
  source 1..21: mol_type = other RNA
  modified_base 1: mod_base = OTHER; note = 2'-O-methylcytidine-3'- phosphorothioate
  modified_base 2: mod_base = OTHER; note = 2'-O-methyluridine-3'-phosphorothioate
  modified_base 3: mod_base = OTHER; note = 2'-O-methylguanosine-3'-phosphate
  modified_base 4: mod_base = OTHER; note = 2'-O-methylcytidine-3'-phosphate
  modified_base 5: mod_base = OTHER; note = 2'-O-methylcytidine-3'-phosphate
  modified_base 6: mod_base = OTHER; note = 2'-O-methylguanosine-3'-phosphate
  modified_base 7: mod_base = OTHER; note = 2'-fluorocytidine-3'-phosphate
  modified_base 8: mod_base = OTHER; note = 2'-O-methylcytidine-3'-phosphate
  modified_base 9: mod_base = OTHER; note = 2'-fluoroadenosine-3'-phosphate
  modified_base 10: mod_base = OTHER; note = 2'-fluorocytidine-3'-phosphate
  modified_base 11: mod_base = OTHER; note = 2'-fluoroadenosine-3'-phosphate
  modified_base 12: mod_base = OTHER; note = 2'-O-methyladenosine-3'-phosphate
  modified_base 13: mod_base = OTHER; note = 2'-O-methylcytidine-3'-phosphate
  modified_base 14: mod_base = OTHER; note = 2'-O-methyluridine-3'-phosphate
  modified_base 15: mod_base = OTHER; note = 2'-O-methylcytidine-3'-phosphate
  modified_base 16: mod_base = OTHER; note = 2'-O-methyladenosine-3'-phosphate
  modified_base 17: mod_base = OTHER; note = 2'-O-methylguanosine-3'-phosphate
  modified_base 18: mod_base = OTHER; note = 2'-O-methylguanosine-3'-phosphate
  modified_base 19: mod_base = OTHER; note = 2'-O-methyladenosine-3'-phosphate
  modified_base 20: mod_base = OTHER; note = 2'-O-methyluridine-3'-phosphate
  modified_base 21: mod_base = OTHER; note 2'-O-methylguanosine-3'-phosphate-N-[tris(GalNAc-alkyl)-ami dodecanoyl)]-4-hydroxyprolinol (Hyp-(GalNAc-alkyl)3)
ctgccgccacaactcaggatg

SEQ ID NO: 2757 - RNA, 23 nt, synthetic construct
  source 1..23: mol_type = other RNA
  modified_base 1: mod_base = OTHER; note = 2'-O-methylcytidine-3'- phosphorothioate
  modified_base 2: mod_base = OTHER; note = 2'-fluoroadenosine-3'-phosphorothioate
  modified_base 3: mod_base = OTHER; note = 2'-O-methyluridine-3'-phosphate
  modified_base 4: mod_base = OTHER; note = 2'-O-methylcytidine-3'-phosphate
  modified_base 5: mod_base = OTHER; note = 2'-O-methylcytidine-3'-phosphate
  modified_base 6: mod_base = OTHER; note = 2'-fluorouridine-3'-phosphate
  modified_base 7: mod_base = OTHER; note = 2'-O-methylguanosine-3'-phosphate
  modified_base 8: mod_base = OTHER; note = 2'-fluoroadenosine-3'-phosphate
  modified_base 9: mod_base = OTHER; note = 2'-fluoroguanosine-3'-phosphate
  modified_base 10: mod_base = OTHER; note = 2'-O-methyluridine-3'-phosphate
  modified_base 11: mod_base = OTHER; note = 2'-O-methyluridine-3'-phosphate
  modified_base 12: mod_base = OTHER; note = 2'-O-methylguanosine-3'-phosphate
  modified_base 13: mod_base = OTHER; note = 2'-O-methyluridine-3'-phosphate
  modified_base 14: mod_base = OTHER; note = 2'-fluoroguanosine-3'-phosphate
  modified_base 15: mod_base = OTHER; note = 2'-O-methylguanosine-3'-phosphate
  modified_base 16: mod_base = OTHER; note = 2'-fluorocytidine-3'-phosphate
  modified_base 17: mod_base = OTHER; note = 2'-O-methylguanosine-3'-phosphate
  modified_base 18: mod_base = OTHER; note = 2'-O-methylguanosine-3'-phosphate
  modified_base 19: mod_base = OTHER; note = 2'-O-methylcytidine-3'-phosphate
  modified_base 20: mod_base = OTHER; note = 2'-O-methyladenosine-3'-phosphate
  modified_base 21: mod_base = OTHER; note = 2'-O-methylguanosine-3'- phosphorothioate
  modified_base 22: mod_base = OTHER; note = 2'-O-methyluridine-3'-phosphorothioate
  modified_base 23: mod_base = OTHER; note = 2'-O-methyluridine-3'-phosphate
catcctgagttgtggcggcagtt

SEQ ID NO: 2758 - RNA, 21 nt, synthetic construct
  source 1..21: mol_type = other RNA
  modified_base 1: mod_base = OTHER; note = 2'-O-methyluridine-3'-phosphorothioate
  modified_base 2: mod_base = OTHER; note = 2'-O-methylcytidine-3'- phosphorothioate
  modified_base 3: mod_base = OTHER; note = 2'-O-methyladenosine-3'-phosphate
  modified_base 4: mod_base = OTHER; note = 2'-O-methyladenosine-3'-phosphate
  modified_base 5: mod_base = OTHER; note = 2'-O-methyladenosine-3'-phosphate
  modified_base 6: mod_base = OTHER; note = 2'-O-methylcytidine-3'-phosphate
  modified_base 7: mod_base = OTHER; note = 2'-fluorouridine-3'-phosphate
  modified_base 8: mod_base = OTHER; note = 2'-O-methylguanosine-3'-phosphate
  modified_base 9: mod_base = OTHER; note = 2'-fluorocytidine-3'-phosphate
  modified_base 10: mod_base = OTHER; note = 2'-fluorocytidine-3'-phosphate
  modified_base 11: mod_base = OTHER; note = 2'-fluoroguanosine-3'-phosphate
  modified_base 12: mod_base = OTHER; note = 2'-O-methylcytidine-3'-phosphate
  modified_base 13: mod_base = OTHER; note = 2'-O-methylcytidine-3'-phosphate
  modified_base 14: mod_base = OTHER; note = 2'-O-methyladenosine-3'-phosphate
  modified_base 15: mod_base = OTHER; note = 2'-O-methylcytidine-3'-phosphate
  modified_base 16: mod_base = OTHER; note = 2'-O-methyladenosine-3'-phosphate
  modified_base 17: mod_base = OTHER; note = 2'-O-methyladenosine-3'-phosphate
  modified_base 18: mod_base = OTHER; note = 2'-O-methylcytidine-3'-phosphate
  modified_base 19: mod_base = OTHER; note = 2'-O-methyluridine-3'-phosphate
  modified_base 20: mod_base = OTHER; note = 2'-O-methylcytidine-3'-phosphate
  modified_base 21: mod_base = OTHER; note 2'-O-methyladenosine-3'-phosphate-N-[tris(GalNAc-alkyl)-ami dodecanoyl)]-4-hydroxyprolinol (Hyp-(GalNAc-alkyl)3)
tcaaactgccgccacaactca

SEQ ID NO: 2759 - RNA, 23 nt, synthetic construct
  source 1..23: mol_type = other RNA
  modified_base 1: mod_base = OTHER; note = 2'-O-methyluridine-3'-phosphorothioate
  modified_base 2: mod_base = OTHER; note = 2'-fluoroguanosine-3'-phosphorothioate
  modified_base 3: mod_base = OTHER; note = 2'-O-methyladenosine-3'-phosphate
  modified_base 4: mod_base = OTHER; note = 2'-O-methylguanosine-3'-phosphate
  modified_base 5: mod_base = OTHER; note = 2'-O-methyluridine-3'-phosphate
  modified_base 6: mod_base = OTHER; note = 2'-fluorouridine-3'-phosphate
  modified_base 7: mod_base = OTHER; note = 2'-O-methylguanosine-3'-phosphate
  modified_base 8: mod_base = OTHER; note = 2'-fluorouridine-3'-phosphate
  modified_base 9: mod_base = OTHER; note = 2'-fluoroguanosine-3'-phosphate
  modified_base 10: mod_base = OTHER; note = 2'-O-methylguanosine-3'-phosphate
  modified_base 11: mod_base = OTHER; note = 2'-O-methylcytidine-3'-phosphate
  modified_base 12: mod_base = OTHER; note = 2'-O-methylguanosine-3'-phosphate
  modified_base 13: mod_base = OTHER; note = 2'-O-methylguanosine-3'-phosphate
  modified_base 14: mod_base = OTHER; note = 2'-fluorocytidine-3'-phosphate
  modified_base 15: mod_base = OTHER; note = 2'-O-methyladenosine-3'-phosphate
  modified_base 16: mod_base = OTHER; note = 2'-fluoroguanosine-3'-phosphate
  modified_base 17: mod_base = OTHER; note = 2'-O-methyluridine-3'-phosphate
  modified_base 18: mod_base = OTHER; note = 2'-O-methyluridine-3'-phosphate
  modified_base 19: mod_base = OTHER; note = 2'-O-methyluridine-3'-phosphate
  modified_base 20: mod_base = OTHER; note = 2'-O-methylguanosine-3'-phosphate
  modified_base 21: mod_base = OTHER; note = 2'-O-methyladenosine-3'- phosphorothioate
  modified_base 22: mod_base = OTHER; note = 2'-O-methyladenosine-3'- phosphorothioate
  modified_base 23: mod_base = OTHER; note = 2'-O-methyluridine-3'-phosphate
tgagttgtggcggcagtttgaat

SEQ ID NO: 2760 - RNA, 21 nt, synthetic construct
  source 1..21: mol_type = other RNA
  modified_base 1: mod_base = OTHER; note = 2'-O-methyluridine-3'-phosphorothioate
  modified_base 2: mod_base = OTHER; note = 2'-O-methyluridine-3'-phosphorothioate
  modified_base 3: mod_base = OTHER; note = 2'-O-methylcytidine-3'-phosphate
  modified_base 4: mod_base = OTHER; note = 2'-O-methyladenosine-3'-phosphate
  modified_base 5: mod_base = OTHER; note = 2'-O-methyladenosine-3'-phosphate
  modified_base 6: mod_base = OTHER; note = 2'-O-methyladenosine-3'-phosphate
  modified_base 7: mod_base = OTHER; note = 2'-fluorocytidine-3'-phosphate
  modified_base 8: mod_base = OTHER; note = 2'-O-methyluridine-3'-phosphate
  modified_base 9: mod_base = OTHER; note = 2'-fluoroguanosine-3'-phosphate
  modified_base 10: mod_base = OTHER; note = 2'-fluorocytidine-3'-phosphate
  modified_base 11: mod_base = OTHER; note = 2'-fluorocytidine-3'-phosphate
  modified_base 12: mod_base = OTHER; note = 2'-O-methylguanosine-3'-phosphate
  modified_base 13: mod_base = OTHER; note = 2'-O-methylcytidine-3'-phosphate
  modified_base 14: mod_base = OTHER; note = 2'-O-methylcytidine-3'-phosphate
  modified_base 15: mod_base = OTHER; note = 2'-O-methyladenosine-3'-phosphate
  modified_base 16: mod_base = OTHER; note = 2'-O-methylcytidine-3'-phosphate
  modified_base 17: mod_base = OTHER; note = 2'-O-methyladenosine-3'-phosphate
  modified_base 18: mod_base = OTHER; note = 2'-O-methyladenosine-3'-phosphate
  modified_base 19: mod_base = OTHER; note = 2'-O-methylcytidine-3'-phosphate
  modified_base 20: mod_base = OTHER; note = 2'-O-methyluridine-3'-phosphate
  modified_base 21: mod_base = OTHER; note 2'-O-methylcytidine-3'-phosphate-N-[tris(GalNAc-alkyl)-amid odecanoyl)]-4-hydroxyprolinol (Hyp-(GalNAc-alkyl)3)
ttcaaactgccgccacaactc

SEQ ID NO: 2761 - RNA, 23 nt, synthetic construct
  source 1..23: mol_type = other RNA
  modified_base 1: mod_base = OTHER; note = 2'-O-methylguanosine-3'- phosphorothioate
  modified_base 2: mod_base = OTHER; note = 2'-fluoroadenosine-3'-phosphorothioate
  modified_base 3: mod_base = OTHER; note = 2'-O-methylguanosine-3'-phosphate
  modified_base 4: mod_base = OTHER; note = 2'-O-methyluridine-3'-phosphate
  modified_base 5: mod_base = OTHER; note = 2'-O-methyluridine-3'-phosphate
  modified_base 6: mod_base = OTHER; note = 2'-fluoroguanosine-3'-phosphate
  modified_base 7: mod_base = OTHER; note = 2'-O-methyluridine-3'-phosphate
  modified_base 8: mod_base = OTHER; note = 2'-fluoroguanosine-3'-phosphate
  modified_base 9: mod_base = OTHER; note = 2'-fluoroguanosine-3'-phosphate
  modified_base 10: mod_base = OTHER; note = 2'-O-methylcytidine-3'-phosphate
  modified_base 11: mod_base = OTHER; note = 2'-O-methylguanosine-3'-phosphate
  modified_base 12: mod_base = OTHER; note = 2'-O-methylguanosine-3'-phosphate
  modified_base 13: mod_base = OTHER; note = 2'-O-methylcytidine-3'-phosphate
  modified_base 14: mod_base = OTHER; note = 2'-fluoroadenosine-3'-phosphate
  modified_base 15: mod_base = OTHER; note = 2'-O-methylguanosine-3'-phosphate
  modified_base 16: mod_base = OTHER; note = 2'-fluorouridine-3'-phosphate
  modified_base 17: mod_base = OTHER; note = 2'-O-methyluridine-3'-phosphate
  modified_base 18: mod_base = OTHER; note = 2'-O-methyluridine-3'-phosphate
  modified_base 19: mod_base = OTHER; note = 2'-O-methylguanosine-3'-phosphate
  modified_base 20: mod_base = OTHER; note = 2'-O-methyladenosine-3'-phosphate
  modified_base 21: mod_base = OTHER; note = 2'-O-methyladenosine-3'- phosphorothioate
  modified_base 22: mod_base = OTHER; note = 2'-O-methyluridine-3'-phosphorothioate
  modified_base 23: mod_base = OTHER; note = 2'-O-methylcytidine-3'-phosphate
gagttgtggcggcagtttgaatc

SEQ ID NO: 2762 - RNA, 21 nt, synthetic construct
  source 1..21: mol_type = other RNA
  modified_base 1: mod_base = OTHER; note = 2'-O-methylguanosine-3'- phosphorothioate
  modified_base 2: mod_base = OTHER; note = 2'-O-methylguanosine-3'- phosphorothioate
  modified_base 3: mod_base = OTHER; note = 2'-O-methylguanosine-3'-phosphate
  modified_base 4: mod_base = OTHER; note = 2'-O-methyladenosine-3'-phosphate
  modified_base 5: mod_base = OTHER; note = 2'-O-methyladenosine-3'-phosphate
  modified_base 6: mod_base = OTHER; note = 2'-O-methylguanosine-3'-phosphate
  modified_base 7: mod_base = OTHER; note = 2'-fluoroadenosine-3'-phosphate
  modified_base 8: mod_base = OTHER; note = 2'-O-methyluridine-3'-phosphate
  modified_base 9: mod_base = OTHER; note = 2'-fluoroadenosine-3'-phosphate
  modified_base 10: mod_base = OTHER; note = 2'-fluorouridine-3'-phosphate
  modified_base 11: mod_base = OTHER; note = 2'-fluorocytidine-3'-phosphate
  modified_base 12: mod_base = OTHER; note = 2'-O-methyladenosine-3'-phosphate
  modified_base 13: mod_base = OTHER; note = 2'-O-methyladenosine-3'-phosphate
  modified_base 14: mod_base = OTHER; note = 2'-O-methyladenosine-3'-phosphate
  modified_base 15: mod_base = OTHER; note = 2'-O-methyluridine-3'-phosphate
  modified_base 16: mod_base = OTHER; note = 2'-O-methylguanosine-3'-phosphate
  modified_base 17: mod_base = OTHER; note = 2'-O-methylguanosine-3'-phosphate
  modified_base 18: mod_base = OTHER; note = 2'-O-methylcytidine-3'-phosphate
  modified_base 19: mod_base = OTHER; note = 2'-O-methyluridine-3'-phosphate
  modified_base 20: mod_base = OTHER; note = 2'-O-methylguanosine-3'-phosphate
  modified_base 21: mod_base = OTHER; note 2'-O-methyladenosine-3'-phosphate-N-[tris(GalNAc-alkyl)-ami dodecanoyl)]-4-hydroxyprolinol (Hyp-(GalNAc-alkyl)3)
gggaagatatcaaatggctga

SEQ ID NO: 2763 - RNA, 23 nt, synthetic construct
  source 1..23: mol_type = other RNA
  modified_base 1: mod_base = OTHER; note = 2'-O-methyluridine-3'-phosphorothioate
  modified_base 2: mod_base = OTHER; note = 2'-fluorocytidine-3'-phosphorothioate
  modified_base 3: mod_base = OTHER; note = 2'-O-methyladenosine-3'-phosphate
  modified_base 4: mod_base = OTHER; note = 2'-O-methylguanosine-3'-phosphate
  modified_base 5: mod_base = OTHER; note = 2'-O-methylcytidine-3'-phosphate
  modified_base 6: mod_base = OTHER; note = 2'-fluorocytidine-3'-phosphate
  modified_base 7: mod_base = OTHER; note = 2'-O-methyladenosine-3'-phosphate
  modified_base 8: mod_base = OTHER; note = 2'-fluorouridine-3'-phosphate
  modified_base 9: mod_base = OTHER; note = 2'-fluorouridine-3'-phosphate
  modified_base 10: mod_base = OTHER; note = 2'-O-methyluridine-3'-phosphate
  modified_base 11: mod_base = OTHER; note = 2'-O-methylguanosine-3'-phosphate
  modified_base 12: mod_base = OTHER; note = 2'-O-methyladenosine-3'-phosphate
  modified_base 13: mod_base = OTHER; note = 2'-O-methyluridine-3'-phosphate
  modified_base 14: mod_base = OTHER; note = 2'-fluoroadenosine-3'-phosphate
  modified_base 15: mod_base = OTHER; note = 2'-O-methyluridine-3'-phosphate
  modified_base 16: mod_base = OTHER; note = 2'-fluorocytidine-3'-phosphate
  modified_base 17: mod_base = OTHER; note = 2'-O-methyluridine-3'-phosphate
  modified_base 18: mod_base = OTHER; note = 2'-O-methyluridine-3'-phosphate
  modified_base 19: mod_base = OTHER; note = 2'-O-methylcytidine-3'-phosphate
  modified_base 20: mod_base = OTHER; note = 2'-O-methylcytidine-3'-phosphate
  modified_base 21: mod_base = OTHER; note = 2'-O-methylcytidine-3'- phosphorothioate
  modified_base 22: mod_base = OTHER; note = 2'-O-methyladenosine-3'- phosphorothioate
  modified_base 23: mod_base = OTHER; note = 2'-O-methylguanosine-3'-phosphate
tcagccatttgatatcttcccag

SEQ ID NO: 2764 - RNA, 21 nt, synthetic construct
  source 1..21: mol_type = other RNA
  modified_base 1: mod_base = OTHER; note = 2'-O-methylguanosine-3'- phosphorothioate
  modified_base 2: mod_base = OTHER; note = 2'-O-methylguanosine-3'- phosphorothioate
  modified_base 3: mod_base = OTHER; note = 2'-O-methyladenosine-3'-phosphate
  modified_base 4: mod_base = OTHER; note = 2'-O-methyladenosine-3'-phosphate
  modified_base 5: mod_base = OTHER; note = 2'-O-methylguanosine-3'-phosphate
  modified_base 6: mod_base = OTHER; note = 2'-O-methyladenosine-3'-phosphate
  modified_base 7: mod_base = OTHER; note = 2'-fluorouridine-3'-phosphate
  modified_base 8: mod_base = OTHER; note = 2'-O-methyladenosine-3'-phosphate
  modified_base 9: mod_base = OTHER; note = 2'-fluorouridine-3'-phosphate
  modified_base 10: mod_base = OTHER; note = 2'-fluorocytidine-3'-phosphate
  modified_base 11: mod_base = OTHER; note = 2'-fluoroadenosine-3'-phosphate
  modified_base 12: mod_base = OTHER; note = 2'-O-methyladenosine-3'-phosphate
  modified_base 13: mod_base = OTHER; note = 2'-O-methyladenosine-3'-phosphate
  modified_base 14: mod_base = OTHER; note = 2'-O-methyluridine-3'-phosphate
  modified_base 15: mod_base = OTHER; note = 2'-O-methylguanosine-3'-phosphate
  modified_base 16: mod_base = OTHER; note = 2'-O-methylguanosine-3'-phosphate
  modified_base 17: mod_base = OTHER; note = 2'-O-methylcytidine-3'-phosphate
  modified_base 18: mod_base = OTHER; note = 2'-O-methyluridine-3'-phosphate
  modified_base 19: mod_base = OTHER; note = 2'-O-methylguanosine-3'-phosphate
  modified_base 20: mod_base = OTHER; note = 2'-O-methyladenosine-3'-phosphate
  modified_base 21: mod_base = OTHER; note 2'-O-methylguanosine-3'-phosphate-N-[tris(GalNAc-alkyl)-ami dodecanoyl)]-4-hydroxyprolinol (Hyp-(GalNAc-alkyl)3)
ggaagatatcaaatggctgag

SEQ ID NO: 2765 - RNA, 23 nt, synthetic construct
  source 1..23: mol_type = other RNA
  modified_base 1: mod_base = OTHER; note = 2'-O-methylcytidine-3'- phosphorothioate
  modified_base 2: mod_base = OTHER; note = 2'-fluorouridine -3'-phosphorothioate
  modified_base 3: mod_base = OTHER; note = 2'-O-methylcytidine-3'-phosphate
  modified_base 4: mod_base = OTHER; note = 2'-O-methyladenosine-3'-phosphate
  modified_base 5: mod_base = OTHER; note = 2'-O-methylguanosine-3'-phosphate
  modified_base 6: mod_base = OTHER; note = 2'-fluorocytidine-3'-phosphate
  modified_base 7: mod_base = OTHER; note = 2'-O-methylcytidine-3'-phosphate
  modified_base 8: mod_base = OTHER; note = 2'-fluoroadenosine-3'-phosphate
  modified_base 9: mod_base = OTHER; note = 2'-fluorouridine-3'-phosphate
  modified_base 10: mod_base = OTHER; note = 2'-O-methyluridine-3'-phosphate
  modified_base 11: mod_base = OTHER; note = 2'-O-methyluridine-3'-phosphate
  modified_base 12: mod_base = OTHER; note = 2'-O-methylguanosine-3'-phosphate
  modified_base 13: mod_base = OTHER; note = 2'-O-methyladenosine-3'-phosphate
  modified_base 14: mod_base = OTHER; note = 2'-fluorouridine-3'-phosphate
  modified_base 15: mod_base = OTHER; note = 2'-O-methyladenosine-3'-phosphate
  modified_base 16: mod_base = OTHER; note = 2'-fluorouridine-3'-phosphate
  modified_base 17: mod_base = OTHER; note = 2'-O-methylcytidine-3'-phosphate
  modified_base 18: mod_base = OTHER; note = 2'-O-methyluridine-3'-phosphate
  modified_base 19: mod_base = OTHER; note = 2'-O-methyluridine-3'-phosphate
  modified_base 20: mod_base = OTHER; note = 2'-O-methylcytidine-3'-phosphate
  modified_base 21: mod_base = OTHER; note = 2'-O-methylcytidine-3'- phosphorothioate
  modified_base 22: mod_base = OTHER; note = 2'-O-methylcytidine-3'- phosphorothioate
  modified_base 23: mod_base = OTHER; note = 2'-O-methyladenosine-3'-phosphate
ctcagccatttgatatcttccca

SEQ ID NO: 2766 - RNA, 21 nt, synthetic construct
  source 1..21: mol_type = other RNA
  modified_base 1: mod_base = OTHER; note = 2'-O-methyladenosine-3'- phosphorothioate
  modified_base 2: mod_base = OTHER; note = 2'-O-methylguanosine-3'- phosphorothioate
  modified_base 3: mod_base = OTHER; note = 2'-O-methylcytidine-3'-phosphate
  modified_base 4: mod_base = OTHER; note = 2'-O-methyluridine-3'-phosphate
  modified_base 5: mod_base = OTHER; note = 2'-O-methylguanosine-3'-phosphate
  modified_base 6: mod_base = OTHER; note = 2'-O-methylguanosine-3'-phosphate
  modified_base 7: mod_base = OTHER; note = 2'-fluoroguanosine-3'-phosphate
  modified_base 8: mod_base = OTHER; note = 2'-O-methyladenosine-3'-phosphate
  modified_base 9: mod_base = OTHER; note = 2'-fluoroadenosine-3'-phosphate
  modified_base 10: mod_base = OTHER; note = 2'-fluoroguanosine-3'-phosphate
  modified_base 11: mod_base = OTHER; note = 2'-fluoroadenosine-3'-phosphate
  modified_base 12: mod_base = OTHER; note = 2'-O-methyluridine-3'-phosphate
  modified_base 13: mod_base = OTHER; note = 2'-O-methyladenosine-3'-phosphate
  modified_base 14: mod_base = OTHER; note = 2'-O-methyluridine-3'-phosphate
  modified_base 15: mod_base = OTHER; note = 2'-O-methylcytidine-3'-phosphate
  modified_base 16: mod_base = OTHER; note = 2'-O-methyladenosine-3'-phosphate
  modified_base 17: mod_base = OTHER; note = 2'-O-methyladenosine-3'-phosphate
  modified_base 18: mod_base = OTHER; note = 2'-O-methyladenosine-3'-phosphate
  modified_base 19: mod_base = OTHER; note = 2'-O-methyluridine-3'-phosphate
  modified_base 20: mod_base = OTHER; note = 2'-O-methylguanosine-3'-phosphate
  modified_base 21: mod_base = OTHER; note 2'-O-methylguanosine-3'-phosphate-N-[tris(GalNAc-alkyl)-ami dodecanoyl)]-4-hydroxyprolinol (Hyp-(GalNAc-alkyl)3)
agctgggaagatatcaaatgg

SEQ ID NO: 2767 - RNA, 23 nt, synthetic construct
  source 1..23: mol_type = other RNA
  modified_base 1: mod_base = OTHER; note = 2'-O-methylcytidine-3'- phosphorothioate
  modified_base 2: mod_base = OTHER; note = 2'-fluorocytidine-3'-phosphorothioate
  modified_base 3: mod_base = OTHER; note = 2'-O-methyladenosine-3'-phosphate
  modified_base 4: mod_base = OTHER; note = 2'-O-methyluridine-3'-phosphate
  modified_base 5: mod_base = OTHER; note = 2'-O-methyluridine-3'-phosphate
  modified_base 6: mod_base = OTHER; note = 2'-fluorouridine-3'-phosphate
  modified_base 7: mod_base = OTHER; note = 2'-O-methylguanosine-3'-phosphate
  modified_base 8: mod_base = OTHER; note = 2'-fluoroadenosine-3'-phosphate
  modified_base 9: mod_base = OTHER; note = 2'-fluorouridine-3'-phosphate
  modified_base 10: mod_base = OTHER; note = 2'-O-methyladenosine-3'-phosphate
  modified_base 11: mod_base = OTHER; note = 2'-O-methyluridine-3'-phosphate
  modified_base 12: mod_base = OTHER; note = 2'-O-methylcytidine-3'-phosphate
  modified_base 13: mod_base = OTHER; note = 2'-O-methyluridine-3'-phosphate
  modified_base 14: mod_base = OTHER; note = 2'-fluorouridine-3'-phosphate
  modified_base 15: mod_base = OTHER; note = 2'-O-methylcytidine-3'-phosphate
  modified_base 16: mod_base = OTHER; note = 2'-fluorocytidine-3'-phosphate
  modified_base 17: mod_base = OTHER; note = 2'-O-methylcytidine-3'-phosphate
  modified_base 18: mod_base = OTHER; note = 2'-O-methyladenosine-3'-phosphate
  modified_base 19: mod_base = OTHER; note = 2'-O-methylguanosine-3'-phosphate
  modified_base 20: mod_base = OTHER; note = 2'-O-methylcytidine-3'-phosphate
  modified_base 21: mod_base = OTHER; note = 2'-O-methyluridine-3'-phosphorothioate
  modified_base 22: mod_base = OTHER; note = 2'-O-methylguanosine-3'- phosphorothioate
  modified_base 23: mod_base = OTHER; note = 2'-O-methyladenosine-3'-phosphate
ccatttgatatcttcccagctga

SEQ ID NO: 2768 - RNA, 21 nt, synthetic construct
  source 1..21: mol_type = other RNA
  modified_base 1: mod_base = OTHER; note = 2'-O-methylcytidine-3'- phosphorothioate
  modified_base 2: mod_base = OTHER; note = 2'-O-methyladenosine-3'- phosphorothioate
  modified_base 3: mod_base = OTHER; note = 2'-O-methylguanosine-3'-phosphate
  modified_base 4: mod_base = OTHER; note = 2'-O-methylcytidine-3'-phosphate
  modified_base 5: mod_base = OTHER; note = 2'-O-methyluridine-3'-phosphate
  modified_base 6: mod_base = OTHER; note = 2'-O-methylguanosine-3'-phosphate
  modified_base 7: mod_base = OTHER; note = 2'-fluoroguanosine-3'-phosphate
  modified_base 8: mod_base = OTHER; note = 2'-O-methylguanosine-3'-phosphate
  modified_base 9: mod_base = OTHER; note = 2'-fluoroadenosine-3'-phosphate
  modified_base 10: mod_base = OTHER; note = 2'-fluoroadenosine-3'-phosphate
  modified_base 11: mod_base = OTHER; note = 2'-fluoroguanosine-3'-phosphate
  modified_base 12: mod_base = OTHER; note = 2'-O-methyladenosine-3'-phosphate
  modified_base 13: mod_base = OTHER; note = 2'-O-methyluridine-3'-phosphate
  modified_base 14: mod_base = OTHER; note = 2'-O-methyladenosine-3'-phosphate
  modified_base 15: mod_base = OTHER; note = 2'-O-methyluridine-3'-phosphate
  modified_base 16: mod_base = OTHER; note = 2'-O-methylcytidine-3'-phosphate
  modified_base 17: mod_base = OTHER; note = 2'-O-methyladenosine-3'-phosphate
  modified_base 18: mod_base = OTHER; note = 2'-O-methyladenosine-3'-phosphate
  modified_base 19: mod_base = OTHER; note = 2'-O-methyladenosine-3'-phosphate
  modified_base 20: mod_base = OTHER; note = 2'-O-methyluridine-3'-phosphate
  modified_base 21: mod_base = OTHER; note 2'-O-methylguanosine-3'-phosphate-N-[tris(GalNAc-alkyl)-ami dodecanoyl)]-4-hydroxyprolinol (Hyp-(GalNAc-alkyl)3)
cagctgggaagatatcaaatg

SEQ ID NO: 2769 - RNA, 23 nt, synthetic construct
  source 1..23: mol_type = other RNA
  modified_base 1: mod_base = OTHER; note = 2'-O-methylcytidine-3'- phosphorothioate
  modified_base 2: mod_base = OTHER; note = 2'-fluoroadenosine-3'-phosphorothioate
  modified_base 3: mod_base = OTHER; note = 2'-O-methyluridine-3'-phosphate
  modified_base 4: mod_base = OTHER; note = 2'-O-methyluridine-3'-phosphate
  modified_base 5: mod_base = OTHER; note = 2'-O-methyluridine-3'-phosphate
  modified_base 6: mod_base = OTHER; note = 2'-fluoroguanosine-3'-phosphate
  modified_base 7: mod_base = OTHER; note = 2'-O-methyladenosine-3'-phosphate
  modified_base 8: mod_base = OTHER; note = 2'-fluorouridine-3'-phosphate
  modified_base 9: mod_base = OTHER; note = 2'-fluoroadenosine-3'-phosphate
  modified_base 10: mod_base = OTHER; note = 2'-O-methyluridine-3'-phosphate
  modified_base 11: mod_base = OTHER; note = 2'-O-methylcytidine-3'-phosphate
  modified_base 12: mod_base = OTHER; note = 2'-O-methyluridine-3'-phosphate
  modified_base 13: mod_base = OTHER; note = 2'-O-methyluridine-3'-phosphate
  modified_base 14: mod_base = OTHER; note = 2'-fluorocytidine-3'-phosphate
  modified_base 15: mod_base = OTHER; note = 2'-O-methylcytidine-3'-phosphate
  modified_base 16: mod_base = OTHER; note = 2'-fluorocytidine-3'-phosphate
  modified_base 17: mod_base = OTHER; note = 2'-O-methyladenosine-3'-phosphate
  modified_base 18: mod_base = OTHER; note = 2'-O-methylguanosine-3'-phosphate
  modified_base 19: mod_base = OTHER; note = 2'-O-methylcytidine-3'-phosphate
  modified_base 20: mod_base = OTHER; note = 2'-O-methyluridine-3'-phosphate
  modified_base 21: mod_base = OTHER; note = 2'-O-methylguanosine-3'- phosphorothioate
  modified_base 22: mod_base = OTHER; note = 2'-O-methyladenosine-3'- phosphorothioate
  modified_base 23: mod_base = OTHER; note = 2'-O-methyluridine-3'-phosphate
catttgatatcttcccagctgat

SEQ ID NO: 2770 - RNA, 21 nt, synthetic construct
  source 1..21: mol_type = other RNA
  modified_base 1: mod_base = OTHER; note = 2'-O-methyladenosine-3'- phosphorothioate
  modified_base 2: mod_base = OTHER; note = 2'-O-methyladenosine-3'- phosphorothioate
  modified_base 3: mod_base = OTHER; note = 2'-O-methyluridine-3'-phosphate
  modified_base 4: mod_base = OTHER; note = 2'-O-methylcytidine-3'-phosphate
  modified_base 5: mod_base = OTHER; note = 2'-O-methyladenosine-3'-phosphate
  modified_base 6: mod_base = OTHER; note = 2'-O-methylguanosine-3'-phosphate
  modified_base 7: mod_base = OTHER; note = 2'-fluorouridine-3'-phosphate
  modified_base 8: mod_base = OTHER; note = 2'-O-methyladenosine-3'-phosphate
  modified_base 9: mod_base = OTHER; note = 2'-fluorocytidine-3'-phosphate
  modified_base 10: mod_base = OTHER; note = 2'-fluorouridine-3'-phosphate
  modified_base 11: mod_base = OTHER; note = 2'-fluorouridine-3'-phosphate
  modified_base 12: mod_base = OTHER; note = 2'-O-methylcytidine-3'-phosphate
  modified_base 13: mod_base = OTHER; note = 2'-O-methylcytidine-3'-phosphate
  modified_base 14: mod_base = OTHER; note = 2'-O-methyladenosine-3'-phosphate
  modified_base 15: mod_base = OTHER; note = 2'-O-methyladenosine-3'-phosphate
  modified_base 16: mod_base = OTHER; note = 2'-O-methyladenosine-3'-phosphate
  modified_base 17: mod_base = OTHER; note = 2'-O-methylguanosine-3'-phosphate
  modified_base 18: mod_base = OTHER; note = 2'-O-methyluridine-3'-phosphate
  modified_base 19: mod_base = OTHER; note = 2'-O-methylcytidine-3'-phosphate
  modified_base 20: mod_base = OTHER; note = 2'-O-methyluridine-3'-phosphate
  modified_base 21: mod_base = OTHER; note 2'-O-methyladenosine-3'-phosphate-N-[tris(GalNAc-alkyl)-ami dodecanoyl)]-4-hydroxyprolinol (Hyp-(GalNAc-alkyl)3)
aatcagtacttccaaagtcta

SEQ ID NO: 2771 - RNA, 23 nt, synthetic construct
  source 1..23: mol_type = other RNA
  modified_base 1: mod_base = OTHER; note = 2'-O-methyluridine-3'-phosphorothioate
  modified_base 2: mod_base = OTHER; note = 2'-fluoroadenosine-3'-phosphorothioate
  modified_base 3: mod_base = OTHER; note = 2'-O-methylguanosine-3'-phosphate
  modified_base 4: mod_base = OTHER; note = 2'-O-methyladenosine-3'-phosphate
  modified_base 5: mod_base = OTHER; note = 2'-O-methylcytidine-3'-phosphate
  modified_base 6: mod_base = OTHER; note = 2'-fluorouridine-3'-phosphate
  modified_base 7: mod_base = OTHER; note = 2'-O-methyluridine-3'-phosphate
  modified_base 8: mod_base = OTHER; note = 2'-fluorouridine-3'-phosphate
  modified_base 9: mod_base = OTHER; note = 2'-fluoroguanosine-3'-phosphate
  modified_base 10: mod_base = OTHER; note = 2'-O-methylguanosine-3'-phosphate
  modified_base 11: mod_base = OTHER; note = 2'-O-methyladenosine-3'-phosphate
  modified_base 12: mod_base = OTHER; note = 2'-O-methyladenosine-3'-phosphate
  modified_base 13: mod_base = OTHER; note = 2'-O-methylguanosine-3'-phosphate
  modified_base 14: mod_base = OTHER; note = 2'-fluorouridine-3'-phosphate
  modified_base 15: mod_base = OTHER; note = 2'-O-methyladenosine-3'-phosphate
  modified_base 16: mod_base = OTHER; note = 2'-fluorocytidine-3'-phosphate
  modified_base 17: mod_base = OTHER; note = 2'-O-methyluridine-3'-phosphate
  modified_base 18: mod_base = OTHER; note = 2'-O-methylguanosine-3'-phosphate
  modified_base 19: mod_base = OTHER; note = 2'-O-methyladenosine-3'-phosphate
  modified_base 20: mod_base = OTHER; note = 2'-O-methyluridine-3'-phosphate
  modified_base 21: mod_base = OTHER; note = 2'-O-methyluridine-3'-phosphorothioate
  modified_base 22: mod_base = OTHER; note = 2'-O-methyluridine-3'-phosphorothioate
  modified_base 23: mod_base = OTHER; note = 2'-O-methyladenosine-3'-phosphate
tagactttggaagtactgattta

SEQ ID NO: 2772 - RNA, 21 nt, synthetic construct
  source 1..21: mol_type = other RNA
  modified_base 1: mod_base = OTHER; note = 2'-O-methyladenosine-3'- phosphorothioate
  modified_base 2: mod_base = OTHER; note = 2'-O-methyluridine-3'-phosphorothioate
  modified_base 3: mod_base = OTHER; note = 2'-O-methylcytidine-3'-phosphate
  modified_base 4: mod_base = OTHER; note = 2'-O-methyladenosine-3'-phosphate
  modified_base 5: mod_base = OTHER; note = 2'-O-methylguanosine-3'-phosphate
  modified_base 6: mod_base = OTHER; note = 2'-O-methyluridine-3'-phosphate
  modified_base 7: mod_base = OTHER; note = 2'-fluoroadenosine-3'-phosphate
  modified_base 8: mod_base = OTHER; note = 2'-O-methylcytidine-3'-phosphate
  modified_base 9: mod_base = OTHER; note = 2'-fluorouridine-3'-phosphate
  modified_base 10: mod_base = OTHER; note = 2'-fluorouridine-3'-phosphate
  modified_base 11: mod_base = OTHER; note = 2'-fluorocytidine-3'-phosphate
  modified_base 12: mod_base = OTHER; note = 2'-O-methylcytidine-3'-phosphate
  modified_base 13: mod_base = OTHER; note = 2'-O-methyladenosine-3'-phosphate
  modified_base 14: mod_base = OTHER; note = 2'-O-methyladenosine-3'-phosphate
  modified_base 15: mod_base = OTHER; note = 2'-O-methyladenosine-3'-phosphate
  modified_base 16: mod_base = OTHER; note = 2'-O-methylguanosine-3'-phosphate
  modified_base 17: mod_base = OTHER; note = 2'-O-methyluridine-3'-phosphate
  modified_base 18: mod_base = OTHER; note = 2'-O-methylcytidine-3'-phosphate
  modified_base 19: mod_base = OTHER; note = 2'-O-methyluridine-3'-phosphate
  modified_base 20: mod_base = OTHER; note = 2'-O-methyladenosine-3'-phosphate
  modified_base 21: mod_base = OTHER; note 2'-O-methyluridine-3'-phosphate-N-[tris(GalNAc-alkyl)-amido decanoyl)]-4-hydroxyprolinol (Hyp-(GalNAc-alkyl)3)
atcagtacttccaaagtctat

SEQ ID NO: 2773 - RNA, 23 nt, synthetic construct
  source 1..23: mol_type = other RNA
  modified_base 1: mod_base = OTHER; note = 2'-O-methyladenosine-3'- phosphorothioate
  modified_base 2: mod_base = OTHER; note = 2'-fluorouridine -3'-phosphorothioate
  modified_base 3: mod_base = OTHER; note = 2'-O-methyladenosine-3'-phosphate
  modified_base 4: mod_base = OTHER; note = 2'-O-methylguanosine-3'-phosphate
  modified_base 5: mod_base = OTHER; note = 2'-O-methyladenosine-3'-phosphate
  modified_base 6: mod_base = OTHER; note = 2'-fluorocytidine-3'-phosphate
  modified_base 7: mod_base = OTHER; note = 2'-O-methyluridine-3'-phosphate
  modified_base 8: mod_base = OTHER; note = 2'-fluorouridine-3'-phosphate
  modified_base 9: mod_base = OTHER; note = 2'-fluorouridine-3'-phosphate
  modified_base 10: mod_base = OTHER; note = 2'-O-methylguanosine-3'-phosphate
  modified_base 11: mod_base = OTHER; note = 2'-O-methylguanosine-3'-phosphate
  modified_base 12: mod_base = OTHER; note = 2'-O-methyladenosine-3'-phosphate
  modified_base 13: mod_base = OTHER; note = 2'-O-methyladenosine-3'-phosphate
  modified_base 14: mod_base = OTHER; note = 2'-fluoroguanosine-3'-phosphate
  modified_base 15: mod_base = OTHER; note = 2'-O-methyluridine-3'-phosphate
  modified_base 16: mod_base = OTHER; note = 2'-fluoroadenosine-3'-phosphate
  modified_base 17: mod_base = OTHER; note = 2'-O-methylcytidine-3'-phosphate
  modified_base 18: mod_base = OTHER; note = 2'-O-methyluridine-3'-phosphate
  modified_base 19: mod_base = OTHER; note = 2'-O-methylguanosine-3'-phosphate
  modified_base 20: mod_base = OTHER; note = 2'-O-methyladenosine-3'-phosphate
  modified_base 21: mod_base = OTHER; note = 2'-O-methyluridine-3'-phosphorothioate
  modified_base 22: mod_base = OTHER; note = 2'-O-methyluridine-3'-phosphorothioate
  modified_base 23: mod_base = OTHER; note = 2'-O-methyluridine-3'-phosphate
atagactttggaagtactgattt

SEQ ID NO: 2774 - RNA, 21 nt, synthetic construct
  source 1..21: mol_type = other RNA
  modified_base 1: mod_base = OTHER; note = 2'-O-methylguanosine-3'- phosphorothioate
  modified_base 2: mod_base = OTHER; note = 2'-O-methylcytidine-3'- phosphorothioate
  modified_base 3: mod_base = OTHER; note = 2'-O-methyluridine-3'-phosphate
  modified_base 4: mod_base = OTHER; note = 2'-O-methyladenosine-3'-phosphate
  modified_base 5: mod_base = OTHER; note = 2'-O-methyladenosine-3'-phosphate
  modified_base 6: mod_base = OTHER; note = 2'-O-methyladenosine-3'-phosphate
  modified_base 7: mod_base = OTHER; note = 2'-fluorouridine-3'-phosphate
  modified_base 8: mod_base = OTHER; note = 2'-O-methylcytidine-3'-phosphate
  modified_base 9: mod_base = OTHER; note = 2'-fluoroadenosine-3'-phosphate
  modified_base 10: mod_base = OTHER; note = 2'-fluoroguanosine-3'-phosphate
  modified_base 11: mod_base = OTHER; note = 2'-fluorouridine-3'-phosphate
  modified_base 12: mod_base = OTHER; note = 2'-O-methyladenosine-3'-phosphate
  modified_base 13: mod_base = OTHER; note = 2'-O-methylcytidine-3'-phosphate
  modified_base 14: mod_base = OTHER; note = 2'-O-methyluridine-3'-phosphate
  modified_base 15: mod_base = OTHER; note = 2'-O-methyluridine-3'-phosphate
  modified_base 16: mod_base = OTHER; note = 2'-O-methylcytidine-3'-phosphate
  modified_base 17: mod_base = OTHER; note = 2'-O-methylcytidine-3'-phosphate
  modified_base 18: mod_base = OTHER; note = 2'-O-methyladenosine-3'-phosphate
  modified_base 19: mod_base = OTHER; note = 2'-O-methyladenosine-3'-phosphate
  modified_base 20: mod_base = OTHER; note = 2'-O-methyladenosine-3'-phosphate
  modified_base 21: mod_base = OTHER; note 2'-O-methylguanosine-3'-phosphate-N-[tris(GalNAc-alkyl)-ami dodecanoyl)]-4-hydroxyprolinol (Hyp-(GalNAc-alkyl)3)
gctaaatcagtacttccaaag

SEQ ID NO: 2775 - RNA, 23 nt, synthetic construct
  source 1..23: mol_type = other RNA
  modified_base 1: mod_base = OTHER; note = 2'-O-methylcytidine-3'- phosphorothioate
  modified_base 2: mod_base = OTHER; note = 2'-fluorouridine -3'-phosphorothioate
  modified_base 3: mod_base = OTHER; note = 2'-O-methyluridine-3'-phosphate
  modified_base 4: mod_base = OTHER; note = 2'-O-methyluridine-3'-phosphate
  modified_base 5: mod_base = OTHER; note = 2'-O-methylguanosine-3'-phosphate
  modified_base 6: mod_base = OTHER; note = 2'-fluoroguanosine-3'-phosphate
  modified_base 7: mod_base = OTHER; note = 2'-O-methyladenosine-3'-phosphate
  modified_base 8: mod_base = OTHER; note = 2'-fluoroadenosine-3'-phosphate
  modified_base 9: mod_base = OTHER; note = 2'-fluoroguanosine-3'-phosphate
  modified_base 10: mod_base = OTHER; note = 2'-O-methyluridine-3'-phosphate
  modified_base 11: mod_base = OTHER; note = 2'-O-methyladenosine-3'-phosphate
  modified_base 12: mod_base = OTHER; note = 2'-O-methylcytidine-3'-phosphate
  modified_base 13: mod_base = OTHER; note = 2'-O-methyluridine-3'-phosphate
  modified_base 14: mod_base = OTHER; note = 2'-fluoroguanosine-3'-phosphate
  modified_base 15: mod_base = OTHER; note = 2'-O-methyladenosine-3'-phosphate
  modified_base 16: mod_base = OTHER; note = 2'-fluorouridine-3'-phosphate
  modified_base 17: mod_base = OTHER; note = 2'-O-methyluridine-3'-phosphate
  modified_base 18: mod_base = OTHER; note = 2'-O-methyluridine-3'-phosphate
  modified_base 19: mod_base = OTHER; note = 2'-O-methyladenosine-3'-phosphate
  modified_base 20: mod_base = OTHER; note = 2'-O-methylguanosine-3'-phosphate
  modified_base 21: mod_base = OTHER; note = 2'-O-methylcytidine-3'- phosphorothioate
  modified_base 22: mod_base = OTHER; note = 2'-O-methyladenosine-3'- phosphorothioate
  modified_base 23: mod_base = OTHER; note = 2'-O-methyluridine-3'-phosphate
ctttggaagtactgatttagcat

SEQ ID NO: 2776 - RNA, 21 nt, synthetic construct
  source 1..21: mol_type = other RNA
  modified_base 1: mod_base = OTHER; note = 2'-O-methyluridine-3'-phosphorothioate
  modified_base 2: mod_base = OTHER; note = 2'-O-methylguanosine-3'- phosphorothioate
  modified_base 3: mod_base = OTHER; note = 2'-O-methylcytidine-3'-phosphate
  modified_base 4: mod_base = OTHER; note = 2'-O-methyluridine-3'-phosphate
  modified_base 5: mod_base = OTHER; note = 2'-O-methyladenosine-3'-phosphate
  modified_base 6: mod_base = OTHER; note = 2'-O-methyladenosine-3'-phosphate
  modified_base 7: mod_base = OTHER; note = 2'-fluoroadenosine-3'-phosphate
  modified_base 8: mod_base = OTHER; note = 2'-O-methyluridine-3'-phosphate
  modified_base 9: mod_base = OTHER; note = 2'-fluorocytidine-3'-phosphate
  modified_base 10: mod_base = OTHER; note = 2'-fluoroadenosine-3'-phosphate
  modified_base 11: mod_base = OTHER; note = 2'-fluoroguanosine-3'-phosphate
  modified_base 12: mod_base = OTHER; note = 2'-O-methyluridine-3'-phosphate
  modified_base 13: mod_base = OTHER; note = 2'-O-methyladenosine-3'-phosphate
  modified_base 14: mod_base = OTHER; note = 2'-O-methylcytidine-3'-phosphate
  modified_base 15: mod_base = OTHER; note = 2'-O-methyluridine-3'-phosphate
  modified_base 16: mod_base = OTHER; note = 2'-O-methyluridine-3'-phosphate
  modified_base 17: mod_base = OTHER; note = 2'-O-methylcytidine-3'-phosphate
  modified_base 18: mod_base = OTHER; note = 2'-O-methylcytidine-3'-phosphate
  modified_base 19: mod_base = OTHER; note = 2'-O-methyladenosine-3'-phosphate
  modified_base 20: mod_base = OTHER; note = 2'-O-methyladenosine-3'-phosphate
  modified_base 21: mod_base = OTHER; note 2'-O-methyladenosine-3'-phosphate-N-[tris(GalNAc-alkyl)-ami dodecanoyl)]-4-hydroxyprolinol (Hyp-(GalNAc-alkyl)3)
tgctaaatcagtacttccaaa

SEQ ID NO: 2777 - RNA, 23 nt, synthetic construct
  source 1..23: mol_type = other RNA
  modified_base 1: mod_base = OTHER; note = 2'-O-methyluridine-3'-phosphorothioate
  modified_base 2: mod_base = OTHER; note = 2'-fluorouridine -3'-phosphorothioate
  modified_base 3: mod_base = OTHER; note = 2'-O-methyluridine-3'-phosphate
  modified_base 4: mod_base = OTHER; note = 2'-O-methylguanosine-3'-phosphate
  modified_base 5: mod_base = OTHER; note = 2'-O-methylguanosine-3'-phosphate
  modified_base 6: mod_base = OTHER; note = 2'-fluoroadenosine-3'-phosphate
  modified_base 7: mod_base = OTHER; note = 2'-O-methyladenosine-3'-phosphate
  modified_base 8: mod_base = OTHER; note = 2'-fluoroguanosine-3'-phosphate
  modified_base 9: mod_base = OTHER; note = 2'-fluorouridine-3'-phosphate
  modified_base 10: mod_base = OTHER; note = 2'-O-methyladenosine-3'-phosphate
  modified_base 11: mod_base = OTHER; note = 2'-O-methylcytidine-3'-phosphate
  modified_base 12: mod_base = OTHER; note = 2'-O-methyluridine-3'-phosphate
  modified_base 13: mod_base = OTHER; note = 2'-O-methylguanosine-3'-phosphate
  modified_base 14: mod_base = OTHER; note = 2'-fluoroadenosine-3'-phosphate
  modified_base 15: mod_base = OTHER; note = 2'-O-methyluridine-3'-phosphate
  modified_base 16: mod_base = OTHER; note = 2'-fluorouridine-3'-phosphate
  modified_base 17: mod_base = OTHER; note = 2'-O-methyluridine-3'-phosphate
  modified_base 18: mod_base = OTHER; note = 2'-O-methyladenosine-3'-phosphate
  modified_base 19: mod_base = OTHER; note = 2'-O-methylguanosine-3'-phosphate
  modified_base 20: mod_base = OTHER; note = 2'-O-methylcytidine-3'-phosphate
  modified_base 21: mod_base = OTHER; note = 2'-O-methyladenosine-3'- phosphorothioate
  modified_base 22: mod_base = OTHER; note = 2'-O-methyluridine-3'-phosphorothioate
  modified_base 23: mod_base = OTHER; note = 2'-O-methylguanosine-3'-phosphate
tttggaagtactgatttagcatg

SEQ ID NO: 2778 - RNA, 21 nt, synthetic construct
  source 1..21: mol_type = other RNA
  modified_base 1: mod_base = OTHER; note = 2'-O-methyluridine-3'-phosphorothioate
  modified_base 2: mod_base = OTHER; note = 2'-O-methylcytidine-3'- phosphorothioate
  modified_base 3: mod_base = OTHER; note = 2'-O-methyladenosine-3'-phosphate
  modified_base 4: mod_base = OTHER; note = 2'-O-methylguanosine-3'-phosphate
  modified_base 5: mod_base = OTHER; note = 2'-O-methylcytidine-3'-phosphate
  modified_base 6: mod_base = OTHER; note = 2'-O-methyladenosine-3'-phosphate
  modified_base 7: mod_base = OTHER; note = 2'-fluorouridine-3'-phosphate
  modified_base 8: mod_base = OTHER; note = 2'-O-methylguanosine-3'-phosphate
  modified_base 9: mod_base = OTHER; note = 2'-fluorocytidine-3'-phosphate
  modified_base 10: mod_base = OTHER; note = 2'-fluorocytidine-3'-phosphate
  modified_base 11: mod_base = OTHER; note = 2'-fluoroadenosine-3'-phosphate
  modified_base 12: mod_base = OTHER; note = 2'-O-methyladenosine-3'-phosphate
  modified_base 13: mod_base = OTHER; note = 2'-O-methyluridine-3'-phosphate
  modified_base 14: mod_base = OTHER; note = 2'-O-methyladenosine-3'-phosphate
  modified_base 15: mod_base = OTHER; note = 2'-O-methyluridine-3'-phosphate
  modified_base 16: mod_base = OTHER; note = 2'-O-methylguanosine-3'-phosphate
  modified_base 17: mod_base = OTHER; note = 2'-O-methyluridine-3'-phosphate
  modified_base 18: mod_base = OTHER; note = 2'-O-methylguanosine-3'-phosphate
  modified_base 19: mod_base = OTHER; note = 2'-O-methyluridine-3'-phosphate
  modified_base 20: mod_base = OTHER; note = 2'-O-methylguanosine-3'-phosphate
  modified_base 21: mod_base = OTHER; note 2'-O-methylguanosine-3'-phosphate-N-[tris(GalNAc-alkyl)-ami dodecanoyl)]-4-hydroxyprolinol (Hyp-(GalNAc-alkyl)3)
tcagcatgccaatatgtgtgg

SEQ ID NO: 2779 - RNA, 23 nt, synthetic construct
  source 1..23: mol_type = other RNA
  modified_base 1: mod_base = OTHER; note = 2'-O-methylcytidine-3'- phosphorothioate
  modified_base 2: mod_base = OTHER; note = 2'-fluorocytidine-3'-phosphorothioate
  modified_base 3: mod_base = OTHER; note = 2'-O-methyladenosine-3'-phosphate
  modified_base 4: mod_base = OTHER; note = 2'-O-methylcytidine-3'-phosphate
  modified_base 5: mod_base = OTHER; note = 2'-O-methyladenosine-3'-phosphate
  modified_base 6: mod_base = OTHER; note = 2'-fluorocytidine-3'-phosphate
  modified_base 7: mod_base = OTHER; note = 2'-O-methyladenosine-3'-phosphate
  modified_base 8: mod_base = OTHER; note = 2'-fluorouridine-3'-phosphate
  modified_base 9: mod_base = OTHER; note = 2'-fluoroadenosine-3'-phosphate
  modified_base 10: mod_base = OTHER; note = 2'-O-methyluridine-3'-phosphate
  modified_base 11: mod_base = OTHER; note = 2'-O-methyluridine-3'-phosphate
  modified_base 12: mod_base = OTHER; note = 2'-O-methylguanosine-3'-phosphate
  modified_base 13: mod_base = OTHER; note = 2'-O-methylguanosine-3'-phosphate
  modified_base 14: mod_base = OTHER; note = 2'-fluorocytidine-3'-phosphate
  modified_base 15: mod_base = OTHER; note = 2'-O-methyladenosine-3'-phosphate
  modified_base 16: mod_base = OTHER; note = 2'-fluorouridine-3'-phosphate
  modified_base 17: mod_base = OTHER; note = 2'-O-methylguanosine-3'-phosphate
  modified_base 18: mod_base = OTHER; note = 2'-O-methylcytidine-3'-phosphate
  modified_base 19: mod_base = OTHER; note = 2'-O-methyluridine-3'-phosphate
  modified_base 20: mod_base = OTHER; note = 2'-O-methylguanosine-3'-phosphate
  modified_base 21: mod_base = OTHER; note = 2'-O-methyladenosine-3'- phosphorothioate
  modified_base 22: mod_base = OTHER; note = 2'-O-methylcytidine-3'- phosphorothioate
  modified_base 23: mod_base = OTHER; note = 2'-O-methylcytidine-3'-phosphate
ccacacatattggcatgctgacc

SEQ ID NO: 2780 - RNA, 21 nt, synthetic construct
  source 1..21: mol_type = other RNA
  modified_base 1: mod_base = OTHER; note = 2'-O-methylcytidine-3'- phosphorothioate
  modified_base 2: mod_base = OTHER; note = 2'-O-methyladenosine-3'- phosphorothioate
  modified_base 3: mod_base = OTHER; note = 2'-O-methylguanosine-3'-phosphate
  modified_base 4: mod_base = OTHER; note = 2'-O-methylcytidine-3'-phosphate
  modified_base 5: mod_base = OTHER; note = 2'-O-methyladenosine-3'-phosphate
  modified_base 6: mod_base = OTHER; note = 2'-O-methyluridine-3'-phosphate
  modified_base 7: mod_base = OTHER; note = 2'-fluoroguanosine-3'-phosphate
  modified_base 8: mod_base = OTHER; note = 2'-O-methylcytidine-3'-phosphate
  modified_base 9: mod_base = OTHER; note = 2'-fluorocytidine-3'-phosphate
  modified_base 10: mod_base = OTHER; note = 2'-fluoroadenosine-3'-phosphate
  modified_base 11: mod_base = OTHER; note = 2'-fluoroadenosine-3'-phosphate
  modified_base 12: mod_base = OTHER; note = 2'-O-methyluridine-3'-phosphate
  modified_base 13: mod_base = OTHER; note = 2'-O-methyladenosine-3'-phosphate
  modified_base 14: mod_base = OTHER; note = 2'-O-methyluridine-3'-phosphate
  modified_base 15: mod_base = OTHER; note = 2'-O-methylguanosine-3'-phosphate
  modified_base 16: mod_base = OTHER; note = 2'-O-methyluridine-3'-phosphate
  modified_base 17: mod_base = OTHER; note = 2'-O-methylguanosine-3'-phosphate
  modified_base 18: mod_base = OTHER; note = 2'-O-methyluridine-3'-phosphate
  modified_base 19: mod_base = OTHER; note = 2'-O-methylguanosine-3'-phosphate
  modified_base 20: mod_base = OTHER; note = 2'-O-methylguanosine-3'-phosphate
  modified_base 21: mod_base = OTHER; note 2'-O-methylguanosine-3'-phosphate-N-[tris(GalNAc-alkyl)-ami dodecanoyl)]-4-hydroxyprolinol (Hyp-(GalNAc-alkyl)3)
cagcatgccaatatgtgtggg

SEQ ID NO: 2781 - RNA, 23 nt, synthetic construct
  source 1..23: mol_type = other RNA
  modified_base 1: mod_base = OTHER; note = 2'-O-methylcytidine-3'- phosphorothioate
  modified_base 2: mod_base = OTHER; note = 2'-fluorocytidine-3'-phosphorothioate
  modified_base 3: mod_base = OTHER; note = 2'-O-methylcytidine-3'-phosphate
  modified_base 4: mod_base = OTHER; note = 2'-O-methyladenosine-3'-phosphate
  modified_base 5: mod_base = OTHER; note = 2'-O-methylcytidine-3'-phosphate
  modified_base 6: mod_base = OTHER; note = 2'-fluoroadenosine-3'-phosphate
  modified_base 7: mod_base = OTHER; note = 2'-O-methylcytidine-3'-phosphate
  modified_base 8: mod_base = OTHER; note = 2'-fluoroadenosine-3'-phosphate
  modified_base 9: mod_base = OTHER; note = 2'-fluorouridine-3'-phosphate
  modified_base 10: mod_base = OTHER; note = 2'-O-methyladenosine-3'-phosphate
  modified_base 11: mod_base = OTHER; note = 2'-O-methyluridine-3'-phosphate
  modified_base 12: mod_base = OTHER; note = 2'-O-methyluridine-3'-phosphate
  modified_base 13: mod_base = OTHER; note = 2'-O-methylguanosine-3'-phosphate
  modified_base 14: mod_base = OTHER; note = 2'-fluoroguanosine-3'-phosphate
  modified_base 15: mod_base = OTHER; note = 2'-O-methylcytidine-3'-phosphate
  modified_base 16: mod_base = OTHER; note = 2'-fluoroadenosine-3'-phosphate
  modified_base 17: mod_base = OTHER; note = 2'-O-methyluridine-3'-phosphate
  modified_base 18: mod_base = OTHER; note = 2'-O-methylguanosine-3'-phosphate
  modified_base 19: mod_base = OTHER; note = 2'-O-methylcytidine-3'-phosphate
  modified_base 20: mod_base = OTHER; note = 2'-O-methyluridine-3'-phosphate
  modified_base 21: mod_base = OTHER; note = 2'-O-methylguanosine-3'- phosphorothioate
  modified_base 22: mod_base = OTHER; note = 2'-O-methyladenosine-3'- phosphorothioate
  modified_base 23: mod_base = OTHER; note = 2'-O-methylcytidine-3'-phosphate
cccacacatattggcatgctgac

SEQ ID NO: 2782 - RNA, 21 nt, synthetic construct
  source 1..21: mol_type = other RNA
  modified_base 1: mod_base = OTHER; note = 2'-O-methyladenosine-3'- phosphorothioate
  modified_base 2: mod_base = OTHER; note = 2'-O-methylguanosine-3'- phosphorothioate
  modified_base 3: mod_base = OTHER; note = 2'-O-methylguanosine-3'-phosphate
  modified_base 4: mod_base = OTHER; note = 2'-O-methylguanosine-3'-phosphate
  modified_base 5: mod_base = OTHER; note = 2'-O-methyluridine-3'-phosphate
  modified_base 6: mod_base = OTHER; note = 2'-O-methylcytidine-3'-phosphate
  modified_base 7: mod_base = OTHER; note = 2'-fluoroadenosine-3'-phosphate
  modified_base 8: mod_base = OTHER; note = 2'-O-methylguanosine-3'-phosphate
  modified_base 9: mod_base = OTHER; note = 2'-fluorocytidine-3'-phosphate
  modified_base 10: mod_base = OTHER; note = 2'-fluoroadenosine-3'-phosphate
  modified_base 11: mod_base = OTHER; note = 2'-fluorouridine-3'-phosphate
  modified_base 12: mod_base = OTHER; note = 2'-O-methylguanosine-3'-phosphate
  modified_base 13: mod_base = OTHER; note = 2'-O-methylcytidine-3'-phosphate
  modified_base 14: mod_base = OTHER; note = 2'-O-methylcytidine-3'-phosphate
  modified_base 15: mod_base = OTHER; note = 2'-O-methyladenosine-3'-phosphate
  modified_base 16: mod_base = OTHER; note = 2'-O-methyladenosine-3'-phosphate
  modified_base 17: mod_base = OTHER; note = 2'-O-methyluridine-3'-phosphate
  modified_base 18: mod_base = OTHER; note = 2'-O-methyladenosine-3'-phosphate
  modified_base 19: mod_base = OTHER; note = 2'-O-methyluridine-3'-phosphate
  modified_base 20: mod_base = OTHER; note = 2'-O-methylguanosine-3'-phosphate
  modified_base 21: mod_base = OTHER; note 2'-O-methyluridine-3'-phosphate-N-[tris(GalNAc-alkyl)-amido decanoyl)]-4-hydroxyprolinol (Hyp-(GalNAc-alkyl)3)
agggtcagcatgccaatatgt

SEQ ID NO: 2783 - RNA, 23 nt, synthetic construct
  source 1..23: mol_type = other RNA
  modified_base 1: mod_base = OTHER; note = 2'-O-methyladenosine-3'- phosphorothioate
  modified_base 2: mod_base = OTHER; note = 2'-fluorocytidine-3'-phosphorothioate
  modified_base 3: mod_base = OTHER; note = 2'-O-methyladenosine-3'-phosphate
  modified_base 4: mod_base = OTHER; note = 2'-O-methyluridine-3'-phosphate
  modified_base 5: mod_base = OTHER; note = 2'-O-methyladenosine-3'-phosphate
  modified_base 6: mod_base = OTHER; note = 2'-fluorouridine-3'-phosphate
  modified_base 7: mod_base = OTHER; note = 2'-O-methyluridine-3'-phosphate
  modified_base 8: mod_base = OTHER; note = 2'-fluoroguanosine-3'-phosphate
  modified_base 9: mod_base = OTHER; note = 2'-fluoroguanosine-3'-phosphate
  modified_base 10: mod_base = OTHER; note = 2'-O-methylcytidine-3'-phosphate
  modified_base 11: mod_base = OTHER; note = 2'-O-methyladenosine-3'-phosphate
  modified_base 12: mod_base = OTHER; note = 2'-O-methyluridine-3'-phosphate
  modified_base 13: mod_base = OTHER; note = 2'-O-methylguanosine-3'-phosphate
  modified_base 14: mod_base = OTHER; note = 2'-fluorocytidine-3'-phosphate
  modified_base 15: mod_base = OTHER; note = 2'-O-methyluridine-3'-phosphate
  modified_base 16: mod_base = OTHER; note = 2'-fluoroguanosine-3'-phosphate
  modified_base 17: mod_base = OTHER; note = 2'-O-methyladenosine-3'-phosphate
  modified_base 18: mod_base = OTHER; note = 2'-O-methylcytidine-3'-phosphate
  modified_base 19: mod_base = OTHER; note = 2'-O-methylcytidine-3'-phosphate
  modified_base 20: mod_base = OTHER; note = 2'-O-methylcytidine-3'-phosphate
  modified_base 21: mod_base = OTHER; note = 2'-O-methyluridine-3'-phosphorothioate
  modified_base 22: mod_base = OTHER; note = 2'-O-methylcytidine-3'- phosphorothioate
  modified_base 23: mod_base = OTHER; note = 2'-O-methyluridine-3'-phosphate
acatattggcatgctgaccctct

SEQ ID NO: 2784 - RNA, 21 nt, synthetic construct
  source 1..21: mol_type = other RNA
  modified_base 1: mod_base = OTHER; note = 2'-O-methylguanosine-3'- phosphorothioate
  modified_base 2: mod_base = OTHER; note = 2'-O-methyladenosine-3'- phosphorothioate
  modified_base 3: mod_base = OTHER; note = 2'-O-methylguanosine-3'-phosphate
  modified_base 4: mod_base = OTHER; note = 2'-O-methylguanosine-3'-phosphate
  modified_base 5: mod_base = OTHER; note = 2'-O-methylguanosine-3'-phosphate
  modified_base 6: mod_base = OTHER; note = 2'-O-methyluridine-3'-phosphate
  modified_base 7: mod_base = OTHER; note = 2'-fluorocytidine-3'-phosphate
  modified_base 8: mod_base = OTHER; note = 2'-O-methyladenosine-3'-phosphate
  modified_base 9: mod_base = OTHER; note = 2'-fluoroguanosine-3'-phosphate
  modified_base 10: mod_base = OTHER; note = 2'-fluorocytidine-3'-phosphate
  modified_base 11: mod_base = OTHER; note = 2'-fluoroadenosine-3'-phosphate
  modified_base 12: mod_base = OTHER; note = 2'-O-methyluridine-3'-phosphate
  modified_base 13: mod_base = OTHER; note = 2'-O-methylguanosine-3'-phosphate
  modified_base 14: mod_base = OTHER; note = 2'-O-methylcytidine-3'-phosphate
  modified_base 15: mod_base = OTHER; note = 2'-O-methylcytidine-3'-phosphate
  modified_base 16: mod_base = OTHER; note = 2'-O-methyladenosine-3'-phosphate
  modified_base 17: mod_base = OTHER; note = 2'-O-methyladenosine-3'-phosphate
  modified_base 18: mod_base = OTHER; note = 2'-O-methyluridine-3'-phosphate
  modified_base 19: mod_base = OTHER; note = 2'-O-methyladenosine-3'-phosphate
  modified_base 20: mod_base = OTHER; note = 2'-O-methyluridine-3'-phosphate
  modified_base 21: mod_base = OTHER; note 2'-O-methylguanosine-3'-phosphate-N-[tris(GalNAc-alkyl)-ami dodecanoyl)]-4-hydroxyprolinol (Hyp-(GalNAc-alkyl)3)
gagggtcagcatgccaatatg

SEQ ID NO: 2785 - RNA, 23 nt, synthetic construct
  source 1..23: mol_type = other RNA
  modified_base 1: mod_base = OTHER; note = 2'-O-methylcytidine-3'- phosphorothioate
  modified_base 2: mod_base = OTHER; note = 2'-fluoroadenosine-3'-phosphorothioate
  modified_base 3: mod_base = OTHER; note = 2'-O-methyluridine-3'-phosphate
  modified_base 4: mod_base = OTHER; note = 2'-O-methyladenosine-3'-phosphate
  modified_base 5: mod_base = OTHER; note = 2'-O-methyluridine-3'-phosphate
  modified_base 6: mod_base = OTHER; note = 2'-fluorouridine-3'-phosphate
  modified_base 7: mod_base = OTHER; note = 2'-O-methylguanosine-3'-phosphate
  modified_base 8: mod_base = OTHER; note = 2'-fluoroguanosine-3'-phosphate
  modified_base 9: mod_base = OTHER; note = 2'-fluorocytidine-3'-phosphate
  modified_base 10: mod_base = OTHER; note = 2'-O-methyladenosine-3'-phosphate
  modified_base 11: mod_base = OTHER; note = 2'-O-methyluridine-3'-phosphate
  modified_base 12: mod_base = OTHER; note = 2'-O-methylguanosine-3'-phosphate
  modified_base 13: mod_base = OTHER; note = 2'-O-methylcytidine-3'-phosphate
  modified_base 14: mod_base = OTHER; note = 2'-fluorouridine-3'-phosphate
  modified_base 15: mod_base = OTHER; note = 2'-O-methylguanosine-3'-phosphate
  modified_base 16: mod_base = OTHER; note = 2'-fluoroadenosine-3'-phosphate
  modified_base 17: mod_base = OTHER; note = 2'-O-methylcytidine-3'-phosphate
  modified_base 18: mod_base = OTHER; note = 2'-O-methylcytidine-3'-phosphate
  modified_base 19: mod_base = OTHER; note = 2'-O-methylcytidine-3'-phosphate
  modified_base 20: mod_base = OTHER; note = 2'-O-methyluridine-3'-phosphate
  modified_base 21: mod_base = OTHER; note = 2'-O-methylcytidine-3'- phosphorothioate
  modified_base 22: mod_base = OTHER; note = 2'-O-methyluridine-3'-phosphorothioate
  modified_base 23: mod_base = OTHER; note = 2'-O-methylguanosine-3'-phosphate
catattggcatgctgaccctctg

SEQ ID NO: 2786 - RNA, 21 nt, synthetic construct
  source 1..21: mol_type = other RNA
  modified_base 1: mod_base = OTHER; note = 2'-O-methylguanosine-3'- phosphorothioate
  modified_base 2: mod_base = OTHER; note = 2'-O-methylcytidine-3'- phosphorothioate
  modified_base 3: mod_base = OTHER; note = 2'-O-methyladenosine-3'-phosphate
  modified_base 4: mod_base = OTHER; note = 2'-O-methyluridine-3'-phosphate
  modified_base 5: mod_base = OTHER; note = 2'-O-methyladenosine-3'-phosphate
  modified_base 6: mod_base = OTHER; note = 2'-O-methyluridine-3'-phosphate
  modified_base 7: mod_base = OTHER; note = 2'-fluoroguanosine-3'-phosphate
  modified_base 8: mod_base = OTHER; note = 2'-O-methyluridine-3'-phosphate
  modified_base 9: mod_base = OTHER; note = 2'-fluoroguanosine-3'-phosphate
  modified_base 10: mod_base = OTHER; note = 2'-fluoroguanosine-3'-phosphate
  modified_base 11: mod_base = OTHER; note = 2'-fluorocytidine-3'-phosphate
  modified_base 12: mod_base = OTHER; note = 2'-O-methyluridine-3'-phosphate
  modified_base 13: mod_base = OTHER; note = 2'-O-methyladenosine-3'-phosphate
  modified_base 14: mod_base = OTHER; note = 2'-O-methyladenosine-3'-phosphate
  modified_base 15: mod_base = OTHER; note = 2'-O-methyladenosine-3'-phosphate
  modified_base 16: mod_base = OTHER; note = 2'-O-methylguanosine-3'-phosphate
  modified_base 17: mod_base = OTHER; note = 2'-O-methylcytidine-3'-phosphate
  modified_base 18: mod_base = OTHER; note = 2'-O-methyladenosine-3'-phosphate
  modified_base 19: mod_base = OTHER; note = 2'-O-methyladenosine-3'-phosphate
  modified_base 20: mod_base = OTHER; note = 2'-O-methyluridine-3'-phosphate
  modified_base 21: mod_base = OTHER; note 2'-O-methyladenosine-3'-phosphate-N-[tris(GalNAc-alkyl)-ami dodecanoyl)]-4-hydroxyprolinol (Hyp-(GalNAc-alkyl)3)
gcatatgtggctaaagcaata

SEQ ID NO: 2787 - RNA, 23 nt, synthetic construct
  source 1..23: mol_type = other RNA
  modified_base 1: mod_base = OTHER; note = 2'-O-methyluridine-3'-phosphorothioate
  modified_base 2: mod_base = OTHER; note = 2'-fluoroadenosine-3'-phosphorothioate
  modified_base 3: mod_base = OTHER; note = 2'-O-methyluridine-3'-phosphate
  modified_base 4: mod_base = OTHER; note = 2'-O-methyluridine-3'-phosphate
  modified_base 5: mod_base = OTHER; note = 2'-O-methylguanosine-3'-phosphate
  modified_base 6: mod_base = OTHER; note = 2'-fluorocytidine-3'-phosphate
  modified_base 7: mod_base = OTHER; note = 2'-O-methyluridine-3'-phosphate
  modified_base 8: mod_base = OTHER; note = 2'-fluorouridine-3'-phosphate
  modified_base 9: mod_base = OTHER; note = 2'-fluorouridine-3'-phosphate
  modified_base 10: mod_base = OTHER; note = 2'-O-methyladenosine-3'-phosphate
  modified_base 11: mod_base = OTHER; note = 2'-O-methylguanosine-3'-phosphate
  modified_base 12: mod_base = OTHER; note = 2'-O-methylcytidine-3'-phosphate
  modified_base 13: mod_base = OTHER; note = 2'-O-methylcytidine-3'-phosphate
  modified_base 14: mod_base = OTHER; note = 2'-fluoroadenosine-3'-phosphate
  modified_base 15: mod_base = OTHER; note = 2'-O-methylcytidine-3'-phosphate
  modified_base 16: mod_base = OTHER; note = 2'-fluoroadenosine-3'-phosphate
  modified_base 17: mod_base = OTHER; note = 2'-O-methyluridine-3'-phosphate
  modified_base 18: mod_base = OTHER; note = 2'-O-methyladenosine-3'-phosphate
  modified_base 19: mod_base = OTHER; note = 2'-O-methyluridine-3'-phosphate
  modified_base 20: mod_base = OTHER; note = 2'-O-methylguanosine-3'-phosphate
  modified_base 21: mod_base = OTHER; note = 2'-O-methylcytidine-3'- phosphorothioate
  modified_base 22: mod_base = OTHER; note = 2'-O-methyladenosine-3'- phosphorothioate
  modified_base 23: mod_base = OTHER; note = 2'-O-methylguanosine-3'-phosphate
tattgctttagccacatatgcag

SEQ ID NO: 2788 - RNA, 21 nt, synthetic construct
  source 1..21: mol_type = other RNA
  modified_base 1: mod_base = OTHER; note = 2'-O-methylcytidine-3'- phosphorothioate
  modified_base 2: mod_base = OTHER; note = 2'-O-methyladenosine-3'- phosphorothioate
  modified_base 3: mod_base = OTHER; note = 2'-O-methyluridine-3'-phosphate
  modified_base 4: mod_base = OTHER; note = 2'-O-methyladenosine-3'-phosphate
  modified_base 5: mod_base = OTHER; note = 2'-O-methyluridine-3'-phosphate
  modified_base 6: mod_base = OTHER; note = 2'-O-methylguanosine-3'-phosphate
  modified_base 7: mod_base = OTHER; note = 2'-fluorouridine-3'-phosphate
  modified_base 8: mod_base = OTHER; note = 2'-O-methylguanosine-3'-phosphate
  modified_base 9: mod_base = OTHER; note = 2'-fluoroguanosine-3'-phosphate
  modified_base 10: mod_base = OTHER; note = 2'-fluorocytidine-3'-phosphate
  modified_base 11: mod_base = OTHER; note = 2'-fluorouridine-3'-phosphate
  modified_base 12: mod_base = OTHER; note = 2'-O-methyladenosine-3'-phosphate
  modified_base 13: mod_base = OTHER; note = 2'-O-methyladenosine-3'-phosphate
  modified_base 14: mod_base = OTHER; note = 2'-O-methyladenosine-3'-phosphate
  modified_base 15: mod_base = OTHER; note = 2'-O-methylguanosine-3'-phosphate
  modified_base 16: mod_base = OTHER; note = 2'-O-methylcytidine-3'-phosphate
  modified_base 17: mod_base = OTHER; note = 2'-O-methyladenosine-3'-phosphate
  modified_base 18: mod_base = OTHER; note = 2'-O-methyladenosine-3'-phosphate
  modified_base 19: mod_base = OTHER; note = 2'-O-methyluridine-3'-phosphate
  modified_base 20: mod_base = OTHER; note = 2'-O-methyladenosine-3'-phosphate
  modified_base 21: mod_base = OTHER; note 2'-O-methylguanosine-3'-phosphate-N-[tris(GalNAc-alkyl)-ami dodecanoyl)]-4-hydroxyprolinol (Hyp-(GalNAc-alkyl)3)
catatgtggctaaagcaatag

SEQ ID NO: 2789 - RNA, 23 nt, synthetic construct
  source 1..23: mol_type = other RNA
  modified_base 1: mod_base = OTHER; note = 2'-O-methylcytidine-3'- phosphorothioate
  modified_base 2: mod_base = OTHER; note = 2'-fluorouridine -3'-phosphorothioate
  modified_base 3: mod_base = OTHER; note = 2'-O-methyladenosine-3'-phosphate
  modified_base 4: mod_base = OTHER; note = 2'-O-methyluridine-3'-phosphate
  modified_base 5: mod_base = OTHER; note = 2'-O-methyluridine-3'-phosphate
  modified_base 6: mod_base = OTHER; note = 2'-fluoroguanosine-3'-phosphate
  modified_base 7: mod_base = OTHER; note = 2'-O-methylcytidine-3'-phosphate
  modified_base 8: mod_base = OTHER; note = 2'-fluorouridine-3'-phosphate
  modified_base 9: mod_base = OTHER; note = 2'-fluorouridine-3'-phosphate
  modified_base 10: mod_base = OTHER; note = 2'-O-methyluridine-3'-phosphate
  modified_base 11: mod_base = OTHER; note = 2'-O-methyladenosine-3'-phosphate
  modified_base 12: mod_base = OTHER; note = 2'-O-methylguanosine-3'-phosphate
  modified_base 13: mod_base = OTHER; note = 2'-O-methylcytidine-3'-phosphate
  modified_base 14: mod_base = OTHER; note = 2'-fluorocytidine-3'-phosphate
  modified_base 15: mod_base = OTHER; note = 2'-O-methyladenosine-3'-phosphate
  modified_base 16: mod_base = OTHER; note = 2'-fluorocytidine-3'-phosphate
  modified_base 17: mod_base = OTHER; note = 2'-O-methyladenosine-3'-phosphate
  modified_base 18: mod_base = OTHER; note = 2'-O-methyluridine-3'-phosphate
  modified_base 19: mod_base = OTHER; note = 2'-O-methyladenosine-3'-phosphate
  modified_base 20: mod_base = OTHER; note = 2'-O-methyluridine-3'-phosphate
  modified_base 21: mod_base = OTHER; note = 2'-O-methylguanosine-3'- phosphorothioate
  modified_base 22: mod_base = OTHER; note = 2'-O-methylcytidine-3'- phosphorothioate
  modified_base 23: mod_base = OTHER; note = 2'-O-methyladenosine-3'-phosphate
ctattgctttagccacatatgca

SEQ ID NO: 2790 - RNA, 21 nt, synthetic construct
  source 1..21: mol_type = other RNA
  modified_base 1: mod_base = OTHER; note = 2'-O-methyluridine-3'-phosphorothioate
  modified_base 2: mod_base = OTHER; note = 2'-O-methylguanosine-3'- phosphorothioate
  modified_base 3: mod_base = OTHER; note = 2'-O-methylcytidine-3'-phosphate
  modified_base 4: mod_base = OTHER; note = 2'-O-methyluridine-3'-phosphate
  modified_base 5: mod_base = OTHER; note = 2'-O-methylguanosine-3'-phosphate
  modified_base 6: mod_base = OTHER; note = 2'-O-methylcytidine-3'-phosphate
  modified_base 7: mod_base = OTHER; note = 2'-fluoroadenosine-3'-phosphate
  modified_base 8: mod_base = OTHER; note = 2'-O-methyluridine-3'-phosphate
  modified_base 9: mod_base = OTHER; note = 2'-fluoroadenosine-3'-phosphate
  modified_base 10: mod_base = OTHER; note = 2'-fluorouridine-3'-phosphate
  modified_base 11: mod_base = OTHER; note = 2'-fluoroguanosine-3'-phosphate
  modified_base 12: mod_base = OTHER; note = 2'-O-methyluridine-3'-phosphate
  modified_base 13: mod_base = OTHER; note = 2'-O-methylguanosine-3'-phosphate
  modified_base 14: mod_base = OTHER; note = 2'-O-methylguanosine-3'-phosphate
  modified_base 15: mod_base = OTHER; note = 2'-O-methylcytidine-3'-phosphate
  modified_base 16: mod_base = OTHER; note = 2'-O-methyluridine-3'-phosphate
  modified_base 17: mod_base = OTHER; note = 2'-O-methyladenosine-3'-phosphate
  modified_base 18: mod_base = OTHER; note = 2'-O-methyladenosine-3'-phosphate
  modified_base 19: mod_base = OTHER; note = 2'-O-methyladenosine-3'-phosphate
  modified_base 20: mod_base = OTHER; note = 2'-O-methylguanosine-3'-phosphate
  modified_base 21: mod_base = OTHER; note 2'-O-methylcytidine-3'-phosphate-N-[tris(GalNAc-alkyl)-amid odecanoyl)]-4-hydroxyprolinol (Hyp-(GalNAc-alkyl)3)
tgctgcatatgtggctaaagc

SEQ ID NO: 2791 - RNA, 23 nt, synthetic construct
  source 1..23: mol_type = other RNA
  modified_base 1: mod_base = OTHER; note = 2'-O-methylguanosine-3'- phosphorothioate
  modified_base 2: mod_base = OTHER; note = 2'-fluorocytidine-3'-phosphorothioate
  modified_base 3: mod_base = OTHER; note = 2'-O-methyluridine-3'-phosphate
  modified_base 4: mod_base = OTHER; note = 2'-O-methyluridine-3'-phosphate
  modified_base 5: mod_base = OTHER; note = 2'-O-methyluridine-3'-phosphate
  modified_base 6: mod_base = OTHER; note = 2'-fluoroadenosine-3'-phosphate
  modified_base 7: mod_base = OTHER; note = 2'-O-methylguanosine-3'-phosphate
  modified_base 8: mod_base = OTHER; note = 2'-fluorocytidine-3'-phosphate
  modified_base 9: mod_base = OTHER; note = 2'-fluorocytidine-3'-phosphate
  modified_base 10: mod_base = OTHER; note = 2'-O-methyladenosine-3'-phosphate
  modified_base 11: mod_base = OTHER; note = 2'-O-methylcytidine-3'-phosphate
  modified_base 12: mod_base = OTHER; note = 2'-O-methyladenosine-3'-phosphate
  modified_base 13: mod_base = OTHER; note = 2'-O-methyluridine-3'-phosphate
  modified_base 14: mod_base = OTHER; note = 2'-fluoroadenosine-3'-phosphate
  modified_base 15: mod_base = OTHER; note = 2'-O-methyluridine-3'-phosphate
  modified_base 16: mod_base = OTHER; note = 2'-fluoroguanosine-3'-phosphate
  modified_base 17: mod_base = OTHER; note = 2'-O-methylcytidine-3'-phosphate
  modified_base 18: mod_base = OTHER; note = 2'-O-methyladenosine-3'-phosphate
  modified_base 19: mod_base = OTHER; note = 2'-O-methylguanosine-3'-phosphate
  modified_base 20: mod_base = OTHER; note = 2'-O-methylcytidine-3'-phosphate
  modified_base 21: mod_base = OTHER; note = 2'-O-methyladenosine-3'- phosphorothioate
  modified_base 22: mod_base = OTHER; note = 2'-O-methyladenosine-3'- phosphorothioate
  modified_base 23: mod_base = OTHER; note = 2'-O-methylguanosine-3'-phosphate
gctttagccacatatgcagcaag

SEQ ID NO: 2792 - RNA, 21 nt, synthetic construct
  source 1..21: mol_type = other RNA
  modified_base 1: mod_base = OTHER; note = 2'-O-methyluridine-3'-phosphorothioate
  modified_base 2: mod_base = OTHER; note = 2'-O-methyluridine-3'-phosphorothioate
  modified_base 3: mod_base = OTHER; note = 2'-O-methylguanosine-3'-phosphate
  modified_base 4: mod_base = OTHER; note = 2'-O-methylcytidine-3'-phosphate
  modified_base 5: mod_base = OTHER; note = 2'-O-methyluridine-3'-phosphate
  modified_base 6: mod_base = OTHER; note = 2'-O-methylguanosine-3'-phosphate
  modified_base 7: mod_base = OTHER; note = 2'-fluorocytidine-3'-phosphate
  modified_base 8: mod_base = OTHER; note = 2'-O-methyladenosine-3'-phosphate
  modified_base 9: mod_base = OTHER; note = 2'-fluorouridine-3'-phosphate
  modified_base 10: mod_base = OTHER; note = 2'-fluoroadenosine-3'-phosphate
  modified_base 11: mod_base = OTHER; note = 2'-fluorouridine-3'-phosphate
  modified_base 12: mod_base = OTHER; note = 2'-O-methylguanosine-3'-phosphate
  modified_base 13: mod_base = OTHER; note = 2'-O-methyluridine-3'-phosphate
  modified_base 14: mod_base = OTHER; note = 2'-O-methylguanosine-3'-phosphate
  modified_base 15: mod_base = OTHER; note = 2'-O-methylguanosine-3'-phosphate
  modified_base 16: mod_base = OTHER; note = 2'-O-methylcytidine-3'-phosphate
  modified_base 17: mod_base = OTHER; note = 2'-O-methyluridine-3'-phosphate
  modified_base 18: mod_base = OTHER; note = 2'-O-methyladenosine-3'-phosphate
  modified_base 19: mod_base = OTHER; note = 2'-O-methyladenosine-3'-phosphate
  modified_base 20: mod_base = OTHER; note = 2'-O-methyladenosine-3'-phosphate
  modified_base 21: mod_base = OTHER; note 2'-O-methylguanosine-3'-phosphate-N-[tris(GalNAc-alkyl)-ami dodecanoyl)]-4-hydroxyprolinol (Hyp-(GalNAc-alkyl)3)
ttgctgcatatgtggctaaag

SEQ ID NO: 2793 - RNA, 23 nt, synthetic construct
  source 1..23: mol_type = other RNA
  modified_base 1: mod_base = OTHER; note = 2'-O-methylcytidine-3'- phosphorothioate
  modified_base 2: mod_base = OTHER; note = 2'-fluorouridine -3'-phosphorothioate
  modified_base 3: mod_base = OTHER; note = 2'-O-methyluridine-3'-phosphate
  modified_base 4: mod_base = OTHER; note = 2'-O-methyluridine-3'-phosphate
  modified_base 5: mod_base = OTHER; note = 2'-O-methyladenosine-3'-phosphate
  modified_base 6: mod_base = OTHER; note = 2'-fluoroguanosine-3'-phosphate
  modified_base 7: mod_base = OTHER; note = 2'-O-methylcytidine-3'-phosphate
  modified_base 8: mod_base = OTHER; note = 2'-fluorocytidine-3'-phosphate
  modified_base 9: mod_base = OTHER; note = 2'-fluoroadenosine-3'-phosphate
  modified_base 10: mod_base = OTHER; note = 2'-O-methylcytidine-3'-phosphate
  modified_base 11: mod_base = OTHER; note = 2'-O-methyladenosine-3'-phosphate
  modified_base 12: mod_base = OTHER; note = 2'-O-methyluridine-3'-phosphate
  modified_base 13: mod_base = OTHER; note = 2'-O-methyladenosine-3'-phosphate
  modified_base 14: mod_base = OTHER; note = 2'-fluorouridine-3'-phosphate
  modified_base 15: mod_base = OTHER; note = 2'-O-methylguanosine-3'-phosphate
  modified_base 16: mod_base = OTHER; note = 2'-fluorocytidine-3'-phosphate
  modified_base 17: mod_base = OTHER; note = 2'-O-methyladenosine-3'-phosphate
  modified_base 18: mod_base = OTHER; note = 2'-O-methylguanosine-3'-phosphate
  modified_base 19: mod_base = OTHER; note = 2'-O-methylcytidine-3'-phosphate
  modified_base 20: mod_base = OTHER; note = 2'-O-methyladenosine-3'-phosphate
  modified_base 21: mod_base = OTHER; note = 2'-O-methyladenosine-3'- phosphorothioate
  modified_base 22: mod_base = OTHER; note = 2'-O-methylguanosine-3'- phosphorothioate
  modified_base 23: mod_base = OTHER; note = 2'-O-methyluridine-3'-phosphate
ctttagccacatatgcagcaagt

SEQ ID NO: 2794 - RNA, 21 nt, synthetic construct
  source 1..21: mol_type = other RNA
  modified_base 1: mod_base = OTHER; note = 2'-O-methyladenosine-3'- phosphorothioate
  modified_base 2: mod_base = OTHER; note = 2'-O-methyladenosine-3'- phosphorothioate
  modified_base 3: mod_base = OTHER; note = 2'-O-methyladenosine-3'-phosphate
  modified_base 4: mod_base = OTHER; note = 2'-O-methyluridine-3'-phosphate
  modified_base 5: mod_base = OTHER; note = 2'-O-methylguanosine-3'-phosphate
  modified_base 6: mod_base = OTHER; note = 2'-O-methyladenosine-3'-phosphate
  modified_base 7: mod_base = OTHER; note = 2'-fluorouridine-3'-phosphate
  modified_base 8: mod_base = OTHER; note = 2'-O-methylguanosine-3'-phosphate
  modified_base 9: mod_base = OTHER; note = 2'-fluoroadenosine-3'-phosphate
  modified_base 10: mod_base = OTHER; note = 2'-fluoroadenosine-3'-phosphate
  modified_base 11: mod_base = OTHER; note = 2'-fluoroguanosine-3'-phosphate
  modified_base 12: mod_base = OTHER; note = 2'-O-methyladenosine-3'-phosphate
  modified_base 13: mod_base = OTHER; note = 2'-O-methyladenosine-3'-phosphate
  modified_base 14: mod_base = OTHER; note = 2'-O-methyladenosine-3'-phosphate
  modified_base 15: mod_base = OTHER; note = 2'-O-methylcytidine-3'-phosphate
  modified_base 16: mod_base = OTHER; note = 2'-O-methyluridine-3'-phosphate
  modified_base 17: mod_base = OTHER; note = 2'-O-methyluridine-3'-phosphate
  modified_base 18: mod_base = OTHER; note = 2'-O-methyluridine-3'-phosphate
  modified_base 19: mod_base = OTHER; note = 2'-O-methylguanosine-3'-phosphate
  modified_base 20: mod_base = OTHER; note = 2'-O-methylguanosine-3'-phosphate
  modified_base 21: mod_base = OTHER; note 2'-O-methylcytidine-3'-phosphate-N-[tris(GalNAc-alkyl)-amid odecanoyl)]-4-hydroxyprolinol (Hyp-(GalNAc-alkyl)3)
aaatgatgaagaaactttggc

SEQ ID NO: 2795 - RNA, 23 nt, synthetic construct
  source 1..23: mol_type = other RNA
  modified_base 1: mod_base = OTHER; note = 2'-O-methylguanosine-3'- phosphorothioate
  modified_base 2: mod_base = OTHER; note = 2'-fluorocytidine-3'-phosphorothioate
  modified_base 3: mod_base = OTHER; note = 2'-O-methylcytidine-3'-phosphate
  modified_base 4: mod_base = OTHER; note = 2'-O-methyladenosine-3'-phosphate
  modified_base 5: mod_base = OTHER; note = 2'-O-methyladenosine-3'-phosphate
  modified_base 6: mod_base = OTHER; note = 2'-fluoroadenosine-3'-phosphate
  modified_base 7: mod_base = OTHER; note = 2'-O-methylguanosine-3'-phosphate
  modified_base 8: mod_base = OTHER; note = 2'-fluorouridine-3'-phosphate
  modified_base 9: mod_base = OTHER; note = 2'-fluorouridine-3'-phosphate
  modified_base 10: mod_base = OTHER; note = 2'-O-methyluridine-3'-phosphate
  modified_base 11: mod_base = OTHER; note = 2'-O-methylcytidine-3'-phosphate
  modified_base 12: mod_base = OTHER; note = 2'-O-methyluridine-3'-phosphate
  modified_base 13: mod_base = OTHER; note = 2'-O-methyluridine-3'-phosphate
  modified_base 14: mod_base = OTHER; note = 2'-fluorocytidine-3'-phosphate
  modified_base 15: mod_base = OTHER; note = 2'-O-methyladenosine-3'-phosphate
  modified_base 16: mod_base = OTHER; note = 2'-fluorouridine-3'-phosphate
  modified_base 17: mod_base = OTHER; note = 2'-O-methylcytidine-3'-phosphate
  modified_base 18: mod_base = OTHER; note = 2'-O-methyladenosine-3'-phosphate
  modified_base 19: mod_base = OTHER; note = 2'-O-methyluridine-3'-phosphate
  modified_base 20: mod_base = OTHER; note = 2'-O-methyluridine-3'-phosphate
  modified_base 21: mod_base = OTHER; note = 2'-O-methyluridine-3'-phosphorothioate
  modified_base 22: mod_base = OTHER; note = 2'-O-methylguanosine-3'- phosphorothioate
  modified_base 23: mod_base = OTHER; note = 2'-O-methylcytidine-3'-phosphate
gccaaagtttcttcatcatttgc

SEQ ID NO: 2796 - RNA, 21 nt, synthetic construct
  source 1..21: mol_type = other RNA
  modified_base 1: mod_base = OTHER; note = 2'-O-methyladenosine-3'- phosphorothioate
  modified_base 2: mod_base = OTHER; note = 2'-O-methyladenosine-3'- phosphorothioate
  modified_base 3: mod_base = OTHER; note = 2'-O-methyluridine-3'-phosphate
  modified_base 4: mod_base = OTHER; note = 2'-O-methylguanosine-3'-phosphate
  modified_base 5: mod_base = OTHER; note = 2'-O-methyladenosine-3'-phosphate
  modified_base 6: mod_base = OTHER; note = 2'-O-methyluridine-3'-phosphate
  modified_base 7: mod_base = OTHER; note = 2'-fluoroguanosine-3'-phosphate
  modified_base 8: mod_base = OTHER; note = 2'-O-methyladenosine-3'-phosphate
  modified_base 9: mod_base = OTHER; note = 2'-fluoroadenosine-3'-phosphate
  modified_base 10: mod_base = OTHER; note = 2'-fluoroguanosine-3'-phosphate
  modified_base 11: mod_base = OTHER; note = 2'-fluoroadenosine-3'-phosphate
  modified_base 12: mod_base = OTHER; note = 2'-O-methyladenosine-3'-phosphate
  modified_base 13: mod_base = OTHER; note = 2'-O-methyladenosine-3'-phosphate
  modified_base 14: mod_base = OTHER; note = 2'-O-methylcytidine-3'-phosphate
  modified_base 15: mod_base = OTHER; note = 2'-O-methyluridine-3'-phosphate
  modified_base 16: mod_base = OTHER; note = 2'-O-methyluridine-3'-phosphate
  modified_base 17: mod_base = OTHER; note = 2'-O-methyluridine-3'-phosphate
  modified_base 18: mod_base = OTHER; note = 2'-O-methylguanosine-3'-phosphate
  modified_base 19: mod_base = OTHER; note = 2'-O-methylguanosine-3'-phosphate
  modified_base 20: mod_base = OTHER; note = 2'-O-methylcytidine-3'-phosphate
  modified_base 21: mod_base = OTHER; note 2'-O-methyluridine-3'-phosphate-N-[tris(GalNAc-alkyl)-amido decanoyl)]-4-hydroxyprolinol (Hyp-(GalNAc-alkyl)3)
aatgatgaagaaactttggct

SEQ ID NO: 2797 - RNA, 23 nt, synthetic construct
  source 1..23: mol_type = other RNA
  modified_base 1: mod_base = OTHER; note = 2'-O-methyladenosine-3'- phosphorothioate
  modified_base 2: mod_base = OTHER; note = 2'-fluoroguanosine-3'-phosphorothioate
  modified_base 3: mod_base = OTHER; note = 2'-O-methylcytidine-3'-phosphate
  modified_base 4: mod_base = OTHER; note = 2'-O-methylcytidine-3'-phosphate
  modified_base 5: mod_base = OTHER; note = 2'-O-methyladenosine-3'-phosphate
  modified_base 6: mod_base = OTHER; note = 2'-fluoroadenosine-3'-phosphate
  modified_base 7: mod_base = OTHER; note = 2'-O-methyladenosine-3'-phosphate
  modified_base 8: mod_base = OTHER; note = 2'-fluoroguanosine-3'-phosphate
  modified_base 9: mod_base = OTHER; note = 2'-fluorouridine-3'-phosphate
  modified_base 10: mod_base = OTHER; note = 2'-O-methyluridine-3'-phosphate
  modified_base 11: mod_base = OTHER; note = 2'-O-methyluridine-3'-phosphate
  modified_base 12: mod_base = OTHER; note = 2'-O-methylcytidine-3'-phosphate
  modified_base 13: mod_base = OTHER; note = 2'-O-methyluridine-3'-phosphate
  modified_base 14: mod_base = OTHER; note = 2'-fluorouridine-3'-phosphate
  modified_base 15: mod_base = OTHER; note = 2'-O-methylcytidine-3'-phosphate
  modified_base 16: mod_base = OTHER; note = 2'-fluoroadenosine-3'-phosphate
  modified_base 17: mod_base = OTHER; note = 2'-O-methyluridine-3'-phosphate
  modified_base 18: mod_base = OTHER; note = 2'-O-methylcytidine-3'-phosphate
  modified_base 19: mod_base = OTHER; note = 2'-O-methyladenosine-3'-phosphate
  modified_base 20: mod_base = OTHER; note = 2'-O-methyluridine-3'-phosphate
  modified_base 21: mod_base = OTHER; note = 2'-O-methyluridine-3'-phosphorothioate
  modified_base 22: mod_base = OTHER; note = 2'-O-methyluridine-3'-phosphorothioate
  modified_base 23: mod_base = OTHER; note = 2'-O-methylguanosine-3'-phosphate
agccaaagtttcttcatcatttg

SEQ ID NO: 2798 - RNA, 21 nt, synthetic construct
  source 1..21: mol_type = other RNA
  modified_base 1: mod_base = OTHER; note = 2'-O-methylguanosine-3'- phosphorothioate
  modified_base 2: mod_base = OTHER; note = 2'-O-methylguanosine-3'- phosphorothioate
  modified_base 3: mod_base = OTHER; note = 2'-O-methylguanosine-3'-phosphate
  modified_base 4: mod_base = OTHER; note = 2'-O-methylcytidine-3'-phosphate
  modified_base 5: mod_base = OTHER; note = 2'-O-methyladenosine-3'-phosphate
  modified_base 6: mod_base = OTHER; note = 2'-O-methyladenosine-3'-phosphate
  modified_base 7: mod_base = OTHER; note = 2'-fluoroadenosine-3'-phosphate
  modified_base 8: mod_base = OTHER; note = 2'-O-methyluridine-3'-phosphate
  modified_base 9: mod_base = OTHER; note = 2'-fluoroguanosine-3'-phosphate
  modified_base 10: mod_base = OTHER; note = 2'-fluoroadenosine-3'-phosphate
  modified_base 11: mod_base = OTHER; note = 2'-fluorouridine-3'-phosphate
  modified_base 12: mod_base = OTHER; note = 2'-O-methylguanosine-3'-phosphate
  modified_base 13: mod_base = OTHER; note = 2'-O-methyladenosine-3'-phosphate
  modified_base 14: mod_base = OTHER; note = 2'-O-methyladenosine-3'-phosphate
  modified_base 15: mod_base = OTHER; note = 2'-O-methylguanosine-3'-phosphate
  modified_base 16: mod_base = OTHER; note = 2'-O-methyladenosine-3'-phosphate
  modified_base 17: mod_base = OTHER; note = 2'-O-methyladenosine-3'-phosphate
  modified_base 18: mod_base = OTHER; note = 2'-O-methyladenosine-3'-phosphate
  modified_base 19: mod_base = OTHER; note = 2'-O-methylcytidine-3'-phosphate
  modified_base 20: mod_base = OTHER; note = 2'-O-methyluridine-3'-phosphate
  modified_base 21: mod_base = OTHER; note 2'-O-methyluridine-3'-phosphate-N-[tris(GalNAc-alkyl)-amido decanoyl)]-4-hydroxyprolinol (Hyp-(GalNAc-alkyl)3)
gggcaaatgatgaagaaactt

SEQ ID NO: 2799 - RNA, 23 nt, synthetic construct
  source 1..23: mol_type = other RNA
  modified_base 1: mod_base = OTHER; note = 2'-O-methyladenosine-3'- phosphorothioate
  modified_base 2: mod_base = OTHER; note = 2'-fluoroadenosine-3'-phosphorothioate
  modified_base 3: mod_base = OTHER; note = 2'-O-methylguanosine-3'-phosphate
  modified_base 4: mod_base = OTHER; note = 2'-O-methyluridine-3'-phosphate
  modified_base 5: mod_base = OTHER; note = 2'-O-methyluridine-3'-phosphate
  modified_base 6: mod_base = OTHER; note = 2'-fluorouridine-3'-phosphate
  modified_base 7: mod_base = OTHER; note = 2'-O-methylcytidine-3'-phosphate
  modified_base 8: mod_base = OTHER; note = 2'-fluorouridine-3'-phosphate
  modified_base 9: mod_base = OTHER; note = 2'-fluorouridine-3'-phosphate
  modified_base 10: mod_base = OTHER; note = 2'-O-methylcytidine-3'-phosphate
  modified_base 11: mod_base = OTHER; note = 2'-O-methyladenosine-3'-phosphate
  modified_base 12: mod_base = OTHER; note = 2'-O-methyluridine-3'-phosphate
  modified_base 13: mod_base = OTHER; note = 2'-O-methylcytidine-3'-phosphate
  modified_base 14: mod_base = OTHER; note = 2'-fluoroadenosine-3'-phosphate
  modified_base 15: mod_base = OTHER; note = 2'-O-methyluridine-3'-phosphate
  modified_base 16: mod_base = OTHER; note = 2'-fluorouridine-3'-phosphate
  modified_base 17: mod_base = OTHER; note = 2'-O-methyluridine-3'-phosphate
  modified_base 18: mod_base = OTHER; note = 2'-O-methylguanosine-3'-phosphate
  modified_base 19: mod_base = OTHER; note = 2'-O-methylcytidine-3'-phosphate
  modified_base 20: mod_base = OTHER; note = 2'-O-methylcytidine-3'-phosphate
  modified_base 21: mod_base = OTHER; note = 2'-O-methylcytidine-3'- phosphorothioate
  modified_base 22: mod_base = OTHER; note = 2'-O-methylcytidine-3'- phosphorothioate
  modified_base 23: mod_base = OTHER; note = 2'-O-methyladenosine-3'-phosphate
aagtttcttcatcatttgcccca

SEQ ID NO: 2800 - RNA, 21 nt, synthetic construct
  source 1..21: mol_type = other RNA
  modified_base 1: mod_base = OTHER; note = 2'-O-methylguanosine-3'- phosphorothioate
  modified_base 2: mod_base = OTHER; note = 2'-O-methylguanosine-3'- phosphorothioate
  modified_base 3: mod_base = OTHER; note = 2'-O-methylguanosine-3'-phosphate
  modified_base 4: mod_base = OTHER; note = 2'-O-methylguanosine-3'-phosphate
  modified_base 5: mod_base = OTHER; note = 2'-O-methylcytidine-3'-phosphate
  modified_base 6: mod_base = OTHER; note = 2'-O-methyladenosine-3'-phosphate
  modified_base 7: mod_base = OTHER; note = 2'-fluoroadenosine-3'-phosphate
  modified_base 8: mod_base = OTHER; note = 2'-O-methyladenosine-3'-phosphate
  modified_base 9: mod_base = OTHER; note = 2'-fluorouridine-3'-phosphate
  modified_base 10: mod_base = OTHER; note = 2'-fluoroguanosine-3'-phosphate
  modified_base 11: mod_base = OTHER; note = 2'-fluoroadenosine-3'-phosphate
  modified_base 12: mod_base = OTHER; note = 2'-O-methyluridine-3'-phosphate
  modified_base 13: mod_base = OTHER; note = 2'-O-methylguanosine-3'-phosphate
  modified_base 14: mod_base = OTHER; note = 2'-O-methyladenosine-3'-phosphate
  modified_base 15: mod_base = OTHER; note = 2'-O-methyladenosine-3'-phosphate
  modified_base 16: mod_base = OTHER; note = 2'-O-methylguanosine-3'-phosphate
  modified_base 17: mod_base = OTHER; note = 2'-O-methyladenosine-3'-phosphate
  modified_base 18: mod_base = OTHER; note = 2'-O-methyladenosine-3'-phosphate
  modified_base 19: mod_base = OTHER; note = 2'-O-methyladenosine-3'-phosphate
  modified_base 20: mod_base = OTHER; note = 2'-O-methylcytidine-3'-phosphate
  modified_base 21: mod_base = OTHER; note 2'-O-methyluridine-3'-phosphate-N-[tris(GalNAc-alkyl)-amido decanoyl)]-4-hydroxyprolinol (Hyp-(GalNAc-alkyl)3)
ggggcaaatgatgaagaaact

SEQ ID NO: 2801 - RNA, 23 nt, synthetic construct
  source 1..23: mol_type = other RNA
  modified_base 1: mod_base = OTHER; note = 2'-O-methyladenosine-3'- phosphorothioate
  modified_base 2: mod_base = OTHER; note = 2'-fluoroguanosine-3'-phosphorothioate
  modified_base 3: mod_base = OTHER; note = 2'-O-methyluridine-3'-phosphate
  modified_base 4: mod_base = OTHER; note = 2'-O-methyluridine-3'-phosphate
  modified_base 5: mod_base = OTHER; note = 2'-O-methyluridine-3'-phosphate
  modified_base 6: mod_base = OTHER; note = 2'-fluorocytidine-3'-phosphate
  modified_base 7: mod_base = OTHER; note = 2'-O-methyluridine-3'-phosphate
  modified_base 8: mod_base = OTHER; note = 2'-fluorouridine-3'-phosphate
  modified_base 9: mod_base = OTHER; note = 2'-fluorocytidine-3'-phosphate
  modified_base 10: mod_base = OTHER; note = 2'-O-methyladenosine-3'-phosphate
  modified_base 11: mod_base = OTHER; note = 2'-O-methyluridine-3'-phosphate
  modified_base 12: mod_base = OTHER; note = 2'-O-methylcytidine-3'-phosphate
  modified_base 13: mod_base = OTHER; note = 2'-O-methyladenosine-3'-phosphate
  modified_base 14: mod_base = OTHER; note = 2'-fluorouridine-3'-phosphate
  modified_base 15: mod_base = OTHER; note = 2'-O-methyluridine-3'-phosphate
  modified_base 16: mod_base = OTHER; note = 2'-fluorouridine-3'-phosphate
  modified_base 17: mod_base = OTHER; note = 2'-O-methylguanosine-3'-phosphate
  modified_base 18: mod_base = OTHER; note = 2'-O-methylcytidine-3'-phosphate
  modified_base 19: mod_base = OTHER; note = 2'-O-methylcytidine-3'-phosphate
  modified_base 20: mod_base = OTHER; note = 2'-O-methylcytidine-3'-phosphate
  modified_base 21: mod_base = OTHER; note = 2'-O-methylcytidine-3'- phosphorothioate
  modified_base 22: mod_base = OTHER; note = 2'-O-methyladenosine-3'- phosphorothioate
  modified_base 23: mod_base = OTHER; note = 2'-O-methylguanosine-3'-phosphate
agtttcttcatcatttgccccag

SEQ ID NO: 2802 - RNA, 21 nt, synthetic construct
  source 1..21: mol_type = other RNA
  modified_base 1: mod_base = OTHER; note = 2'-O-methylguanosine-3'- phosphorothioate
  modified_base 2: mod_base = OTHER; note = 2'-O-methyladenosine-3'- phosphorothioate
  modified_base 3: mod_base = OTHER; note = 2'-O-methylguanosine-3'-phosphate
  modified_base 4: mod_base = OTHER; note = 2'-O-methyladenosine-3'-phosphate
  modified_base 5: mod_base = OTHER; note = 2'-O-methyluridine-3'-phosphate
  modified_base 6: mod_base = OTHER; note = 2'-O-methyladenosine-3'-phosphate
  modified_base 7: mod_base = OTHER; note = 2'-fluorocytidine-3'-phosphate
  modified_base 8: mod_base = OTHER; note = 2'-O-methyluridine-3'-phosphate
  modified_base 9: mod_base = OTHER; note = 2'-fluoroadenosine-3'-phosphate
  modified_base 10: mod_base = OTHER; note = 2'-fluoroadenosine-3'-phosphate
  modified_base 11: mod_base = OTHER; note = 2'-fluoroadenosine-3'-phosphate
  modified_base 12: mod_base = OTHER; note = 2'-O-methylguanosine-3'-phosphate
  modified_base 13: mod_base = OTHER; note = 2'-O-methylguanosine-3'-phosphate
  modified_base 14: mod_base = OTHER; note = 2'-O-methyladenosine-3'-phosphate
  modified_base 15: mod_base = OTHER; note = 2'-O-methyladenosine-3'-phosphate
  modified_base 16: mod_base = OTHER; note = 2'-O-methylguanosine-3'-phosphate
  modified_base 17: mod_base = OTHER; note = 2'-O-methyladenosine-3'-phosphate
  modified_base 18: mod_base = OTHER; note = 2'-O-methyladenosine-3'-phosphate
  modified_base 19: mod_base = OTHER; note = 2'-O-methyluridine-3'-phosphate
  modified_base 20: mod_base = OTHER; note = 2'-O-methyluridine-3'-phosphate
  modified_base 21: mod_base = OTHER; note 2'-O-methylcytidine-3'-phosphate-N-[tris(GalNAc-alkyl)-amid odecanoyl)]-4-hydroxyprolinol (Hyp-(GalNAc-alkyl)3)
gagatactaaaggaagaattc

SEQ ID NO: 2803 - RNA, 23 nt, synthetic construct
  source 1..23: mol_type = other RNA
  modified_base 1: mod_base = OTHER; note = 2'-O-methylguanosine-3'- phosphorothioate
  modified_base 2: mod_base = OTHER; note = 2'-fluoroadenosine-3'-phosphorothioate
  modified_base 3: mod_base = OTHER; note = 2'-O-methyladenosine-3'-phosphate
  modified_base 4: mod_base = OTHER; note = 2'-O-methyluridine-3'-phosphate
  modified_base 5: mod_base = OTHER; note = 2'-O-methyluridine-3'-phosphate
  modified_base 6: mod_base = OTHER; note = 2'-fluorocytidine-3'-phosphate
  modified_base 7: mod_base = OTHER; note = 2'-O-methyluridine-3'-phosphate
  modified_base 8: mod_base = OTHER; note = 2'-fluorouridine-3'-phosphate
  modified_base 9: mod_base = OTHER; note = 2'-fluorocytidine-3'-phosphate
  modified_base 10: mod_base = OTHER; note = 2'-O-methylcytidine-3'-phosphate
  modified_base 11: mod_base = OTHER; note = 2'-O-methyluridine-3'-phosphate
  modified_base 12: mod_base = OTHER; note = 2'-O-methyluridine-3'-phosphate
  modified_base 13: mod_base = OTHER; note = 2'-O-methyluridine-3'-phosphate
  modified_base 14: mod_base = OTHER; note = 2'-fluoroadenosine-3'-phosphate
  modified_base 15: mod_base = OTHER; note = 2'-O-methylguanosine-3'-phosphate
  modified_base 16: mod_base = OTHER; note = 2'-fluorouridine-3'-phosphate
  modified_base 17: mod_base = OTHER; note = 2'-O-methyladenosine-3'-phosphate
  modified_base 18: mod_base = OTHER; note = 2'-O-methyluridine-3'-phosphate
  modified_base 19: mod_base = OTHER; note = 2'-O-methylcytidine-3'-phosphate
  modified_base 20: mod_base = OTHER; note = 2'-O-methyluridine-3'-phosphate
  modified_base 21: mod_base = OTHER; note = 2'-O-methylcytidine-3'- phosphorothioate
  modified_base 22: mod_base = OTHER; note = 2'-O-methylguanosine-3'- phosphorothioate
  modified_base 23: mod_base = OTHER; note = 2'-O-methyladenosine-3'-phosphate
gaattcttcctttagtatctcga

SEQ ID NO: 2804 - RNA, 21 nt, synthetic construct
  source 1..21: mol_type = other RNA
  modified_base 1: mod_base = OTHER; note = 2'-O-methyladenosine-3'- phosphorothioate
  modified_base 2: mod_base = OTHER; note = 2'-O-methylguanosine-3'- phosphorothioate
  modified_base 3: mod_base = OTHER; note = 2'-O-methyladenosine-3'-phosphate
  modified_base 4: mod_base = OTHER; note = 2'-O-methyluridine-3'-phosphate
  modified_base 5: mod_base = OTHER; note = 2'-O-methyladenosine-3'-phosphate
  modified_base 6: mod_base = OTHER; note = 2'-O-methylcytidine-3'-phosphate
  modified_base 7: mod_base = OTHER; note = 2'-fluorouridine-3'-phosphate
  modified_base 8: mod_base = OTHER; note = 2'-O-methyladenosine-3'-phosphate
  modified_base 9: mod_base = OTHER; note = 2'-fluoroadenosine-3'-phosphate
  modified_base 10: mod_base = OTHER; note = 2'-fluoroadenosine-3'-phosphate
  modified_base 11: mod_base = OTHER; note = 2'-fluoroguanosine-3'-phosphate
  modified_base 12: mod_base = OTHER; note = 2'-O-methylguanosine-3'-phosphate
  modified_base 13: mod_base = OTHER; note = 2'-O-methyladenosine-3'-phosphate
  modified_base 14: mod_base = OTHER; note = 2'-O-methyladenosine-3'-phosphate
  modified_base 15: mod_base = OTHER; note = 2'-O-methylguanosine-3'-phosphate
  modified_base 16: mod_base = OTHER; note = 2'-O-methyladenosine-3'-phosphate
  modified_base 17: mod_base = OTHER; note = 2'-O-methyladenosine-3'-phosphate
  modified_base 18: mod_base = OTHER; note = 2'-O-methyluridine-3'-phosphate
  modified_base 19: mod_base = OTHER; note = 2'-O-methyluridine-3'-phosphate
  modified_base 20: mod_base = OTHER; note = 2'-O-methylcytidine-3'-phosphate
  modified_base 21: mod_base = OTHER; note 2'-O-methylcytidine-3'-phosphate-N-[tris(GalNAc-alkyl)-amid odecanoyl)]-4-hydroxyprolinol (Hyp-(GalNAc-alkyl)3)
agatactaaaggaagaattcc

SEQ ID NO: 2805 - RNA, 23 nt, synthetic construct
  source 1..23: mol_type = other RNA
  modified_base 1: mod_base = OTHER; note = 2'-O-methylguanosine-3'- phosphorothioate
  modified_base 2: mod_base = OTHER; note = 2'-fluoroguanosine-3'-phosphorothioate
  modified_base 3: mod_base = OTHER; note = 2'-O-methyladenosine-3'-phosphate
  modified_base 4: mod_base = OTHER; note = 2'-O-methyladenosine-3'-phosphate
  modified_base 5: mod_base = OTHER; note = 2'-O-methyluridine-3'-phosphate
  modified_base 6: mod_base = OTHER; note = 2'-fluorouridine-3'-phosphate
  modified_base 7: mod_base = OTHER; note = 2'-O-methylcytidine-3'-phosphate
  modified_base 8: mod_base = OTHER; note = 2'-fluorouridine-3'-phosphate
  modified_base 9: mod_base = OTHER; note = 2'-fluorouridine-3'-phosphate
  modified_base 10: mod_base = OTHER; note = 2'-O-methylcytidine-3'-phosphate
  modified_base 11: mod_base = OTHER; note = 2'-O-methylcytidine-3'-phosphate
  modified_base 12: mod_base = OTHER; note = 2'-O-methyluridine-3'-phosphate
  modified_base 13: mod_base = OTHER; note = 2'-O-methyluridine-3'-phosphate
  modified_base 14: mod_base = OTHER; note = 2'-fluorouridine-3'-phosphate
  modified_base 15: mod_base = OTHER; note = 2'-O-methyladenosine-3'-phosphate
  modified_base 16: mod_base = OTHER; note = 2'-fluoroguanosine-3'-phosphate
  modified_base 17: mod_base = OTHER; note = 2'-O-methyluridine-3'-phosphate
  modified_base 18: mod_base = OTHER; note = 2'-O-methyladenosine-3'-phosphate
  modified_base 19: mod_base = OTHER; note = 2'-O-methyluridine-3'-phosphate
  modified_base 20: mod_base = OTHER; note = 2'-O-methylcytidine-3'-phosphate
  modified_base 21: mod_base = OTHER; note = 2'-O-methyluridine-3'-phosphorothioate
  modified_base 22: mod_base = OTHER; note = 2'-O-methylcytidine-3'- phosphorothioate
  modified_base 23: mod_base = OTHER; note = 2'-O-methylguanosine-3'-phosphate
ggaattcttcctttagtatctcg

SEQ ID NO: 2806 - RNA, 21 nt, synthetic construct
  source 1..21: mol_type = other RNA
  modified_base 1: mod_base = OTHER; note = 2'-O-methylcytidine-3'- phosphorothioate
  modified_base 2: mod_base = OTHER; note = 2'-O-methylcytidine-3'- phosphorothioate
  modified_base 3: mod_base = OTHER; note = 2'-O-methyluridine-3'-phosphate
  modified_base 4: mod_base = OTHER; note = 2'-O-methylcytidine-3'-phosphate
  modified_base 5: mod_base = OTHER; note = 2'-O-methylguanosine-3'-phosphate
  modified_base 6: mod_base = OTHER; note = 2'-O-methyladenosine-3'-phosphate
  modified_base 7: mod_base = OTHER; note = 2'-fluoroguanosine-3'-phosphate
  modified_base 8: mod_base = OTHER; note = 2'-O-methyladenosine-3'-phosphate
  modified_base 9: mod_base = OTHER; note = 2'-fluorouridine-3'-phosphate
  modified_base 10: mod_base = OTHER; note = 2'-fluoroadenosine-3'-phosphate
  modified_base 11: mod_base = OTHER; note = 2'-fluorocytidine-3'-phosphate
  modified_base 12: mod_base = OTHER; note = 2'-O-methyluridine-3'-phosphate
  modified_base 13: mod_base = OTHER; note = 2'-O-methyladenosine-3'-phosphate
  modified_base 14: mod_base = OTHER; note = 2'-O-methyladenosine-3'-phosphate
  modified_base 15: mod_base = OTHER; note = 2'-O-methyladenosine-3'-phosphate
  modified_base 16: mod_base = OTHER; note = 2'-O-methylguanosine-3'-phosphate
  modified_base 17: mod_base = OTHER; note = 2'-O-methylguanosine-3'-phosphate
  modified_base 18: mod_base = OTHER; note = 2'-O-methyladenosine-3'-phosphate
  modified_base 19: mod_base = OTHER; note = 2'-O-methyladenosine-3'-phosphate
  modified_base 20: mod_base = OTHER; note = 2'-O-methylguanosine-3'-phosphate
  modified_base 21: mod_base = OTHER; note 2'-O-methyladenosine-3'-phosphate-N-[tris(GalNAc-alkyl)-ami dodecanoyl)]-4-hydroxyprolinol (Hyp-(GalNAc-alkyl)3)
cctcgagatactaaaggaaga

SEQ ID NO: 2807 - RNA, 23 nt, synthetic construct
  source 1..23: mol_type = other RNA
  modified_base 1: mod_base = OTHER; note = 2'-O-methyluridine-3'-phosphorothioate
  modified_base 2: mod_base = OTHER; note = 2'-fluorocytidine-3'-phosphorothioate
  modified_base 3: mod_base = OTHER; note = 2'-O-methyluridine-3'-phosphate
  modified_base 4: mod_base = OTHER; note = 2'-O-methyluridine-3'-phosphate
  modified_base 5: mod_base = OTHER; note = 2'-O-methylcytidine-3'-phosphate
  modified_base 6: mod_base = OTHER; note = 2'-fluorocytidine-3'-phosphate
  modified_base 7: mod_base = OTHER; note = 2'-O-methyluridine-3'-phosphate
  modified_base 8: mod_base = OTHER; note = 2'-fluorouridine-3'-phosphate
  modified_base 9: mod_base = OTHER; note = 2'-fluorouridine-3'-phosphate
  modified_base 10: mod_base = OTHER; note = 2'-O-methyladenosine-3'-phosphate
  modified_base 11: mod_base = OTHER; note = 2'-O-methylguanosine-3'-phosphate
  modified_base 12: mod_base = OTHER; note = 2'-O-methyluridine-3'-phosphate
  modified_base 13: mod_base = OTHER; note = 2'-O-methyladenosine-3'-phosphate
  modified_base 14: mod_base = OTHER; note = 2'-fluorouridine-3'-phosphate
  modified_base 15: mod_base = OTHER; note = 2'-O-methylcytidine-3'-phosphate
  modified_base 16: mod_base = OTHER; note = 2'-fluorouridine-3'-phosphate
  modified_base 17: mod_base = OTHER; note = 2'-O-methylcytidine-3'-phosphate
  modified_base 18: mod_base = OTHER; note = 2'-O-methylguanosine-3'-phosphate
  modified_base 19: mod_base = OTHER; note = 2'-O-methyladenosine-3'-phosphate
  modified_base 20: mod_base = OTHER; note = 2'-O-methylguanosine-3'-phosphate
  modified_base 21: mod_base = OTHER; note = 2'-O-methylguanosine-3'- phosphorothioate
  modified_base 22: mod_base = OTHER; note = 2'-O-methyladenosine-3'- phosphorothioate
  modified_base 23: mod_base = OTHER; note = 2'-O-methylcytidine-3'-phosphate
tcttcctttagtatctcgaggac

SEQ ID NO: 2808 - RNA, 21 nt, synthetic construct
  source 1..21: mol_type = other RNA
  modified_base 1: mod_base = OTHER; note = 2'-O-methyluridine-3'-phosphorothioate
  modified_base 2: mod_base = OTHER; note = 2'-O-methylcytidine-3'- phosphorothioate
  modified_base 3: mod_base = OTHER; note = 2'-O-methylcytidine-3'-phosphate
  modified_base 4: mod_base = OTHER; note = 2'-O-methyluridine-3'-phosphate
  modified_base 5: mod_base = OTHER; note = 2'-O-methylcytidine-3'-phosphate
  modified_base 6: mod_base = OTHER; note = 2'-O-methylguanosine-3'-phosphate
  modified_base 7: mod_base = OTHER; note = 2'-fluoroadenosine-3'-phosphate
  modified_base 8: mod_base = OTHER; note = 2'-O-methylguanosine-3'-phosphate
  modified_base 9: mod_base = OTHER; note = 2'-fluoroadenosine-3'-phosphate
  modified_base 10: mod_base = OTHER; note = 2'-fluorouridine-3'-phosphate
  modified_base 11: mod_base = OTHER; note = 2'-fluoroadenosine-3'-phosphate
  modified_base 12: mod_base = OTHER; note = 2'-O-methylcytidine-3'-phosphate
  modified_base 13: mod_base = OTHER; note = 2'-O-methyluridine-3'-phosphate
  modified_base 14: mod_base = OTHER; note = 2'-O-methyladenosine-3'-phosphate
  modified_base 15: mod_base = OTHER; note = 2'-O-methyladenosine-3'-phosphate
  modified_base 16: mod_base = OTHER; note = 2'-O-methyladenosine-3'-phosphate
  modified_base 17: mod_base = OTHER; note = 2'-O-methylguanosine-3'-phosphate
  modified_base 18: mod_base = OTHER; note = 2'-O-methylguanosine-3'-phosphate
  modified_base 19: mod_base = OTHER; note = 2'-O-methyladenosine-3'-phosphate
  modified_base 20: mod_base = OTHER; note = 2'-O-methyladenosine-3'-phosphate
  modified_base 21: mod_base = OTHER; note 2'-O-methylguanosine-3'-phosphate-N-[tris(GalNAc-alkyl)-ami dodecanoyl)]-4-hydroxyprolinol (Hyp-(GalNAc-alkyl)3)
tcctcgagatactaaaggaag

SEQ ID NO: 2809 - RNA, 23 nt, synthetic construct
  source 1..23: mol_type = other RNA
  modified_base 1: mod_base = OTHER; note = 2'-O-methylcytidine-3'- phosphorothioate
  modified_base 2: mod_base = OTHER; note = 2'-fluorouridine -3'-phosphorothioate
  modified_base 3: mod_base = OTHER; note = 2'-O-methyluridine-3'-phosphate
  modified_base 4: mod_base = OTHER; note = 2'-O-methylcytidine-3'-phosphate
  modified_base 5: mod_base = OTHER; note = 2'-O-methylcytidine-3'-phosphate
  modified_base 6: mod_base = OTHER; note = 2'-fluorouridine-3'-phosphate
  modified_base 7: mod_base = OTHER; note = 2'-O-methyluridine-3'-phosphate
  modified_base 8: mod_base = OTHER; note = 2'-fluorouridine-3'-phosphate
  modified_base 9: mod_base = OTHER; note = 2'-fluoroadenosine-3'-phosphate
  modified_base 10: mod_base = OTHER; note = 2'-O-methylguanosine-3'-phosphate
  modified_base 11: mod_base = OTHER; note = 2'-O-methyluridine-3'-phosphate
  modified_base 12: mod_base = OTHER; note = 2'-O-methyladenosine-3'-phosphate
  modified_base 13: mod_base = OTHER; note = 2'-O-methyluridine-3'-phosphate
  modified_base 14: mod_base = OTHER; note = 2'-fluorocytidine-3'-phosphate
  modified_base 15: mod_base = OTHER; note = 2'-O-methyluridine-3'-phosphate
  modified_base 16: mod_base = OTHER; note = 2'-fluorocytidine-3'-phosphate
  modified_base 17: mod_base = OTHER; note = 2'-O-methylguanosine-3'-phosphate
  modified_base 18: mod_base = OTHER; note = 2'-O-methyladenosine-3'-phosphate
  modified_base 19: mod_base = OTHER; note = 2'-O-methylguanosine-3'-phosphate
  modified_base 20: mod_base = OTHER; note = 2'-O-methylguanosine-3'-phosphate
  modified_base 21: mod_base = OTHER; note = 2'-O-methyladenosine-3'- phosphorothioate
  modified_base 22: mod_base = OTHER; note = 2'-O-methylcytidine-3'- phosphorothioate
  modified_base 23: mod_base = OTHER; note = 2'-O-methyladenosine-3'-phosphate
cttcctttagtatctcgaggaca

SEQ ID NO: 2810 - RNA, 21 nt, synthetic construct
  source 1..21: mol_type = other RNA
  modified_base 1: mod_base = OTHER; note = 2'-O-methyladenosine-3'- phosphorothioate
  modified_base 2: mod_base = OTHER; note = 2'-O-methylcytidine-3'- phosphorothioate
  modified_base 3: mod_base = OTHER; note = 2'-O-methyladenosine-3'-phosphate
  modified_base 4: mod_base = OTHER; note = 2'-O-methyladenosine-3'-phosphate
  modified_base 5: mod_base = OTHER; note = 2'-O-methylcytidine-3'-phosphate
  modified_base 6: mod_base = OTHER; note = 2'-O-methyluridine-3'-phosphate
  modified_base 7: mod_base = OTHER; note = 2'-fluorocytidine-3'-phosphate
  modified_base 8: mod_base = OTHER; note = 2'-O-methyladenosine-3'-phosphate
  modified_base 9: mod_base = OTHER; note = 2'-fluoroguanosine-3'-phosphate
  modified_base 10: mod_base = OTHER; note = 2'-fluoroguanosine-3'-phosphate
  modified_base 11: mod_base = OTHER; note = 2'-fluoroadenosine-3'-phosphate
  modified_base 12: mod_base = OTHER; note = 2'-O-methyluridine-3'-phosphate
  modified_base 13: mod_base = OTHER; note = 2'-O-methylguanosine-3'-phosphate
  modified_base 14: mod_base = OTHER; note = 2'-O-methyladenosine-3'-phosphate
  modified_base 15: mod_base = OTHER; note = 2'-O-methyladenosine-3'-phosphate
  modified_base 16: mod_base = OTHER; note = 2'-O-methyladenosine-3'-phosphate
  modified_base 17: mod_base = OTHER; note = 2'-O-methyladenosine-3'-phosphate
  modified_base 18: mod_base = OTHER; note = 2'-O-methyladenosine-3'-phosphate
  modified_base 19: mod_base = OTHER; note = 2'-O-methyluridine-3'-phosphate
  modified_base 20: mod_base = OTHER; note = 2'-O-methyluridine-3'-phosphate
  modified_base 21: mod_base = OTHER; note 2'-O-methyluridine-3'-phosphate-N-[tris(GalNAc-alkyl)-amido decanoyl)]-4-hydroxyprolinol (Hyp-(GalNAc-alkyl)3)
acaactcaggatgaaaaattt

SEQ ID NO: 2811 - RNA, 23 nt, synthetic construct
  source 1..23: mol_type = other RNA
  modified_base 1: mod_base = OTHER; note = 2'-O-methyladenosine-3'- phosphorothioate
  modified_base 2: mod_base = OTHER; note = 2'-fluoroadenosine-3'-phosphorothioate
  modified_base 3: mod_base = OTHER; note = 2'-O-methyladenosine-3'-phosphate
  modified_base 4: mod_base = OTHER; note = 2'-O-methyluridine-3'-phosphate
  modified_base 5: mod_base = OTHER; note = 2'-O-methyluridine-3'-phosphate
  modified_base 6: mod_base = OTHER; note = 2'-fluorouridine-3'-phosphate
  modified_base 7: mod_base = OTHER; note = 2'-O-methyluridine-3'-phosphate
  modified_base 8: mod_base = OTHER; note = 2'-fluorouridine-3'-phosphate
  modified_base 9: mod_base = OTHER; note = 2'-fluorocytidine-3'-phosphate
  modified_base 10: mod_base = OTHER; note = 2'-O-methyladenosine-3'-phosphate
  modified_base 11: mod_base = OTHER; note = 2'-O-methyluridine-3'-phosphate
  modified_base 12: mod_base = OTHER; note = 2'-O-methylcytidine-3'-phosphate
  modified_base 13: mod_base = OTHER; note = 2'-O-methylcytidine-3'-phosphate
  modified_base 14: mod_base = OTHER; note = 2'-fluorouridine-3'-phosphate
  modified_base 15: mod_base = OTHER; note = 2'-O-methylguanosine-3'-phosphate
  modified_base 16: mod_base = OTHER; note = 2'-fluoroadenosine-3'-phosphate
  modified_base 17: mod_base = OTHER; note = 2'-O-methylguanosine-3'-phosphate
  modified_base 18: mod_base = OTHER; note = 2'-O-methyluridine-3'-phosphate
  modified_base 19: mod_base = OTHER; note = 2'-O-methyluridine-3'-phosphate
  modified_base 20: mod_base = OTHER; note = 2'-O-methylguanosine-3'-phosphate
  modified_base 21: mod_base = OTHER; note = 2'-O-methyluridine-3'-phosphorothioate
  modified_base 22: mod_base = OTHER; note = 2'-O-methylguanosine-3'- phosphorothioate
  modified_base 23: mod_base = OTHER; note = 2'-O-methylguanosine-3'-phosphate
aaatttttcatcctgagttgtgg

SEQ ID NO: 2812 - RNA, 21 nt, synthetic construct
  source 1..21: mol_type = other RNA
  modified_base 1: mod_base = OTHER; note = 2'-O-methylcytidine-3'- phosphorothioate
  modified_base 2: mod_base = OTHER; note = 2'-O-methyladenosine-3'- phosphorothioate
  modified_base 3: mod_base = OTHER; note = 2'-O-methyladenosine-3'-phosphate
  modified_base 4: mod_base = OTHER; note = 2'-O-methylcytidine-3'-phosphate
  modified_base 5: mod_base = OTHER; note = 2'-O-methyluridine-3'-phosphate
  modified_base 6: mod_base = OTHER; note = 2'-O-methylcytidine-3'-phosphate
  modified_base 7: mod_base = OTHER; note = 2'-fluoroadenosine-3'-phosphate
  modified_base 8: mod_base = OTHER; note = 2'-O-methylguanosine-3'-phosphate
  modified_base 9: mod_base = OTHER; note = 2'-fluoroguanosine-3'-phosphate
  modified_base 10: mod_base = OTHER; note = 2'-fluoroadenosine-3'-phosphate
  modified_base 11: mod_base = OTHER; note = 2'-fluorouridine-3'-phosphate
  modified_base 12: mod_base = OTHER; note = 2'-O-methylguanosine-3'-phosphate
  modified_base 13: mod_base = OTHER; note = 2'-O-methyladenosine-3'-phosphate
  modified_base 14: mod_base = OTHER; note = 2'-O-methyladenosine-3'-phosphate
  modified_base 15: mod_base = OTHER; note = 2'-O-methyladenosine-3'-phosphate
  modified_base 16: mod_base = OTHER; note = 2'-O-methyladenosine-3'-phosphate
  modified_base 17: mod_base = OTHER; note = 2'-O-methyladenosine-3'-phosphate
  modified_base 18: mod_base = OTHER; note = 2'-O-methyluridine-3'-phosphate
  modified_base 19: mod_base = OTHER; note = 2'-O-methyluridine-3'-phosphate
  modified_base 20: mod_base = OTHER; note = 2'-O-methyluridine-3'-phosphate
  modified_base 21: mod_base = OTHER; note 2'-O-methyluridine-3'-phosphate-N-[tris(GalNAc-alkyl)-amido decanoyl)]-4-hydroxyprolinol (Hyp-(GalNAc-alkyl)3)
caactcaggatgaaaaatttt

SEQ ID NO: 2813 - RNA, 23 nt, synthetic construct
  source 1..23: mol_type = other RNA
  modified_base 1: mod_base = OTHER; note = 2'-O-methyladenosine-3'- phosphorothioate
  modified_base 2: mod_base = OTHER; note = 2'-fluoroadenosine-3'-phosphorothioate
  modified_base 3: mod_base = OTHER; note = 2'-O-methyladenosine-3'-phosphate
  modified_base 4: mod_base = OTHER; note = 2'-O-methyladenosine-3'-phosphate
  modified_base 5: mod_base = OTHER; note = 2'-O-methyluridine-3'-phosphate
  modified_base 6: mod_base = OTHER; note = 2'-fluorouridine-3'-phosphate
  modified_base 7: mod_base = OTHER; note = 2'-O-methyluridine-3'-phosphate
  modified_base 8: mod_base = OTHER; note = 2'-fluorouridine-3'-phosphate
  modified_base 9: mod_base = OTHER; note = 2'-fluorouridine-3'-phosphate
  modified_base 10: mod_base = OTHER; note = 2'-O-methylcytidine-3'-phosphate
  modified_base 11: mod_base = OTHER; note = 2'-O-methyladenosine-3'-phosphate
  modified_base 12: mod_base = OTHER; note = 2'-O-methyluridine-3'-phosphate
  modified_base 13: mod_base = OTHER; note = 2'-O-methylcytidine-3'-phosphate
  modified_base 14: mod_base = OTHER; note = 2'-fluorocytidine-3'-phosphate
  modified_base 15: mod_base = OTHER; note = 2'-O-methyluridine-3'-phosphate
  modified_base 16: mod_base = OTHER; note = 2'-fluoroguanosine-3'-phosphate
  modified_base 17: mod_base = OTHER; note = 2'-O-methyladenosine-3'-phosphate
  modified_base 18: mod_base = OTHER; note = 2'-O-methylguanosine-3'-phosphate
  modified_base 19: mod_base = OTHER; note = 2'-O-methyluridine-3'-phosphate
  modified_base 20: mod_base = OTHER; note = 2'-O-methyluridine-3'-phosphate
  modified_base 21: mod_base = OTHER; note = 2'-O-methylguanosine-3'- phosphorothioate
  modified_base 22: mod_base = OTHER; note = 2'-O-methyluridine-3'-phosphorothioate
  modified_base 23: mod_base = OTHER; note = 2'-O-methylguanosine-3'-phosphate
aaaatttttcatcctgagttgtg

SEQ ID NO: 2814 - RNA, 21 nt, synthetic construct
  source 1..21: mol_type = other RNA
  modified_base 1: mod_base = OTHER; note = 2'-O-methylcytidine-3'- phosphorothioate
  modified_base 2: mod_base = OTHER; note = 2'-O-methylguanosine-3'- phosphorothioate
  modified_base 3: mod_base = OTHER; note = 2'-O-methylcytidine-3'-phosphate
  modified_base 4: mod_base = OTHER; note = 2'-O-methylcytidine-3'-phosphate
  modified_base 5: mod_base = OTHER; note = 2'-O-methyladenosine-3'-phosphate
  modified_base 6: mod_base = OTHER; note = 2'-O-methylcytidine-3'-phosphate
  modified_base 7: mod_base = OTHER; note = 2'-fluoroadenosine-3'-phosphate
  modified_base 8: mod_base = OTHER; note = 2'-O-methyladenosine-3'-phosphate
  modified_base 9: mod_base = OTHER; note = 2'-fluorocytidine-3'-phosphate
  modified_base 10: mod_base = OTHER; note = 2'-fluorouridine-3'-phosphate
  modified_base 11: mod_base = OTHER; note = 2'-fluorocytidine-3'-phosphate
  modified_base 12: mod_base = OTHER; note = 2'-O-methyladenosine-3'-phosphate
  modified_base 13: mod_base = OTHER; note = 2'-O-methylguanosine-3'-phosphate
  modified_base 14: mod_base = OTHER; note = 2'-O-methylguanosine-3'-phosphate
  modified_base 15: mod_base = OTHER; note = 2'-O-methyladenosine-3'-phosphate
  modified_base 16: mod_base = OTHER; note = 2'-O-methyluridine-3'-phosphate
  modified_base 17: mod_base = OTHER; note = 2'-O-methylguanosine-3'-phosphate
  modified_base 18: mod_base = OTHER; note = 2'-O-methyladenosine-3'-phosphate
  modified_base 19: mod_base = OTHER; note = 2'-O-methyladenosine-3'-phosphate
  modified_base 20: mod_base = OTHER; note = 2'-O-methyladenosine-3'-phosphate
  modified_base 21: mod_base = OTHER; note 2'-O-methyladenosine-3'-phosphate-N-[tris(GalNAc-alkyl)-ami dodecanoyl)]-4-hydroxyprolinol (Hyp-(GalNAc-alkyl)3)
cgccacaactcaggatgaaaa

SEQ ID NO: 2815 - RNA, 23 nt, synthetic construct
  source 1..23: mol_type = other RNA
  modified_base 1: mod_base = OTHER; note = 2'-O-methyluridine-3'-phosphorothioate
  modified_base 2: mod_base = OTHER; note = 2'-fluorouridine -3'-phosphorothioate
  modified_base 3: mod_base = OTHER; note = 2'-O-methyluridine-3'-phosphate
  modified_base 4: mod_base = OTHER; note = 2'-O-methyluridine-3'-phosphate
  modified_base 5: mod_base = OTHER; note = 2'-O-methylcytidine-3'-phosphate
  modified_base 6: mod_base = OTHER; note = 2'-fluoroadenosine-3'-phosphate
  modified_base 7: mod_base = OTHER; note = 2'-O-methyluridine-3'-phosphate
  modified_base 8: mod_base = OTHER; note = 2'-fluorocytidine-3'-phosphate
  modified_base 9: mod_base = OTHER; note = 2'-fluorocytidine-3'-phosphate
  modified_base 10: mod_base = OTHER; note = 2'-O-methyluridine-3'-phosphate
  modified_base 11: mod_base = OTHER; note = 2'-O-methylguanosine-3'-phosphate
  modified_base 12: mod_base = OTHER; note = 2'-O-methyladenosine-3'-phosphate
  modified_base 13: mod_base = OTHER; note = 2'-O-methylguanosine-3'-phosphate
  modified_base 14: mod_base = OTHER; note = 2'-fluorouridine-3'-phosphate
  modified_base 15: mod_base = OTHER; note = 2'-O-methyluridine-3'-phosphate
  modified_base 16: mod_base = OTHER; note = 2'-fluoroguanosine-3'-phosphate
  modified_base 17: mod_base = OTHER; note = 2'-O-methyluridine-3'-phosphate
  modified_base 18: mod_base = OTHER; note = 2'-O-methylguanosine-3'-phosphate
  modified_base 19: mod_base = OTHER; note = 2'-O-methylguanosine-3'-phosphate
  modified_base 20: mod_base = OTHER; note = 2'-O-methylcytidine-3'-phosphate
  modified_base 21: mod_base = OTHER; note = 2'-O-methylguanosine-3'- phosphorothioate
  modified_base 22: mod_base = OTHER; note = 2'-O-methylguanosine-3'- phosphorothioate
  modified_base 23: mod_base = OTHER; note = 2'-O-methylcytidine-3'-phosphate
ttttcatcctgagttgtggcggc

SEQ ID NO: 2816 - RNA, 21 nt, synthetic construct
  source 1..21: mol_type = other RNA
  modified_base 1: mod_base = OTHER; note = 2'-O-methylcytidine-3'- phosphorothioate
  modified_base 2: mod_base = OTHER; note = 2'-O-methylcytidine-3'- phosphorothioate
  modified_base 3: mod_base = OTHER; note = 2'-O-methylguanosine-3'-phosphate
  modified_base 4: mod_base = OTHER; note = 2'-O-methylcytidine-3'-phosphate
  modified_base 5: mod_base = OTHER; note = 2'-O-methylcytidine-3'-phosphate
  modified_base 6: mod_base = OTHER; note = 2'-O-methyladenosine-3'-phosphate
  modified_base 7: mod_base = OTHER; note = 2'-fluorocytidine-3'-phosphate
  modified_base 8: mod_base = OTHER; note = 2'-O-methyladenosine-3'-phosphate
  modified_base 9: mod_base = OTHER; note = 2'-fluoroadenosine-3'-phosphate
  modified_base 10: mod_base = OTHER; note = 2'-fluorocytidine-3'-phosphate
  modified_base 11: mod_base = OTHER; note = 2'-fluorouridine-3'-phosphate
  modified_base 12: mod_base = OTHER; note = 2'-O-methylcytidine-3'-phosphate
  modified_base 13: mod_base = OTHER; note = 2'-O-methyladenosine-3'-phosphate
  modified_base 14: mod_base = OTHER; note = 2'-O-methylguanosine-3'-phosphate
  modified_base 15: mod_base = OTHER; note = 2'-O-methylguanosine-3'-phosphate
  modified_base 16: mod_base = OTHER; note = 2'-O-methyladenosine-3'-phosphate
  modified_base 17: mod_base = OTHER; note = 2'-O-methyluridine-3'-phosphate
  modified_base 18: mod_base = OTHER; note = 2'-O-methylguanosine-3'-phosphate
  modified_base 19: mod_base = OTHER; note = 2'-O-methyladenosine-3'-phosphate
  modified_base 20: mod_base = OTHER; note = 2'-O-methyladenosine-3'-phosphate
  modified_base 21: mod_base = OTHER; note 2'-O-methyladenosine-3'-phosphate-N-[tris(GalNAc-alkyl)-ami dodecanoyl)]-4-hydroxyprolinol (Hyp-(GalNAc-alkyl)3)
ccgccacaactcaggatgaaa

SEQ ID NO: 2817 - RNA, 23 nt, synthetic construct
  source 1..23: mol_type = other RNA
  modified_base 1: mod_base = OTHER; note = 2'-O-methyluridine-3'-phosphorothioate
  modified_base 2: mod_base = OTHER; note = 2'-fluorouridine -3'-phosphorothioate
  modified_base 3: mod_base = OTHER; note = 2'-O-methyluridine-3'-phosphate
  modified_base 4: mod_base = OTHER; note = 2'-O-methylcytidine-3'-phosphate
  modified_base 5: mod_base = OTHER; note = 2'-O-methyladenosine-3'-phosphate
  modified_base 6: mod_base = OTHER; note = 2'-fluorouridine-3'-phosphate
  modified_base 7: mod_base = OTHER; note = 2'-O-methylcytidine-3'-phosphate
  modified_base 8: mod_base = OTHER; note = 2'-fluorocytidine-3'-phosphate
  modified_base 9: mod_base = OTHER; note = 2'-fluorouridine-3'-phosphate
  modified_base 10: mod_base = OTHER; note = 2'-O-methylguanosine-3'-phosphate
  modified_base 11: mod_base = OTHER; note = 2'-O-methyladenosine-3'-phosphate
  modified_base 12: mod_base = OTHER; note = 2'-O-methylguanosine-3'-phosphate
  modified_base 13: mod_base = OTHER; note = 2'-O-methyluridine-3'-phosphate
  modified_base 14: mod_base = OTHER; note = 2'-fluorouridine-3'-phosphate
  modified_base 15: mod_base = OTHER; note = 2'-O-methylguanosine-3'-phosphate
  modified_base 16: mod_base = OTHER; note = 2'-fluorouridine-3'-phosphate
  modified_base 17: mod_base = OTHER; note = 2'-O-methylguanosine-3'-phosphate
  modified_base 18: mod_base = OTHER; note = 2'-O-methylguanosine-3'-phosphate
  modified_base 19: mod_base = OTHER; note = 2'-O-methylcytidine-3'-phosphate
  modified_base 20: mod_base = OTHER; note = 2'-O-methylguanosine-3'-phosphate
  modified_base 21: mod_base = OTHER; note = 2'-O-methylguanosine-3'- phosphorothioate
  modified_base 22: mod_base = OTHER; note = 2'-O-methylcytidine-3'- phosphorothioate
  modified_base 23: mod_base = OTHER; note = 2'-O-methyladenosine-3'-phosphate
tttcatcctgagttgtggcggca

SEQ ID NO: 2818 - RNA, 21 nt, synthetic construct
  source 1..21: mol_type = other RNA
  modified_base 1: mod_base = OTHER; note = 2'-O-methyladenosine-3'- phosphorothioate
  modified_base 2: mod_base = OTHER; note = 2'-O-methylguanosine-3'- phosphorothioate
  modified_base 3: mod_base = OTHER; note = 2'-O-methylguanosine-3'-phosphate
  modified_base 4: mod_base = OTHER; note = 2'-O-methylguanosine-3'-phosphate
  modified_base 5: mod_base = OTHER; note = 2'-O-methyladenosine-3'-phosphate
  modified_base 6: mod_base = OTHER; note = 2'-O-methyladenosine-3'-phosphate
  modified_base 7: mod_base = OTHER; note = 2'-fluoroguanosine-3'-phosphate
  modified_base 8: mod_base = OTHER; note = 2'-O-methylguanosine-3'-phosphate
  modified_base 9: mod_base = OTHER; note = 2'-fluorouridine-3'-phosphate
  modified_base 10: mod_base = OTHER; note = 2'-fluoroguanosine-3'-phosphate
  modified_base 11: mod_base = OTHER; note = 2'-fluoroguanosine-3'-phosphate
  modified_base 12: mod_base = OTHER; note = 2'-O-methyladenosine-3'-phosphate
  modified_base 13: mod_base = OTHER; note = 2'-O-methyladenosine-3'-phosphate
  modified_base 14: mod_base = OTHER; note = 2'-O-methylguanosine-3'-phosphate
  modified_base 15: mod_base = OTHER; note = 2'-O-methyluridine-3'-phosphate
  modified_base 16: mod_base = OTHER; note = 2'-O-methylcytidine-3'-phosphate
  modified_base 17: mod_base = OTHER; note = 2'-O-methyluridine-3'-phosphate
  modified_base 18: mod_base = OTHER; note = 2'-O-methyluridine-3'-phosphate
  modified_base 19: mod_base = OTHER; note = 2'-O-methylcytidine-3'-phosphate
  modified_base 20: mod_base = OTHER; note = 2'-O-methylcytidine-3'-phosphate
  modified_base 21: mod_base = OTHER; note 2'-O-methyluridine-3'-phosphate-N-[tris(GalNAc-alkyl)-amido decanoyl)]-4-hydroxyprolinol (Hyp-(GalNAc-alkyl)3)
agggaaggtggaagtcttcct

SEQ ID NO: 2819 - RNA, 23 nt, synthetic construct
  source 1..23: mol_type = other RNA
  modified_base 1: mod_base = OTHER; note = 2'-O-methyladenosine-3'- phosphorothioate
  modified_base 2: mod_base = OTHER; note = 2'-fluoroguanosine-3'-phosphorothioate
  modified_base 3: mod_base = OTHER; note = 2'-O-methylguanosine-3'-phosphate
  modified_base 4: mod_base = OTHER; note = 2'-O-methyladenosine-3'-phosphate
  modified_base 5: mod_base = OTHER; note = 2'-O-methyladenosine-3'-phosphate
  modified_base 6: mod_base = OTHER; note = 2'-fluoroguanosine-3'-phosphate
  modified_base 7: mod_base = OTHER; note = 2'-O-methyladenosine-3'-phosphate
  modified_base 8: mod_base = OTHER; note = 2'-fluorocytidine-3'-phosphate
  modified_base 9: mod_base = OTHER; note = 2'-fluorouridine-3'-phosphate
  modified_base 10: mod_base = OTHER; note = 2'-O-methyluridine-3'-phosphate
  modified_base 11: mod_base = OTHER; note = 2'-O-methylcytidine-3'-phosphate
  modified_base 12: mod_base = OTHER; note = 2'-O-methylcytidine-3'-phosphate
  modified_base 13: mod_base = OTHER; note = 2'-O-methyladenosine-3'-phosphate
  modified_base 14: mod_base = OTHER; note = 2'-fluorocytidine-3'-phosphate
  modified_base 15: mod_base = OTHER; note = 2'-O-methylcytidine-3'-phosphate
  modified_base 16: mod_base = OTHER; note = 2'-fluorouridine-3'-phosphate
  modified_base 17: mod_base = OTHER; note = 2'-O-methyluridine-3'-phosphate
  modified_base 18: mod_base = OTHER; note = 2'-O-methylcytidine-3'-phosphate
  modified_base 19: mod_base = OTHER; note = 2'-O-methylcytidine-3'-phosphate
  modified_base 20: mod_base = OTHER; note = 2'-O-methylcytidine-3'-phosphate
  modified_base 21: mod_base = OTHER; note = 2'-O-methyluridine-3'-phosphorothioate
  modified_base 22: mod_base = OTHER; note = 2'-O-methyluridine-3'-phosphorothioate
  modified_base 23: mod_base = OTHER; note = 2'-O-methylcytidine-3'-phosphate
aggaagacttccaccttcccttc

SEQ ID NO: 2820 - RNA, 21 nt, synthetic construct
  source 1..21: mol_type = other RNA
  modified_base 1: mod_base = OTHER; note = 2'-O-methylguanosine-3'- phosphorothioate
  modified_base 2: mod_base = OTHER; note = 2'-O-methylguanosine-3'- phosphorothioate
  modified_base 3: mod_base = OTHER; note = 2'-O-methylguanosine-3'-phosphate
  modified_base 4: mod_base = OTHER; note = 2'-O-methyladenosine-3'-phosphate
  modified_base 5: mod_base = OTHER; note = 2'-O-methyladenosine-3'-phosphate
  modified_base 6: mod_base = OTHER; note = 2'-O-methylguanosine-3'-phosphate
  modified_base 7: mod_base = OTHER; note = 2'-fluoroguanosine-3'-phosphate
  modified_base 8: mod_base = OTHER; note = 2'-O-methyluridine-3'-phosphate
  modified_base 9: mod_base = OTHER; note = 2'-fluoroguanosine-3'-phosphate
  modified_base 10: mod_base = OTHER; note = 2'-fluoroguanosine-3'-phosphate
  modified_base 11: mod_base = OTHER; note = 2'-fluoroadenosine-3'-phosphate
  modified_base 12: mod_base = OTHER; note = 2'-O-methyladenosine-3'-phosphate
  modified_base 13: mod_base = OTHER; note = 2'-O-methylguanosine-3'-phosphate
  modified_base 14: mod_base = OTHER; note = 2'-O-methyluridine-3'-phosphate
  modified_base 15: mod_base = OTHER; note = 2'-O-methylcytidine-3'-phosphate
  modified_base 16: mod_base = OTHER; note = 2'-O-methyluridine-3'-phosphate
  modified_base 17: mod_base = OTHER; note = 2'-O-methyluridine-3'-phosphate
  modified_base 18: mod_base = OTHER; note = 2'-O-methylcytidine-3'-phosphate
  modified_base 19: mod_base = OTHER; note = 2'-O-methylcytidine-3'-phosphate
  modified_base 20: mod_base = OTHER; note = 2'-O-methyluridine-3'-phosphate
  modified_base 21: mod_base = OTHER; note 2'-O-methylguanosine-3'-phosphate-N-[tris(GalNAc-alkyl)-ami dodecanoyl)]-4-hydroxyprolinol (Hyp-(GalNAc-alkyl)3)
gggaaggtggaagtcttcctg

SEQ ID NO: 2821 - RNA, 23 nt, synthetic construct
  source 1..23: mol_type = other RNA
  modified_base 1: mod_base = OTHER; note = 2'-O-methylcytidine-3'- phosphorothioate
  modified_base 2: mod_base = OTHER; note = 2'-fluoroadenosine-3'-phosphorothioate
  modified_base 3: mod_base = OTHER; note = 2'-O-methylguanosine-3'-phosphate
  modified_base 4: mod_base = OTHER; note = 2'-O-methylguanosine-3'-phosphate
  modified_base 5: mod_base = OTHER; note = 2'-O-methyladenosine-3'-phosphate
  modified_base 6: mod_base = OTHER; note = 2'-fluoroadenosine-3'-phosphate
  modified_base 7: mod_base = OTHER; note = 2'-O-methylguanosine-3'-phosphate
  modified_base 8: mod_base = OTHER; note = 2'-fluoroadenosine-3'-phosphate
  modified_base 9: mod_base = OTHER; note = 2'-fluorocytidine-3'-phosphate
  modified_base 10: mod_base = OTHER; note = 2'-O-methyluridine-3'-phosphate
  modified_base 11: mod_base = OTHER; note = 2'-O-methyluridine-3'-phosphate
  modified_base 12: mod_base = OTHER; note = 2'-O-methylcytidine-3'-phosphate
  modified_base 13: mod_base = OTHER; note = 2'-O-methylcytidine-3'-phosphate
  modified_base 14: mod_base = OTHER; note = 2'-fluoroadenosine-3'-phosphate
  modified_base 15: mod_base = OTHER; note = 2'-O-methylcytidine-3'-phosphate
  modified_base 16: mod_base = OTHER; note = 2'-fluorocytidine-3'-phosphate
  modified_base 17: mod_base = OTHER; note = 2'-O-methyluridine-3'-phosphate
  modified_base 18: mod_base = OTHER; note = 2'-O-methyluridine-3'-phosphate
  modified_base 19: mod_base = OTHER; note = 2'-O-methylcytidine-3'-phosphate
  modified_base 20: mod_base = OTHER; note = 2'-O-methylcytidine-3'-phosphate
  modified_base 21: mod_base = OTHER; note = 2'-O-methylcytidine-3'- phosphorothioate
  modified_base 22: mod_base = OTHER; note = 2'-O-methyluridine-3'-phosphorothioate
  modified_base 23: mod_base = OTHER; note = 2'-O-methyluridine-3'-phosphate
caggaagacttccaccttccctt

SEQ ID NO: 2822 - RNA, 21 nt, synthetic construct
  source 1..21: mol_type = other RNA
  modified_base 1: mod_base = OTHER; note = 2'-O-methyluridine-3'-phosphorothioate
  modified_base 2: mod_base = OTHER; note = 2'-O-methylguanosine-3'- phosphorothioate
  modified_base 3: mod_base = OTHER; note = 2'-O-methylguanosine-3'-phosphate
  modified_base 4: mod_base = OTHER; note = 2'-O-methyladenosine-3'-phosphate
  modified_base 5: mod_base = OTHER; note = 2'-O-methyladenosine-3'-phosphate
  modified_base 6: mod_base = OTHER; note = 2'-O-methylguanosine-3'-phosphate
  modified_base 7: mod_base = OTHER; note = 2'-fluoroguanosine-3'-phosphate
  modified_base 8: mod_base = OTHER; note = 2'-O-methylguanosine-3'-phosphate
  modified_base 9: mod_base = OTHER; note = 2'-fluoroadenosine-3'-phosphate
  modified_base 10: mod_base = OTHER; note = 2'-fluoroadenosine-3'-phosphate
  modified_base 11: mod_base = OTHER; note = 2'-fluoroguanosine-3'-phosphate
  modified_base 12: mod_base = OTHER; note = 2'-O-methylguanosine-3'-phosphate
  modified_base 13: mod_base = OTHER; note = 2'-O-methyluridine-3'-phosphate
  modified_base 14: mod_base = OTHER; note = 2'-O-methylguanosine-3'-phosphate
  modified_base 15: mod_base = OTHER; note = 2'-O-methylguanosine-3'-phosphate
  modified_base 16: mod_base = OTHER; note = 2'-O-methyladenosine-3'-phosphate
  modified_base 17: mod_base = OTHER; note = 2'-O-methyladenosine-3'-phosphate
  modified_base 18: mod_base = OTHER; note = 2'-O-methylguanosine-3'-phosphate
  modified_base 19: mod_base = OTHER; note = 2'-O-methyluridine-3'-phosphate
  modified_base 20: mod_base = OTHER; note = 2'-O-methylcytidine-3'-phosphate
  modified_base 21: mod_base = OTHER; note 2'-O-methyluridine-3'-phosphate-N-[tris(GalNAc-alkyl)-amido decanoyl)]-4-hydroxyprolinol (Hyp-(GalNAc-alkyl)3)
tggaagggaaggtggaagtct

SEQ ID NO: 2823 - RNA, 23 nt, synthetic construct
  source 1..23: mol_type = other RNA
  modified_base 1: mod_base = OTHER; note = 2'-O-methyladenosine-3'- phosphorothioate
  modified_base 2: mod_base = OTHER; note = 2'-fluoroguanosine-3'-phosphorothioate
  modified_base 3: mod_base = OTHER; note = 2'-O-methyladenosine-3'-phosphate
  modified_base 4: mod_base = OTHER; note = 2'-O-methylcytidine-3'-phosphate
  modified_base 5: mod_base = OTHER; note = 2'-O-methyluridine-3'-phosphate
  modified_base 6: mod_base = OTHER; note = 2'-fluorouridine-3'-phosphate
  modified_base 7: mod_base = OTHER; note = 2'-O-methylcytidine-3'-phosphate
  modified_base 8: mod_base = OTHER; note = 2'-fluorocytidine-3'-phosphate
  modified_base 9: mod_base = OTHER; note = 2'-fluoroadenosine-3'-phosphate
  modified_base 10: mod_base = OTHER; note = 2'-O-methylcytidine-3'-phosphate
  modified_base 11: mod_base = OTHER; note = 2'-O-methylcytidine-3'-phosphate
  modified_base 12: mod_base = OTHER; note = 2'-O-methyluridine-3'-phosphate
  modified_base 13: mod_base = OTHER; note = 2'-O-methyluridine-3'-phosphate
  modified_base 14: mod_base = OTHER; note = 2'-fluorocytidine-3'-phosphate
  modified_base 15: mod_base = OTHER; note = 2'-O-methylcytidine-3'-phosphate
  modified_base 16: mod_base = OTHER; note = 2'-fluorocytidine-3'-phosphate
  modified_base 17: mod_base = OTHER; note = 2'-O-methyluridine-3'-phosphate
  modified_base 18: mod_base = OTHER; note = 2'-O-methyluridine-3'-phosphate
  modified_base 19: mod_base = OTHER; note = 2'-O-methylcytidine-3'-phosphate
  modified_base 20: mod_base = OTHER; note = 2'-O-methylcytidine-3'-phosphate
  modified_base 21: mod_base = OTHER; note = 2'-O-methyladenosine-3'- phosphorothioate
  modified_base 22: mod_base = OTHER; note = 2'-O-methylcytidine-3'- phosphorothioate
  modified_base 23: mod_base = OTHER; note = 2'-O-methyladenosine-3'-phosphate
agacttccaccttcccttccaca

SEQ ID NO: 2824 - RNA, 21 nt, synthetic construct
  source 1..21: mol_type = other RNA
  modified_base 1: mod_base = OTHER; note = 2'-O-methylguanosine-3'- phosphorothioate
  modified_base 2: mod_base = OTHER; note = 2'-O-methyluridine-3'-phosphorothioate
  modified_base 3: mod_base = OTHER; note = 2'-O-methylguanosine-3'-phosphate
  modified_base 4: mod_base = OTHER; note = 2'-O-methylguanosine-3'-phosphate
  modified_base 5: mod_base = OTHER; note = 2'-O-methyladenosine-3'-phosphate
  modified_base 6: mod_base = OTHER; note = 2'-O-methyladenosine-3'-phosphate
  modified_base 7: mod_base = OTHER; note = 2'-fluoroguanosine-3'-phosphate
  modified_base 8: mod_base = OTHER; note = 2'-O-methylguanosine-3'-phosphate
  modified_base 9: mod_base = OTHER; note = 2'-fluoroguanosine-3'-phosphate
  modified_base 10: mod_base = OTHER; note = 2'-fluoroadenosine-3'-phosphate
  modified_base 11: mod_base = OTHER; note = 2'-fluoroadenosine-3'-phosphate
  modified_base 12: mod_base = OTHER; note = 2'-O-methylguanosine-3'-phosphate
  modified_base 13: mod_base = OTHER; note = 2'-O-methylguanosine-3'-phosphate
  modified_base 14: mod_base = OTHER; note = 2'-O-methyluridine-3'-phosphate
  modified_base 15: mod_base = OTHER; note = 2'-O-methylguanosine-3'-phosphate
  modified_base 16: mod_base = OTHER; note = 2'-O-methylguanosine-3'-phosphate
  modified_base 17: mod_base = OTHER; note = 2'-O-methyladenosine-3'-phosphate
  modified_base 18: mod_base = OTHER; note = 2'-O-methyladenosine-3'-phosphate
  modified_base 19: mod_base = OTHER; note = 2'-O-methylguanosine-3'-phosphate
  modified_base 20: mod_base = OTHER; note = 2'-O-methyluridine-3'-phosphate
  modified_base 21: mod_base = OTHER; note 2'-O-methylcytidine-3'-phosphate-N-[tris(GalNAc-alkyl)-amid odecanoyl)]-4-hydroxyprolinol (Hyp-(GalNAc-alkyl)3)
gtggaagggaaggtggaagtc

SEQ ID NO: 2825 - RNA, 23 nt, synthetic construct
  source 1..23: mol_type = other RNA
  modified_base 1: mod_base = OTHER; note = 2'-O-methylguanosine-3'- phosphorothioate
  modified_base 2: mod_base = OTHER; note = 2'-fluoroadenosine-3'-phosphorothioate
  modified_base 3: mod_base = OTHER; note = 2'-O-methylcytidine-3'-phosphate
  modified_base 4: mod_base = OTHER; note = 2'-O-methyluridine-3'-phosphate
  modified_base 5: mod_base = OTHER; note = 2'-O-methyluridine-3'-phosphate
  modified_base 6: mod_base = OTHER; note = 2'-fluorocytidine-3'-phosphate
  modified_base 7: mod_base = OTHER; note = 2'-O-methylcytidine-3'-phosphate
  modified_base 8: mod_base = OTHER; note = 2'-fluoroadenosine-3'-phosphate
  modified_base 9: mod_base = OTHER; note = 2'-fluorocytidine-3'-phosphate
  modified_base 10: mod_base = OTHER; note = 2'-O-methylcytidine-3'-phosphate
  modified_base 11: mod_base = OTHER; note = 2'-O-methyluridine-3'-phosphate
  modified_base 12: mod_base = OTHER; note = 2'-O-methyluridine-3'-phosphate
  modified_base 13: mod_base = OTHER; note = 2'-O-methylcytidine-3'-phosphate
  modified_base 14: mod_base = OTHER; note = 2'-fluorocytidine-3'-phosphate
  modified_base 15: mod_base = OTHER; note = 2'-O-methylcytidine-3'-phosphate
  modified_base 16: mod_base = OTHER; note = 2'-fluorouridine-3'-phosphate
  modified_base 17: mod_base = OTHER; note = 2'-O-methyluridine-3'-phosphate
  modified_base 18: mod_base = OTHER; note = 2'-O-methylcytidine-3'-phosphate
  modified_base 19: mod_base = OTHER; note = 2'-O-methylcytidine-3'-phosphate
  modified_base 20: mod_base = OTHER; note = 2'-O-methyladenosine-3'-phosphate
  modified_base 21: mod_base = OTHER; note = 2'-O-methylcytidine-3'- phosphorothioate
  modified_base 22: mod_base = OTHER; note = 2'-O-methyladenosine-3'- phosphorothioate
  modified_base 23: mod_base = OTHER; note = 2'-O-methylguanosine-3'-phosphate
gacttccaccttcccttccacag

SEQ ID NO: 2826 - RNA, 21 nt, synthetic construct
  source 1..21: mol_type = other RNA
  modified_base 1: mod_base = OTHER; note = 2'-O-methylguanosine-3'- phosphorothioate
  modified_base 2: mod_base = OTHER; note = 2'-O-methylguanosine-3'- phosphorothioate
  modified_base 3: mod_base = OTHER; note = 2'-O-methylcytidine-3'-phosphate
  modified_base 4: mod_base = OTHER; note = 2'-O-methylguanosine-3'-phosphate
  modified_base 5: mod_base = OTHER; note = 2'-O-methyladenosine-3'-phosphate
  modified_base 6: mod_base = OTHER; note = 2'-O-methylguanosine-3'-phosphate
  modified_base 7: mod_base = OTHER; note = 2'-fluorocytidine-3'-phosphate
  modified_base 8: mod_base = OTHER; note = 2'-O-methyluridine-3'-phosphate
  modified_base 9: mod_base = OTHER; note = 2'-fluorouridine-3'-phosphate
  modified_base 10: mod_base = OTHER; note = 2'-fluoroguanosine-3'-phosphate
  modified_base 11: mod_base = OTHER; note = 2'-fluorocytidine-3'-phosphate
  modified_base 12: mod_base = OTHER; note = 2'-O-methylcytidine-3'-phosphate
  modified_base 13: mod_base = OTHER; note = 2'-O-methyladenosine-3'-phosphate
  modified_base 14: mod_base = OTHER; note = 2'-O-methylcytidine-3'-phosphate
  modified_base 15: mod_base = OTHER; note = 2'-O-methyluridine-3'-phosphate
  modified_base 16: mod_base = OTHER; note = 2'-O-methylguanosine-3'-phosphate
  modified_base 17: mod_base = OTHER; note = 2'-O-methyluridine-3'-phosphate
  modified_base 18: mod_base = OTHER; note = 2'-O-methylguanosine-3'-phosphate
  modified_base 19: mod_base = OTHER; note = 2'-O-methyladenosine-3'-phosphate
  modified_base 20: mod_base = OTHER; note = 2'-O-methylguanosine-3'-phosphate
  modified_base 21: mod_base = OTHER; note 2'-O-methyladenosine-3'-phosphate-N-[tris(GalNAc-alkyl)-ami dodecanoyl)]-4-hydroxyprolinol (Hyp-(GalNAc-alkyl)3)
ggcgagcttgccactgtgaga

SEQ ID NO: 2827 - RNA, 23 nt, synthetic construct
  source 1..23: mol_type = other RNA
  modified_base 1: mod_base = OTHER; note = 2'-O-methyluridine-3'-phosphorothioate
  modified_base 2: mod_base = OTHER; note = 2'-fluorocytidine-3'-phosphorothioate
  modified_base 3: mod_base = OTHER; note = 2'-O-methyluridine-3'-phosphate
  modified_base 4: mod_base = OTHER; note = 2'-O-methylcytidine-3'-phosphate
  modified_base 5: mod_base = OTHER; note = 2'-O-methyladenosine-3'-phosphate
  modified_base 6: mod_base = OTHER; note = 2'-fluorocytidine-3'-phosphate
  modified_base 7: mod_base = OTHER; note = 2'-O-methyladenosine-3'-phosphate
  modified_base 8: mod_base = OTHER; note = 2'-fluoroguanosine-3'-phosphate
  modified_base 9: mod_base = OTHER; note = 2'-fluorouridine-3'-phosphate
  modified_base 10: mod_base = OTHER; note = 2'-O-methylguanosine-3'-phosphate
  modified_base 11: mod_base = OTHER; note = 2'-O-methylguanosine-3'-phosphate
  modified_base 12: mod_base = OTHER; note = 2'-O-methylcytidine-3'-phosphate
  modified_base 13: mod_base = OTHER; note = 2'-O-methyladenosine-3'-phosphate
  modified_base 14: mod_base = OTHER; note = 2'-fluoroadenosine-3'-phosphate
  modified_base 15: mod_base = OTHER; note = 2'-O-methylguanosine-3'-phosphate
  modified_base 16: mod_base = OTHER; note = 2'-fluorocytidine-3'-phosphate
  modified_base 17: mod_base = OTHER; note = 2'-O-methyluridine-3'-phosphate
  modified_base 18: mod_base = OTHER; note = 2'-O-methylcytidine-3'-phosphate
  modified_base 19: mod_base = OTHER; note = 2'-O-methylguanosine-3'-phosphate
  modified_base 20: mod_base = OTHER; note = 2'-O-methylcytidine-3'-phosphate
  modified_base 21: mod_base = OTHER; note = 2'-O-methylcytidine-3'- phosphorothioate
  modified_base 22: mod_base = OTHER; note = 2'-O-methylguanosine-3'- phosphorothioate
  modified_base 23: mod_base = OTHER; note = 2'-O-methyluridine-3'-phosphate
tctcacagtggcaagctcgccgt

SEQ ID NO: 2828 - RNA, 21 nt, synthetic construct
  source 1..21: mol_type = other RNA
  modified_base 1: mod_base = OTHER; note = 2'-O-methylguanosine-3'- phosphorothioate
  modified_base 2: mod_base = OTHER; note = 2'-O-methylcytidine-3'- phosphorothioate
  modified_base 3: mod_base = OTHER; note = 2'-O-methylguanosine-3'-phosphate
  modified_base 4: mod_base = OTHER; note = 2'-O-methyladenosine-3'-phosphate
  modified_base 5: mod_base = OTHER; note = 2'-O-methylguanosine-3'-phosphate
  modified_base 6: mod_base = OTHER; note = 2'-O-methylcytidine-3'-phosphate
  modified_base 7: mod_base = OTHER; note = 2'-fluorouridine-3'-phosphate
  modified_base 8: mod_base = OTHER; note = 2'-O-methyluridine-3'-phosphate
  modified_base 9: mod_base = OTHER; note = 2'-fluoroguanosine-3'-phosphate
  modified_base 10: mod_base = OTHER; note = 2'-fluorocytidine-3'-phosphate
  modified_base 11: mod_base = OTHER; note = 2'-fluorocytidine-3'-phosphate
  modified_base 12: mod_base = OTHER; note = 2'-O-methyladenosine-3'-phosphate
  modified_base 13: mod_base = OTHER; note = 2'-O-methylcytidine-3'-phosphate
  modified_base 14: mod_base = OTHER; note = 2'-O-methyluridine-3'-phosphate
  modified_base 15: mod_base = OTHER; note = 2'-O-methylguanosine-3'-phosphate
  modified_base 16: mod_base = OTHER; note = 2'-O-methyluridine-3'-phosphate
  modified_base 17: mod_base = OTHER; note = 2'-O-methylguanosine-3'-phosphate
  modified_base 18: mod_base = OTHER; note = 2'-O-methyladenosine-3'-phosphate
  modified_base 19: mod_base = OTHER; note = 2'-O-methylguanosine-3'-phosphate
  modified_base 20: mod_base = OTHER; note = 2'-O-methyladenosine-3'-phosphate
  modified_base 21: mod_base = OTHER; note 2'-O-methylguanosine-3'-phosphate-N-[tris(GalNAc-alkyl)-ami dodecanoyl)]-4-hydroxyprolinol (Hyp-(GalNAc-alkyl)3)
gcgagcttgccactgtgagag

SEQ ID NO: 2829 - RNA, 23 nt, synthetic construct
  source 1..23: mol_type = other RNA
  modified_base 1: mod_base = OTHER; note = 2'-O-methylcytidine-3'- phosphorothioate
  modified_base 2: mod_base = OTHER; note = 2'-fluorouridine -3'-phosphorothioate
  modified_base 3: mod_base = OTHER; note = 2'-O-methylcytidine-3'-phosphate
  modified_base 4: mod_base = OTHER; note = 2'-O-methyluridine-3'-phosphate
  modified_base 5: mod_base = OTHER; note = 2'-O-methylcytidine-3'-phosphate
  modified_base 6: mod_base = OTHER; note = 2'-fluoroadenosine-3'-phosphate
  modified_base 7: mod_base = OTHER; note = 2'-O-methylcytidine-3'-phosphate
  modified_base 8: mod_base = OTHER; note = 2'-fluoroadenosine-3'-phosphate
  modified_base 9: mod_base = OTHER; note = 2'-fluoroguanosine-3'-phosphate
  modified_base 10: mod_base = OTHER; note = 2'-O-methyluridine-3'-phosphate
  modified_base 11: mod_base = OTHER; note = 2'-O-methylguanosine-3'-phosphate
  modified_base 12: mod_base = OTHER; note = 2'-O-methylguanosine-3'-phosphate
  modified_base 13: mod_base = OTHER; note = 2'-O-methylcytidine-3'-phosphate
  modified_base 14: mod_base = OTHER; note = 2'-fluoroadenosine-3'-phosphate
  modified_base 15: mod_base = OTHER; note = 2'-O-methyladenosine-3'-phosphate
  modified_base 16: mod_base = OTHER; note = 2'-fluoroguanosine-3'-phosphate
  modified_base 17: mod_base = OTHER; note = 2'-O-methylcytidine-3'-phosphate
  modified_base 18: mod_base = OTHER; note = 2'-O-methyluridine-3'-phosphate
  modified_base 19: mod_base = OTHER; note = 2'-O-methylcytidine-3'-phosphate
  modified_base 20: mod_base = OTHER; note = 2'-O-methylguanosine-3'-phosphate
  modified_base 21: mod_base = OTHER; note = 2'-O-methylcytidine-3'- phosphorothioate
  modified_base 22: mod_base = OTHER; note = 2'-O-methylcytidine-3'- phosphorothioate
  modified_base 23: mod_base = OTHER; note = 2'-O-methylguanosine-3'-phosphate
ctctcacagtggcaagctcgccg

SEQ ID NO: 2830 - RNA, 21 nt, synthetic construct
  source 1..21: mol_type = other RNA
  modified_base 1: mod_base = OTHER; note = 2'-O-methylguanosine-3'- phosphorothioate
  modified_base 2: mod_base = OTHER; note = 2'-O-methylguanosine-3'- phosphorothioate
  modified_base 3: mod_base = OTHER; note = 2'-O-methyladenosine-3'-phosphate
  modified_base 4: mod_base = OTHER; note = 2'-O-methylcytidine-3'-phosphate
  modified_base 5: mod_base = OTHER; note = 2'-O-methylguanosine-3'-phosphate
  modified_base 6: mod_base = OTHER; note = 2'-O-methylguanosine-3'-phosphate
  modified_base 7: mod_base = OTHER; note = 2'-fluorocytidine-3'-phosphate
  modified_base 8: mod_base = OTHER; note = 2'-O-methylguanosine-3'-phosphate
  modified_base 9: mod_base = OTHER; note = 2'-fluoroadenosine-3'-phosphate
  modified_base 10: mod_base = OTHER; note = 2'-fluoroguanosine-3'-phosphate
  modified_base 11: mod_base = OTHER; note = 2'-fluorocytidine-3'-phosphate
  modified_base 12: mod_base = OTHER; note = 2'-O-methyluridine-3'-phosphate
  modified_base 13: mod_base = OTHER; note = 2'-O-methyluridine-3'-phosphate
  modified_base 14: mod_base = OTHER; note = 2'-O-methylguanosine-3'-phosphate
  modified_base 15: mod_base = OTHER; note = 2'-O-methylcytidine-3'-phosphate
  modified_base 16: mod_base = OTHER; note = 2'-O-methylcytidine-3'-phosphate
  modified_base 17: mod_base = OTHER; note = 2'-O-methyladenosine-3'-phosphate
  modified_base 18: mod_base = OTHER; note = 2'-O-methylcytidine-3'-phosphate
  modified_base 19: mod_base = OTHER; note = 2'-O-methyluridine-3'-phosphate
  modified_base 20: mod_base = OTHER; note = 2'-O-methylguanosine-3'-phosphate
  modified_base 21: mod_base = OTHER; note 2'-O-methyluridine-3'-phosphate-N-[tris(GalNAc-alkyl)-amido decanoyl)]-4-hydroxyprolinol (Hyp-(GalNAc-alkyl)3)
ggacggcgagcttgccactgt

SEQ ID NO: 2831 - RNA, 23 nt, synthetic construct
  source 1..23: mol_type = other RNA
  modified_base 1: mod_base = OTHER; note = 2'-O-methyladenosine-3'- phosphorothioate
  modified_base 2: mod_base = OTHER; note = 2'-fluorocytidine-3'-phosphorothioate
  modified_base 3: mod_base = OTHER; note = 2'-O-methyladenosine-3'-phosphate
  modified_base 4: mod_base = OTHER; note = 2'-O-methylguanosine-3'-phosphate
  modified_base 5: mod_base = OTHER; note = 2'-O-methyluridine-3'-phosphate
  modified_base 6: mod_base = OTHER; note = 2'-fluoroguanosine-3'-phosphate
  modified_base 7: mod_base = OTHER; note = 2'-O-methylguanosine-3'-phosphate
  modified_base 8: mod_base = OTHER; note = 2'-fluorocytidine-3'-phosphate
  modified_base 9: mod_base = OTHER; note = 2'-fluoroadenosine-3'-phosphate
  modified_base 10: mod_base = OTHER; note = 2'-O-methyladenosine-3'-phosphate
  modified_base 11: mod_base = OTHER; note = 2'-O-methylguanosine-3'-phosphate
  modified_base 12: mod_base = OTHER; note = 2'-O-methylcytidine-3'-phosphate
  modified_base 13: mod_base = OTHER; note = 2'-O-methyluridine-3'-phosphate
  modified_base 14: mod_base = OTHER; note = 2'-fluorocytidine-3'-phosphate
  modified_base 15: mod_base = OTHER; note = 2'-O-methylguanosine-3'-phosphate
  modified_base 16: mod_base = OTHER; note = 2'-fluorocytidine-3'-phosphate
  modified_base 17: mod_base = OTHER; note = 2'-O-methylcytidine-3'-phosphate
  modified_base 18: mod_base = OTHER; note = 2'-O-methylguanosine-3'-phosphate
  modified_base 19: mod_base = OTHER; note = 2'-O-methyluridine-3'-phosphate
  modified_base 20: mod_base = OTHER; note = 2'-O-methylcytidine-3'-phosphate
  modified_base 21: mod_base = OTHER; note = 2'-O-methylcytidine-3'- phosphorothioate
  modified_base 22: mod_base = OTHER; note = 2'-O-methyladenosine-3'- phosphorothioate
  modified_base 23: mod_base = OTHER; note = 2'-O-methylcytidine-3'-phosphate
acagtggcaagctcgccgtccac

SEQ ID NO: 2832 - RNA, 21 nt, synthetic construct
  source 1..21: mol_type = other RNA
  modified_base 1: mod_base = OTHER; note = 2'-O-methyluridine-3'-phosphorothioate
  modified_base 2: mod_base = OTHER; note = 2'-O-methylguanosine-3'- phosphorothioate
  modified_base 3: mod_base = OTHER; note = 2'-O-methylguanosine-3'-phosphate
  modified_base 4: mod_base = OTHER; note = 2'-O-methyladenosine-3'-phosphate
  modified_base 5: mod_base = OTHER; note = 2'-O-methylcytidine-3'-phosphate
  modified_base 6: mod_base = OTHER; note = 2'-O-methylguanosine-3'-phosphate
  modified_base 7: mod_base = OTHER; note = 2'-fluoroguanosine-3'-phosphate
  modified_base 8: mod_base = OTHER; note = 2'-O-methylcytidine-3'-phosphate
  modified_base 9: mod_base = OTHER; note = 2'-fluoroguanosine-3'-phosphate
  modified_base 10: mod_base = OTHER; note = 2'-fluoroadenosine-3'-phosphate
  modified_base 11: mod_base = OTHER; note = 2'-fluoroguanosine-3'-phosphate
  modified_base 12: mod_base = OTHER; note = 2'-O-methylcytidine-3'-phosphate
  modified_base 13: mod_base = OTHER; note = 2'-O-methyluridine-3'-phosphate
  modified_base 14: mod_base = OTHER; note = 2'-O-methyluridine-3'-phosphate
  modified_base 15: mod_base = OTHER; note = 2'-O-methylguanosine-3'-phosphate
  modified_base 16: mod_base = OTHER; note = 2'-O-methylcytidine-3'-phosphate
  modified_base 17: mod_base = OTHER; note = 2'-O-methylcytidine-3'-phosphate
  modified_base 18: mod_base = OTHER; note = 2'-O-methyladenosine-3'-phosphate
  modified_base 19: mod_base = OTHER; note = 2'-O-methylcytidine-3'-phosphate
  modified_base 20: mod_base = OTHER; note = 2'-O-methyluridine-3'-phosphate
  modified_base 21: mod_base = OTHER; note 2'-O-methylguanosine-3'-phosphate-N-[tris(GalNAc-alkyl)-ami dodecanoyl)]-4-hydroxyprolinol (Hyp-(GalNAc-alkyl)3)
tggacggcgagcttgccactg

SEQ ID NO: 2833 - RNA, 23 nt, synthetic construct
  source 1..23: mol_type = other RNA
  modified_base 1: mod_base = OTHER; note = 2'-O-methylcytidine-3'- phosphorothioate
  modified_base 2: mod_base = OTHER; note = 2'-fluoroadenosine-3'-phosphorothioate
  modified_base 3: mod_base = OTHER; note = 2'-O-methylguanosine-3'-phosphate
  modified_base 4: mod_base = OTHER; note = 2'-O-methyluridine-3'-phosphate
  modified_base 5: mod_base = OTHER; note = 2'-O-methylguanosine-3'-phosphate
  modified_base 6: mod_base = OTHER; note = 2'-fluoroguanosine-3'-phosphate
  modified_base 7: mod_base = OTHER; note = 2'-O-methylcytidine-3'-phosphate
  modified_base 8: mod_base = OTHER; note = 2'-fluoroadenosine-3'-phosphate
  modified_base 9: mod_base = OTHER; note = 2'-fluoroadenosine-3'-phosphate
  modified_base 10: mod_base = OTHER; note = 2'-O-methylguanosine-3'-phosphate
  modified_base 11: mod_base = OTHER; note = 2'-O-methylcytidine-3'-phosphate
  modified_base 12: mod_base = OTHER; note = 2'-O-methyluridine-3'-phosphate
  modified_base 13: mod_base = OTHER; note = 2'-O-methylcytidine-3'-phosphate
  modified_base 14: mod_base = OTHER; note = 2'-fluoroguanosine-3'-phosphate
  modified_base 15: mod_base = OTHER; note = 2'-O-methylcytidine-3'-phosphate
  modified_base 16: mod_base = OTHER; note = 2'-fluorocytidine-3'-phosphate
  modified_base 17: mod_base = OTHER; note = 2'-O-methylguanosine-3'-phosphate
  modified_base 18: mod_base = OTHER; note = 2'-O-methyluridine-3'-phosphate
  modified_base 19: mod_base = OTHER; note = 2'-O-methylcytidine-3'-phosphate
  modified_base 20: mod_base = OTHER; note = 2'-O-methylcytidine-3'-phosphate
  modified_base 21: mod_base = OTHER; note = 2'-O-methyladenosine-3'- phosphorothioate
  modified_base 22: mod_base = OTHER; note = 2'-O-methylcytidine-3'- phosphorothioate
  modified_base 23: mod_base = OTHER; note = 2'-O-methyladenosine-3'-phosphate
cagtggcaagctcgccgtccaca

SEQ ID NO: 2834 - RNA, 21 nt, synthetic construct
  source 1..21: mol_type = other RNA
  modified_base 1: mod_base = OTHER; note = 2'-O-methyladenosine-3'- phosphorothioate
  modified_base 2: mod_base = OTHER; note = 2'-O-methyluridine-3'-phosphorothioate
  modified_base 3: mod_base = OTHER; note = 2'-O-methylguanosine-3'-phosphate
  modified_base 4: mod_base = OTHER; note = 2'-O-methyluridine-3'-phosphate
  modified_base 5: mod_base = OTHER; note = 2'-O-methylguanosine-3'-phosphate
  modified_base 6: mod_base = OTHER; note = 2'-O-methylcytidine-3'-phosphate
  modified_base 7: mod_base = OTHER; note = 2'-fluoroguanosine-3'-phosphate
  modified_base 8: mod_base = OTHER; note = 2'-O-methyluridine-3'-phosphate
  modified_base 9: mod_base = OTHER; note = 2'-fluoroadenosine-3'-phosphate
  modified_base 10: mod_base = OTHER; note = 2'-fluoroadenosine-3'-phosphate
  modified_base 11: mod_base = OTHER; note = 2'-fluorocytidine-3'-phosphate
  modified_base 12: mod_base = OTHER; note = 2'-O-methyladenosine-3'-phosphate
  modified_base 13: mod_base = OTHER; note = 2'-O-methylguanosine-3'-phosphate
  modified_base 14: mod_base = OTHER; note = 2'-O-methyladenosine-3'-phosphate
  modified_base 15: mod_base = OTHER; note = 2'-O-methyluridine-3'-phosphate
  modified_base 16: mod_base = OTHER; note = 2'-O-methyluridine-3'-phosphate
  modified_base 17: mod_base = OTHER; note = 2'-O-methylcytidine-3'-phosphate
  modified_base 18: mod_base = OTHER; note = 2'-O-methyladenosine-3'-phosphate
  modified_base 19: mod_base = OTHER; note = 2'-O-methyladenosine-3'-phosphate
  modified_base 20: mod_base = OTHER; note = 2'-O-methyladenosine-3'-phosphate
  modified_base 21: mod_base = OTHER; note 2'-O-methylcytidine-3'-phosphate-N-[tris(GalNAc-alkyl)-amid odecanoyl)]-4-hydroxyprolinol (Hyp-(GalNAc-alkyl)3)
atgtgcgtaacagattcaaac

SEQ ID NO: 2835 - RNA, 23 nt, synthetic construct
  source 1..23: mol_type = other RNA
  modified_base 1: mod_base = OTHER; note = 2'-O-methylguanosine-3'- phosphorothioate
  modified_base 2: mod_base = OTHER; note = 2'-fluorouridine -3'-phosphorothioate
  modified_base 3: mod_base = OTHER; note = 2'-O-methyluridine-3'-phosphate
  modified_base 4: mod_base = OTHER; note = 2'-O-methyluridine-3'-phosphate
  modified_base 5: mod_base = OTHER; note = 2'-O-methylguanosine-3'-phosphate
  modified_base 6: mod_base = OTHER; note = 2'-fluoroadenosine-3'-phosphate
  modified_base 7: mod_base = OTHER; note = 2'-O-methyladenosine-3'-phosphate
  modified_base 8: mod_base = OTHER; note = 2'-fluorouridine-3'-phosphate
  modified_base 9: mod_base = OTHER; note = 2'-fluorocytidine-3'-phosphate
  modified_base 10: mod_base = OTHER; note = 2'-O-methyluridine-3'-phosphate
  modified_base 11: mod_base = OTHER; note = 2'-O-methylguanosine-3'-phosphate
  modified_base 12: mod_base = OTHER; note = 2'-O-methyluridine-3'-phosphate
  modified_base 13: mod_base = OTHER; note = 2'-O-methyluridine-3'-phosphate
  modified_base 14: mod_base = OTHER; note = 2'-fluoroadenosine-3'-phosphate
  modified_base 15: mod_base = OTHER; note = 2'-O-methylcytidine-3'-phosphate
  modified_base 16: mod_base = OTHER; note = 2'-fluoroguanosine-3'-phosphate
  modified_base 17: mod_base = OTHER; note = 2'-O-methylcytidine-3'-phosphate
  modified_base 18: mod_base = OTHER; note = 2'-O-methyladenosine-3'-phosphate
  modified_base 19: mod_base = OTHER; note = 2'-O-methylcytidine-3'-phosphate
  modified_base 20: mod_base = OTHER; note = 2'-O-methyladenosine-3'-phosphate
  modified_base 21: mod_base = OTHER; note = 2'-O-methyluridine-3'-phosphorothioate
  modified_base 22: mod_base = OTHER; note = 2'-O-methylcytidine-3'- phosphorothioate
  modified_base 23: mod_base = OTHER; note = 2'-O-methyladenosine-3'-phosphate
gtttgaatctgttacgcacatca

SEQ ID NO: 2836 - RNA, 21 nt, synthetic construct
  source 1..21: mol_type = other RNA
  modified_base 1: mod_base = OTHER; note = 2'-O-methyluridine-3'-phosphorothioate
  modified_base 2: mod_base = OTHER; note = 2'-O-methylguanosine-3'- phosphorothioate
  modified_base 3: mod_base = OTHER; note = 2'-O-methyluridine-3'-phosphate
  modified_base 4: mod_base = OTHER; note = 2'-O-methylguanosine-3'-phosphate
  modified_base 5: mod_base = OTHER; note = 2'-O-methylcytidine-3'-phosphate
  modified_base 6: mod_base = OTHER; note = 2'-O-methylguanosine-3'-phosphate
  modified_base 7: mod_base = OTHER; note = 2'-fluorouridine-3'-phosphate
  modified_base 8: mod_base = OTHER; note = 2'-O-methyladenosine-3'-phosphate
  modified_base 9: mod_base = OTHER; note = 2'-fluoroadenosine-3'-phosphate
  modified_base 10: mod_base = OTHER; note = 2'-fluorocytidine-3'-phosphate
  modified_base 11: mod_base = OTHER; note = 2'-fluoroadenosine-3'-phosphate
  modified_base 12: mod_base = OTHER; note = 2'-O-methylguanosine-3'-phosphate
  modified_base 13: mod_base = OTHER; note = 2'-O-methyladenosine-3'-phosphate
  modified_base 14: mod_base = OTHER; note = 2'-O-methyluridine-3'-phosphate
  modified_base 15: mod_base = OTHER; note = 2'-O-methyluridine-3'-phosphate
  modified_base 16: mod_base = OTHER; note = 2'-O-methylcytidine-3'-phosphate
  modified_base 17: mod_base = OTHER; note = 2'-O-methyladenosine-3'-phosphate
  modified_base 18: mod_base = OTHER; note = 2'-O-methyladenosine-3'-phosphate
  modified_base 19: mod_base = OTHER; note = 2'-O-methyladenosine-3'-phosphate
  modified_base 20: mod_base = OTHER; note = 2'-O-methylcytidine-3'-phosphate
  modified_base 21: mod_base = OTHER; note 2'-O-methyluridine-3'-phosphate-N-[tris(GalNAc-alkyl)-amido decanoyl)]-4-hydroxyprolinol (Hyp-(GalNAc-alkyl)3)
tgtgcgtaacagattcaaact

SEQ ID NO: 2837 - RNA, 23 nt, synthetic construct
  source 1..23: mol_type = other RNA
  modified_base 1: mod_base = OTHER; note = 2'-O-methyladenosine-3'- phosphorothioate
  modified_base 2: mod_base = OTHER; note = 2'-fluoroguanosine-3'-phosphorothioate
  modified_base 3: mod_base = OTHER; note = 2'-O-methyluridine-3'-phosphate
  modified_base 4: mod_base = OTHER; note = 2'-O-methyluridine-3'-phosphate
  modified_base 5: mod_base = OTHER; note = 2'-O-methyluridine-3'-phosphate
  modified_base 6: mod_base = OTHER; note = 2'-fluoroguanosine-3'-phosphate
  modified_base 7: mod_base = OTHER; note = 2'-O-methyladenosine-3'-phosphate
  modified_base 8: mod_base = OTHER; note = 2'-fluoroadenosine-3'-phosphate
  modified_base 9: mod_base = OTHER; note = 2'-fluorouridine-3'-phosphate
  modified_base 10: mod_base = OTHER; note = 2'-O-methylcytidine-3'-phosphate
  modified_base 11: mod_base = OTHER; note = 2'-O-methyluridine-3'-phosphate
  modified_base 12: mod_base = OTHER; note = 2'-O-methylguanosine-3'-phosphate
  modified_base 13: mod_base = OTHER; note = 2'-O-methyluridine-3'-phosphate
  modified_base 14: mod_base = OTHER; note = 2'-fluorouridine-3'-phosphate
  modified_base 15: mod_base = OTHER; note = 2'-O-methyladenosine-3'-phosphate
  modified_base 16: mod_base = OTHER; note = 2'-fluorocytidine-3'-phosphate
  modified_base 17: mod_base = OTHER; note = 2'-O-methylguanosine-3'-phosphate
  modified_base 18: mod_base = OTHER; note = 2'-O-methylcytidine-3'-phosphate
  modified_base 19: mod_base = OTHER; note = 2'-O-methyladenosine-3'-phosphate
  modified_base 20: mod_base = OTHER; note = 2'-O-methylcytidine-3'-phosphate
  modified_base 21: mod_base = OTHER; note = 2'-O-methyladenosine-3'- phosphorothioate
  modified_base 22: mod_base = OTHER; note = 2'-O-methyluridine-3'-phosphorothioate
  modified_base 23: mod_base = OTHER; note = 2'-O-methylcytidine-3'-phosphate
agtttgaatctgttacgcacatc

SEQ ID NO: 2838 - RNA, 21 nt, synthetic construct
  source 1..21: mol_type = other RNA
  modified_base 1: mod_base = OTHER; note = 2'-O-methylguanosine-3'- phosphorothioate
  modified_base 2: mod_base = OTHER; note = 2'-O-methyladenosine-3'- phosphorothioate
  modified_base 3: mod_base = OTHER; note = 2'-O-methyluridine-3'-phosphate
  modified_base 4: mod_base = OTHER; note = 2'-O-methylguanosine-3'-phosphate
  modified_base 5: mod_base = OTHER; note = 2'-O-methyladenosine-3'-phosphate
  modified_base 6: mod_base = OTHER; note = 2'-O-methyluridine-3'-phosphate
  modified_base 7: mod_base = OTHER; note = 2'-fluoroguanosine-3'-phosphate
  modified_base 8: mod_base = OTHER; note = 2'-O-methyluridine-3'-phosphate
  modified_base 9: mod_base = OTHER; note = 2'-fluoroguanosine-3'-phosphate
  modified_base 10: mod_base = OTHER; note = 2'-fluorocytidine-3'-phosphate
  modified_base 11: mod_base = OTHER; note = 2'-fluoroguanosine-3'-phosphate
  modified_base 12: mod_base = OTHER; note = 2'-O-methyluridine-3'-phosphate
  modified_base 13: mod_base = OTHER; note = 2'-O-methyladenosine-3'-phosphate
  modified_base 14: mod_base = OTHER; note = 2'-O-methyladenosine-3'-phosphate
  modified_base 15: mod_base = OTHER; note = 2'-O-methylcytidine-3'-phosphate
  modified_base 16: mod_base = OTHER; note = 2'-O-methyladenosine-3'-phosphate
  modified_base 17: mod_base = OTHER; note = 2'-O-methylguanosine-3'-phosphate
  modified_base 18: mod_base = OTHER; note = 2'-O-methyladenosine-3'-phosphate
  modified_base 19: mod_base = OTHER; note = 2'-O-methyluridine-3'-phosphate
  modified_base 20: mod_base = OTHER; note = 2'-O-methyluridine-3'-phosphate
  modified_base 21: mod_base = OTHER; note 2'-O-methylcytidine-3'-phosphate-N-[tris(GalNAc-alkyl)-amid odecanoyl)]-4-hydroxyprolinol (Hyp-(GalNAc-alkyl)3)
gatgatgtgcgtaacagattc

SEQ ID NO: 2839 - RNA, 23 nt, synthetic construct
  source 1..23: mol_type = other RNA
  modified_base 1: mod_base = OTHER; note = 2'-O-methylguanosine-3'- phosphorothioate
  modified_base 2: mod_base = OTHER; note = 2'-fluoroadenosine-3'-phosphorothioate
  modified_base 3: mod_base = OTHER; note = 2'-O-methyladenosine-3'-phosphate
  modified_base 4: mod_base = OTHER; note = 2'-O-methyluridine-3'-phosphate
  modified_base 5: mod_base = OTHER; note = 2'-O-methylcytidine-3'-phosphate
  modified_base 6: mod_base = OTHER; note = 2'-fluorouridine-3'-phosphate
  modified_base 7: mod_base = OTHER; note = 2'-O-methylguanosine-3'-phosphate
  modified_base 8: mod_base = OTHER; note = 2'-fluorouridine-3'-phosphate
  modified_base 9: mod_base = OTHER; note = 2'-fluorouridine-3'-phosphate
  modified_base 10: mod_base = OTHER; note = 2'-O-methyladenosine-3'-phosphate
  modified_base 11: mod_base = OTHER; note = 2'-O-methylcytidine-3'-phosphate
  modified_base 12: mod_base = OTHER; note = 2'-O-methylguanosine-3'-phosphate
  modified_base 13: mod_base = OTHER; note = 2'-O-methylcytidine-3'-phosphate
  modified_base 14: mod_base = OTHER; note = 2'-fluoroadenosine-3'-phosphate
  modified_base 15: mod_base = OTHER; note = 2'-O-methylcytidine-3'-phosphate
  modified_base 16: mod_base = OTHER; note = 2'-fluoroadenosine-3'-phosphate
  modified_base 17: mod_base = OTHER; note = 2'-O-methyluridine-3'-phosphate
  modified_base 18: mod_base = OTHER; note = 2'-O-methylcytidine-3'-phosphate
  modified_base 19: mod_base = OTHER; note = 2'-O-methyladenosine-3'-phosphate
  modified_base 20: mod_base = OTHER; note = 2'-O-methyluridine-3'-phosphate
  modified_base 21: mod_base = OTHER; note = 2'-O-methylcytidine-3'- phosphorothioate
  modified_base 22: mod_base = OTHER; note = 2'-O-methylcytidine-3'- phosphorothioate
  modified_base 23: mod_base = OTHER; note = 2'-O-methyladenosine-3'-phosphate
gaatctgttacgcacatcatcca

SEQ ID NO: 2840 - RNA, 21 nt, synthetic construct
  source 1..21: mol_type = other RNA
  modified_base 1: mod_base = OTHER; note = 2'-O-methylguanosine-3'- phosphorothioate
  modified_base 2: mod_base = OTHER; note = 2'-O-methylguanosine-3'- phosphorothioate
  modified_base 3: mod_base = OTHER; note = 2'-O-methyladenosine-3'-phosphate
  modified_base 4: mod_base = OTHER; note = 2'-O-methyluridine-3'-phosphate
  modified_base 5: mod_base = OTHER; note = 2'-O-methylguanosine-3'-phosphate
  modified_base 6: mod_base = OTHER; note = 2'-O-methyladenosine-3'-phosphate
  modified_base 7: mod_base = OTHER; note = 2'-fluorouridine-3'-phosphate
  modified_base 8: mod_base = OTHER; note = 2'-O-methylguanosine-3'-phosphate
  modified_base 9: mod_base = OTHER; note = 2'-fluorouridine-3'-phosphate
  modified_base 10: mod_base = OTHER; note = 2'-fluoroguanosine-3'-phosphate
  modified_base 11: mod_base = OTHER; note = 2'-fluorocytidine-3'-phosphate
  modified_base 12: mod_base = OTHER; note = 2'-O-methylguanosine-3'-phosphate
  modified_base 13: mod_base = OTHER; note = 2'-O-methyluridine-3'-phosphate
  modified_base 14: mod_base = OTHER; note = 2'-O-methyladenosine-3'-phosphate
  modified_base 15: mod_base = OTHER; note = 2'-O-methyladenosine-3'-phosphate
  modified_base 16: mod_base = OTHER; note = 2'-O-methylcytidine-3'-phosphate
  modified_base 17: mod_base = OTHER; note = 2'-O-methyladenosine-3'-phosphate
  modified_base 18: mod_base = OTHER; note = 2'-O-methylguanosine-3'-phosphate
  modified_base 19: mod_base = OTHER; note = 2'-O-methyladenosine-3'-phosphate
  modified_base 20: mod_base = OTHER; note = 2'-O-methyluridine-3'-phosphate
  modified_base 21: mod_base = OTHER; note 2'-O-methyluridine-3'-phosphate-N-[tris(GalNAc-alkyl)-amido decanoyl)]-4-hydroxyprolinol (Hyp-(GalNAc-alkyl)3)
ggatgatgtgcgtaacagatt

SEQ ID NO: 2841 - RNA, 23 nt, synthetic construct
  source 1..23: mol_type = other RNA
  modified_base 1: mod_base = OTHER; note = 2'-O-methyladenosine-3'- phosphorothioate
  modified_base 2: mod_base = OTHER; note = 2'-fluoroadenosine-3'-phosphorothioate
  modified_base 3: mod_base = OTHER; note = 2'-O-methyluridine-3'-phosphate
  modified_base 4: mod_base = OTHER; note = 2'-O-methylcytidine-3'-phosphate
  modified_base 5: mod_base = OTHER; note = 2'-O-methyluridine-3'-phosphate
  modified_base 6: mod_base = OTHER; note = 2'-fluoroguanosine-3'-phosphate
  modified_base 7: mod_base = OTHER; note = 2'-O-methyluridine-3'-phosphate
  modified_base 8: mod_base = OTHER; note = 2'-fluorouridine-3'-phosphate
  modified_base 9: mod_base = OTHER; note = 2'-fluoroadenosine-3'-phosphate
  modified_base 10: mod_base = OTHER; note = 2'-O-methylcytidine-3'-phosphate
  modified_base 11: mod_base = OTHER; note = 2'-O-methylguanosine-3'-phosphate
  modified_base 12: mod_base = OTHER; note = 2'-O-methylcytidine-3'-phosphate
  modified_base 13: mod_base = OTHER; note = 2'-O-methyladenosine-3'-phosphate
  modified_base 14: mod_base = OTHER; note = 2'-fluorocytidine-3'-phosphate
  modified_base 15: mod_base = OTHER; note = 2'-O-methyladenosine-3'-phosphate
  modified_base 16: mod_base = OTHER; note = 2'-fluorouridine-3'-phosphate
  modified_base 17: mod_base = OTHER; note = 2'-O-methylcytidine-3'-phosphate
  modified_base 18: mod_base = OTHER; note = 2'-O-methyladenosine-3'-phosphate
  modified_base 19: mod_base = OTHER; note = 2'-O-methyluridine-3'-phosphate
  modified_base 20: mod_base = OTHER; note = 2'-O-methylcytidine-3'-phosphate
  modified_base 21: mod_base = OTHER; note = 2'-O-methylcytidine-3'- phosphorothioate
  modified_base 22: mod_base = OTHER; note = 2'-O-methyladenosine-3'- phosphorothioate
  modified_base 23: mod_base = OTHER; note = 2'-O-methylguanosine-3'-phosphate
aatctgttacgcacatcatccag

SEQ ID NO: 2842 - RNA, 21 nt, synthetic construct
  source 1..21: mol_type = other RNA
  modified_base 1: mod_base = OTHER; note = 2'-O-methylguanosine-3'- phosphorothioate
  modified_base 2: mod_base = OTHER; note = 2'-O-methylguanosine-3'- phosphorothioate
  modified_base 3: mod_base = OTHER; note = 2'-O-methylguanosine-3'-phosphate
  modified_base 4: mod_base = OTHER; note = 2'-O-methyluridine-3'-phosphate
  modified_base 5: mod_base = OTHER; note = 2'-O-methylcytidine-3'-phosphate
  modified_base 6: mod_base = OTHER; note = 2'-O-methyladenosine-3'-phosphate
  modified_base 7: mod_base = OTHER; note = 2'-fluoroguanosine-3'-phosphate
  modified_base 8: mod_base = OTHER; note = 2'-O-methylcytidine-3'-phosphate
  modified_base 9: mod_base = OTHER; note = 2'-fluoroadenosine-3'-phosphate
  modified_base 10: mod_base = OTHER; note = 2'-fluorouridine-3'-phosphate
  modified_base 11: mod_base = OTHER; note = 2'-fluoroguanosine-3'-phosphate
  modified_base 12: mod_base = OTHER; note = 2'-O-methylcytidine-3'-phosphate
  modified_base 13: mod_base = OTHER; note = 2'-O-methylcytidine-3'-phosphate
  modified_base 14: mod_base = OTHER; note = 2'-O-methyladenosine-3'-phosphate
  modified_base 15: mod_base = OTHER; note = 2'-O-methyladenosine-3'-phosphate
  modified_base 16: mod_base = OTHER; note = 2'-O-methyluridine-3'-phosphate
  modified_base 17: mod_base = OTHER; note = 2'-O-methyladenosine-3'-phosphate
  modified_base 18: mod_base = OTHER; note = 2'-O-methyluridine-3'-phosphate
  modified_base 19: mod_base = OTHER; note = 2'-O-methylguanosine-3'-phosphate
  modified_base 20: mod_base = OTHER; note = 2'-O-methyluridine-3'-phosphate
  modified_base 21: mod_base = OTHER; note 2'-O-methylguanosine-3'-phosphate-N-[tris(GalNAc-alkyl)-ami dodecanoyl)]-4-hydroxyprolinol (Hyp-(GalNAc-alkyl)3)
gggtcagcatgccaatatgtg

SEQ ID NO: 2843 - RNA, 23 nt, synthetic construct
  source 1..23: mol_type = other RNA
  modified_base 1: mod_base = OTHER; note = 2'-O-methylcytidine-3'- phosphorothioate
  modified_base 2: mod_base = OTHER; note = 2'-fluoroadenosine-3'-phosphorothioate
  modified_base 3: mod_base = OTHER; note = 2'-O-methylcytidine-3'-phosphate
  modified_base 4: mod_base = OTHER; note = 2'-O-methyladenosine-3'-phosphate
  modified_base 5: mod_base = OTHER; note = 2'-O-methyluridine-3'-phosphate
  modified_base 6: mod_base = OTHER; note = 2'-fluoroadenosine-3'-phosphate
  modified_base 7: mod_base = OTHER; note = 2'-O-methyluridine-3'-phosphate
  modified_base 8: mod_base = OTHER; note = 2'-fluorouridine-3'-phosphate
  modified_base 9: mod_base = OTHER; note = 2'-fluoroguanosine-3'-phosphate
  modified_base 10: mod_base = OTHER; note = 2'-O-methylguanosine-3'-phosphate
  modified_base 11: mod_base = OTHER; note = 2'-O-methylcytidine-3'-phosphate
  modified_base 12: mod_base = OTHER; note = 2'-O-methyladenosine-3'-phosphate
  modified_base 13: mod_base = OTHER; note = 2'-O-methyluridine-3'-phosphate
  modified_base 14: mod_base = OTHER; note = 2'-fluoroguanosine-3'-phosphate
  modified_base 15: mod_base = OTHER; note = 2'-O-methylcytidine-3'-phosphate
  modified_base 16: mod_base = OTHER; note = 2'-fluorouridine-3'-phosphate
  modified_base 17: mod_base = OTHER; note = 2'-O-methylguanosine-3'-phosphate
  modified_base 18: mod_base = OTHER; note = 2'-O-methyladenosine-3'-phosphate
  modified_base 19: mod_base = OTHER; note = 2'-O-methylcytidine-3'-phosphate
  modified_base 20: mod_base = OTHER; note = 2'-O-methylcytidine-3'-phosphate
  modified_base 21: mod_base = OTHER; note = 2'-O-methylcytidine-3'- phosphorothioate
  modified_base 22: mod_base = OTHER; note = 2'-O-methyluridine-3'-phosphorothioate
  modified_base 23: mod_base = OTHER; note = 2'-O-methylcytidine-3'-phosphate
cacatattggcatgctgaccctc

SEQ ID NO: 2844 - RNA, 21 nt, synthetic construct
  source 1..21: mol_type = other RNA
  modified_base 1: mod_base = OTHER; note = 2'-O-methylguanosine-3'- phosphorothioate
  modified_base 2: mod_base = OTHER; note = 2'-O-methylguanosine-3'- phosphorothioate
  modified_base 3: mod_base = OTHER; note = 2'-O-methyluridine-3'-phosphate
  modified_base 4: mod_base = OTHER; note = 2'-O-methylcytidine-3'-phosphate
  modified_base 5: mod_base = OTHER; note = 2'-O-methyladenosine-3'-phosphate
  modified_base 6: mod_base = OTHER; note = 2'-O-methylguanosine-3'-phosphate
  modified_base 7: mod_base = OTHER; note = 2'-fluorocytidine-3'-phosphate
  modified_base 8: mod_base = OTHER; note = 2'-O-methyladenosine-3'-phosphate
  modified_base 9: mod_base = OTHER; note = 2'-fluorouridine-3'-phosphate
  modified_base 10: mod_base = OTHER; note = 2'-fluoroguanosine-3'-phosphate
  modified_base 11: mod_base = OTHER; note = 2'-fluorocytidine-3'-phosphate
  modified_base 12: mod_base = OTHER; note = 2'-O-methylcytidine-3'-phosphate
  modified_base 13: mod_base = OTHER; note = 2'-O-methyladenosine-3'-phosphate
  modified_base 14: mod_base = OTHER; note = 2'-O-methyladenosine-3'-phosphate
  modified_base 15: mod_base = OTHER; note = 2'-O-methyluridine-3'-phosphate
  modified_base 16: mod_base = OTHER; note = 2'-O-methyladenosine-3'-phosphate
  modified_base 17: mod_base = OTHER; note = 2'-O-methyluridine-3'-phosphate
  modified_base 18: mod_base = OTHER; note = 2'-O-methylguanosine-3'-phosphate
  modified_base 19: mod_base = OTHER; note = 2'-O-methyluridine-3'-phosphate
  modified_base 20: mod_base = OTHER; note = 2'-O-methylguanosine-3'-phosphate
  modified_base 21: mod_base = OTHER; note 2'-O-methyluridine-3'-phosphate-N-[tris(GalNAc-alkyl)-amido decanoyl)]-4-hydroxyprolinol (Hyp-(GalNAc-alkyl)3)
ggtcagcatgccaatatgtgt

SEQ ID NO: 2845 - RNA, 23 nt, synthetic construct
  source 1..23: mol_type = other RNA
  modified_base 1: mod_base = OTHER; note = 2'-O-methyladenosine-3'- phosphorothioate
  modified_base 2: mod_base = OTHER; note = 2'-fluorocytidine-3'-phosphorothioate
  modified_base 3: mod_base = OTHER; note = 2'-O-methyladenosine-3'-phosphate
  modified_base 4: mod_base = OTHER; note = 2'-O-methylcytidine-3'-phosphate
  modified_base 5: mod_base = OTHER; note = 2'-O-methyladenosine-3'-phosphate
  modified_base 6: mod_base = OTHER; note = 2'-fluorouridine-3'-phosphate
  modified_base 7: mod_base = OTHER; note = 2'-O-methyladenosine-3'-phosphate
  modified_base 8: mod_base = OTHER; note = 2'-fluorouridine-3'-phosphate
  modified_base 9: mod_base = OTHER; note = 2'-fluorouridine-3'-phosphate
  modified_base 10: mod_base = OTHER; note = 2'-O-methylguanosine-3'-phosphate
  modified_base 11: mod_base = OTHER; note = 2'-O-methylguanosine-3'-phosphate
  modified_base 12: mod_base = OTHER; note = 2'-O-methylcytidine-3'-phosphate
  modified_base 13: mod_base = OTHER; note = 2'-O-methyladenosine-3'-phosphate
  modified_base 14: mod_base = OTHER; note = 2'-fluorouridine-3'-phosphate
  modified_base 15: mod_base = OTHER; note = 2'-O-methylguanosine-3'-phosphate
  modified_base 16: mod_base = OTHER; note = 2'-fluorocytidine-3'-phosphate
  modified_base 17: mod_base = OTHER; note = 2'-O-methyluridine-3'-phosphate
  modified_base 18: mod_base = OTHER; note = 2'-O-methylguanosine-3'-phosphate
  modified_base 19: mod_base = OTHER; note = 2'-O-methyladenosine-3'-phosphate
  modified_base 20: mod_base = OTHER; note = 2'-O-methylcytidine-3'-phosphate
  modified_base 21: mod_base = OTHER; note = 2'-O-methylcytidine-3'- phosphorothioate
  modified_base 22: mod_base = OTHER; note = 2'-O-methylcytidine-3'- phosphorothioate
  modified_base 23: mod_base = OTHER; note = 2'-O-methyluridine-3'-phosphate
acacatattggcatgctgaccct

SEQ ID NO: 2846 - RNA, 21 nt, synthetic construct
  source 1..21: mol_type = other RNA
  modified_base 1: mod_base = OTHER; note = 2'-O-methylcytidine-3'- phosphorothioate
  modified_base 2: mod_base = OTHER; note = 2'-O-methyladenosine-3'- phosphorothioate
  modified_base 3: mod_base = OTHER; note = 2'-O-methylguanosine-3'-phosphate
  modified_base 4: mod_base = OTHER; note = 2'-O-methyladenosine-3'-phosphate
  modified_base 5: mod_base = OTHER; note = 2'-O-methylguanosine-3'-phosphate
  modified_base 6: mod_base = OTHER; note = 2'-O-methylguanosine-3'-phosphate
  modified_base 7: mod_base = OTHER; note = 2'-fluoroguanosine-3'-phosphate
  modified_base 8: mod_base = OTHER; note = 2'-O-methyluridine-3'-phosphate
  modified_base 9: mod_base = OTHER; note = 2'-fluorocytidine-3'-phosphate
  modified_base 10: mod_base = OTHER; note = 2'-fluoroadenosine-3'-phosphate
  modified_base 11: mod_base = OTHER; note = 2'-fluoroguanosine-3'-phosphate
  modified_base 12: mod_base = OTHER; note = 2'-O-methylcytidine-3'-phosphate
  modified_base 13: mod_base = OTHER; note = 2'-O-methyladenosine-3'-phosphate
  modified_base 14: mod_base = OTHER; note = 2'-O-methyluridine-3'-phosphate
  modified_base 15: mod_base = OTHER; note = 2'-O-methylguanosine-3'-phosphate
  modified_base 16: mod_base = OTHER; note = 2'-O-methylcytidine-3'-phosphate
  modified_base 17: mod_base = OTHER; note = 2'-O-methylcytidine-3'-phosphate
  modified_base 18: mod_base = OTHER; note = 2'-O-methyladenosine-3'-phosphate
  modified_base 19: mod_base = OTHER; note = 2'-O-methyladenosine-3'-phosphate
  modified_base 20: mod_base = OTHER; note = 2'-O-methyluridine-3'-phosphate
  modified_base 21: mod_base = OTHER; note 2'-O-methyladenosine-3'-phosphate-N-[tris(GalNAc-alkyl)-ami dodecanoyl)]-4-hydroxyprolinol (Hyp-(GalNAc-alkyl)3)
cagagggtcagcatgccaata

SEQ ID NO: 2847 - RNA, 23 nt, synthetic construct
  source 1..23: mol_type = other RNA
  modified_base 1: mod_base = OTHER; note = 2'-O-methyluridine-3'-phosphorothioate
  modified_base 2: mod_base = OTHER; note = 2'-fluoroadenosine-3'-phosphorothioate
  modified_base 3: mod_base = OTHER; note = 2'-O-methyluridine-3'-phosphate
  modified_base 4: mod_base = OTHER; note = 2'-O-methyluridine-3'-phosphate
  modified_base 5: mod_base = OTHER; note = 2'-O-methylguanosine-3'-phosphate
  modified_base 6: mod_base = OTHER; note = 2'-fluoroguanosine-3'-phosphate
  modified_base 7: mod_base = OTHER; note = 2'-O-methylcytidine-3'-phosphate
  modified_base 8: mod_base = OTHER; note = 2'-fluoroadenosine-3'-phosphate
  modified_base 9: mod_base = OTHER; note = 2'-fluorouridine-3'-phosphate
  modified_base 10: mod_base = OTHER; note = 2'-O-methylguanosine-3'-phosphate
  modified_base 11: mod_base = OTHER; note = 2'-O-methylcytidine-3'-phosphate
  modified_base 12: mod_base = OTHER; note = 2'-O-methyluridine-3'-phosphate
  modified_base 13: mod_base = OTHER; note = 2'-O-methylguanosine-3'-phosphate
  modified_base 14: mod_base = OTHER; note = 2'-fluoroadenosine-3'-phosphate
  modified_base 15: mod_base = OTHER; note = 2'-O-methylcytidine-3'-phosphate
  modified_base 16: mod_base = OTHER; note = 2'-fluorocytidine-3'-phosphate
  modified_base 17: mod_base = OTHER; note = 2'-O-methylcytidine-3'-phosphate
  modified_base 18: mod_base = OTHER; note = 2'-O-methyluridine-3'-phosphate
  modified_base 19: mod_base = OTHER; note = 2'-O-methylcytidine-3'-phosphate
  modified_base 20: mod_base = OTHER; note = 2'-O-methyluridine-3'-phosphate
  modified_base 21: mod_base = OTHER; note = 2'-O-methylguanosine-3'- phosphorothioate
  modified_base 22: mod_base = OTHER; note = 2'-O-methyluridine-3'-phosphorothioate
  modified_base 23: mod_base = OTHER; note = 2'-O-methylcytidine-3'-phosphate
tattggcatgctgaccctctgtc

SEQ ID NO: 2848 - RNA, 21 nt, synthetic construct
  source 1..21: mol_type = other RNA
  modified_base 1: mod_base = OTHER; note = 2'-O-methyladenosine-3'- phosphorothioate
  modified_base 2: mod_base = OTHER; note = 2'-O-methylcytidine-3'- phosphorothioate
  modified_base 3: mod_base = OTHER; note = 2'-O-methyladenosine-3'-phosphate
  modified_base 4: mod_base = OTHER; note = 2'-O-methylguanosine-3'-phosphate
  modified_base 5: mod_base = OTHER; note = 2'-O-methyladenosine-3'-phosphate
  modified_base 6: mod_base = OTHER; note = 2'-O-methylguanosine-3'-phosphate
  modified_base 7: mod_base = OTHER; note = 2'-fluoroguanosine-3'-phosphate
  modified_base 8: mod_base = OTHER; note = 2'-O-methylguanosine-3'-phosphate
  modified_base 9: mod_base = OTHER; note = 2'-fluorouridine-3'-phosphate
  modified_base 10: mod_base = OTHER; note = 2'-fluorocytidine-3'-phosphate
  modified_base 11: mod_base = OTHER; note = 2'-fluoroadenosine-3'-phosphate
  modified_base 12: mod_base = OTHER; note = 2'-O-methylguanosine-3'-phosphate
  modified_base 13: mod_base = OTHER; note = 2'-O-methylcytidine-3'-phosphate
  modified_base 14: mod_base = OTHER; note = 2'-O-methyladenosine-3'-phosphate
  modified_base 15: mod_base = OTHER; note = 2'-O-methyluridine-3'-phosphate
  modified_base 16: mod_base = OTHER; note = 2'-O-methylguanosine-3'-phosphate
  modified_base 17: mod_base = OTHER; note = 2'-O-methylcytidine-3'-phosphate
  modified_base 18: mod_base = OTHER; note = 2'-O-methylcytidine-3'-phosphate
  modified_base 19: mod_base = OTHER; note = 2'-O-methyladenosine-3'-phosphate
  modified_base 20: mod_base = OTHER; note = 2'-O-methyladenosine-3'-phosphate
  modified_base 21: mod_base = OTHER; note 2'-O-methyluridine-3'-phosphate-N-[tris(GalNAc-alkyl)-amido decanoyl)]-4-hydroxyprolinol (Hyp-(GalNAc-alkyl)3)
acagagggtcagcatgccaat

SEQ ID NO: 2849 - RNA, 23 nt, synthetic construct
  source 1..23: mol_type = other RNA
  modified_base 1: mod_base = OTHER; note = 2'-O-methyladenosine-3'- phosphorothioate
  modified_base 2: mod_base = OTHER; note = 2'-fluorouridine -3'-phosphorothioate
  modified_base 3: mod_base = OTHER; note = 2'-O-methyluridine-3'-phosphate
  modified_base 4: mod_base = OTHER; note = 2'-O-methylguanosine-3'-phosphate
  modified_base 5: mod_base = OTHER; note = 2'-O-methylguanosine-3'-phosphate
  modified_base 6: mod_base = OTHER; note = 2'-fluorocytidine-3'-phosphate
  modified_base 7: mod_base = OTHER; note = 2'-O-methyladenosine-3'-phosphate
  modified_base 8: mod_base = OTHER; note = 2'-fluorouridine-3'-phosphate
  modified_base 9: mod_base = OTHER; note = 2'-fluoroguanosine-3'-phosphate
  modified_base 10: mod_base = OTHER; note = 2'-O-methylcytidine-3'-phosphate
  modified_base 11: mod_base = OTHER; note = 2'-O-methyluridine-3'-phosphate
  modified_base 12: mod_base = OTHER; note = 2'-O-methylguanosine-3'-phosphate
  modified_base 13: mod_base = OTHER; note = 2'-O-methyladenosine-3'-phosphate
  modified_base 14: mod_base = OTHER; note = 2'-fluorocytidine-3'-phosphate
  modified_base 15: mod_base = OTHER; note = 2'-O-methylcytidine-3'-phosphate
  modified_base 16: mod_base = OTHER; note = 2'-fluorocytidine-3'-phosphate
  modified_base 17: mod_base = OTHER; note = 2'-O-methyluridine-3'-phosphate
  modified_base 18: mod_base = OTHER; note = 2'-O-methylcytidine-3'-phosphate
  modified_base 19: mod_base = OTHER; note = 2'-O-methyluridine-3'-phosphate
  modified_base 20: mod_base = OTHER; note = 2'-O-methylguanosine-3'-phosphate
  modified_base 21: mod_base = OTHER; note = 2'-O-methyluridine-3'-phosphorothioate
  modified_base 22: mod_base = OTHER; note = 2'-O-methylcytidine-3'- phosphorothioate
  modified_base 23: mod_base = OTHER; note = 2'-O-methylcytidine-3'-phosphate
attggcatgctgaccctctgtcc

SEQ ID NO: 2850 - RNA, 21 nt, synthetic construct
  source 1..21: mol_type = other RNA
  modified_base 1: mod_base = OTHER; note = 2'-O-methylguanosine-3'- phosphorothioate
  modified_base 2: mod_base = OTHER; note = 2'-O-methylcytidine-3'- phosphorothioate
  modified_base 3: mod_base = OTHER; note = 2'-O-methyluridine-3'-phosphate
  modified_base 4: mod_base = OTHER; note = 2'-O-methyluridine-3'-phosphate
  modified_base 5: mod_base = OTHER; note = 2'-O-methylguanosine-3'-phosphate
  modified_base 6: mod_base = OTHER; note = 2'-O-methyladenosine-3'-phosphate
  modified_base 7: mod_base = OTHER; note = 2'-fluoroadenosine-3'-phosphate
  modified_base 8: mod_base = OTHER; note = 2'-O-methyluridine-3'-phosphate
  modified_base 9: mod_base = OTHER; note = 2'-fluoroguanosine-3'-phosphate
  modified_base 10: mod_base = OTHER; note = 2'-fluoroguanosine-3'-phosphate
  modified_base 11: mod_base = OTHER; note = 2'-fluoroguanosine-3'-phosphate
  modified_base 12: mod_base = OTHER; note = 2'-O-methyladenosine-3'-phosphate
  modified_base 13: mod_base = OTHER; note = 2'-O-methyluridine-3'-phosphate
  modified_base 14: mod_base = OTHER; note = 2'-O-methylcytidine-3'-phosphate
  modified_base 15: mod_base = OTHER; note = 2'-O-methyluridine-3'-phosphate
  modified_base 16: mod_base = OTHER; note = 2'-O-methyluridine-3'-phosphate
  modified_base 17: mod_base = OTHER; note = 2'-O-methylguanosine-3'-phosphate
  modified_base 18: mod_base = OTHER; note = 2'-O-methylguanosine-3'-phosphate
  modified_base 19: mod_base = OTHER; note = 2'-O-methyluridine-3'-phosphate
  modified_base 20: mod_base = OTHER; note = 2'-O-methylguanosine-3'-phosphate
  modified_base 21: mod_base = OTHER; note 2'-O-methyluridine-3'-phosphate-N-[tris(GalNAc-alkyl)-amido decanoyl)]-4-hydroxyprolinol (Hyp-(GalNAc-alkyl)3)
gcttgaatgggatcttggtgt

SEQ ID NO: 2851 - RNA, 23 nt, synthetic construct
  source 1..23: mol_type = other RNA
  modified_base 1: mod_base = OTHER; note = 2'-O-methyladenosine-3'- phosphorothioate
  modified_base 2: mod_base = OTHER; note = 2'-fluorocytidine-3'-phosphorothioate
  modified_base 3: mod_base = OTHER; note = 2'-O-methyladenosine-3'-phosphate
  modified_base 4: mod_base = OTHER; note = 2'-O-methylcytidine-3'-phosphate
  modified_base 5: mod_base = OTHER; note = 2'-O-methylcytidine-3'-phosphate
  modified_base 6: mod_base = OTHER; note = 2'-fluoroadenosine-3'-phosphate
  modified_base 7: mod_base = OTHER; note = 2'-O-methyladenosine-3'-phosphate
  modified_base 8: mod_base = OTHER; note = 2'-fluoroguanosine-3'-phosphate
  modified_base 9: mod_base = OTHER; note = 2'-fluoroadenosine-3'-phosphate
  modified_base 10: mod_base = OTHER; note = 2'-O-methyluridine-3'-phosphate
  modified_base 11: mod_base = OTHER; note = 2'-O-methylcytidine-3'-phosphate
  modified_base 12: mod_base = OTHER; note = 2'-O-methylcytidine-3'-phosphate
  modified_base 13: mod_base = OTHER; note = 2'-O-methylcytidine-3'-phosphate
  modified_base 14: mod_base = OTHER; note = 2'-fluoroadenosine-3'-phosphate
  modified_base 15: mod_base = OTHER; note = 2'-O-methyluridine-3'-phosphate
  modified_base 16: mod_base = OTHER; note = 2'-fluorouridine-3'-phosphate
  modified_base 17: mod_base = OTHER; note = 2'-O-methylcytidine-3'-phosphate
  modified_base 18: mod_base = OTHER; note = 2'-O-methyladenosine-3'-phosphate
  modified_base 19: mod_base = OTHER; note = 2'-O-methyladenosine-3'-phosphate
  modified_base 20: mod_base = OTHER; note = 2'-O-methylguanosine-3'-phosphate
  modified_base 21: mod_base = OTHER; note = 2'-O-methylcytidine-3'- phosphorothioate
  modified_base 22: mod_base = OTHER; note = 2'-O-methylcytidine-3'- phosphorothioate
  modified_base 23: mod_base = OTHER; note = 2'-O-methyladenosine-3'-phosphate
acaccaagatcccattcaagcca

SEQ ID NO: 2852 - RNA, 21 nt, synthetic construct
  source 1..21: mol_type = other RNA
  modified_base 1: mod_base = OTHER; note = 2'-O-methylcytidine-3'- phosphorothioate
  modified_base 2: mod_base = OTHER; note = 2'-O-methyluridine-3'-phosphorothioate
  modified_base 3: mod_base = OTHER; note = 2'-O-methyluridine-3'-phosphate
  modified_base 4: mod_base = OTHER; note = 2'-O-methylguanosine-3'-phosphate
  modified_base 5: mod_base = OTHER; note = 2'-O-methyladenosine-3'-phosphate
  modified_base 6: mod_base = OTHER; note = 2'-O-methyladenosine-3'-phosphate
  modified_base 7: mod_base = OTHER; note = 2'-fluorouridine-3'-phosphate
  modified_base 8: mod_base = OTHER; note = 2'-O-methylguanosine-3'-phosphate
  modified_base 9: mod_base = OTHER; note = 2'-fluoroguanosine-3'-phosphate
  modified_base 10: mod_base = OTHER; note = 2'-fluoroguanosine-3'-phosphate
  modified_base 11: mod_base = OTHER; note = 2'-fluoroadenosine-3'-phosphate
  modified_base 12: mod_base = OTHER; note = 2'-O-methyluridine-3'-phosphate
  modified_base 13: mod_base = OTHER; note = 2'-O-methylcytidine-3'-phosphate
  modified_base 14: mod_base = OTHER; note = 2'-O-methyluridine-3'-phosphate
  modified_base 15: mod_base = OTHER; note = 2'-O-methyluridine-3'-phosphate
  modified_base 16: mod_base = OTHER; note = 2'-O-methylguanosine-3'-phosphate
  modified_base 17: mod_base = OTHER; note = 2'-O-methylguanosine-3'-phosphate
  modified_base 18: mod_base = OTHER; note = 2'-O-methyluridine-3'-phosphate
  modified_base 19: mod_base = OTHER; note = 2'-O-methylguanosine-3'-phosphate
  modified_base 20: mod_base = OTHER; note = 2'-O-methyluridine-3'-phosphate
  modified_base 21: mod_base = OTHER; note 2'-O-methylcytidine-3'-phosphate-N-[tris(GalNAc-alkyl)-amid odecanoyl)]-4-hydroxyprolinol (Hyp-(GalNAc-alkyl)3)
cttgaatgggatcttggtgtc

SEQ ID NO: 2853 - RNA, 23 nt, synthetic construct
  source 1..23: mol_type = other RNA
  modified_base 1: mod_base = OTHER; note = 2'-O-methylguanosine-3'- phosphorothioate
  modified_base 2: mod_base = OTHER; note = 2'-fluoroadenosine-3'-phosphorothioate
  modified_base 3: mod_base = OTHER; note = 2'-O-methylcytidine-3'-phosphate
  modified_base 4: mod_base = OTHER; note = 2'-O-methyladenosine-3'-phosphate
  modified_base 5: mod_base = OTHER; note = 2'-O-methylcytidine-3'-phosphate
  modified_base 6: mod_base = OTHER; note = 2'-fluorocytidine-3'-phosphate
  modified_base 7: mod_base = OTHER; note = 2'-O-methyladenosine-3'-phosphate
  modified_base 8: mod_base = OTHER; note = 2'-fluoroadenosine-3'-phosphate
  modified_base 9: mod_base = OTHER; note = 2'-fluoroguanosine-3'-phosphate
  modified_base 10: mod_base = OTHER; note = 2'-O-methyladenosine-3'-phosphate
  modified_base 11: mod_base = OTHER; note = 2'-O-methyluridine-3'-phosphate
  modified_base 12: mod_base = OTHER; note = 2'-O-methylcytidine-3'-phosphate
  modified_base 13: mod_base = OTHER; note = 2'-O-methylcytidine-3'-phosphate
  modified_base 14: mod_base = OTHER; note = 2'-fluorocytidine-3'-phosphate
  modified_base 15: mod_base = OTHER; note = 2'-O-methyladenosine-3'-phosphate
  modified_base 16: mod_base = OTHER; note = 2'-fluorouridine-3'-phosphate
  modified_base 17: mod_base = OTHER; note = 2'-O-methyluridine-3'-phosphate
  modified_base 18: mod_base = OTHER; note = 2'-O-methylcytidine-3'-phosphate
  modified_base 19: mod_base = OTHER; note = 2'-O-methyladenosine-3'-phosphate
  modified_base 20: mod_base = OTHER; note = 2'-O-methyladenosine-3'-phosphate
  modified_base 21: mod_base = OTHER; note = 2'-O-methylguanosine-3'- phosphorothioate
  modified_base 22: mod_base = OTHER; note = 2'-O-methylcytidine-3'- phosphorothioate
  modified_base 23: mod_base = OTHER; note = 2'-O-methylcytidine-3'-phosphate
gacaccaagatcccattcaagcc

SEQ ID NO: 2854 - RNA, 21 nt, synthetic construct
  source 1..21: mol_type = other RNA
  modified_base 1: mod_base = OTHER; note = 2'-O-methylcytidine-3'- phosphorothioate
  modified_base 2: mod_base = OTHER; note = 2'-O-methyladenosine-3'- phosphorothioate
  modified_base 3: mod_base = OTHER; note = 2'-O-methyluridine-3'-phosphate
  modified_base 4: mod_base = OTHER; note = 2'-O-methylguanosine-3'-phosphate
  modified_base 5: mod_base = OTHER; note = 2'-O-methylguanosine-3'-phosphate
  modified_base 6: mod_base = OTHER; note = 2'-O-methylcytidine-3'-phosphate
  modified_base 7: mod_base = OTHER; note = 2'-fluorouridine-3'-phosphate
  modified_base 8: mod_base = OTHER; note = 2'-O-methyluridine-3'-phosphate
  modified_base 9: mod_base = OTHER; note = 2'-fluoroguanosine-3'-phosphate
  modified_base 10: mod_base = OTHER; note = 2'-fluoroadenosine-3'-phosphate
  modified_base 11: mod_base = OTHER; note = 2'-fluoroadenosine-3'-phosphate
  modified_base 12: mod_base = OTHER; note = 2'-O-methyluridine-3'-phosphate
  modified_base 13: mod_base = OTHER; note = 2'-O-methylguanosine-3'-phosphate
  modified_base 14: mod_base = OTHER; note = 2'-O-methylguanosine-3'-phosphate
  modified_base 15: mod_base = OTHER; note = 2'-O-methylguanosine-3'-phosphate
  modified_base 16: mod_base = OTHER; note = 2'-O-methyladenosine-3'-phosphate
  modified_base 17: mod_base = OTHER; note = 2'-O-methyluridine-3'-phosphate
  modified_base 18: mod_base = OTHER; note = 2'-O-methylcytidine-3'-phosphate
  modified_base 19: mod_base = OTHER; note = 2'-O-methyluridine-3'-phosphate
  modified_base 20: mod_base = OTHER; note = 2'-O-methyluridine-3'-phosphate
  modified_base 21: mod_base = OTHER; note 2'-O-methylguanosine-3'-phosphate-N-[tris(GalNAc-alkyl)-ami dodecanoyl)]-4-hydroxyprolinol (Hyp-(GalNAc-alkyl)3)
catggcttgaatgggatcttg

SEQ ID NO: 2855 - RNA, 23 nt, synthetic construct
  source 1..23: mol_type = other RNA
  modified_base 1: mod_base = OTHER; note = 2'-O-methylcytidine-3'- phosphorothioate
  modified_base 2: mod_base = OTHER; note = 2'-fluoroadenosine-3'-phosphorothioate
  modified_base 3: mod_base = OTHER; note = 2'-O-methyladenosine-3'-phosphate
  modified_base 4: mod_base = OTHER; note = 2'-O-methylguanosine-3'-phosphate
  modified_base 5: mod_base = OTHER; note = 2'-O-methyladenosine-3'-phosphate
  modified_base 6: mod_base = OTHER; note = 2'-fluorouridine-3'-phosphate
  modified_base 7: mod_base = OTHER; note = 2'-O-methylcytidine-3'-phosphate
  modified_base 8: mod_base = OTHER; note = 2'-fluorocytidine-3'-phosphate
  modified_base 9: mod_base = OTHER; note = 2'-fluorocytidine-3'-phosphate
  modified_base 10: mod_base = OTHER; note = 2'-O-methyladenosine-3'-phosphate
  modified_base 11: mod_base = OTHER; note = 2'-O-methyluridine-3'-phosphate
  modified_base 12: mod_base = OTHER; note = 2'-O-methyluridine-3'-phosphate
  modified_base 13: mod_base = OTHER; note = 2'-O-methylcytidine-3'-phosphate
  modified_base 14: mod_base = OTHER; note = 2'-fluoroadenosine-3'-phosphate
  modified_base 15: mod_base = OTHER; note = 2'-O-methyladenosine-3'-phosphate
  modified_base 16: mod_base = OTHER; note = 2'-fluoroguanosine-3'-phosphate
  modified_base 17: mod_base = OTHER; note = 2'-O-methylcytidine-3'-phosphate
  modified_base 18: mod_base = OTHER; note = 2'-O-methylcytidine-3'-phosphate
  modified_base 19: mod_base = OTHER; note = 2'-O-methyladenosine-3'-phosphate
  modified_base 20: mod_base = OTHER; note = 2'-O-methyluridine-3'-phosphate
  modified_base 21: mod_base = OTHER; note = 2'-O-methylguanosine-3'- phosphorothioate
  modified_base 22: mod_base = OTHER; note = 2'-O-methyluridine-3'-phosphorothioate
  modified_base 23: mod_base = OTHER; note = 2'-O-methyluridine-3'-phosphate
caagatcccattcaagccatgtt

SEQ ID NO: 2856 - RNA, 21 nt, synthetic construct
  source 1..21: mol_type = other RNA
  modified_base 1: mod_base = OTHER; note = 2'-O-methyladenosine-3'- phosphorothioate
  modified_base 2: mod_base = OTHER; note = 2'-O-methylcytidine-3'- phosphorothioate
  modified_base 3: mod_base = OTHER; note = 2'-O-methyladenosine-3'-phosphate
  modified_base 4: mod_base = OTHER; note = 2'-O-methyluridine-3'-phosphate
  modified_base 5: mod_base = OTHER; note = 2'-O-methylguanosine-3'-phosphate
  modified_base 6: mod_base = OTHER; note = 2'-O-methylguanosine-3'-phosphate
  modified_base 7: mod_base = OTHER; note = 2'-fluorocytidine-3'-phosphate
  modified_base 8: mod_base = OTHER; note = 2'-O-methyluridine-3'-phosphate
  modified_base 9: mod_base = OTHER; note = 2'-fluorouridine-3'-phosphate
  modified_base 10: mod_base = OTHER; note = 2'-fluoroguanosine-3'-phosphate
  modified_base 11: mod_base = OTHER; note = 2'-fluoroadenosine-3'-phosphate
  modified_base 12: mod_base = OTHER; note = 2'-O-methyladenosine-3'-phosphate
  modified_base 13: mod_base = OTHER; note = 2'-O-methyluridine-3'-phosphate
  modified_base 14: mod_base = OTHER; note = 2'-O-methylguanosine-3'-phosphate
  modified_base 15: mod_base = OTHER; note = 2'-O-methylguanosine-3'-phosphate
  modified_base 16: mod_base = OTHER; note = 2'-O-methylguanosine-3'-phosphate
  modified_base 17: mod_base = OTHER; note = 2'-O-methyladenosine-3'-phosphate
  modified_base 18: mod_base = OTHER; note = 2'-O-methyluridine-3'-phosphate
  modified_base 19: mod_base = OTHER; note = 2'-O-methylcytidine-3'-phosphate
  modified_base 20: mod_base = OTHER; note = 2'-O-methyluridine-3'-phosphate
  modified_base 21: mod_base = OTHER; note 2'-O-methyluridine-3'-phosphate-N-[tris(GalNAc-alkyl)-amido decanoyl)]-4-hydroxyprolinol (Hyp-(GalNAc-alkyl)3)
acatggcttgaatgggatctt

SEQ ID NO: 2857 - RNA, 23 nt, synthetic construct
  source 1..23: mol_type = other RNA
  modified_base 1: mod_base = OTHER; note = 2'-O-methyladenosine-3'- phosphorothioate
  modified_base 2: mod_base = OTHER; note = 2'-fluoroadenosine-3'-phosphorothioate
  modified_base 3: mod_base = OTHER; note = 2'-O-methylguanosine-3'-phosphate
  modified_base 4: mod_base = OTHER; note = 2'-O-methyladenosine-3'-phosphate
  modified_base 5: mod_base = OTHER; note = 2'-O-methyluridine-3'-phosphate
  modified_base 6: mod_base = OTHER; note = 2'-fluorocytidine-3'-phosphate
  modified_base 7: mod_base = OTHER; note = 2'-O-methylcytidine-3'-phosphate
  modified_base 8: mod_base = OTHER; note = 2'-fluorocytidine-3'-phosphate
  modified_base 9: mod_base = OTHER; note = 2'-fluoroadenosine-3'-phosphate
  modified_base 10: mod_base = OTHER; note = 2'-O-methyluridine-3'-phosphate
  modified_base 11: mod_base = OTHER; note = 2'-O-methyluridine-3'-phosphate
  modified_base 12: mod_base = OTHER; note = 2'-O-methylcytidine-3'-phosphate
  modified_base 13: mod_base = OTHER; note = 2'-O-methyladenosine-3'-phosphate
  modified_base 14: mod_base = OTHER; note = 2'-fluoroadenosine-3'-phosphate
  modified_base 15: mod_base = OTHER; note = 2'-O-methylguanosine-3'-phosphate
  modified_base 16: mod_base = OTHER; note = 2'-fluorocytidine-3'-phosphate
  modified_base 17: mod_base = OTHER; note = 2'-O-methylcytidine-3'-phosphate
  modified_base 18: mod_base = OTHER; note = 2'-O-methyladenosine-3'-phosphate
  modified_base 19: mod_base = OTHER; note = 2'-O-methyluridine-3'-phosphate
  modified_base 20: mod_base = OTHER; note = 2'-O-methylguanosine-3'-phosphate
  modified_base 21: mod_base = OTHER; note = 2'-O-methyluridine-3'-phosphorothioate
  modified_base 22: mod_base = OTHER; note = 2'-O-methyluridine-3'-phosphorothioate
  modified_base 23: mod_base = OTHER; note = 2'-O-methyluridine-3'-phosphate
aagatcccattcaagccatgttt

SEQ ID NO: 2858 - RNA, 21 nt, synthetic construct
  source 1..21: mol_type = other RNA
  modified_base 1: mod_base = OTHER; note = 2'-O-methyluridine-3'-phosphorothioate
  modified_base 2: mod_base = OTHER; note = 2'-O-methylcytidine-3'- phosphorothioate
  modified_base 3: mod_base = OTHER; note = 2'-O-methyladenosine-3'-phosphate
  modified_base 4: mod_base = OTHER; note = 2'-O-methyladenosine-3'-phosphate
  modified_base 5: mod_base = OTHER; note = 2'-O-methyladenosine-3'-phosphate
  modified_base 6: mod_base = OTHER; note = 2'-O-methyluridine-3'-phosphate
  modified_base 7: mod_base = OTHER; note = 2'-fluoroguanosine-3'-phosphate
  modified_base 8: mod_base = OTHER; note = 2'-O-methylguanosine-3'-phosphate
  modified_base 9: mod_base = OTHER; note = 2'-fluorocytidine-3'-phosphate
  modified_base 10: mod_base = OTHER; note = 2'-fluorouridine-3'-phosphate
  modified_base 11: mod_base = OTHER; note = 2'-fluoroguanosine-3'-phosphate
  modified_base 12: mod_base = OTHER; note = 2'-O-methyladenosine-3'-phosphate
  modified_base 13: mod_base = OTHER; note = 2'-O-methylguanosine-3'-phosphate
  modified_base 14: mod_base = OTHER; note = 2'-O-methyladenosine-3'-phosphate
  modified_base 15: mod_base = OTHER; note = 2'-O-methyladenosine-3'-phosphate
  modified_base 16: mod_base = OTHER; note = 2'-O-methylguanosine-3'-phosphate
  modified_base 17: mod_base = OTHER; note = 2'-O-methyladenosine-3'-phosphate
  modified_base 18: mod_base = OTHER; note = 2'-O-methylcytidine-3'-phosphate
  modified_base 19: mod_base = OTHER; note = 2'-O-methyluridine-3'-phosphate
  modified_base 20: mod_base = OTHER; note = 2'-O-methylguanosine-3'-phosphate
  modified_base 21: mod_base = OTHER; note 2'-O-methyladenosine-3'-phosphate-N-[tris(GalNAc-alkyl)-ami dodecanoyl)]-4-hydroxyprolinol (Hyp-(GalNAc-alkyl)3)
tcaaatggctgagaagactga

SEQ ID NO: 2859 - RNA, 23 nt, synthetic construct
  source 1..23: mol_type = other RNA
  modified_base 1: mod_base = OTHER; note = 2'-O-methyluridine-3'-phosphorothioate
  modified_base 2: mod_base = OTHER; note = 2'-fluorocytidine-3'-phosphorothioate
  modified_base 3: mod_base = OTHER; note = 2'-O-methyladenosine-3'-phosphate
  modified_base 4: mod_base = OTHER; note = 2'-O-methylguanosine-3'-phosphate
  modified_base 5: mod_base = OTHER; note = 2'-O-methyluridine-3'-phosphate
  modified_base 6: mod_base = OTHER; note = 2'-fluorocytidine-3'-phosphate
  modified_base 7: mod_base = OTHER; note = 2'-O-methyluridine-3'-phosphate
  modified_base 8: mod_base = OTHER; note = 2'-fluorouridine-3'-phosphate
  modified_base 9: mod_base = OTHER; note = 2'-fluorocytidine-3'-phosphate
  modified_base 10: mod_base = OTHER; note = 2'-O-methyluridine-3'-phosphate
  modified_base 11: mod_base = OTHER; note = 2'-O-methylcytidine-3'-phosphate
  modified_base 12: mod_base = OTHER; note = 2'-O-methyladenosine-3'-phosphate
  modified_base 13: mod_base = OTHER; note = 2'-O-methylguanosine-3'-phosphate
  modified_base 14: mod_base = OTHER; note = 2'-fluorocytidine-3'-phosphate
  modified_base 15: mod_base = OTHER; note = 2'-O-methylcytidine-3'-phosphate
  modified_base 16: mod_base = OTHER; note = 2'-fluoroadenosine-3'-phosphate
  modified_base 17: mod_base = OTHER; note = 2'-O-methyluridine-3'-phosphate
  modified_base 18: mod_base = OTHER; note = 2'-O-methyluridine-3'-phosphate
  modified_base 19: mod_base = OTHER; note = 2'-O-methyluridine-3'-phosphate
  modified_base 20: mod_base = OTHER; note = 2'-O-methylguanosine-3'-phosphate
  modified_base 21: mod_base = OTHER; note = 2'-O-methyladenosine-3'- phosphorothioate
  modified_base 22: mod_base = OTHER; note = 2'-O-methyluridine-3'-phosphorothioate
  modified_base 23: mod_base = OTHER; note = 2'-O-methyladenosine-3'-phosphate
tcagtcttctcagccatttgata

SEQ ID NO: 2860 - RNA, 21 nt, synthetic construct
  source 1..21: mol_type = other RNA
  modified_base 1: mod_base = OTHER; note = 2'-O-methylcytidine-3'- phosphorothioate
  modified_base 2: mod_base = OTHER; note = 2'-O-methyladenosine-3'- phosphorothioate
  modified_base 3: mod_base = OTHER; note = 2'-O-methyladenosine-3'-phosphate
  modified_base 4: mod_base = OTHER; note = 2'-O-methyladenosine-3'-phosphate
  modified_base 5: mod_base = OTHER; note = 2'-O-methyluridine-3'-phosphate
  modified_base 6: mod_base = OTHER; note = 2'-O-methylguanosine-3'-phosphate
  modified_base 7: mod_base = OTHER; note = 2'-fluoroguanosine-3'-phosphate
  modified_base 8: mod_base = OTHER; note = 2'-O-methylcytidine-3'-phosphate
  modified_base 9: mod_base = OTHER; note = 2'-fluorouridine-3'-phosphate
  modified_base 10: mod_base = OTHER; note = 2'-fluoroguanosine-3'-phosphate
  modified_base 11: mod_base = OTHER; note = 2'-fluoroadenosine-3'-phosphate
  modified_base 12: mod_base = OTHER; note = 2'-O-methylguanosine-3'-phosphate
  modified_base 13: mod_base = OTHER; note = 2'-O-methyladenosine-3'-phosphate
  modified_base 14: mod_base = OTHER; note = 2'-O-methyladenosine-3'-phosphate
  modified_base 15: mod_base = OTHER; note = 2'-O-methylguanosine-3'-phosphate
  modified_base 16: mod_base = OTHER; note = 2'-O-methyladenosine-3'-phosphate
  modified_base 17: mod_base = OTHER; note = 2'-O-methylcytidine-3'-phosphate
  modified_base 18: mod_base = OTHER; note = 2'-O-methyluridine-3'-phosphate
  modified_base 19: mod_base = OTHER; note = 2'-O-methylguanosine-3'-phosphate
  modified_base 20: mod_base = OTHER; note = 2'-O-methyladenosine-3'-phosphate
  modified_base 21: mod_base = OTHER; note 2'-O-methylcytidine-3'-phosphate-N-[tris(GalNAc-alkyl)-amid odecanoyl)]-4-hydroxyprolinol (Hyp-(GalNAc-alkyl)3)
caaatggctgagaagactgac

SEQ ID NO: 2861 - RNA, 23 nt, synthetic construct
  source 1..23: mol_type = other RNA
  modified_base 1: mod_base = OTHER; note = 2'-O-methylguanosine-3'- phosphorothioate
  modified_base 2: mod_base = OTHER; note = 2'-fluorouridine -3'-phosphorothioate
  modified_base 3: mod_base = OTHER; note = 2'-O-methylcytidine-3'-phosphate
  modified_base 4: mod_base = OTHER; note = 2'-O-methyladenosine-3'-phosphate
  modified_base 5: mod_base = OTHER; note = 2'-O-methylguanosine-3'-phosphate
  modified_base 6: mod_base = OTHER; note = 2'-fluorouridine-3'-phosphate
  modified_base 7: mod_base = OTHER; note = 2'-O-methylcytidine-3'-phosphate
  modified_base 8: mod_base = OTHER; note = 2'-fluorouridine-3'-phosphate
  modified_base 9: mod_base = OTHER; note = 2'-fluorouridine-3'-phosphate
  modified_base 10: mod_base = OTHER; note = 2'-O-methylcytidine-3'-phosphate
  modified_base 11: mod_base = OTHER; note = 2'-O-methyluridine-3'-phosphate
  modified_base 12: mod_base = OTHER; note = 2'-O-methylcytidine-3'-phosphate
  modified_base 13: mod_base = OTHER; note = 2'-O-methyladenosine-3'-phosphate
  modified_base 14: mod_base = OTHER; note = 2'-fluoroguanosine-3'-phosphate
  modified_base 15: mod_base = OTHER; note = 2'-O-methylcytidine-3'-phosphate
  modified_base 16: mod_base = OTHER; note = 2'-fluorocytidine-3'-phosphate
  modified_base 17: mod_base = OTHER; note = 2'-O-methyladenosine-3'-phosphate
  modified_base 18: mod_base = OTHER; note = 2'-O-methyluridine-3'-phosphate
  modified_base 19: mod_base = OTHER; note = 2'-O-methyluridine-3'-phosphate
  modified_base 20: mod_base = OTHER; note = 2'-O-methyluridine-3'-phosphate
  modified_base 21: mod_base = OTHER; note = 2'-O-methylguanosine-3'- phosphorothioate
  modified_base 22: mod_base = OTHER; note = 2'-O-methyladenosine-3'- phosphorothioate
  modified_base 23: mod_base = OTHER; note = 2'-O-methyluridine-3'-phosphate
gtcagtcttctcagccatttgat

SEQ ID NO: 2862 - RNA, 21 nt, synthetic construct
  source 1..21: mol_type = other RNA
  modified_base 1: mod_base = OTHER; note = 2'-O-methylguanosine-3'- phosphorothioate
  modified_base 2: mod_base = OTHER; note = 2'-O-methyladenosine-3'- phosphorothioate
  modified_base 3: mod_base = OTHER; note = 2'-O-methyluridine-3'-phosphate
  modified_base 4: mod_base = OTHER; note = 2'-O-methyladenosine-3'-phosphate
  modified_base 5: mod_base = OTHER; note = 2'-O-methyluridine-3'-phosphate
  modified_base 6: mod_base = OTHER; note = 2'-O-methylcytidine-3'-phosphate
  modified_base 7: mod_base = OTHER; note = 2'-fluoroadenosine-3'-phosphate
  modified_base 8: mod_base = OTHER; note = 2'-O-methyladenosine-3'-phosphate
  modified_base 9: mod_base = OTHER; note = 2'-fluoroadenosine-3'-phosphate
  modified_base 10: mod_base = OTHER; note = 2'-fluorouridine-3'-phosphate
  modified_base 11: mod_base = OTHER; note = 2'-fluoroguanosine-3'-phosphate
  modified_base 12: mod_base = OTHER; note = 2'-O-methylguanosine-3'-phosphate
  modified_base 13: mod_base = OTHER; note = 2'-O-methylcytidine-3'-phosphate
  modified_base 14: mod_base = OTHER; note = 2'-O-methyluridine-3'-phosphate
  modified_base 15: mod_base = OTHER; note = 2'-O-methylguanosine-3'-phosphate
  modified_base 16: mod_base = OTHER; note = 2'-O-methyladenosine-3'-phosphate
  modified_base 17: mod_base = OTHER; note = 2'-O-methylguanosine-3'-phosphate
  modified_base 18: mod_base = OTHER; note = 2'-O-methyladenosine-3'-phosphate
  modified_base 19: mod_base = OTHER; note = 2'-O-methyladenosine-3'-phosphate
  modified_base 20: mod_base = OTHER; note = 2'-O-methylguanosine-3'-phosphate
  modified_base 21: mod_base = OTHER; note 2'-O-methyladenosine-3'-phosphate-N-[tris(GalNAc-alkyl)-ami dodecanoyl)]-4-hydroxyprolinol (Hyp-(GalNAc-alkyl)3)
gatatcaaatggctgagaaga

SEQ ID NO: 2863 - RNA, 23 nt, synthetic construct
  source 1..23: mol_type = other RNA
  modified_base 1: mod_base = OTHER; note = 2'-O-methyluridine-3'-phosphorothioate
  modified_base 2: mod_base = OTHER; note = 2'-fluorocytidine-3'-phosphorothioate
  modified_base 3: mod_base = OTHER; note = 2'-O-methyluridine-3'-phosphate
  modified_base 4: mod_base = OTHER; note = 2'-O-methyluridine-3'-phosphate
  modified_base 5: mod_base = OTHER; note = 2'-O-methylcytidine-3'-phosphate
  modified_base 6: mod_base = OTHER; note = 2'-fluorouridine-3'-phosphate
  modified_base 7: mod_base = OTHER; note = 2'-O-methylcytidine-3'-phosphate
  modified_base 8: mod_base = OTHER; note = 2'-fluoroadenosine-3'-phosphate
  modified_base 9: mod_base = OTHER; note = 2'-fluoroguanosine-3'-phosphate
  modified_base 10: mod_base = OTHER; note = 2'-O-methylcytidine-3'-phosphate
  modified_base 11: mod_base = OTHER; note = 2'-O-methylcytidine-3'-phosphate
  modified_base 12: mod_base = OTHER; note = 2'-O-methyladenosine-3'-phosphate
  modified_base 13: mod_base = OTHER; note = 2'-O-methyluridine-3'-phosphate
  modified_base 14: mod_base = OTHER; note = 2'-fluorouridine-3'-phosphate
  modified_base 15: mod_base = OTHER; note = 2'-O-methyluridine-3'-phosphate
  modified_base 16: mod_base = OTHER; note = 2'-fluoroguanosine-3'-phosphate
  modified_base 17: mod_base = OTHER; note = 2'-O-methyladenosine-3'-phosphate
  modified_base 18: mod_base = OTHER; note = 2'-O-methyluridine-3'-phosphate
  modified_base 19: mod_base = OTHER; note = 2'-O-methyladenosine-3'-phosphate
  modified_base 20: mod_base = OTHER; note = 2'-O-methyluridine-3'-phosphate
  modified_base 21: mod_base = OTHER; note = 2'-O-methylcytidine-3'- phosphorothioate
  modified_base 22: mod_base = OTHER; note = 2'-O-methyluridine-3'-phosphorothioate
  modified_base 23: mod_base = OTHER; note = 2'-O-methyluridine-3'-phosphate
tcttctcagccatttgatatctt

SEQ ID NO: 2864 - RNA, 21 nt, synthetic construct
  source 1..21: mol_type = other RNA
  modified_base 1: mod_base = OTHER; note = 2'-O-methyladenosine-3'- phosphorothioate
  modified_base 2: mod_base = OTHER; note = 2'-O-methylguanosine-3'- phosphorothioate
  modified_base 3: mod_base = OTHER; note = 2'-O-methyladenosine-3'-phosphate
  modified_base 4: mod_base = OTHER; note = 2'-O-methyluridine-3'-phosphate
  modified_base 5: mod_base = OTHER; note = 2'-O-methyladenosine-3'-phosphate
  modified_base 6: mod_base = OTHER; note = 2'-O-methyluridine-3'-phosphate
  modified_base 7: mod_base = OTHER; note = 2'-fluorocytidine-3'-phosphate
  modified_base 8: mod_base = OTHER; note = 2'-O-methyladenosine-3'-phosphate
  modified_base 9: mod_base = OTHER; note = 2'-fluoroadenosine-3'-phosphate
  modified_base 10: mod_base = OTHER; note = 2'-fluoroadenosine-3'-phosphate
  modified_base 11: mod_base = OTHER; note = 2'-fluorouridine-3'-phosphate
  modified_base 12: mod_base = OTHER; note = 2'-O-methylguanosine-3'-phosphate
  modified_base 13: mod_base = OTHER; note = 2'-O-methylguanosine-3'-phosphate
  modified_base 14: mod_base = OTHER; note = 2'-O-methylcytidine-3'-phosphate
  modified_base 15: mod_base = OTHER; note = 2'-O-methyluridine-3'-phosphate
  modified_base 16: mod_base = OTHER; note = 2'-O-methylguanosine-3'-phosphate
  modified_base 17: mod_base = OTHER; note = 2'-O-methyladenosine-3'-phosphate
  modified_base 18: mod_base = OTHER; note = 2'-O-methylguanosine-3'-phosphate
  modified_base 19: mod_base = OTHER; note = 2'-O-methyladenosine-3'-phosphate
  modified_base 20: mod_base = OTHER; note = 2'-O-methyladenosine-3'-phosphate
  modified_base 21: mod_base = OTHER; note 2'-O-methylguanosine-3'-phosphate-N-[tris(GalNAc-alkyl)-ami dodecanoyl)]-4-hydroxyprolinol (Hyp-(GalNAc-alkyl)3)
agatatcaaatggctgagaag

SEQ ID NO: 2865 - RNA, 23 nt, synthetic construct
  source 1..23: mol_type = other RNA
  modified_base 1: mod_base = OTHER; note = 2'-O-methylcytidine-3'- phosphorothioate
  modified_base 2: mod_base = OTHER; note = 2'-fluorouridine -3'-phosphorothioate
  modified_base 3: mod_base = OTHER; note = 2'-O-methyluridine-3'-phosphate
  modified_base 4: mod_base = OTHER; note = 2'-O-methylcytidine-3'-phosphate
  modified_base 5: mod_base = OTHER; note = 2'-O-methyluridine-3'-phosphate
  modified_base 6: mod_base = OTHER; note = 2'-fluorocytidine-3'-phosphate
  modified_base 7: mod_base = OTHER; note = 2'-O-methyladenosine-3'-phosphate
  modified_base 8: mod_base = OTHER; note = 2'-fluoroguanosine-3'-phosphate
  modified_base 9: mod_base = OTHER; note = 2'-fluorocytidine-3'-phosphate
  modified_base 10: mod_base = OTHER; note = 2'-O-methylcytidine-3'-phosphate
  modified_base 11: mod_base = OTHER; note = 2'-O-methyladenosine-3'-phosphate
  modified_base 12: mod_base = OTHER; note = 2'-O-methyluridine-3'-phosphate
  modified_base 13: mod_base = OTHER; note = 2'-O-methyluridine-3'-phosphate
  modified_base 14: mod_base = OTHER; note = 2'-fluorouridine-3'-phosphate
  modified_base 15: mod_base = OTHER; note = 2'-O-methylguanosine-3'-phosphate
  modified_base 16: mod_base = OTHER; note = 2'-fluoroadenosine-3'-phosphate
  modified_base 17: mod_base = OTHER; note = 2'-O-methyluridine-3'-phosphate
  modified_base 18: mod_base = OTHER; note = 2'-O-methyladenosine-3'-phosphate
  modified_base 19: mod_base = OTHER; note = 2'-O-methyluridine-3'-phosphate
  modified_base 20: mod_base = OTHER; note = 2'-O-methylcytidine-3'-phosphate
  modified_base 21: mod_base = OTHER; note = 2'-O-methyluridine-3'-phosphorothioate
  modified_base 22: mod_base = OTHER; note = 2'-O-methyluridine-3'-phosphorothioate
  modified_base 23: mod_base = OTHER; note = 2'-O-methylcytidine-3'-phosphate
cttctcagccatttgatatcttc

SEQ ID NO: 2866 - RNA, 21 nt, synthetic construct
  source 1..21: mol_type = other RNA
  modified_base 1: mod_base = OTHER; note = 2'-O-methylguanosine-3'- phosphorothioate
  modified_base 2: mod_base = OTHER; note = 2'-O-methyladenosine-3'- phosphorothioate
  modified_base 3: mod_base = OTHER; note = 2'-O-methyladenosine-3'-phosphate
  modified_base 4: mod_base = OTHER; note = 2'-O-methyladenosine-3'-phosphate
  modified_base 5: mod_base = OTHER; note = 2'-O-methylguanosine-3'-phosphate
  modified_base 6: mod_base = OTHER; note = 2'-O-methyluridine-3'-phosphate
  modified_base 7: mod_base = OTHER; note = 2'-fluorocytidine-3'-phosphate
  modified_base 8: mod_base = OTHER; note = 2'-O-methyladenosine-3'-phosphate
  modified_base 9: mod_base = OTHER; note = 2'-fluorouridine-3'-phosphate
  modified_base 10: mod_base = OTHER; note = 2'-fluorocytidine-3'-phosphate
  modified_base 11: mod_base = OTHER; note = 2'-fluoroguanosine-3'-phosphate
  modified_base 12: mod_base = OTHER; note = 2'-O-methyladenosine-3'-phosphate
  modified_base 13: mod_base = OTHER; note = 2'-O-methylcytidine-3'-phosphate
  modified_base 14: mod_base = OTHER; note = 2'-O-methyladenosine-3'-phosphate
  modified_base 15: mod_base = OTHER; note = 2'-O-methyladenosine-3'-phosphate
  modified_base 16: mod_base = OTHER; note = 2'-O-methylguanosine-3'-phosphate
  modified_base 17: mod_base = OTHER; note = 2'-O-methyladenosine-3'-phosphate
  modified_base 18: mod_base = OTHER; note = 2'-O-methylcytidine-3'-phosphate
  modified_base 19: mod_base = OTHER; note = 2'-O-methyladenosine-3'-phosphate
  modified_base 20: mod_base = OTHER; note = 2'-O-methyluridine-3'-phosphate
  modified_base 21: mod_base = OTHER; note 2'-O-methyluridine-3'-phosphate-N-[tris(GalNAc-alkyl)-amido decanoyl)]-4-hydroxyprolinol (Hyp-(GalNAc-alkyl)3)
gaaagtcatcgacaagacatt

SEQ ID NO: 2867 - RNA, 23 nt, synthetic construct
  source 1..23: mol_type = other RNA
  modified_base 1: mod_base = OTHER; note = 2'-O-methyladenosine-3'- phosphorothioate
  modified_base 2: mod_base = OTHER; note = 2'-fluoroadenosine-3'-phosphorothioate
  modified_base 3: mod_base = OTHER; note = 2'-O-methyluridine-3'-phosphate
  modified_base 4: mod_base = OTHER; note = 2'-O-methylguanosine-3'-phosphate
  modified_base 5: mod_base = OTHER; note = 2'-O-methyluridine-3'-phosphate
  modified_base 6: mod_base = OTHER; note = 2'-fluorocytidine-3'-phosphate
  modified_base 7: mod_base = OTHER; note = 2'-O-methyluridine-3'-phosphate
  modified_base 8: mod_base = OTHER; note = 2'-fluorouridine-3'-phosphate
  modified_base 9: mod_base = OTHER; note = 2'-fluoroguanosine-3'-phosphate
  modified_base 10: mod_base = OTHER; note = 2'-O-methyluridine-3'-phosphate
  modified_base 11: mod_base = OTHER; note = 2'-O-methylcytidine-3'-phosphate
  modified_base 12: mod_base = OTHER; note = 2'-O-methylguanosine-3'-phosphate
  modified_base 13: mod_base = OTHER; note = 2'-O-methyladenosine-3'-phosphate
  modified_base 14: mod_base = OTHER; note = 2'-fluorouridine-3'-phosphate
  modified_base 15: mod_base = OTHER; note = 2'-O-methylguanosine-3'-phosphate
  modified_base 16: mod_base = OTHER; note = 2'-fluoroadenosine-3'-phosphate
  modified_base 17: mod_base = OTHER; note = 2'-O-methylcytidine-3'-phosphate
  modified_base 18: mod_base = OTHER; note = 2'-O-methyluridine-3'-phosphate
  modified_base 19: mod_base = OTHER; note = 2'-O-methyluridine-3'-phosphate
  modified_base 20: mod_base = OTHER; note = 2'-O-methyluridine-3'-phosphate
  modified_base 21: mod_base = OTHER; note = 2'-O-methylcytidine-3'- phosphorothioate
  modified_base 22: mod_base = OTHER; note = 2'-O-methyladenosine-3'- phosphorothioate
  modified_base 23: mod_base = OTHER; note = 2'-O-methylcytidine-3'-phosphate
aatgtcttgtcgatgactttcac

SEQ ID NO: 2868 - RNA, 21 nt, synthetic construct
  source 1..21: mol_type = other RNA
  modified_base 1: mod_base = OTHER; note = 2'-O-methyladenosine-3'- phosphorothioate
  modified_base 2: mod_base = OTHER; note = 2'-O-methyladenosine-3'- phosphorothioate
  modified_base 3: mod_base = OTHER; note = 2'-O-methyladenosine-3'-phosphate
  modified_base 4: mod_base = OTHER; note = 2'-O-methylguanosine-3'-phosphate
  modified_base 5: mod_base = OTHER; note = 2'-O-methyluridine-3'-phosphate
  modified_base 6: mod_base = OTHER; note = 2'-O-methylcytidine-3'-phosphate
  modified_base 7: mod_base = OTHER; note = 2'-fluoroadenosine-3'-phosphate
  modified_base 8: mod_base = OTHER; note = 2'-O-methyluridine-3'-phosphate
  modified_base 9: mod_base = OTHER; note = 2'-fluorocytidine-3'-phosphate
  modified_base 10: mod_base = OTHER; note = 2'-fluoroguanosine-3'-phosphate
  modified_base 11: mod_base = OTHER; note = 2'-fluoroadenosine-3'-phosphate
  modified_base 12: mod_base = OTHER; note = 2'-O-methylcytidine-3'-phosphate
  modified_base 13: mod_base = OTHER; note = 2'-O-methyladenosine-3'-phosphate
  modified_base 14: mod_base = OTHER; note = 2'-O-methyladenosine-3'-phosphate
  modified_base 15: mod_base = OTHER; note = 2'-O-methylguanosine-3'-phosphate
  modified_base 16: mod_base = OTHER; note = 2'-O-methyladenosine-3'-phosphate
  modified_base 17: mod_base = OTHER; note = 2'-O-methylcytidine-3'-phosphate
  modified_base 18: mod_base = OTHER; note = 2'-O-methyladenosine-3'-phosphate
  modified_base 19: mod_base = OTHER; note = 2'-O-methyluridine-3'-phosphate
  modified_base 20: mod_base = OTHER; note = 2'-O-methyluridine-3'-phosphate
  modified_base 21: mod_base = OTHER; note 2'-O-methylguanosine-3'-phosphate-N-[tris(GalNAc-alkyl)-ami dodecanoyl)]-4-hydroxyprolinol (Hyp-(GalNAc-alkyl)3)
aaagtcatcgacaagacattg

SEQ ID NO: 2869 - RNA, 23 nt, synthetic construct
  source 1..23: mol_type = other RNA
  modified_base 1: mod_base = OTHER; note = 2'-O-methylcytidine-3'- phosphorothioate
  modified_base 2: mod_base = OTHER; note = 2'-fluoroadenosine-3'-phosphorothioate
  modified_base 3: mod_base = OTHER; note = 2'-O-methyladenosine-3'-phosphate
  modified_base 4: mod_base = OTHER; note = 2'-O-methyluridine-3'-phosphate
  modified_base 5: mod_base = OTHER; note = 2'-O-methylguanosine-3'-phosphate
  modified_base 6: mod_base = OTHER; note = 2'-fluorouridine-3'-phosphate
  modified_base 7: mod_base = OTHER; note = 2'-O-methylcytidine-3'-phosphate
  modified_base 8: mod_base = OTHER; note = 2'-fluorouridine-3'-phosphate
  modified_base 9: mod_base = OTHER; note = 2'-fluorouridine-3'-phosphate
  modified_base 10: mod_base = OTHER; note = 2'-O-methylguanosine-3'-phosphate
  modified_base 11: mod_base = OTHER; note = 2'-O-methyluridine-3'-phosphate
  modified_base 12: mod_base = OTHER; note = 2'-O-methylcytidine-3'-phosphate
  modified_base 13: mod_base = OTHER; note = 2'-O-methylguanosine-3'-phosphate
  modified_base 14: mod_base = OTHER; note = 2'-fluoroadenosine-3'-phosphate
  modified_base 15: mod_base = OTHER; note = 2'-O-methyluridine-3'-phosphate
  modified_base 16: mod_base = OTHER; note = 2'-fluoroguanosine-3'-phosphate
  modified_base 17: mod_base = OTHER; note = 2'-O-methyladenosine-3'-phosphate
  modified_base 18: mod_base = OTHER; note = 2'-O-methylcytidine-3'-phosphate
  modified_base 19: mod_base = OTHER; note = 2'-O-methyluridine-3'-phosphate
  modified_base 20: mod_base = OTHER; note = 2'-O-methyluridine-3'-phosphate
  modified_base 21: mod_base = OTHER; note = 2'-O-methyluridine-3'-phosphorothioate
  modified_base 22: mod_base = OTHER; note = 2'-O-methylcytidine-3'- phosphorothioate
  modified_base 23: mod_base = OTHER; note = 2'-O-methyladenosine-3'-phosphate
caatgtcttgtcgatgactttca

SEQ ID NO: 2870 - RNA, 21 nt, synthetic construct
  source 1..21: mol_type = other RNA
  modified_base 1: mod_base = OTHER; note = 2'-O-methyladenosine-3'- phosphorothioate
  modified_base 2: mod_base = OTHER; note = 2'-O-methyluridine-3'-phosphorothioate
  modified_base 3: mod_base = OTHER; note = 2'-O-methylguanosine-3'-phosphate
  modified_base 4: mod_base = OTHER; note = 2'-O-methyluridine-3'-phosphate
  modified_base 5: mod_base = OTHER; note = 2'-O-methylguanosine-3'-phosphate
  modified_base 6: mod_base = OTHER; note = 2'-O-methyladenosine-3'-phosphate
  modified_base 7: mod_base = OTHER; note = 2'-fluoroadenosine-3'-phosphate
  modified_base 8: mod_base = OTHER; note = 2'-O-methyladenosine-3'-phosphate
  modified_base 9: mod_base = OTHER; note = 2'-fluoroguanosine-3'-phosphate
  modified_base 10: mod_base = OTHER; note = 2'-fluorouridine-3'-phosphate
  modified_base 11: mod_base = OTHER; note = 2'-fluorocytidine-3'-phosphate
  modified_base 12: mod_base = OTHER; note = 2'-O-methyladenosine-3'-phosphate
  modified_base 13: mod_base = OTHER; note = 2'-O-methyluridine-3'-phosphate
  modified_base 14: mod_base = OTHER; note = 2'-O-methylcytidine-3'-phosphate
  modified_base 15: mod_base = OTHER; note = 2'-O-methylguanosine-3'-phosphate
  modified_base 16: mod_base = OTHER; note = 2'-O-methyladenosine-3'-phosphate
  modified_base 17: mod_base = OTHER; note = 2'-O-methylcytidine-3'-phosphate
  modified_base 18: mod_base = OTHER; note = 2'-O-methyladenosine-3'-phosphate
  modified_base 19: mod_base = OTHER; note = 2'-O-methyladenosine-3'-phosphate
  modified_base 20: mod_base = OTHER; note = 2'-O-methylguanosine-3'-phosphate
  modified_base 21: mod_base = OTHER; note 2'-O-methyladenosine-3'-phosphate-N-[tris(GalNAc-alkyl)-ami dodecanoyl)]-4-hydroxyprolinol (Hyp-(GalNAc-alkyl)3)
atgtgaaagtcatcgacaaga

SEQ ID NO: 2871 - RNA, 23 nt, synthetic construct
  source 1..23: mol_type = other RNA
  modified_base 1: mod_base = OTHER; note = 2'-O-methyluridine-3'-phosphorothioate
  modified_base 2: mod_base = OTHER; note = 2'-fluorocytidine-3'-phosphorothioate
  modified_base 3: mod_base = OTHER; note = 2'-O-methyluridine-3'-phosphate
  modified_base 4: mod_base = OTHER; note = 2'-O-methyluridine-3'-phosphate
  modified_base 5: mod_base = OTHER; note = 2'-O-methylguanosine-3'-phosphate
  modified_base 6: mod_base = OTHER; note = 2'-fluorouridine-3'-phosphate
  modified_base 7: mod_base = OTHER; note = 2'-O-methylcytidine-3'-phosphate
  modified_base 8: mod_base = OTHER; note = 2'-fluoroguanosine-3'-phosphate
  modified_base 9: mod_base = OTHER; note = 2'-fluoroadenosine-3'-phosphate
  modified_base 10: mod_base = OTHER; note = 2'-O-methyluridine-3'-phosphate
  modified_base 11: mod_base = OTHER; note = 2'-O-methylguanosine-3'-phosphate
  modified_base 12: mod_base = OTHER; note = 2'-O-methyladenosine-3'-phosphate
  modified_base 13: mod_base = OTHER; note = 2'-O-methylcytidine-3'-phosphate
  modified_base 14: mod_base = OTHER; note = 2'-fluorouridine-3'-phosphate
  modified_base 15: mod_base = OTHER; note = 2'-O-methyluridine-3'-phosphate
  modified_base 16: mod_base = OTHER; note = 2'-fluorouridine-3'-phosphate
  modified_base 17: mod_base = OTHER; note = 2'-O-methylcytidine-3'-phosphate
  modified_base 18: mod_base = OTHER; note = 2'-O-methyladenosine-3'-phosphate
  modified_base 19: mod_base = OTHER; note = 2'-O-methylcytidine-3'-phosphate
  modified_base 20: mod_base = OTHER; note = 2'-O-methyladenosine-3'-phosphate
  modified_base 21: mod_base = OTHER; note = 2'-O-methyluridine-3'-phosphorothioate
  modified_base 22: mod_base = OTHER; note = 2'-O-methyluridine-3'-phosphorothioate
  modified_base 23: mod_base = OTHER; note = 2'-O-methylcytidine-3'-phosphate
tcttgtcgatgactttcacattc

SEQ ID NO: 2872 - RNA, 21 nt, synthetic construct
  source 1..21: mol_type = other RNA
  modified_base 1: mod_base = OTHER; note = 2'-O-methyladenosine-3'- phosphorothioate
  modified_base 2: mod_base = OTHER; note = 2'-O-methyladenosine-3'- phosphorothioate
  modified_base 3: mod_base = OTHER; note = 2'-O-methyluridine-3'-phosphate
  modified_base 4: mod_base = OTHER; note = 2'-O-methylguanosine-3'-phosphate
  modified_base 5: mod_base = OTHER; note = 2'-O-methyluridine-3'-phosphate
  modified_base 6: mod_base = OTHER; note = 2'-O-methylguanosine-3'-phosphate
  modified_base 7: mod_base = OTHER; note = 2'-fluoroadenosine-3'-phosphate
  modified_base 8: mod_base = OTHER; note = 2'-O-methyladenosine-3'-phosphate
  modified_base 9: mod_base = OTHER; note = 2'-fluoroadenosine-3'-phosphate
  modified_base 10: mod_base = OTHER; note = 2'-fluoroguanosine-3'-phosphate
  modified_base 11: mod_base = OTHER; note = 2'-fluorouridine-3'-phosphate
  modified_base 12: mod_base = OTHER; note = 2'-O-methylcytidine-3'-phosphate
  modified_base 13: mod_base = OTHER; note = 2'-O-methyladenosine-3'-phosphate
  modified_base 14: mod_base = OTHER; note = 2'-O-methyluridine-3'-phosphate
  modified_base 15: mod_base = OTHER; note = 2'-O-methylcytidine-3'-phosphate
  modified_base 16: mod_base = OTHER; note = 2'-O-methylguanosine-3'-phosphate
  modified_base 17: mod_base = OTHER; note = 2'-O-methyladenosine-3'-phosphate
  modified_base 18: mod_base = OTHER; note = 2'-O-methylcytidine-3'-phosphate
  modified_base 19: mod_base = OTHER; note = 2'-O-methyladenosine-3'-phosphate
  modified_base 20: mod_base = OTHER; note = 2'-O-methyladenosine-3'-phosphate
  modified_base 21: mod_base = OTHER; note 2'-O-methylguanosine-3'-phosphate-N-[tris(GalNAc-alkyl)-ami dodecanoyl)]-4-hydroxyprolinol (Hyp-(GalNAc-alkyl)3)
aatgtgaaagtcatcgacaag

SEQ ID NO: 2873 - RNA, 23 nt, synthetic construct
  source 1..23: mol_type = other RNA
  modified_base 1: mod_base = OTHER; note = 2'-O-methylcytidine-3'- phosphorothioate
  modified_base 2: mod_base = OTHER; note = 2'-fluorouridine -3'-phosphorothioate
  modified_base 3: mod_base = OTHER; note = 2'-O-methyluridine-3'-phosphate
  modified_base 4: mod_base = OTHER; note = 2'-O-methylguanosine-3'-phosphate
  modified_base 5: mod_base = OTHER; note = 2'-O-methyluridine-3'-phosphate
  modified_base 6: mod_base = OTHER; note = 2'-fluorocytidine-3'-phosphate
  modified_base 7: mod_base = OTHER; note = 2'-O-methylguanosine-3'-phosphate
  modified_base 8: mod_base = OTHER; note = 2'-fluoroadenosine-3'-phosphate
  modified_base 9: mod_base = OTHER; note = 2'-fluorouridine-3'-phosphate
  modified_base 10: mod_base = OTHER; note = 2'-O-methylguanosine-3'-phosphate
  modified_base 11: mod_base = OTHER; note = 2'-O-methyladenosine-3'-phosphate
  modified_base 12: mod_base = OTHER; note = 2'-O-methylcytidine-3'-phosphate
  modified_base 13: mod_base = OTHER; note = 2'-O-methyluridine-3'-phosphate
  modified_base 14: mod_base = OTHER; note = 2'-fluorouridine-3'-phosphate
  modified_base 15: mod_base = OTHER; note = 2'-O-methyluridine-3'-phosphate
  modified_base 16: mod_base = OTHER; note = 2'-fluorocytidine-3'-phosphate
  modified_base 17: mod_base = OTHER; note = 2'-O-methyladenosine-3'-phosphate
  modified_base 18: mod_base = OTHER; note = 2'-O-methylcytidine-3'-phosphate
  modified_base 19: mod_base = OTHER; note = 2'-O-methyladenosine-3'-phosphate
  modified_base 20: mod_base = OTHER; note = 2'-O-methyluridine-3'-phosphate
  modified_base 21: mod_base = OTHER; note = 2'-O-methyluridine-3'-phosphorothioate
  modified_base 22: mod_base = OTHER; note = 2'-O-methylcytidine-3'- phosphorothioate
  modified_base 23: mod_base = OTHER; note = 2'-O-methyluridine-3'-phosphate
cttgtcgatgactttcacattct

SEQ ID NO: 2874 - RNA, 21 nt, synthetic construct
  source 1..21: mol_type = other RNA
  modified_base 1: mod_base = OTHER; note = 2'-O-methylguanosine-3'- phosphorothioate
  modified_base 2: mod_base = OTHER; note = 2'-O-methylguanosine-3'- phosphorothioate
  modified_base 3: mod_base = OTHER; note = 2'-O-methylcytidine-3'-phosphate
  modified_base 4: mod_base = OTHER; note = 2'-O-methyluridine-3'-phosphate
  modified_base 5: mod_base = OTHER; note = 2'-O-methyladenosine-3'-phosphate
  modified_base 6: mod_base = OTHER; note = 2'-O-methyladenosine-3'-phosphate
  modified_base 7: mod_base = OTHER; note = 2'-fluorouridine-3'-phosphate
  modified_base 8: mod_base = OTHER; note = 2'-O-methyluridine-3'-phosphate
  modified_base 9: mod_base = OTHER; note = 2'-fluorouridine-3'-phosphate
  modified_base 10: mod_base = OTHER; note = 2'-fluoroguanosine-3'-phosphate
  modified_base 11: mod_base = OTHER; note = 2'-fluorouridine-3'-phosphate
  modified_base 12: mod_base = OTHER; note = 2'-O-methyladenosine-3'-phosphate
  modified_base 13: mod_base = OTHER; note = 2'-O-methyluridine-3'-phosphate
  modified_base 14: mod_base = OTHER; note = 2'-O-methylcytidine-3'-phosphate
  modified_base 15: mod_base = OTHER; note = 2'-O-methyladenosine-3'-phosphate
  modified_base 16: mod_base = OTHER; note = 2'-O-methyladenosine-3'-phosphate
  modified_base 17: mod_base = OTHER; note = 2'-O-methyluridine-3'-phosphate
  modified_base 18: mod_base = OTHER; note = 2'-O-methylguanosine-3'-phosphate
  modified_base 19: mod_base = OTHER; note = 2'-O-methyladenosine-3'-phosphate
  modified_base 20: mod_base = OTHER; note = 2'-O-methyluridine-3'-phosphate
  modified_base 21: mod_base = OTHER; note 2'-O-methyluridine-3'-phosphate-N-[tris(GalNAc-alkyl)-amido decanoyl)]-4-hydroxyprolinol (Hyp-(GalNAc-alkyl)3)
ggctaatttgtatcaatgatt

SEQ ID NO: 2875 - RNA, 23 nt, synthetic construct
  source 1..23: mol_type = other RNA
  modified_base 1: mod_base = OTHER; note = 2'-O-methyladenosine-3'- phosphorothioate
  modified_base 2: mod_base = OTHER; note = 2'-fluoroadenosine-3'-phosphorothioate
  modified_base 3: mod_base = OTHER; note = 2'-O-methyluridine-3'-phosphate
  modified_base 4: mod_base = OTHER; note = 2'-O-methylcytidine-3'-phosphate
  modified_base 5: mod_base = OTHER; note = 2'-O-methyladenosine-3'-phosphate
  modified_base 6: mod_base = OTHER; note = 2'-fluorouridine-3'-phosphate
  modified_base 7: mod_base = OTHER; note = 2'-O-methyluridine-3'-phosphate
  modified_base 8: mod_base = OTHER; note = 2'-fluoroguanosine-3'-phosphate
  modified_base 9: mod_base = OTHER; note = 2'-fluoroadenosine-3'-phosphate
  modified_base 10: mod_base = OTHER; note = 2'-O-methyluridine-3'-phosphate
  modified_base 11: mod_base = OTHER; note = 2'-O-methyladenosine-3'-phosphate
  modified_base 12: mod_base = OTHER; note = 2'-O-methylcytidine-3'-phosphate
  modified_base 13: mod_base = OTHER; note = 2'-O-methyladenosine-3'-phosphate
  modified_base 14: mod_base = OTHER; note = 2'-fluoroadenosine-3'-phosphate
  modified_base 15: mod_base = OTHER; note = 2'-O-methyladenosine-3'-phosphate
  modified_base 16: mod_base = OTHER; note = 2'-fluorouridine-3'-phosphate
  modified_base 17: mod_base = OTHER; note = 2'-O-methyluridine-3'-phosphate
  modified_base 18: mod_base = OTHER; note = 2'-O-methyladenosine-3'-phosphate
  modified_base 19: mod_base = OTHER; note = 2'-O-methylguanosine-3'-phosphate
  modified_base 20: mod_base = OTHER; note = 2'-O-methylcytidine-3'-phosphate
  modified_base 21: mod_base = OTHER; note = 2'-O-methylcytidine-3'- phosphorothioate
  modified_base 22: mod_base = OTHER; note = 2'-O-methylguanosine-3'- phosphorothioate
  modified_base 23: mod_base = OTHER; note = 2'-O-methylguanosine-3'-phosphate
aatcattgatacaaattagccgg

SEQ ID NO: 2876 - RNA, 21 nt, synthetic construct
  source 1..21: mol_type = other RNA
  modified_base 1: mod_base = OTHER; note = 2'-O-methylguanosine-3'- phosphorothioate
  modified_base 2: mod_base = OTHER; note = 2'-O-methylcytidine-3'- phosphorothioate
  modified_base 3: mod_base = OTHER; note = 2'-O-methyluridine-3'-phosphate
  modified_base 4: mod_base = OTHER; note = 2'-O-methyladenosine-3'-phosphate
  modified_base 5: mod_base = OTHER; note = 2'-O-methyladenosine-3'-phosphate
  modified_base 6: mod_base = OTHER; note = 2'-O-methyluridine-3'-phosphate
  modified_base 7: mod_base = OTHER; note = 2'-fluorouridine-3'-phosphate
  modified_base 8: mod_base = OTHER; note = 2'-O-methyluridine-3'-phosphate
  modified_base 9: mod_base = OTHER; note = 2'-fluoroguanosine-3'-phosphate
  modified_base 10: mod_base = OTHER; note = 2'-fluorouridine-3'-phosphate
  modified_base 11: mod_base = OTHER; note = 2'-fluoroadenosine-3'-phosphate
  modified_base 12: mod_base = OTHER; note = 2'-O-methyluridine-3'-phosphate
  modified_base 13: mod_base = OTHER; note = 2'-O-methylcytidine-3'-phosphate
  modified_base 14: mod_base = OTHER; note = 2'-O-methyladenosine-3'-phosphate
  modified_base 15: mod_base = OTHER; note = 2'-O-methyladenosine-3'-phosphate
  modified_base 16: mod_base = OTHER; note = 2'-O-methyluridine-3'-phosphate
  modified_base 17: mod_base = OTHER; note = 2'-O-methylguanosine-3'-phosphate
  modified_base 18: mod_base = OTHER; note = 2'-O-methyladenosine-3'-phosphate
  modified_base 19: mod_base = OTHER; note = 2'-O-methyluridine-3'-phosphate
  modified_base 20: mod_base = OTHER; note = 2'-O-methyluridine-3'-phosphate
  modified_base 21: mod_base = OTHER; note 2'-O-methyladenosine-3'-phosphate-N-[tris(GalNAc-alkyl)-ami dodecanoyl)]-4-hydroxyprolinol (Hyp-(GalNAc-alkyl)3)
gctaatttgtatcaatgatta

SEQ ID NO: 2877 - RNA, 23 nt, synthetic construct
  source 1..23: mol_type = other RNA
  modified_base 1: mod_base = OTHER; note = 2'-O-methyluridine-3'-phosphorothioate
  modified_base 2: mod_base = OTHER; note = 2'-fluoroadenosine-3'-phosphorothioate
  modified_base 3: mod_base = OTHER; note = 2'-O-methyladenosine-3'-phosphate
  modified_base 4: mod_base = OTHER; note = 2'-O-methyluridine-3'-phosphate
  modified_base 5: mod_base = OTHER; note = 2'-O-methylcytidine-3'-phosphate
  modified_base 6: mod_base = OTHER; note = 2'-fluoroadenosine-3'-phosphate
  modified_base 7: mod_base = OTHER; note = 2'-O-methyluridine-3'-phosphate
  modified_base 8: mod_base = OTHER; note = 2'-fluorouridine-3'-phosphate
  modified_base 9: mod_base = OTHER; note = 2'-fluoroguanosine-3'-phosphate
  modified_base 10: mod_base = OTHER; note = 2'-O-methyladenosine-3'-phosphate
  modified_base 11: mod_base = OTHER; note = 2'-O-methyluridine-3'-phosphate
  modified_base 12: mod_base = OTHER; note = 2'-O-methyladenosine-3'-phosphate
  modified_base 13: mod_base = OTHER; note = 2'-O-methylcytidine-3'-phosphate
  modified_base 14: mod_base = OTHER; note = 2'-fluoroadenosine-3'-phosphate
  modified_base 15: mod_base = OTHER; note = 2'-O-methyladenosine-3'-phosphate
  modified_base 16: mod_base = OTHER; note = 2'-fluoroadenosine-3'-phosphate
  modified_base 17: mod_base = OTHER; note = 2'-O-methyluridine-3'-phosphate
  modified_base 18: mod_base = OTHER; note = 2'-O-methyluridine-3'-phosphate
  modified_base 19: mod_base = OTHER; note = 2'-O-methyladenosine-3'-phosphate
  modified_base 20: mod_base = OTHER; note = 2'-O-methylguanosine-3'-phosphate
  modified_base 21: mod_base = OTHER; note = 2'-O-methylcytidine-3'- phosphorothioate
  modified_base 22: mod_base = OTHER; note = 2'-O-methylcytidine-3'- phosphorothioate
  modified_base 23: mod_base = OTHER; note = 2'-O-methylguanosine-3'-phosphate
taatcattgatacaaattagccg

SEQ ID NO: 2878 - RNA, 21 nt, synthetic construct
  source 1..21: mol_type = other RNA
  modified_base 1: mod_base = OTHER; note = 2'-O-methylcytidine-3'- phosphorothioate
  modified_base 2: mod_base = OTHER; note = 2'-O-methylcytidine-3'- phosphorothioate
  modified_base 3: mod_base = OTHER; note = 2'-O-methylcytidine-3'-phosphate
  modified_base 4: mod_base = OTHER; note = 2'-O-methylcytidine-3'-phosphate
  modified_base 5: mod_base = OTHER; note = 2'-O-methylguanosine-3'-phosphate
  modified_base 6: mod_base = OTHER; note = 2'-O-methylguanosine-3'-phosphate
  modified_base 7: mod_base = OTHER; note = 2'-fluorocytidine-3'-phosphate
  modified_base 8: mod_base = OTHER; note = 2'-O-methyluridine-3'-phosphate
  modified_base 9: mod_base = OTHER; note = 2'-fluoroadenosine-3'-phosphate
  modified_base 10: mod_base = OTHER; note = 2'-fluoroadenosine-3'-phosphate
  modified_base 11: mod_base = OTHER; note = 2'-fluorouridine-3'-phosphate
  modified_base 12: mod_base = OTHER; note = 2'-O-methyluridine-3'-phosphate
  modified_base 13: mod_base = OTHER; note = 2'-O-methyluridine-3'-phosphate
  modified_base 14: mod_base = OTHER; note = 2'-O-methylguanosine-3'-phosphate
  modified_base 15: mod_base = OTHER; note = 2'-O-methyluridine-3'-phosphate
  modified_base 16: mod_base = OTHER; note = 2'-O-methyladenosine-3'-phosphate
  modified_base 17: mod_base = OTHER; note = 2'-O-methyluridine-3'-phosphate
  modified_base 18: mod_base = OTHER; note = 2'-O-methylcytidine-3'-phosphate
  modified_base 19: mod_base = OTHER; note = 2'-O-methyladenosine-3'-phosphate
  modified_base 20: mod_base = OTHER; note = 2'-O-methyladenosine-3'-phosphate
  modified_base 21: mod_base = OTHER; note 2'-O-methyluridine-3'-phosphate-N-[tris(GalNAc-alkyl)-amido decanoyl)]-4-hydroxyprolinol (Hyp-(GalNAc-alkyl)3)
ccccggctaatttgtatcaat

SEQ ID NO: 2879 - RNA, 23 nt, synthetic construct
  source 1..23: mol_type = other RNA
  modified_base 1: mod_base = OTHER; note = 2'-O-methyladenosine-3'- phosphorothioate
  modified_base 2: mod_base = OTHER; note = 2'-fluorouridine -3'-phosphorothioate
  modified_base 3: mod_base = OTHER; note = 2'-O-methyluridine-3'-phosphate
  modified_base 4: mod_base = OTHER; note = 2'-O-methylguanosine-3'-phosphate
  modified_base 5: mod_base = OTHER; note = 2'-O-methyladenosine-3'-phosphate
  modified_base 6: mod_base = OTHER; note = 2'-fluorouridine-3'-phosphate
  modified_base 7: mod_base = OTHER; note = 2'-O-methyladenosine-3'-phosphate
  modified_base 8: mod_base = OTHER; note = 2'-fluorocytidine-3'-phosphate
  modified_base 9: mod_base = OTHER; note = 2'-fluoroadenosine-3'-phosphate
  modified_base 10: mod_base = OTHER; note = 2'-O-methyladenosine-3'-phosphate
  modified_base 11: mod_base = OTHER; note = 2'-O-methyladenosine-3'-phosphate
  modified_base 12: mod_base = OTHER; note = 2'-O-methyluridine-3'-phosphate
  modified_base 13: mod_base = OTHER; note = 2'-O-methyluridine-3'-phosphate
  modified_base 14: mod_base = OTHER; note = 2'-fluoroadenosine-3'-phosphate
  modified_base 15: mod_base = OTHER; note = 2'-O-methylguanosine-3'-phosphate
  modified_base 16: mod_base = OTHER; note = 2'-fluorocytidine-3'-phosphate
  modified_base 17: mod_base = OTHER; note = 2'-O-methylcytidine-3'-phosphate
  modified_base 18: mod_base = OTHER; note = 2'-O-methylguanosine-3'-phosphate
  modified_base 19: mod_base = OTHER; note = 2'-O-methylguanosine-3'-phosphate
  modified_base 20: mod_base = OTHER; note = 2'-O-methylguanosine-3'-phosphate
  modified_base 21: mod_base = OTHER; note = 2'-O-methylguanosine-3'- phosphorothioate
  modified_base 22: mod_base = OTHER; note = 2'-O-methylguanosine-3'- phosphorothioate
  modified_base 23: mod_base = OTHER; note = 2'-O-methyladenosine-3'-phosphate
attgatacaaattagccggggga

SEQ ID NO: 2880 - RNA, 21 nt, synthetic construct
  source 1..21: mol_type = other RNA
  modified_base 1: mod_base = OTHER; note = 2'-O-methylcytidine-3'- phosphorothioate
  modified_base 2: mod_base = OTHER; note = 2'-O-methylcytidine-3'- phosphorothioate
  modified_base 3: mod_base = OTHER; note = 2'-O-methylcytidine-3'-phosphate
  modified_base 4: mod_base = OTHER; note = 2'-O-methylcytidine-3'-phosphate
  modified_base 5: mod_base = OTHER; note = 2'-O-methylcytidine-3'-phosphate
  modified_base 6: mod_base = OTHER; note = 2'-O-methylguanosine-3'-phosphate
  modified_base 7: mod_base = OTHER; note = 2'-fluoroguanosine-3'-phosphate
  modified_base 8: mod_base = OTHER; note = 2'-O-methylcytidine-3'-phosphate
  modified_base 9: mod_base = OTHER; note = 2'-fluorouridine-3'-phosphate
  modified_base 10: mod_base = OTHER; note = 2'-fluoroadenosine-3'-phosphate
  modified_base 11: mod_base = OTHER; note = 2'-fluoroadenosine-3'-phosphate
  modified_base 12: mod_base = OTHER; note = 2'-O-methyluridine-3'-phosphate
  modified_base 13: mod_base = OTHER; note = 2'-O-methyluridine-3'-phosphate
  modified_base 14: mod_base = OTHER; note = 2'-O-methyluridine-3'-phosphate
  modified_base 15: mod_base = OTHER; note = 2'-O-methylguanosine-3'-phosphate
  modified_base 16: mod_base = OTHER; note = 2'-O-methyluridine-3'-phosphate
  modified_base 17: mod_base = OTHER; note = 2'-O-methyladenosine-3'-phosphate
  modified_base 18: mod_base = OTHER; note = 2'-O-methyluridine-3'-phosphate
  modified_base 19: mod_base = OTHER; note = 2'-O-methylcytidine-3'-phosphate
  modified_base 20: mod_base = OTHER; note = 2'-O-methyladenosine-3'-phosphate
  modified_base 21: mod_base = OTHER; note 2'-O-methyladenosine-3'-phosphate-N-[tris(GalNAc-alkyl)-ami dodecanoyl)]-4-hydroxyprolinol (Hyp-(GalNAc-alkyl)3)
cccccggctaatttgtatcaa

SEQ ID NO: 2881 - RNA, 23 nt, synthetic construct
  source 1..23: mol_type = other RNA
  modified_base 1: mod_base = OTHER; note = 2'-O-methyluridine-3'-phosphorothioate
  modified_base 2: mod_base = OTHER; note = 2'-fluorouridine -3'-phosphorothioate
  modified_base 3: mod_base = OTHER; note = 2'-O-methylguanosine-3'-phosphate
  modified_base 4: mod_base = OTHER; note = 2'-O-methyladenosine-3'-phosphate
  modified_base 5: mod_base = OTHER; note = 2'-O-methyluridine-3'-phosphate
  modified_base 6: mod_base = OTHER; note = 2'-fluoroadenosine-3'-phosphate
  modified_base 7: mod_base = OTHER; note = 2'-O-methylcytidine-3'-phosphate
  modified_base 8: mod_base = OTHER; note = 2'-fluoroadenosine-3'-phosphate
  modified_base 9: mod_base = OTHER; note = 2'-fluoroadenosine-3'-phosphate
  modified_base 10: mod_base = OTHER; note = 2'-O-methyladenosine-3'-phosphate
  modified_base 11: mod_base = OTHER; note = 2'-O-methyluridine-3'-phosphate
  modified_base 12: mod_base = OTHER; note = 2'-O-methyluridine-3'-phosphate
  modified_base 13: mod_base = OTHER; note = 2'-O-methyladenosine-3'-phosphate
  modified_base 14: mod_base = OTHER; note = 2'-fluoroguanosine-3'-phosphate
  modified_base 15: mod_base = OTHER; note = 2'-O-methylcytidine-3'-phosphate
  modified_base 16: mod_base = OTHER; note = 2'-fluorocytidine-3'-phosphate
  modified_base 17: mod_base = OTHER; note = 2'-O-methylguanosine-3'-phosphate
  modified_base 18: mod_base = OTHER; note = 2'-O-methylguanosine-3'-phosphate
  modified_base 19: mod_base = OTHER; note = 2'-O-methylguanosine-3'-phosphate
  modified_base 20: mod_base = OTHER; note = 2'-O-methylguanosine-3'-phosphate
  modified_base 21: mod_base = OTHER; note = 2'-O-methylguanosine-3'- phosphorothioate
  modified_base 22: mod_base = OTHER; note = 2'-O-methyladenosine-3'- phosphorothioate
  modified_base 23: mod_base = OTHER; note = 2'-O-methylguanosine-3'-phosphate
ttgatacaaattagccgggggag

SEQ ID NO: 2882 - RNA, 21 nt, synthetic construct
  source 1..21: mol_type = other RNA
  modified_base 1: mod_base = OTHER; note = 2'-O-methyluridine-3'-phosphorothioate
  modified_base 2: mod_base = OTHER; note = 2'-O-methylguanosine-3'- phosphorothioate
  modified_base 3: mod_base = OTHER; note = 2'-O-methyluridine-3'-phosphate
  modified_base 4: mod_base = OTHER; note = 2'-O-methylcytidine-3'-phosphate
  modified_base 5: mod_base = OTHER; note = 2'-O-methylguanosine-3'-phosphate
  modified_base 6: mod_base = OTHER; note = 2'-O-methyladenosine-3'-phosphate
  modified_base 7: mod_base = OTHER; note = 2'-fluorocytidine-3'-phosphate
  modified_base 8: mod_base = OTHER; note = 2'-O-methyluridine-3'-phosphate
  modified_base 9: mod_base = OTHER; note = 2'-fluorouridine-3'-phosphate
  modified_base 10: mod_base = OTHER; note = 2'-fluorocytidine-3'-phosphate
  modified_base 11: mod_base = OTHER; note = 2'-fluorouridine-3'-phosphate
  modified_base 12: mod_base = OTHER; note = 2'-O-methylguanosine-3'-phosphate
  modified_base 13: mod_base = OTHER; note = 2'-O-methyluridine-3'-phosphate
  modified_base 14: mod_base = OTHER; note = 2'-O-methyluridine-3'-phosphate
  modified_base 15: mod_base = OTHER; note = 2'-O-methyluridine-3'-phosphate
  modified_base 16: mod_base = OTHER; note = 2'-O-methyluridine-3'-phosphate
  modified_base 17: mod_base = OTHER; note = 2'-O-methyladenosine-3'-phosphate
  modified_base 18: mod_base = OTHER; note = 2'-O-methylguanosine-3'-phosphate
  modified_base 19: mod_base = OTHER; note = 2'-O-methylguanosine-3'-phosphate
  modified_base 20: mod_base = OTHER; note = 2'-O-methyladenosine-3'-phosphate
  modified_base 21: mod_base = OTHER; note 2'-O-methylcytidine-3'-phosphate-N-[tris(GalNAc-alkyl)-amid odecanoyl)]-4-hydroxyprolinol (Hyp-(GalNAc-alkyl)3)
tgtcgacttctgttttaggac

SEQ ID NO: 2883 - RNA, 23 nt, synthetic construct
  source 1..23: mol_type = other RNA
  modified_base 1: mod_base = OTHER; note = 2'-O-methylguanosine-3'- phosphorothioate
  modified_base 2: mod_base = OTHER; note = 2'-fluorouridine -3'-phosphorothioate
  modified_base 3: mod_base = OTHER; note = 2'-O-methylcytidine-3'-phosphate
  modified_base 4: mod_base = OTHER; note = 2'-O-methylcytidine-3'-phosphate
  modified_base 5: mod_base = OTHER; note = 2'-O-methyluridine-3'-phosphate
  modified_base 6: mod_base = OTHER; note = 2'-fluoroadenosine-3'-phosphate
  modified_base 7: mod_base = OTHER; note = 2'-O-methyladenosine-3'-phosphate
  modified_base 8: mod_base = OTHER; note = 2'-fluoroadenosine-3'-phosphate
  modified_base 9: mod_base = OTHER; note = 2'-fluoroadenosine-3'-phosphate
  modified_base 10: mod_base = OTHER; note = 2'-O-methylcytidine-3'-phosphate
  modified_base 11: mod_base = OTHER; note = 2'-O-methyladenosine-3'-phosphate
  modified_base 12: mod_base = OTHER; note = 2'-O-methylguanosine-3'-phosphate
  modified_base 13: mod_base = OTHER; note = 2'-O-methyladenosine-3'-phosphate
  modified_base 14: mod_base = OTHER; note = 2'-fluoroadenosine-3'-phosphate
  modified_base 15: mod_base = OTHER; note = 2'-O-methylguanosine-3'-phosphate
  modified_base 16: mod_base = OTHER; note = 2'-fluorouridine-3'-phosphate
  modified_base 17: mod_base = OTHER; note = 2'-O-methylcytidine-3'-phosphate
  modified_base 18: mod_base = OTHER; note = 2'-O-methylguanosine-3'-phosphate
  modified_base 19: mod_base = OTHER; note = 2'-O-methyladenosine-3'-phosphate
  modified_base 20: mod_base = OTHER; note = 2'-O-methylcytidine-3'-phosphate
  modified_base 21: mod_base = OTHER; note = 2'-O-methyladenosine-3'- phosphorothioate
  modified_base 22: mod_base = OTHER; note = 2'-O-methylguanosine-3'- phosphorothioate
  modified_base 23: mod_base = OTHER; note = 2'-O-methyladenosine-3'-phosphate
gtcctaaaacagaagtcgacaga

SEQ ID NO: 2884 - RNA, 21 nt, synthetic construct
  source 1..21: mol_type = other RNA
  modified_base 1: mod_base = OTHER; note = 2'-O-methylguanosine-3'- phosphorothioate
  modified_base 2: mod_base = OTHER; note = 2'-O-methyluridine-3'-phosphorothioate
  modified_base 3: mod_base = OTHER; note = 2'-O-methylcytidine-3'-phosphate
  modified_base 4: mod_base = OTHER; note = 2'-O-methylguanosine-3'-phosphate
  modified_base 5: mod_base = OTHER; note = 2'-O-methyladenosine-3'-phosphate
  modified_base 6: mod_base = OTHER; note = 2'-O-methylcytidine-3'-phosphate
  modified_base 7: mod_base = OTHER; note = 2'-fluorouridine-3'-phosphate
  modified_base 8: mod_base = OTHER; note = 2'-O-methyluridine-3'-phosphate
  modified_base 9: mod_base = OTHER; note = 2'-fluorocytidine-3'-phosphate
  modified_base 10: mod_base = OTHER; note = 2'-fluorouridine-3'-phosphate
  modified_base 11: mod_base = OTHER; note = 2'-fluoroguanosine-3'-phosphate
  modified_base 12: mod_base = OTHER; note = 2'-O-methyluridine-3'-phosphate
  modified_base 13: mod_base = OTHER; note = 2'-O-methyluridine-3'-phosphate
  modified_base 14: mod_base = OTHER; note = 2'-O-methyluridine-3'-phosphate
  modified_base 15: mod_base = OTHER; note = 2'-O-methyluridine-3'-phosphate
  modified_base 16: mod_base = OTHER; note = 2'-O-methyladenosine-3'-phosphate
  modified_base 17: mod_base = OTHER; note = 2'-O-methylguanosine-3'-phosphate
  modified_base 18: mod_base = OTHER; note = 2'-O-methylguanosine-3'-phosphate
  modified_base 19: mod_base = OTHER; note = 2'-O-methyladenosine-3'-phosphate
  modified_base 20: mod_base = OTHER; note = 2'-O-methylcytidine-3'-phosphate
  modified_base 21: mod_base = OTHER; note 2'-O-methyladenosine-3'-phosphate-N-[tris(GalNAc-alkyl)-ami dodecanoyl)]-4-hydroxyprolinol (Hyp-(GalNAc-alkyl)3)
gtcgacttctgttttaggaca

SEQ ID NO: 2885 - RNA, 23 nt, synthetic construct
  source 1..23: mol_type = other RNA
  modified_base 1: mod_base = OTHER; note = 2'-O-methyluridine-3'-phosphorothioate
  modified_base 2: mod_base = OTHER; note = 2'-fluoroguanosine-3'-phosphorothioate
  modified_base 3: mod_base = OTHER; note = 2'-O-methyluridine-3'-phosphate
  modified_base 4: mod_base = OTHER; note = 2'-O-methylcytidine-3'-phosphate
  modified_base 5: mod_base = OTHER; note = 2'-O-methylcytidine-3'-phosphate
  modified_base 6: mod_base = OTHER; note = 2'-fluorouridine-3'-phosphate
  modified_base 7: mod_base = OTHER; note = 2'-O-methyladenosine-3'-phosphate
  modified_base 8: mod_base = OTHER; note = 2'-fluoroadenosine-3'-phosphate
  modified_base 9: mod_base = OTHER; note = 2'-fluoroadenosine-3'-phosphate
  modified_base 10: mod_base = OTHER; note = 2'-O-methyladenosine-3'-phosphate
  modified_base 11: mod_base = OTHER; note = 2'-O-methylcytidine-3'-phosphate
  modified_base 12: mod_base = OTHER; note = 2'-O-methyladenosine-3'-phosphate
  modified_base 13: mod_base = OTHER; note = 2'-O-methylguanosine-3'-phosphate
  modified_base 14: mod_base = OTHER; note = 2'-fluoroadenosine-3'-phosphate
  modified_base 15: mod_base = OTHER; note = 2'-O-methyladenosine-3'-phosphate
  modified_base 16: mod_base = OTHER; note = 2'-fluoroguanosine-3'-phosphate
  modified_base 17: mod_base = OTHER; note = 2'-O-methyluridine-3'-phosphate
  modified_base 18: mod_base = OTHER; note = 2'-O-methylcytidine-3'-phosphate
  modified_base 19: mod_base = OTHER; note = 2'-O-methylguanosine-3'-phosphate
  modified_base 20: mod_base = OTHER; note = 2'-O-methyladenosine-3'-phosphate
  modified_base 21: mod_base = OTHER; note = 2'-O-methylcytidine-3'- phosphorothioate
  modified_base 22: mod_base = OTHER; note = 2'-O-methyladenosine-3'- phosphorothioate
  modified_base 23: mod_base = OTHER; note = 2'-O-methylguanosine-3'-phosphate
tgtcctaaaacagaagtcgacag

SEQ ID NO: 2886 - RNA, 21 nt, synthetic construct
  source 1..21: mol_type = other RNA
  modified_base 1: mod_base = OTHER; note = 2'-O-methylguanosine-3'- phosphorothioate
  modified_base 2: mod_base = OTHER; note = 2'-O-methyladenosine-3'- phosphorothioate
  modified_base 3: mod_base = OTHER; note = 2'-O-methyluridine-3'-phosphate
  modified_base 4: mod_base = OTHER; note = 2'-O-methylcytidine-3'-phosphate
  modified_base 5: mod_base = OTHER; note = 2'-O-methyluridine-3'-phosphate
  modified_base 6: mod_base = OTHER; note = 2'-O-methylguanosine-3'-phosphate
  modified_base 7: mod_base = OTHER; note = 2'-fluorouridine-3'-phosphate
  modified_base 8: mod_base = OTHER; note = 2'-O-methylcytidine-3'-phosphate
  modified_base 9: mod_base = OTHER; note = 2'-fluoroguanosine-3'-phosphate
  modified_base 10: mod_base = OTHER; note = 2'-fluoroadenosine-3'-phosphate
  modified_base 11: mod_base = OTHER; note = 2'-fluorocytidine-3'-phosphate
  modified_base 12: mod_base = OTHER; note = 2'-O-methyluridine-3'-phosphate
  modified_base 13: mod_base = OTHER; note = 2'-O-methyluridine-3'-phosphate
  modified_base 14: mod_base = OTHER; note = 2'-O-methylcytidine-3'-phosphate
  modified_base 15: mod_base = OTHER; note = 2'-O-methyluridine-3'-phosphate
  modified_base 16: mod_base = OTHER; note = 2'-O-methylguanosine-3'-phosphate
  modified_base 17: mod_base = OTHER; note = 2'-O-methyluridine-3'-phosphate
  modified_base 18: mod_base = OTHER; note = 2'-O-methyluridine-3'-phosphate
  modified_base 19: mod_base = OTHER; note = 2'-O-methyluridine-3'-phosphate
  modified_base 20: mod_base = OTHER; note = 2'-O-methyluridine-3'-phosphate
  modified_base 21: mod_base = OTHER; note 2'-O-methyladenosine-3'-phosphate-N-[tris(GalNAc-alkyl)-ami dodecanoyl)]-4-hydroxyprolinol (Hyp-(GalNAc-alkyl)3)
gatctgtcgacttctgtttta

SEQ ID NO: 2887 - RNA, 23 nt, synthetic construct
  source 1..23: mol_type = other RNA
  modified_base 1: mod_base = OTHER; note = 2'-O-methyluridine-3'-phosphorothioate
  modified_base 2: mod_base = OTHER; note = 2'-fluoroadenosine-3'-phosphorothioate
  modified_base 3: mod_base = OTHER; note = 2'-O-methyladenosine-3'-phosphate
  modified_base 4: mod_base = OTHER; note = 2'-O-methyladenosine-3'-phosphate
  modified_base 5: mod_base = OTHER; note = 2'-O-methyladenosine-3'-phosphate
  modified_base 6: mod_base = OTHER; note = 2'-fluorocytidine-3'-phosphate
  modified_base 7: mod_base = OTHER; note = 2'-O-methyladenosine-3'-phosphate
  modified_base 8: mod_base = OTHER; note = 2'-fluoroguanosine-3'-phosphate
  modified_base 9: mod_base = OTHER; note = 2'-fluoroadenosine-3'-phosphate
  modified_base 10: mod_base = OTHER; note = 2'-O-methyladenosine-3'-phosphate
  modified_base 11: mod_base = OTHER; note = 2'-O-methylguanosine-3'-phosphate
  modified_base 12: mod_base = OTHER; note = 2'-O-methyluridine-3'-phosphate
  modified_base 13: mod_base = OTHER; note = 2'-O-methylcytidine-3'-phosphate
  modified_base 14: mod_base = OTHER; note = 2'-fluoroguanosine-3'-phosphate
  modified_base 15: mod_base = OTHER; note = 2'-O-methyladenosine-3'-phosphate
  modified_base 16: mod_base = OTHER; note = 2'-fluorocytidine-3'-phosphate
  modified_base 17: mod_base = OTHER; note = 2'-O-methyladenosine-3'-phosphate
  modified_base 18: mod_base = OTHER; note = 2'-O-methylguanosine-3'-phosphate
  modified_base 19: mod_base = OTHER; note = 2'-O-methyladenosine-3'-phosphate
  modified_base 20: mod_base = OTHER; note = 2'-O-methyluridine-3'-phosphate
  modified_base 21: mod_base = OTHER; note = 2'-O-methylcytidine-3'- phosphorothioate
  modified_base 22: mod_base = OTHER; note = 2'-O-methyluridine-3'-phosphorothioate
  modified_base 23: mod_base = OTHER; note = 2'-O-methylguanosine-3'-phosphate
taaaacagaagtcgacagatctg

SEQ ID NO: 2888 - RNA, 21 nt, synthetic construct
  source 1..21: mol_type = other RNA
  modified_base 1: mod_base = OTHER; note = 2'-O-methyladenosine-3'- phosphorothioate
  modified_base 2: mod_base = OTHER; note = 2'-O-methylguanosine-3'- phosphorothioate
  modified_base 3: mod_base = OTHER; note = 2'-O-methyladenosine-3'-phosphate
  modified_base 4: mod_base = OTHER; note = 2'-O-methyluridine-3'-phosphate
  modified_base 5: mod_base = OTHER; note = 2'-O-methylcytidine-3'-phosphate
  modified_base 6: mod_base = OTHER; note = 2'-O-methyluridine-3'-phosphate
  modified_base 7: mod_base = OTHER; note = 2'-fluoroguanosine-3'-phosphate
  modified_base 8: mod_base = OTHER; note = 2'-O-methyluridine-3'-phosphate
  modified_base 9: mod_base = OTHER; note = 2'-fluorocytidine-3'-phosphate
  modified_base 10: mod_base = OTHER; note = 2'-fluoroguanosine-3'-phosphate
  modified_base 11: mod_base = OTHER; note = 2'-fluoroadenosine-3'-phosphate
  modified_base 12: mod_base = OTHER; note = 2'-O-methylcytidine-3'-phosphate
  modified_base 13: mod_base = OTHER; note = 2'-O-methyluridine-3'-phosphate
  modified_base 14: mod_base = OTHER; note = 2'-O-methyluridine-3'-phosphate
  modified_base 15: mod_base = OTHER; note = 2'-O-methylcytidine-3'-phosphate
  modified_base 16: mod_base = OTHER; note = 2'-O-methyluridine-3'-phosphate
  modified_base 17: mod_base = OTHER; note = 2'-O-methylguanosine-3'-phosphate
  modified_base 18: mod_base = OTHER; note = 2'-O-methyluridine-3'-phosphate
  modified_base 19: mod_base = OTHER; note = 2'-O-methyluridine-3'-phosphate
  modified_base 20: mod_base = OTHER; note = 2'-O-methyluridine-3'-phosphate
  modified_base 21: mod_base = OTHER; note 2'-O-methyluridine-3'-phosphate-N-[tris(GalNAc-alkyl)-amido decanoyl)]-4-hydroxyprolinol (Hyp-(GalNAc-alkyl)3)
agatctgtcgacttctgtttt

SEQ ID NO: 2889 - RNA, 23 nt, synthetic construct
  source 1..23: mol_type = other RNA
  modified_base 1: mod_base = OTHER; note = 2'-O-methyladenosine-3'- phosphorothioate
  modified_base 2: mod_base = OTHER; note = 2'-fluoroadenosine-3'-phosphorothioate
  modified_base 3: mod_base = OTHER; note = 2'-O-methyladenosine-3'-phosphate
  modified_base 4: mod_base = OTHER; note = 2'-O-methyladenosine-3'-phosphate
  modified_base 5: mod_base = OTHER; note = 2'-O-methylcytidine-3'-phosphate
  modified_base 6: mod_base = OTHER; note = 2'-fluoroadenosine-3'-phosphate
  modified_base 7: mod_base = OTHER; note = 2'-O-methylguanosine-3'-phosphate
  modified_base 8: mod_base = OTHER; note = 2'-fluoroadenosine-3'-phosphate
  modified_base 9: mod_base = OTHER; note = 2'-fluoroadenosine-3'-phosphate
  modified_base 10: mod_base = OTHER; note = 2'-O-methylguanosine-3'-phosphate
  modified_base 11: mod_base = OTHER; note = 2'-O-methyluridine-3'-phosphate
  modified_base 12: mod_base = OTHER; note = 2'-O-methylcytidine-3'-phosphate
  modified_base 13: mod_base = OTHER; note = 2'-O-methylguanosine-3'-phosphate
  modified_base 14: mod_base = OTHER; note = 2'-fluoroadenosine-3'-phosphate
  modified_base 15: mod_base = OTHER; note = 2'-O-methylcytidine-3'-phosphate
  modified_base 16: mod_base = OTHER; note = 2'-fluoroadenosine-3'-phosphate
  modified_base 17: mod_base = OTHER; note = 2'-O-methylguanosine-3'-phosphate
  modified_base 18: mod_base = OTHER; note = 2'-O-methyladenosine-3'-phosphate
  modified_base 19: mod_base = OTHER; note = 2'-O-methyluridine-3'-phosphate
  modified_base 20: mod_base = OTHER; note = 2'-O-methylcytidine-3'-phosphate
  modified_base 21: mod_base = OTHER; note = 2'-O-methyluridine-3'-phosphorothioate
  modified_base 22: mod_base = OTHER; note = 2'-O-methylguanosine-3'- phosphorothioate
  modified_base 23: mod_base = OTHER; note = 2'-O-methyluridine-3'-phosphate
aaaacagaagtcgacagatctgt

SEQ ID NO: 2890 - RNA, 21 nt, synthetic construct
  source 1..21: mol_type = other RNA
  modified_base 1: mod_base = OTHER; note = 2'-O-methylcytidine-3'- phosphorothioate
  modified_base 2: mod_base = OTHER; note = 2'-O-methylcytidine-3'- phosphorothioate
  modified_base 3: mod_base = OTHER; note = 2'-O-methylguanosine-3'-phosphate
  modified_base 4: mod_base = OTHER; note = 2'-O-methyladenosine-3'-phosphate
  modified_base 5: mod_base = OTHER; note = 2'-O-methylguanosine-3'-phosphate
  modified_base 6: mod_base = OTHER; note = 2'-O-methyladenosine-3'-phosphate
  modified_base 7: mod_base = OTHER; note = 2'-fluoroadenosine-3'-phosphate
  modified_base 8: mod_base = OTHER; note = 2'-O-methylguanosine-3'-phosphate
  modified_base 9: mod_base = OTHER; note = 2'-fluorouridine-3'-phosphate
  modified_base 10: mod_base = OTHER; note = 2'-fluorocytidine-3'-phosphate
  modified_base 11: mod_base = OTHER; note = 2'-fluoroadenosine-3'-phosphate
  modified_base 12: mod_base = OTHER; note = 2'-O-methylcytidine-3'-phosphate
  modified_base 13: mod_base = OTHER; note = 2'-O-methylcytidine-3'-phosphate
  modified_base 14: mod_base = OTHER; note = 2'-O-methyladenosine-3'-phosphate
  modified_base 15: mod_base = OTHER; note = 2'-O-methyladenosine-3'-phosphate
  modified_base 16: mod_base = OTHER; note = 2'-O-methylguanosine-3'-phosphate
  modified_base 17: mod_base = OTHER; note = 2'-O-methyladenosine-3'-phosphate
  modified_base 18: mod_base = OTHER; note = 2'-O-methyladenosine-3'-phosphate
  modified_base 19: mod_base = OTHER; note = 2'-O-methylguanosine-3'-phosphate
  modified_base 20: mod_base = OTHER; note = 2'-O-methylcytidine-3'-phosphate
  modified_base 21: mod_base = OTHER; note 2'-O-methyluridine-3'-phosphate-N-[tris(GalNAc-alkyl)-amido decanoyl)]-4-hydroxyprolinol (Hyp-(GalNAc-alkyl)3)
ccgagaagtcaccaagaagct

SEQ ID NO: 2891 - RNA, 23 nt, synthetic construct
  source 1..23: mol_type = other RNA
  modified_base 1: mod_base = OTHER; note = 2'-O-methyladenosine-3'- phosphorothioate
  modified_base 2: mod_base = OTHER; note = 2'-fluoroguanosine-3'-phosphorothioate
  modified_base 3: mod_base = OTHER; note = 2'-O-methylcytidine-3'-phosphate
  modified_base 4: mod_base = OTHER; note = 2'-O-methyluridine-3'-phosphate
  modified_base 5: mod_base = OTHER; note = 2'-O-methyluridine-3'-phosphate
  modified_base 6: mod_base = OTHER; note = 2'-fluorocytidine-3'-phosphate
  modified_base 7: mod_base = OTHER; note = 2'-O-methyluridine-3'-phosphate
  modified_base 8: mod_base = OTHER; note = 2'-fluorouridine-3'-phosphate
  modified_base 9: mod_base = OTHER; note = 2'-fluoroguanosine-3'-phosphate
  modified_base 10: mod_base = OTHER; note = 2'-O-methylguanosine-3'-phosphate
  modified_base 11: mod_base = OTHER; note = 2'-O-methyluridine-3'-phosphate
  modified_base 12: mod_base = OTHER; note = 2'-O-methylguanosine-3'-phosphate
  modified_base 13: mod_base = OTHER; note = 2'-O-methyladenosine-3'-phosphate
  modified_base 14: mod_base = OTHER; note = 2'-fluorocytidine-3'-phosphate
  modified_base 15: mod_base = OTHER; note = 2'-O-methyluridine-3'-phosphate
  modified_base 16: mod_base = OTHER; note = 2'-fluorouridine-3'-phosphate
  modified_base 17: mod_base = OTHER; note = 2'-O-methylcytidine-3'-phosphate
  modified_base 18: mod_base = OTHER; note = 2'-O-methyluridine-3'-phosphate
  modified_base 19: mod_base = OTHER; note = 2'-O-methylcytidine-3'-phosphate
  modified_base 20: mod_base = OTHER; note = 2'-O-methylguanosine-3'-phosphate
  modified_base 21: mod_base = OTHER; note = 2'-O-methylguanosine-3'- phosphorothioate
  modified_base 22: mod_base = OTHER; note = 2'-O-methyluridine-3'-phosphorothioate
  modified_base 23: mod_base = OTHER; note = 2'-O-methylcytidine-3'-phosphate
agcttcttggtgacttctcggtc

SEQ ID NO: 2892 - RNA, 21 nt, synthetic construct
  source 1..21: mol_type = other RNA
  modified_base 1: mod_base = OTHER; note = 2'-O-methylcytidine-3'- phosphorothioate
  modified_base 2: mod_base = OTHER; note = 2'-O-methylguanosine-3'- phosphorothioate
  modified_base 3: mod_base = OTHER; note = 2'-O-methyladenosine-3'-phosphate
  modified_base 4: mod_base = OTHER; note = 2'-O-methylguanosine-3'-phosphate
  modified_base 5: mod_base = OTHER; note = 2'-O-methyladenosine-3'-phosphate
  modified_base 6: mod_base = OTHER; note = 2'-O-methyladenosine-3'-phosphate
  modified_base 7: mod_base = OTHER; note = 2'-fluoroguanosine-3'-phosphate
  modified_base 8: mod_base = OTHER; note = 2'-O-methyluridine-3'-phosphate
  modified_base 9: mod_base = OTHER; note = 2'-fluorocytidine-3'-phosphate
  modified_base 10: mod_base = OTHER; note = 2'-fluoroadenosine-3'-phosphate
  modified_base 11: mod_base = OTHER; note = 2'-fluorocytidine-3'-phosphate
  modified_base 12: mod_base = OTHER; note = 2'-O-methylcytidine-3'-phosphate
  modified_base 13: mod_base = OTHER; note = 2'-O-methyladenosine-3'-phosphate
  modified_base 14: mod_base = OTHER; note = 2'-O-methyladenosine-3'-phosphate
  modified_base 15: mod_base = OTHER; note = 2'-O-methylguanosine-3'-phosphate
  modified_base 16: mod_base = OTHER; note = 2'-O-methyladenosine-3'-phosphate
  modified_base 17: mod_base = OTHER; note = 2'-O-methyladenosine-3'-phosphate
  modified_base 18: mod_base = OTHER; note = 2'-O-methylguanosine-3'-phosphate
  modified_base 19: mod_base = OTHER; note = 2'-O-methylcytidine-3'-phosphate
  modified_base 20: mod_base = OTHER; note = 2'-O-methyluridine-3'-phosphate
  modified_base 21: mod_base = OTHER; note 2'-O-methyladenosine-3'-phosphate-N-[tris(GalNAc-alkyl)-ami dodecanoyl)]-4-hydroxyprolinol (Hyp-(GalNAc-alkyl)3)
cgagaagtcaccaagaagcta

SEQ ID NO: 2893 - RNA, 23 nt, synthetic construct
  source 1..23: mol_type = other RNA
  modified_base 1: mod_base = OTHER; note = 2'-O-methyluridine-3'-phosphorothioate
  modified_base 2: mod_base = OTHER; note = 2'-fluoroadenosine-3'-phosphorothioate
  modified_base 3: mod_base = OTHER; note = 2'-O-methylguanosine-3'-phosphate
  modified_base 4: mod_base = OTHER; note = 2'-O-methylcytidine-3'-phosphate
  modified_base 5: mod_base = OTHER; note = 2'-O-methyluridine-3'-phosphate
  modified_base 6: mod_base = OTHER; note = 2'-fluorouridine-3'-phosphate
  modified_base 7: mod_base = OTHER; note = 2'-O-methylcytidine-3'-phosphate
  modified_base 8: mod_base = OTHER; note = 2'-fluorouridine-3'-phosphate
  modified_base 9: mod_base = OTHER; note = 2'-fluorouridine-3'-phosphate
  modified_base 10: mod_base = OTHER; note = 2'-O-methylguanosine-3'-phosphate
  modified_base 11: mod_base = OTHER; note = 2'-O-methylguanosine-3'-phosphate
  modified_base 12: mod_base = OTHER; note = 2'-O-methyluridine-3'-phosphate
  modified_base 13: mod_base = OTHER; note = 2'-O-methylguanosine-3'-phosphate
  modified_base 14: mod_base = OTHER; note = 2'-fluoroadenosine-3'-phosphate
  modified_base 15: mod_base = OTHER; note = 2'-O-methylcytidine-3'-phosphate
  modified_base 16: mod_base = OTHER; note = 2'-fluorouridine-3'-phosphate
  modified_base 17: mod_base = OTHER; note = 2'-O-methyluridine-3'-phosphate
  modified_base 18: mod_base = OTHER; note = 2'-O-methylcytidine-3'-phosphate
  modified_base 19: mod_base = OTHER; note = 2'-O-methyluridine-3'-phosphate
  modified_base 20: mod_base = OTHER; note = 2'-O-methylcytidine-3'-phosphate
  modified_base 21: mod_base = OTHER; note = 2'-O-methylguanosine-3'- phosphorothioate
  modified_base 22: mod_base = OTHER; note = 2'-O-methylguanosine-3'- phosphorothioate
  modified_base 23: mod_base = OTHER; note = 2'-O-methyluridine-3'-phosphate
tagcttcttggtgacttctcggt

SEQ ID NO: 2894 - RNA, 21 nt, synthetic construct
  source 1..21: mol_type = other RNA
  modified_base 1: mod_base = OTHER; note = 2'-O-methyladenosine-3'- phosphorothioate
  modified_base 2: mod_base = OTHER; note = 2'-O-methylguanosine-3'- phosphorothioate
  modified_base 3: mod_base = OTHER; note = 2'-O-methylguanosine-3'-phosphate
  modified_base 4: mod_base = OTHER; note = 2'-O-methyladenosine-3'-phosphate
  modified_base 5: mod_base = OTHER; note = 2'-O-methylcytidine-3'-phosphate
  modified_base 6: mod_base = OTHER; note = 2'-O-methylcytidine-3'-phosphate
  modified_base 7: mod_base = OTHER; note = 2'-fluoroguanosine-3'-phosphate
  modified_base 8: mod_base = OTHER; note = 2'-O-methyladenosine-3'-phosphate
  modified_base 9: mod_base = OTHER; note = 2'-fluoroguanosine-3'-phosphate
  modified_base 10: mod_base = OTHER; note = 2'-fluoroadenosine-3'-phosphate
  modified_base 11: mod_base = OTHER; note = 2'-fluoroadenosine-3'-phosphate
  modified_base 12: mod_base = OTHER; note = 2'-O-methylguanosine-3'-phosphate
  modified_base 13: mod_base = OTHER; note = 2'-O-methyluridine-3'-phosphate
  modified_base 14: mod_base = OTHER; note = 2'-O-methylcytidine-3'-phosphate
  modified_base 15: mod_base = OTHER; note = 2'-O-methyladenosine-3'-phosphate
  modified_base 16: mod_base = OTHER; note = 2'-O-methylcytidine-3'-phosphate
  modified_base 17: mod_base = OTHER; note = 2'-O-methylcytidine-3'-phosphate
  modified_base 18: mod_base = OTHER; note = 2'-O-methyladenosine-3'-phosphate
  modified_base 19: mod_base = OTHER; note = 2'-O-methyladenosine-3'-phosphate
  modified_base 20: mod_base = OTHER; note = 2'-O-methylguanosine-3'-phosphate
  modified_base 21: mod_base = OTHER; note 2'-O-methyladenosine-3'-phosphate-N-[tris(GalNAc-alkyl)-ami dodecanoyl)]-4-hydroxyprolinol (Hyp-(GalNAc-alkyl)3)
aggaccgagaagtcaccaaga

SEQ ID NO: 2895 - RNA, 23 nt, synthetic construct
  source 1..23: mol_type = other RNA
  modified_base 1: mod_base = OTHER; note = 2'-O-methyluridine-3'-phosphorothioate
  modified_base 2: mod_base = OTHER; note = 2'-fluorocytidine-3'-phosphorothioate
  modified_base 3: mod_base = OTHER; note = 2'-O-methyluridine-3'-phosphate
  modified_base 4: mod_base = OTHER; note = 2'-O-methyluridine-3'-phosphate
  modified_base 5: mod_base = OTHER; note = 2'-O-methylguanosine-3'-phosphate
  modified_base 6: mod_base = OTHER; note = 2'-fluoroguanosine-3'-phosphate
  modified_base 7: mod_base = OTHER; note = 2'-O-methyluridine-3'-phosphate
  modified_base 8: mod_base = OTHER; note = 2'-fluoroguanosine-3'-phosphate
  modified_base 9: mod_base = OTHER; note = 2'-fluoroadenosine-3'-phosphate
  modified_base 10: mod_base = OTHER; note = 2'-O-methylcytidine-3'-phosphate
  modified_base 11: mod_base = OTHER; note = 2'-O-methyluridine-3'-phosphate
  modified_base 12: mod_base = OTHER; note = 2'-O-methyluridine-3'-phosphate
  modified_base 13: mod_base = OTHER; note = 2'-O-methylcytidine-3'-phosphate
  modified_base 14: mod_base = OTHER; note = 2'-fluorouridine-3'-phosphate
  modified_base 15: mod_base = OTHER; note = 2'-O-methylcytidine-3'-phosphate
  modified_base 16: mod_base = OTHER; note = 2'-fluoroguanosine-3'-phosphate
  modified_base 17: mod_base = OTHER; note = 2'-O-methylguanosine-3'-phosphate
  modified_base 18: mod_base = OTHER; note = 2'-O-methyluridine-3'-phosphate
  modified_base 19: mod_base = OTHER; note = 2'-O-methylcytidine-3'-phosphate
  modified_base 20: mod_base = OTHER; note = 2'-O-methylcytidine-3'-phosphate
  modified_base 21: mod_base = OTHER; note = 2'-O-methyluridine-3'-phosphorothioate
  modified_base 22: mod_base = OTHER; note = 2'-O-methyluridine-3'-phosphorothioate
  modified_base 23: mod_base = OTHER; note = 2'-O-methylguanosine-3'-phosphate
tcttggtgacttctcggtccttg

SEQ ID NO: 2896 - RNA, 21 nt, synthetic construct
  source 1..21: mol_type = other RNA
  modified_base 1: mod_base = OTHER; note = 2'-O-methyladenosine-3'- phosphorothioate
  modified_base 2: mod_base = OTHER; note = 2'-O-methyladenosine-3'- phosphorothioate
  modified_base 3: mod_base = OTHER; note = 2'-O-methylguanosine-3'-phosphate
  modified_base 4: mod_base = OTHER; note = 2'-O-methylguanosine-3'-phosphate
  modified_base 5: mod_base = OTHER; note = 2'-O-methyladenosine-3'-phosphate
  modified_base 6: mod_base = OTHER; note = 2'-O-methylcytidine-3'-phosphate
  modified_base 7: mod_base = OTHER; note = 2'-fluorocytidine-3'-phosphate
  modified_base 8: mod_base = OTHER; note = 2'-O-methylguanosine-3'-phosphate
  modified_base 9: mod_base = OTHER; note = 2'-fluoroadenosine-3'-phosphate
  modified_base 10: mod_base = OTHER; note = 2'-fluoroguanosine-3'-phosphate
  modified_base 11: mod_base = OTHER; note = 2'-fluoroadenosine-3'-phosphate
  modified_base 12: mod_base = OTHER; note = 2'-O-methyladenosine-3'-phosphate
  modified_base 13: mod_base = OTHER; note = 2'-O-methylguanosine-3'-phosphate
  modified_base 14: mod_base = OTHER; note = 2'-O-methyluridine-3'-phosphate
  modified_base 15: mod_base = OTHER; note = 2'-O-methylcytidine-3'-phosphate
  modified_base 16: mod_base = OTHER; note = 2'-O-methyladenosine-3'-phosphate
  modified_base 17: mod_base = OTHER; note = 2'-O-methylcytidine-3'-phosphate
  modified_base 18: mod_base = OTHER; note = 2'-O-methylcytidine-3'-phosphate
  modified_base 19: mod_base = OTHER; note = 2'-O-methyladenosine-3'-phosphate
  modified_base 20: mod_base = OTHER; note = 2'-O-methyladenosine-3'-phosphate
  modified_base 21: mod_base = OTHER; note 2'-O-methylguanosine-3'-phosphate-N-[tris(GalNAc-alkyl)-ami dodecanoyl)]-4-hydroxyprolinol (Hyp-(GalNAc-alkyl)3)
aaggaccgagaagtcaccaag

SEQ ID NO: 2897 - RNA, 23 nt, synthetic construct
  source 1..23: mol_type = other RNA
  modified_base 1: mod_base = OTHER; note = 2'-O-methylcytidine-3'- phosphorothioate
  modified_base 2: mod_base = OTHER; note = 2'-fluorouridine -3'-phosphorothioate
  modified_base 3: mod_base = OTHER; note = 2'-O-methyluridine-3'-phosphate
  modified_base 4: mod_base = OTHER; note = 2'-O-methylguanosine-3'-phosphate
  modified_base 5: mod_base = OTHER; note = 2'-O-methylguanosine-3'-phosphate
  modified_base 6: mod_base = OTHER; note = 2'-fluorouridine-3'-phosphate
  modified_base 7: mod_base = OTHER; note = 2'-O-methylguanosine-3'-phosphate
  modified_base 8: mod_base = OTHER; note = 2'-fluoroadenosine-3'-phosphate
  modified_base 9: mod_base = OTHER; note = 2'-fluorocytidine-3'-phosphate
  modified_base 10: mod_base = OTHER; note = 2'-O-methyluridine-3'-phosphate
  modified_base 11: mod_base = OTHER; note = 2'-O-methyluridine-3'-phosphate
  modified_base 12: mod_base = OTHER; note = 2'-O-methylcytidine-3'-phosphate
  modified_base 13: mod_base = OTHER; note = 2'-O-methyluridine-3'-phosphate
  modified_base 14: mod_base = OTHER; note = 2'-fluorocytidine-3'-phosphate
  modified_base 15: mod_base = OTHER; note = 2'-O-methylguanosine-3'-phosphate
  modified_base 16: mod_base = OTHER; note = 2'-fluoroguanosine-3'-phosphate
  modified_base 17: mod_base = OTHER; note = 2'-O-methyluridine-3'-phosphate
  modified_base 18: mod_base = OTHER; note = 2'-O-methylcytidine-3'-phosphate
  modified_base 19: mod_base = OTHER; note = 2'-O-methylcytidine-3'-phosphate
  modified_base 20: mod_base = OTHER; note = 2'-O-methyluridine-3'-phosphate
  modified_base 21: mod_base = OTHER; note = 2'-O-methyluridine-3'-phosphorothioate
  modified_base 22: mod_base = OTHER; note = 2'-O-methylguanosine-3'- phosphorothioate
  modified_base 23: mod_base = OTHER; note = 2'-O-methyluridine-3'-phosphate
cttggtgacttctcggtccttgt

SEQ ID NO: 2898 - RNA, 21 nt, synthetic construct
  source 1..21: mol_type = other RNA
  modified_base 1: mod_base = OTHER; note = 2'-O-methyladenosine-3'- phosphorothioate
  modified_base 2: mod_base = OTHER; note = 2'-O-methyladenosine-3'- phosphorothioate
  modified_base 3: mod_base = OTHER; note = 2'-O-methyladenosine-3'-phosphate
  modified_base 4: mod_base = OTHER; note = 2'-O-methylcytidine-3'-phosphate
  modified_base 5: mod_base = OTHER; note = 2'-O-methyladenosine-3'-phosphate
  modified_base 6: mod_base = OTHER; note = 2'-O-methyluridine-3'-phosphate
  modified_base 7: mod_base = OTHER; note = 2'-fluoroguanosine-3'-phosphate
  modified_base 8: mod_base = OTHER; note = 2'-O-methylguanosine-3'-phosphate
  modified_base 9: mod_base = OTHER; note = 2'-fluorocytidine-3'-phosphate
  modified_base 10: mod_base = OTHER; note = 2'-fluorouridine-3'-phosphate
  modified_base 11: mod_base = OTHER; note = 2'-fluorouridine-3'-phosphate
  modified_base 12: mod_base = OTHER; note = 2'-O-methylguanosine-3'-phosphate
  modified_base 13: mod_base = OTHER; note = 2'-O-methyladenosine-3'-phosphate
  modified_base 14: mod_base = OTHER; note = 2'-O-methyladenosine-3'-phosphate
  modified_base 15: mod_base = OTHER; note = 2'-O-methyluridine-3'-phosphate
  modified_base 16: mod_base = OTHER; note = 2'-O-methylguanosine-3'-phosphate
  modified_base 17: mod_base = OTHER; note = 2'-O-methylguanosine-3'-phosphate
  modified_base 18: mod_base = OTHER; note = 2'-O-methylguanosine-3'-phosphate
  modified_base 19: mod_base = OTHER; note = 2'-O-methyladenosine-3'-phosphate
  modified_base 20: mod_base = OTHER; note = 2'-O-methyluridine-3'-phosphate
  modified_base 21: mod_base = OTHER; note 2'-O-methylcytidine-3'-phosphate-N-[tris(GalNAc-alkyl)-amid odecanoyl)]-4-hydroxyprolinol (Hyp-(GalNAc-alkyl)3)
aaacatggcttgaatgggatc

SEQ ID NO: 2899 - RNA, 23 nt, synthetic construct
  source 1..23: mol_type = other RNA
  modified_base 1: mod_base = OTHER; note = 2'-O-methylguanosine-3'- phosphorothioate
  modified_base 2: mod_base = OTHER; note = 2'-fluoroadenosine-3'-phosphorothioate
  modified_base 3: mod_base = OTHER; note = 2'-O-methyluridine-3'-phosphate
  modified_base 4: mod_base = OTHER; note = 2'-O-methylcytidine-3'-phosphate
  modified_base 5: mod_base = OTHER; note = 2'-O-methylcytidine-3'-phosphate
  modified_base 6: mod_base = OTHER; note = 2'-fluorocytidine-3'-phosphate
  modified_base 7: mod_base = OTHER; note = 2'-O-methyladenosine-3'-phosphate
  modified_base 8: mod_base = OTHER; note = 2'-fluorouridine-3'-phosphate
  modified_base 9: mod_base = OTHER; note = 2'-fluorouridine-3'-phosphate
  modified_base 10: mod_base = OTHER; note = 2'-O-methylcytidine-3'-phosphate
  modified_base 11: mod_base = OTHER; note = 2'-O-methyladenosine-3'-phosphate
  modified_base 12: mod_base = OTHER; note = 2'-O-methyladenosine-3'-phosphate
  modified_base 13: mod_base = OTHER; note = 2'-O-methylguanosine-3'-phosphate
  modified_base 14: mod_base = OTHER; note = 2'-fluorocytidine-3'-phosphate
  modified_base 15: mod_base = OTHER; note = 2'-O-methylcytidine-3'-phosphate
  modified_base 16: mod_base = OTHER; note = 2'-fluoroadenosine-3'-phosphate
  modified_base 17: mod_base = OTHER; note = 2'-O-methyluridine-3'-phosphate
  modified_base 18: mod_base = OTHER; note = 2'-O-methylguanosine-3'-phosphate
  modified_base 19: mod_base = OTHER; note = 2'-O-methyluridine-3'-phosphate
  modified_base 20: mod_base = OTHER; note = 2'-O-methyluridine-3'-phosphate
  modified_base 21: mod_base = OTHER; note = 2'-O-methyluridine-3'-phosphorothioate
  modified_base 22: mod_base = OTHER; note = 2'-O-methyladenosine-3'- phosphorothioate
  modified_base 23: mod_base = OTHER; note = 2'-O-methyladenosine-3'-phosphate
gatcccattcaagccatgtttaa

SEQ ID NO: 2900 - RNA, 21 nt, synthetic construct
  source 1..21: mol_type = other RNA
  modified_base 1: mod_base = OTHER; note = 2'-O-methyladenosine-3'- phosphorothioate
  modified_base 2: mod_base = OTHER; note = 2'-O-methyladenosine-3'- phosphorothioate
  modified_base 3: mod_base = OTHER; note = 2'-O-methylcytidine-3'-phosphate
  modified_base 4: mod_base = OTHER; note = 2'-O-methyladenosine-3'-phosphate
  modified_base 5: mod_base = OTHER; note = 2'-O-methyluridine-3'-phosphate
  modified_base 6: mod_base = OTHER; note = 2'-O-methylguanosine-3'-phosphate
  modified_base 7: mod_base = OTHER; note = 2'-fluoroguanosine-3'-phosphate
  modified_base 8: mod_base = OTHER; note = 2'-O-methylcytidine-3'-phosphate
  modified_base 9: mod_base = OTHER; note = 2'-fluorouridine-3'-phosphate
  modified_base 10: mod_base = OTHER; note = 2'-fluorouridine-3'-phosphate
  modified_base 11: mod_base = OTHER; note = 2'-fluoroguanosine-3'-phosphate
  modified_base 12: mod_base = OTHER; note = 2'-O-methyladenosine-3'-phosphate
  modified_base 13: mod_base = OTHER; note = 2'-O-methyladenosine-3'-phosphate
  modified_base 14: mod_base = OTHER; note = 2'-O-methyluridine-3'-phosphate
  modified_base 15: mod_base = OTHER; note = 2'-O-methylguanosine-3'-phosphate
  modified_base 16: mod_base = OTHER; note = 2'-O-methylguanosine-3'-phosphate
  modified_base 17: mod_base = OTHER; note = 2'-O-methylguanosine-3'-phosphate
  modified_base 18: mod_base = OTHER; note = 2'-O-methyladenosine-3'-phosphate
  modified_base 19: mod_base = OTHER; note = 2'-O-methyluridine-3'-phosphate
  modified_base 20: mod_base = OTHER; note = 2'-O-methylcytidine-3'-phosphate
  modified_base 21: mod_base = OTHER; note 2'-O-methyluridine-3'-phosphate-N-[tris(GalNAc-alkyl)-amido decanoyl)]-4-hydroxyprolinol (Hyp-(GalNAc-alkyl)3)
aacatggcttgaatgggatct

SEQ ID NO: 2901 - RNA, 23 nt, synthetic construct
  source 1..23: mol_type = other RNA
  modified_base 1: mod_base = OTHER; note = 2'-O-methyladenosine-3'- phosphorothioate
  modified_base 2: mod_base = OTHER; note = 2'-fluoroguanosine-3'-phosphorothioate
  modified_base 3: mod_base = OTHER; note = 2'-O-methyladenosine-3'-phosphate
  modified_base 4: mod_base = OTHER; note = 2'-O-methyluridine-3'-phosphate
  modified_base 5: mod_base = OTHER; note = 2'-O-methylcytidine-3'-phosphate
  modified_base 6: mod_base = OTHER; note = 2'-fluorocytidine-3'-phosphate
  modified_base 7: mod_base = OTHER; note = 2'-O-methylcytidine-3'-phosphate
  modified_base 8: mod_base = OTHER; note = 2'-fluoroadenosine-3'-phosphate
  modified_base 9: mod_base = OTHER; note = 2'-fluorouridine-3'-phosphate
  modified_base 10: mod_base = OTHER; note = 2'-O-methyluridine-3'-phosphate
  modified_base 11: mod_base = OTHER; note = 2'-O-methylcytidine-3'-phosphate
  modified_base 12: mod_base = OTHER; note = 2'-O-methyladenosine-3'-phosphate
  modified_base 13: mod_base = OTHER; note = 2'-O-methyladenosine-3'-phosphate
  modified_base 14: mod_base = OTHER; note = 2'-fluoroguanosine-3'-phosphate
  modified_base 15: mod_base = OTHER; note = 2'-O-methylcytidine-3'-phosphate
  modified_base 16: mod_base = OTHER; note = 2'-fluorocytidine-3'-phosphate
  modified_base 17: mod_base = OTHER; note = 2'-O-methyladenosine-3'-phosphate
  modified_base 18: mod_base = OTHER; note = 2'-O-methyluridine-3'-phosphate
  modified_base 19: mod_base = OTHER; note = 2'-O-methylguanosine-3'-phosphate
  modified_base 20: mod_base = OTHER; note = 2'-O-methyluridine-3'-phosphate
  modified_base 21: mod_base = OTHER; note = 2'-O-methyluridine-3'-phosphorothioate
  modified_base 22: mod_base = OTHER; note = 2'-O-methyluridine-3'-phosphorothioate
  modified_base 23: mod_base = OTHER; note = 2'-O-methyladenosine-3'-phosphate
agatcccattcaagccatgttta

SEQ ID NO: 2902 - RNA, 21 nt, synthetic construct
  source 1..21: mol_type = other RNA
  modified_base 1: mod_base = OTHER; note = 2'-O-methyluridine-3'-phosphorothioate
  modified_base 2: mod_base = OTHER; note = 2'-O-methylguanosine-3'- phosphorothioate
  modified_base 3: mod_base = OTHER; note = 2'-O-methyluridine-3'-phosphate
  modified_base 4: mod_base = OTHER; note = 2'-O-methyluridine-3'-phosphate
  modified_base 5: mod_base = OTHER; note = 2'-O-methyladenosine-3'-phosphate
  modified_base 6: mod_base = OTHER; note = 2'-O-methyladenosine-3'-phosphate
  modified_base 7: mod_base = OTHER; note = 2'-fluoroadenosine-3'-phosphate
  modified_base 8: mod_base = OTHER; note = 2'-O-methylcytidine-3'-phosphate
  modified_base 9: mod_base = OTHER; note = 2'-fluoroadenosine-3'-phosphate
  modified_base 10: mod_base = OTHER; note = 2'-fluorouridine-3'-phosphate
  modified_base 11: mod_base = OTHER; note = 2'-fluoroguanosine-3'-phosphate
  modified_base 12: mod_base = OTHER; note = 2'-O-methylguanosine-3'-phosphate
  modified_base 13: mod_base = OTHER; note = 2'-O-methylcytidine-3'-phosphate
  modified_base 14: mod_base = OTHER; note = 2'-O-methyluridine-3'-phosphate
  modified_base 15: mod_base = OTHER; note = 2'-O-methyluridine-3'-phosphate
  modified_base 16: mod_base = OTHER; note = 2'-O-methylguanosine-3'-phosphate
  modified_base 17: mod_base = OTHER; note = 2'-O-methyladenosine-3'-phosphate
  modified_base 18: mod_base = OTHER; note = 2'-O-methyladenosine-3'-phosphate
  modified_base 19: mod_base = OTHER; note = 2'-O-methyluridine-3'-phosphate
  modified_base 20: mod_base = OTHER; note = 2'-O-methylguanosine-3'-phosphate
  modified_base 21: mod_base = OTHER; note 2'-O-methylguanosine-3'-phosphate-N-[tris(GalNAc-alkyl)-ami dodecanoyl)]-4-hydroxyprolinol (Hyp-(GalNAc-alkyl)3)
tgttaaacatggcttgaatgg

SEQ ID NO: 2903 - RNA, 23 nt, synthetic construct
  source 1..23: mol_type = other RNA
  modified_base 1: mod_base = OTHER; note = 2'-O-methylcytidine-3'- phosphorothioate
  modified_base 2: mod_base = OTHER; note = 2'-fluorocytidine-3'-phosphorothioate
  modified_base 3: mod_base = OTHER; note = 2'-O-methyladenosine-3'-phosphate
  modified_base 4: mod_base = OTHER; note = 2'-O-methyluridine-3'-phosphate
  modified_base 5: mod_base = OTHER; note = 2'-O-methyluridine-3'-phosphate
  modified_base 6: mod_base = OTHER; note = 2'-fluorocytidine-3'-phosphate
  modified_base 7: mod_base = OTHER; note = 2'-O-methyladenosine-3'-phosphate
  modified_base 8: mod_base = OTHER; note = 2'-fluoroadenosine-3'-phosphate
  modified_base 9: mod_base = OTHER; note = 2'-fluoroguanosine-3'-phosphate
  modified_base 10: mod_base = OTHER; note = 2'-O-methylcytidine-3'-phosphate
  modified_base 11: mod_base = OTHER; note = 2'-O-methylcytidine-3'-phosphate
  modified_base 12: mod_base = OTHER; note = 2'-O-methyladenosine-3'-phosphate
  modified_base 13: mod_base = OTHER; note = 2'-O-methyluridine-3'-phosphate
  modified_base 14: mod_base = OTHER; note = 2'-fluoroguanosine-3'-phosphate
  modified_base 15: mod_base = OTHER; note = 2'-O-methyluridine-3'-phosphate
  modified_base 16: mod_base = OTHER; note = 2'-fluorouridine-3'-phosphate
  modified_base 17: mod_base = OTHER; note = 2'-O-methyluridine-3'-phosphate
  modified_base 18: mod_base = OTHER; note = 2'-O-methyladenosine-3'-phosphate
  modified_base 19: mod_base = OTHER; note = 2'-O-methyladenosine-3'-phosphate
  modified_base 20: mod_base = OTHER; note = 2'-O-methylcytidine-3'-phosphate
  modified_base 21: mod_base = OTHER; note = 2'-O-methyladenosine-3'- phosphorothioate
  modified_base 22: mod_base = OTHER; note = 2'-O-methylguanosine-3'- phosphorothioate
  modified_base 23: mod_base = OTHER; note = 2'-O-methylcytidine-3'-phosphate
ccattcaagccatgtttaacagc

SEQ ID NO: 2904 - RNA, 21 nt, synthetic construct
  source 1..21: mol_type = other RNA
  modified_base 1: mod_base = OTHER; note = 2'-O-methylcytidine-3'- phosphorothioate
  modified_base 2: mod_base = OTHER; note = 2'-O-methyluridine-3'-phosphorothioate
  modified_base 3: mod_base = OTHER; note = 2'-O-methylguanosine-3'-phosphate
  modified_base 4: mod_base = OTHER; note = 2'-O-methyluridine-3'-phosphate
  modified_base 5: mod_base = OTHER; note = 2'-O-methyluridine-3'-phosphate
  modified_base 6: mod_base = OTHER; note = 2'-O-methyladenosine-3'-phosphate
  modified_base 7: mod_base = OTHER; note = 2'-fluoroadenosine-3'-phosphate
  modified_base 8: mod_base = OTHER; note = 2'-O-methyladenosine-3'-phosphate
  modified_base 9: mod_base = OTHER; note = 2'-fluorocytidine-3'-phosphate
  modified_base 10: mod_base = OTHER; note = 2'-fluoroadenosine-3'-phosphate
  modified_base 11: mod_base = OTHER; note = 2'-fluorouridine-3'-phosphate
  modified_base 12: mod_base = OTHER; note = 2'-O-methylguanosine-3'-phosphate
  modified_base 13: mod_base = OTHER; note = 2'-O-methylguanosine-3'-phosphate
  modified_base 14: mod_base = OTHER; note = 2'-O-methylcytidine-3'-phosphate
  modified_base 15: mod_base = OTHER; note = 2'-O-methyluridine-3'-phosphate
  modified_base 16: mod_base = OTHER; note = 2'-O-methyluridine-3'-phosphate
  modified_base 17: mod_base = OTHER; note = 2'-O-methylguanosine-3'-phosphate
  modified_base 18: mod_base = OTHER; note = 2'-O-methyladenosine-3'-phosphate
  modified_base 19: mod_base = OTHER; note = 2'-O-methyladenosine-3'-phosphate
  modified_base 20: mod_base = OTHER; note = 2'-O-methyluridine-3'-phosphate
  modified_base 21: mod_base = OTHER; note 2'-O-methylguanosine-3'-phosphate-N-[tris(GalNAc-alkyl)-ami dodecanoyl)]-4-hydroxyprolinol (Hyp-(GalNAc-alkyl)3)
ctgttaaacatggcttgaatg

SEQ ID NO: 2905 - RNA, 23 nt, synthetic construct
  source 1..23: mol_type = other RNA
  modified_base 1: mod_base = OTHER; note = 2'-O-methylcytidine-3'- phosphorothioate
  modified_base 2: mod_base = OTHER; note = 2'-fluoroadenosine-3'-phosphorothioate
  modified_base 3: mod_base = OTHER; note = 2'-O-methyluridine-3'-phosphate
  modified_base 4: mod_base = OTHER; note = 2'-O-methyluridine-3'-phosphate
  modified_base 5: mod_base = OTHER; note = 2'-O-methylcytidine-3'-phosphate
  modified_base 6: mod_base = OTHER; note = 2'-fluoroadenosine-3'-phosphate
  modified_base 7: mod_base = OTHER; note = 2'-O-methyladenosine-3'-phosphate
  modified_base 8: mod_base = OTHER; note = 2'-fluoroguanosine-3'-phosphate
  modified_base 9: mod_base = OTHER; note = 2'-fluorocytidine-3'-phosphate
  modified_base 10: mod_base = OTHER; note = 2'-O-methylcytidine-3'-phosphate
  modified_base 11: mod_base = OTHER; note = 2'-O-methyladenosine-3'-phosphate
  modified_base 12: mod_base = OTHER; note = 2'-O-methyluridine-3'-phosphate
  modified_base 13: mod_base = OTHER; note = 2'-O-methylguanosine-3'-phosphate
  modified_base 14: mod_base = OTHER; note = 2'-fluorouridine-3'-phosphate
  modified_base 15: mod_base = OTHER; note = 2'-O-methyluridine-3'-phosphate
  modified_base 16: mod_base = OTHER; note = 2'-fluorouridine-3'-phosphate
  modified_base 17: mod_base = OTHER; note = 2'-O-methyladenosine-3'-phosphate
  modified_base 18: mod_base = OTHER; note = 2'-O-methyladenosine-3'-phosphate
  modified_base 19: mod_base = OTHER; note = 2'-O-methylcytidine-3'-phosphate
  modified_base 20: mod_base = OTHER; note = 2'-O-methyladenosine-3'-phosphate
  modified_base 21: mod_base = OTHER; note = 2'-O-methylguanosine-3'- phosphorothioate
  modified_base 22: mod_base = OTHER; note = 2'-O-methylcytidine-3'- phosphorothioate
  modified_base 23: mod_base = OTHER; note = 2'-O-methylcytidine-3'-phosphate
cattcaagccatgtttaacagcc

SEQ ID NO: 2906 - RNA, 21 nt, synthetic construct
  source 1..21: mol_type = other RNA
  modified_base 1: mod_base = OTHER; note = 2'-O-methylguanosine-3'- phosphorothioate
  modified_base 2: mod_base = OTHER; note = 2'-O-methyladenosine-3'- phosphorothioate
  modified_base 3: mod_base = OTHER; note = 2'-O-methylcytidine-3'-phosphate
  modified_base 4: mod_base = OTHER; note = 2'-O-methyluridine-3'-phosphate
  modified_base 5: mod_base = OTHER; note = 2'-O-methyluridine-3'-phosphate
  modified_base 6: mod_base = OTHER; note = 2'-O-methylguanosine-3'-phosphate
  modified_base 7: mod_base = OTHER; note = 2'-fluorocytidine-3'-phosphate
  modified_base 8: mod_base = OTHER; note = 2'-O-methyluridine-3'-phosphate
  modified_base 9: mod_base = OTHER; note = 2'-fluoroguanosine-3'-phosphate
  modified_base 10: mod_base = OTHER; note = 2'-fluorocytidine-3'-phosphate
  modified_base 11: mod_base = OTHER; note = 2'-fluoroadenosine-3'-phosphate
  modified_base 12: mod_base = OTHER; note = 2'-O-methyluridine-3'-phosphate
  modified_base 13: mod_base = OTHER; note = 2'-O-methyladenosine-3'-phosphate
  modified_base 14: mod_base = OTHER; note = 2'-O-methyluridine-3'-phosphate
  modified_base 15: mod_base = OTHER; note = 2'-O-methylguanosine-3'-phosphate
  modified_base 16: mod_base = OTHER; note = 2'-O-methyluridine-3'-phosphate
  modified_base 17: mod_base = OTHER; note = 2'-O-methylguanosine-3'-phosphate
  modified_base 18: mod_base = OTHER; note = 2'-O-methylguanosine-3'-phosphate
  modified_base 19: mod_base = OTHER; note = 2'-O-methylcytidine-3'-phosphate
  modified_base 20: mod_base = OTHER; note = 2'-O-methyluridine-3'-phosphate
  modified_base 21: mod_base = OTHER; note 2'-O-methyladenosine-3'-phosphate-N-[tris(GalNAc-alkyl)-ami dodecanoyl)]-4-hydroxyprolinol (Hyp-(GalNAc-alkyl)3)
gacttgctgcatatgtggcta

SEQ ID NO: 2907 - RNA, 23 nt, synthetic construct
  source 1..23: mol_type = other RNA
  modified_base 1: mod_base = OTHER; note = 2'-O-methyluridine-3'-phosphorothioate
  modified_base 2: mod_base = OTHER; note = 2'-fluoroadenosine-3'-phosphorothioate
  modified_base 3: mod_base = OTHER; note = 2'-O-methylguanosine-3'-phosphate
  modified_base 4: mod_base = OTHER; note = 2'-O-methylcytidine-3'-phosphate
  modified_base 5: mod_base = OTHER; note = 2'-O-methylcytidine-3'-phosphate
  modified_base 6: mod_base = OTHER; note = 2'-fluoroadenosine-3'-phosphate
  modified_base 7: mod_base = OTHER; note = 2'-O-methylcytidine-3'-phosphate
  modified_base 8: mod_base = OTHER; note = 2'-fluoroadenosine-3'-phosphate
  modified_base 9: mod_base = OTHER; note = 2'-fluorouridine-3'-phosphate
  modified_base 10: mod_base = OTHER; note = 2'-O-methyladenosine-3'-phosphate
  modified_base 11: mod_base = OTHER; note = 2'-O-methyluridine-3'-phosphate
  modified_base 12: mod_base = OTHER; note = 2'-O-methylguanosine-3'-phosphate
  modified_base 13: mod_base = OTHER; note = 2'-O-methylcytidine-3'-phosphate
  modified_base 14: mod_base = OTHER; note = 2'-fluoroadenosine-3'-phosphate
  modified_base 15: mod_base = OTHER; note = 2'-O-methylguanosine-3'-phosphate
  modified_base 16: mod_base = OTHER; note = 2'-fluorocytidine-3'-phosphate
  modified_base 17: mod_base = OTHER; note = 2'-O-methyladenosine-3'-phosphate
  modified_base 18: mod_base = OTHER; note = 2'-O-methyladenosine-3'-phosphate
  modified_base 19: mod_base = OTHER; note = 2'-O-methylguanosine-3'-phosphate
  modified_base 20: mod_base = OTHER; note = 2'-O-methyluridine-3'-phosphate
  modified_base 21: mod_base = OTHER; note = 2'-O-methylcytidine-3'- phosphorothioate
  modified_base 22: mod_base = OTHER; note = 2'-O-methylcytidine-3'- phosphorothioate
  modified_base 23: mod_base = OTHER; note = 2'-O-methyladenosine-3'-phosphate
tagccacatatgcagcaagtcca

SEQ ID NO: 2908 - RNA, 21 nt, synthetic construct
  source 1..21: mol_type = other RNA
  modified_base 1: mod_base = OTHER; note = 2'-O-methyladenosine-3'- phosphorothioate
  modified_base 2: mod_base = OTHER; note = 2'-O-methylcytidine-3'- phosphorothioate
  modified_base 3: mod_base = OTHER; note = 2'-O-methyluridine-3'-phosphate
  modified_base 4: mod_base = OTHER; note = 2'-O-methyluridine-3'-phosphate
  modified_base 5: mod_base = OTHER; note = 2'-O-methylguanosine-3'-phosphate
  modified_base 6: mod_base = OTHER; note = 2'-O-methylcytidine-3'-phosphate
  modified_base 7: mod_base = OTHER; note = 2'-fluorouridine-3'-phosphate
  modified_base 8: mod_base = OTHER; note = 2'-O-methylguanosine-3'-phosphate
  modified_base 9: mod_base = OTHER; note = 2'-fluorocytidine-3'-phosphate
  modified_base 10: mod_base = OTHER; note = 2'-fluoroadenosine-3'-phosphate
  modified_base 11: mod_base = OTHER; note = 2'-fluorouridine-3'-phosphate
  modified_base 12: mod_base = OTHER; note = 2'-O-methyladenosine-3'-phosphate
  modified_base 13: mod_base = OTHER; note = 2'-O-methyluridine-3'-phosphate
  modified_base 14: mod_base = OTHER; note = 2'-O-methylguanosine-3'-phosphate
  modified_base 15: mod_base = OTHER; note = 2'-O-methyluridine-3'-phosphate
  modified_base 16: mod_base = OTHER; note = 2'-O-methylguanosine-3'-phosphate
  modified_base 17: mod_base = OTHER; note = 2'-O-methylguanosine-3'-phosphate
  modified_base 18: mod_base = OTHER; note = 2'-O-methylcytidine-3'-phosphate
  modified_base 19: mod_base = OTHER; note = 2'-O-methyluridine-3'-phosphate
  modified_base 20: mod_base = OTHER; note = 2'-O-methyladenosine-3'-phosphate
  modified_base 21: mod_base = OTHER; note 2'-O-methyladenosine-3'-phosphate-N-[tris(GalNAc-alkyl)-ami dodecanoyl)]-4-hydroxyprolinol (Hyp-(GalNAc-alkyl)3)
acttgctgcatatgtggctaa

SEQ ID NO: 2909 - RNA, 23 nt, synthetic construct
  source 1..23: mol_type = other RNA
  modified_base 1: mod_base = OTHER; note = 2'-O-methyluridine-3'-phosphorothioate
  modified_base 2: mod_base = OTHER; note = 2'-fluorouridine -3'-phosphorothioate
  modified_base 3: mod_base = OTHER; note = 2'-O-methyladenosine-3'-phosphate
  modified_base 4: mod_base = OTHER; note = 2'-O-methylguanosine-3'-phosphate
  modified_base 5: mod_base = OTHER; note = 2'-O-methylcytidine-3'-phosphate
  modified_base 6: mod_base = OTHER; note = 2'-fluorocytidine-3'-phosphate
  modified_base 7: mod_base = OTHER; note = 2'-O-methyladenosine-3'-phosphate
  modified_base 8: mod_base = OTHER; note = 2'-fluorocytidine-3'-phosphate
  modified_base 9: mod_base = OTHER; note = 2'-fluoroadenosine-3'-phosphate
  modified_base 10: mod_base = OTHER; note = 2'-O-methyluridine-3'-phosphate
  modified_base 11: mod_base = OTHER; note = 2'-O-methyladenosine-3'-phosphate
  modified_base 12: mod_base = OTHER; note = 2'-O-methyluridine-3'-phosphate
  modified_base 13: mod_base = OTHER; note = 2'-O-methylguanosine-3'-phosphate
  modified_base 14: mod_base = OTHER; note = 2'-fluorocytidine-3'-phosphate
  modified_base 15: mod_base = OTHER; note = 2'-O-methyladenosine-3'-phosphate
  modified_base 16: mod_base = OTHER; note = 2'-fluoroguanosine-3'-phosphate
  modified_base 17: mod_base = OTHER; note = 2'-O-methylcytidine-3'-phosphate
  modified_base 18: mod_base = OTHER; note = 2'-O-methyladenosine-3'-phosphate
  modified_base 19: mod_base = OTHER; note = 2'-O-methyladenosine-3'-phosphate
  modified_base 20: mod_base = OTHER; note = 2'-O-methylguanosine-3'-phosphate
  modified_base 21: mod_base = OTHER; note = 2'-O-methyluridine-3'-phosphorothioate
  modified_base 22: mod_base = OTHER; note = 2'-O-methylcytidine-3'- phosphorothioate
  modified_base 23: mod_base = OTHER; note = 2'-O-methylcytidine-3'-phosphate
ttagccacatatgcagcaagtcc

SEQ ID NO: 2910 - RNA, 21 nt, synthetic construct
  source 1..21: mol_type = other RNA
  modified_base 1: mod_base = OTHER; note = 2'-O-methyladenosine-3'- phosphorothioate
  modified_base 2: mod_base = OTHER; note = 2'-O-methylguanosine-3'- phosphorothioate
  modified_base 3: mod_base = OTHER; note = 2'-O-methyluridine-3'-phosphate
  modified_base 4: mod_base = OTHER; note = 2'-O-methylguanosine-3'-phosphate
  modified_base 5: mod_base = OTHER; note = 2'-O-methylguanosine-3'-phosphate
  modified_base 6: mod_base = OTHER; note = 2'-O-methyladenosine-3'-phosphate
  modified_base 7: mod_base = OTHER; note = 2'-fluorocytidine-3'-phosphate
  modified_base 8: mod_base = OTHER; note = 2'-O-methyluridine-3'-phosphate
  modified_base 9: mod_base = OTHER; note = 2'-fluorouridine-3'-phosphate
  modified_base 10: mod_base = OTHER; note = 2'-fluoroguanosine-3'-phosphate
  modified_base 11: mod_base = OTHER; note = 2'-fluorocytidine-3'-phosphate
  modified_base 12: mod_base = OTHER; note = 2'-O-methyluridine-3'-phosphate
  modified_base 13: mod_base = OTHER; note = 2'-O-methylguanosine-3'-phosphate
  modified_base 14: mod_base = OTHER; note = 2'-O-methylcytidine-3'-phosphate
  modified_base 15: mod_base = OTHER; note = 2'-O-methyladenosine-3'-phosphate
  modified_base 16: mod_base = OTHER; note = 2'-O-methyluridine-3'-phosphate
  modified_base 17: mod_base = OTHER; note = 2'-O-methyladenosine-3'-phosphate
  modified_base 18: mod_base = OTHER; note = 2'-O-methyluridine-3'-phosphate
  modified_base 19: mod_base = OTHER; note = 2'-O-methylguanosine-3'-phosphate
  modified_base 20: mod_base = OTHER; note = 2'-O-methyluridine-3'-phosphate
  modified_base 21: mod_base = OTHER; note 2'-O-methylguanosine-3'-phosphate-N-[tris(GalNAc-alkyl)-ami dodecanoyl)]-4-hydroxyprolinol (Hyp-(GalNAc-alkyl)3)
agtggacttgctgcatatgtg

SEQ ID NO: 2911 - RNA, 23 nt, synthetic construct
  source 1..23: mol_type = other RNA
  modified_base 1: mod_base = OTHER; note = 2'-O-methylcytidine-3'- phosphorothioate
  modified_base 2: mod_base = OTHER; note = 2'-fluoroadenosine-3'-phosphorothioate
  modified_base 3: mod_base = OTHER; note = 2'-O-methylcytidine-3'-phosphate
  modified_base 4: mod_base = OTHER; note = 2'-O-methyladenosine-3'-phosphate
  modified_base 5: mod_base = OTHER; note = 2'-O-methyluridine-3'-phosphate
  modified_base 6: mod_base = OTHER; note = 2'-fluoroadenosine-3'-phosphate
  modified_base 7: mod_base = OTHER; note = 2'-O-methyluridine-3'-phosphate
  modified_base 8: mod_base = OTHER; note = 2'-fluoroguanosine-3'-phosphate
  modified_base 9: mod_base = OTHER; note = 2'-fluorocytidine-3'-phosphate
  modified_base 10: mod_base = OTHER; note = 2'-O-methyladenosine-3'-phosphate
  modified_base 11: mod_base = OTHER; note = 2'-O-methylguanosine-3'-phosphate
  modified_base 12: mod_base = OTHER; note = 2'-O-methylcytidine-3'-phosphate
  modified_base 13: mod_base = OTHER; note = 2'-O-methyladenosine-3'-phosphate
  modified_base 14: mod_base = OTHER; note = 2'-fluoroadenosine-3'-phosphate
  modified_base 15: mod_base = OTHER; note = 2'-O-methylguanosine-3'-phosphate
  modified_base 16: mod_base = OTHER; note = 2'-fluorouridine-3'-phosphate
  modified_base 17: mod_base = OTHER; note = 2'-O-methylcytidine-3'-phosphate
  modified_base 18: mod_base = OTHER; note = 2'-O-methylcytidine-3'-phosphate
  modified_base 19: mod_base = OTHER; note = 2'-O-methyladenosine-3'-phosphate
  modified_base 20: mod_base = OTHER; note = 2'-O-methylcytidine-3'-phosphate
  modified_base 21: mod_base = OTHER; note = 2'-O-methyluridine-3'-phosphorothioate
  modified_base 22: mod_base = OTHER; note = 2'-O-methylguanosine-3'- phosphorothioate
  modified_base 23: mod_base = OTHER; note = 2'-O-methyluridine-3'-phosphate
cacatatgcagcaagtccactgt

SEQ ID NO: 2912 - RNA, 21 nt, synthetic construct
  source 1..21: mol_type = other RNA
  modified_base 1: mod_base = OTHER; note = 2'-O-methylcytidine-3'- phosphorothioate
  modified_base 2: mod_base = OTHER; note = 2'-O-methyladenosine-3'- phosphorothioate
  modified_base 3: mod_base = OTHER; note = 2'-O-methylguanosine-3'-phosphate
  modified_base 4: mod_base = OTHER; note = 2'-O-methyluridine-3'-phosphate
  modified_base 5: mod_base = OTHER; note = 2'-O-methylguanosine-3'-phosphate
  modified_base 6: mod_base = OTHER; note = 2'-O-methylguanosine-3'-phosphate
  modified_base 7: mod_base = OTHER; note = 2'-fluoroadenosine-3'-phosphate
  modified_base 8: mod_base = OTHER; note = 2'-O-methylcytidine-3'-phosphate
  modified_base 9: mod_base = OTHER; note = 2'-fluorouridine-3'-phosphate
  modified_base 10: mod_base = OTHER; note = 2'-fluorouridine-3'-phosphate
  modified_base 11: mod_base = OTHER; note = 2'-fluoroguanosine-3'-phosphate
  modified_base 12: mod_base = OTHER; note = 2'-O-methylcytidine-3'-phosphate
  modified_base 13: mod_base = OTHER; note = 2'-O-methyluridine-3'-phosphate
  modified_base 14: mod_base = OTHER; note = 2'-O-methylguanosine-3'-phosphate
  modified_base 15: mod_base = OTHER; note = 2'-O-methylcytidine-3'-phosphate
  modified_base 16: mod_base = OTHER; note = 2'-O-methyladenosine-3'-phosphate
  modified_base 17: mod_base = OTHER; note = 2'-O-methyluridine-3'-phosphate
  modified_base 18: mod_base = OTHER; note = 2'-O-methyladenosine-3'-phosphate
  modified_base 19: mod_base = OTHER; note = 2'-O-methyluridine-3'-phosphate
  modified_base 20: mod_base = OTHER; note = 2'-O-methylguanosine-3'-phosphate
  modified_base 21: mod_base = OTHER; note 2'-O-methyluridine-3'-phosphate-N-[tris(GalNAc-alkyl)-amido decanoyl)]-4-hydroxyprolinol (Hyp-(GalNAc-alkyl)3)
cagtggacttgctgcatatgt

SEQ ID NO: 2913 - RNA, 23 nt, synthetic construct
  source 1..23: mol_type = other RNA
  modified_base 1: mod_base = OTHER; note = 2'-O-methyladenosine-3'- phosphorothioate
  modified_base 2: mod_base = OTHER; note = 2'-fluorocytidine-3'-phosphorothioate
  modified_base 3: mod_base = OTHER; note = 2'-O-methyladenosine-3'-phosphate
  modified_base 4: mod_base = OTHER; note = 2'-O-methyluridine-3'-phosphate
  modified_base 5: mod_base = OTHER; note = 2'-O-methyladenosine-3'-phosphate
  modified_base 6: mod_base = OTHER; note = 2'-fluorouridine-3'-phosphate
  modified_base 7: mod_base = OTHER; note = 2'-O-methylguanosine-3'-phosphate
  modified_base 8: mod_base = OTHER; note = 2'-fluorocytidine-3'-phosphate
  modified_base 9: mod_base = OTHER; note = 2'-fluoroadenosine-3'-phosphate
  modified_base 10: mod_base = OTHER; note = 2'-O-methylguanosine-3'-phosphate
  modified_base 11: mod_base = OTHER; note = 2'-O-methylcytidine-3'-phosphate
  modified_base 12: mod_base = OTHER; note = 2'-O-methyladenosine-3'-phosphate
  modified_base 13: mod_base = OTHER; note = 2'-O-methyladenosine-3'-phosphate
  modified_base 14: mod_base = OTHER; note = 2'-fluoroguanosine-3'-phosphate
  modified_base 15: mod_base = OTHER; note = 2'-O-methyluridine-3'-phosphate
  modified_base 16: mod_base = OTHER; note = 2'-fluorocytidine-3'-phosphate
  modified_base 17: mod_base = OTHER; note = 2'-O-methylcytidine-3'-phosphate
  modified_base 18: mod_base = OTHER; note = 2'-O-methyladenosine-3'-phosphate
  modified_base 19: mod_base = OTHER; note = 2'-O-methylcytidine-3'-phosphate
  modified_base 20: mod_base = OTHER; note = 2'-O-methyluridine-3'-phosphate
  modified_base 21: mod_base = OTHER; note = 2'-O-methylguanosine-3'- phosphorothioate
  modified_base 22: mod_base = OTHER; note = 2'-O-methyluridine-3'-phosphorothioate
  modified_base 23: mod_base = OTHER; note = 2'-O-methylcytidine-3'-phosphate
acatatgcagcaagtccactgtc

SEQ ID NO: 2914 - RNA, 21 nt, synthetic construct
  source 1..21: mol_type = other RNA
  modified_base 1: mod_base = OTHER; note = 2'-O-methyluridine-3'-phosphorothioate
  modified_base 2: mod_base = OTHER; note = 2'-O-methyladenosine-3'- phosphorothioate
  modified_base 3: mod_base = OTHER; note = 2'-O-methyladenosine-3'-phosphate
  modified_base 4: mod_base = OTHER; note = 2'-O-methyladenosine-3'-phosphate
  modified_base 5: mod_base = OTHER; note = 2'-O-methyluridine-3'-phosphate
  modified_base 6: mod_base = OTHER; note = 2'-O-methylcytidine-3'-phosphate
  modified_base 7: mod_base = OTHER; note = 2'-fluoroadenosine-3'-phosphate
  modified_base 8: mod_base = OTHER; note = 2'-O-methylguanosine-3'-phosphate
  modified_base 9: mod_base = OTHER; note = 2'-fluorouridine-3'-phosphate
  modified_base 10: mod_base = OTHER; note = 2'-fluoroadenosine-3'-phosphate
  modified_base 11: mod_base = OTHER; note = 2'-fluorocytidine-3'-phosphate
  modified_base 12: mod_base = OTHER; note = 2'-O-methyluridine-3'-phosphate
  modified_base 13: mod_base = OTHER; note = 2'-O-methyluridine-3'-phosphate
  modified_base 14: mod_base = OTHER; note = 2'-O-methylcytidine-3'-phosphate
  modified_base 15: mod_base = OTHER; note = 2'-O-methylcytidine-3'-phosphate
  modified_base 16: mod_base = OTHER; note = 2'-O-methyladenosine-3'-phosphate
  modified_base 17: mod_base = OTHER; note = 2'-O-methyladenosine-3'-phosphate
  modified_base 18: mod_base = OTHER; note = 2'-O-methyladenosine-3'-phosphate
  modified_base 19: mod_base = OTHER; note = 2'-O-methylguanosine-3'-phosphate
  modified_base 20: mod_base = OTHER; note = 2'-O-methyluridine-3'-phosphate
  modified_base 21: mod_base = OTHER; note 2'-O-methylcytidine-3'-phosphate-N-[tris(GalNAc-alkyl)-amid odecanoyl)]-4-hydroxyprolinol (Hyp-(GalNAc-alkyl)3)
taaatcagtacttccaaagtc

SEQ ID NO: 2915 - RNA, 23 nt, synthetic construct
  source 1..23: mol_type = other RNA
  modified_base 1: mod_base = OTHER; note = 2'-O-methylguanosine-3'- phosphorothioate
  modified_base 2: mod_base = OTHER; note = 2'-fluoroadenosine-3'-phosphorothioate
  modified_base 3: mod_base = OTHER; note = 2'-O-methylcytidine-3'-phosphate
  modified_base 4: mod_base = OTHER; note = 2'-O-methyluridine-3'-phosphate
  modified_base 5: mod_base = OTHER; note = 2'-O-methyluridine-3'-phosphate
  modified_base 6: mod_base = OTHER; note = 2'-fluorouridine-3'-phosphate
  modified_base 7: mod_base = OTHER; note = 2'-O-methylguanosine-3'-phosphate
  modified_base 8: mod_base = OTHER; note = 2'-fluoroguanosine-3'-phosphate
  modified_base 9: mod_base = OTHER; note = 2'-fluoroadenosine-3'-phosphate
  modified_base 10: mod_base = OTHER; note = 2'-O-methyladenosine-3'-phosphate
  modified_base 11: mod_base = OTHER; note = 2'-O-methylguanosine-3'-phosphate
  modified_base 12: mod_base = OTHER; note = 2'-O-methyluridine-3'-phosphate
  modified_base 13: mod_base = OTHER; note = 2'-O-methyladenosine-3'-phosphate
  modified_base 14: mod_base = OTHER; note = 2'-fluorocytidine-3'-phosphate
  modified_base 15: mod_base = OTHER; note = 2'-O-methyluridine-3'-phosphate
  modified_base 16: mod_base = OTHER; note = 2'-fluoroguanosine-3'-phosphate
  modified_base 17: mod_base = OTHER; note = 2'-O-methyladenosine-3'-phosphate
  modified_base 18: mod_base = OTHER; note = 2'-O-methyluridine-3'-phosphate
  modified_base 19: mod_base = OTHER; note = 2'-O-methyluridine-3'-phosphate
  modified_base 20: mod_base = OTHER; note = 2'-O-methyluridine-3'-phosphate
  modified_base 21: mod_base = OTHER; note = 2'-O-methyladenosine-3'- phosphorothioate
  modified_base 22: mod_base = OTHER; note = 2'-O-methylguanosine-3'- phosphorothioate
  modified_base 23: mod_base = OTHER; note = 2'-O-methylcytidine-3'-phosphate
gactttggaagtactgatttagc

(The sequence listing continues in the following parts.)
